United States Patent Application Publication US 2012/0017338 A1 - sequence listing, part 15

SEQ ID NO: 61274 - protein, 868 aa, Zea mays
  Coding DNA Sequence Number=SeqID_19495
  Gene Ontology: Mol. function=nucleic acid binding; Cellular component= nucleus; Biological process=regulation of transcription, DNA-dependent
  Homolog annotation: Hit_ID=Q6Z0U0; Match level="QueryCoverage=71%, HitCoverage=85%, E-value=0.0, Identity=56%"; Hit description =Putative SNF2 domain/helicase domain-containing protein
  Pfam annotation: Domain name=Helicase_C; Domain location=714-792; Score=63.3; E_value=7.7e-16; Accession=PF00271.21; Description =Helicase conserved C-terminal domain
  Pfam annotation: Domain name=SNF2_N; Domain location=359-642; Score= -84.3; E_value=0.0013; Accession=PF00176.13; Description=SNF2 family N-terminal domain
  Pfam module annotation: Pfam domain module=Helicase_C::SNF2_N; Domain location=714-792::359-642
MYPSGHALPDANRNHSLVFGGTSKDWDNIRQFIASLERASENSSAIASKTGGGKSTNHSVEPAEQKGKGDIIVLDSDDEDGDGNSPEHNKLASEMNKELGTSVLASNIAERMATNGSQTFETVHAYGGSKNTQIVPYGQGSALVNQFPLQTSWQPSIQFERVVLTKRPEEQRMQDLVAATIAEKRAETQMFLSLPTERKRRRTDHSLLMLDSFVPKQRRRKGDTGLAPADLSLDLHQTATSQEPDIAIEEEEKRKNDGDGLEDYWKDFALAVESTKLDDVDEAAANEKEDNGKMEDIDCNHDIRIHEDLGHASRRRMNGYGGNSKDADEIDCGTVKLSEDFIVADIAIHPRHAQAMKPHQVEGFNFLVKNLIGDKPGGCILAHAPRFRENIFAYKLHSELHGKDIPVYDFYSVKVEKRVEQLQILKSWEDKMGILFLGYKQFSTIVTDDGGSKVTAACRDRLLKVPNLLILDEGHTPRNKETDVLESLSRVETPRKVVLSGTLFQNHVEEVFNILNLVRPKFLRMESSRPIARRIMSQVEIFGRSSKGLADGAFTEAVEGTLLNDENFKRKVHVIRGLRELTRDVLHYYKGAILDELPGLVDFSVFLKLTPKQKDIVHKLEMHDRFKRSAVGSALYIHPCLSGLSEVNAENRAHTLRDDSVDSLMDSINVRDGVKANFFMNILSLANSAGEKVLAFSQYILPMTFFERLLVKKKGWHVGREIFMISGDTSQEDREAAVDRFNSSADAKVLFGSIRACGEGISIVGASRVVILDVHLNPSVTRQAIGRAFRPGQQKKVFVYRLVAADSDEVKVHETAFKKEVIQKLWFEWSEQCTTENFKLGQVDIDDSGDELLDTRAIRQDIKALYRR

SEQ ID NO: 61275 - protein, 339 aa, Zea mays
  Coding DNA Sequence Number=SeqID_19496
  Gene Ontology: Mol. function=protein serine/threonine kinase activity; Cellular component=membrane; Biological process=protein amino acid phosphorylation
  Homolog annotation: Hit_ID=Q6ZKI6; Match level="QueryCoverage=84%, HitCoverage=87%, E-value=2e-82, Identity=70%"; Hit description =Putative serine/threonine-specific protein kinase
  Pfam annotation: Domain name=Pkinase; Domain location=8-273; Score =27.9; E_value=3.2e-10; Accession=PF00069.15; Description=Protein kinase domain
  Pfam annotation: Domain name=Pkinase_Tyr; Domain location=8-273; Score=-37.5; E_value=3.6e-10; Accession=PF07714.7; Description =Protein tyrosine kinase
  Pfam module annotation: Pfam domain module=Pkinase::Pkinase_Tyr; Domain location=8-273::8-273
  Subcellular localization annotation: CTP_CleavageSite=61; ConfidenceScore=5.47e-01
MKGVSEGLIIGTTVGVVIGVLLALGTLLCLRRRRRSQTQIRSSSSRRASTVPIRTNGVNACAMLSNSTTGQESPTPRELEERGSSLWIQGPGEDSAPLKWDLRVSIALDVARGLEYLHDGAVPPVVHRDIKSPNILLDQAMHARVADFGLSREEMVTRGDGAANNIRGTYGYLDPEYVSTRSFTKKSDVYSYGVLLFELIAGRNPQQGLMEYAELAAINADDGRRTGWEEIADARLGGAFDADELNDVAAVAYRCVSRASRKRPAMRDVVQALARVARRGRGRGRKQQHHPPQASSAAAGDESAVDLEAEEGSEAGRSSFSGLLQREESVGSVSDLPDV

SEQ ID NO: 61276 - protein, 360 aa, Zea mays
  Coding DNA Sequence Number=SeqID_19497
  Homolog annotation: Hit_ID=Q6QP54; Match level="QueryCoverage=32%, HitCoverage=48%, E-value=1e-16, Identity=55%"; Hit description =Putative kinase
MEARAHGSCNRRAGCYVRATAPPLAPLSRLLDCGTSTATRGNPAYDPAVPARRDDGAPVFRSSNGSRTRNGRLTNHSPVALTPRRDKRRLRQEKRATLRLRHNDRVKKGNRPRASLLIRGSKAGPSEGFNSRLRALGFHAHYWSEVRRPAPRKGSTAASGHSGSAPTTDQGFVGWPSKAAKPGPRRHGKLRFARPHGSDSGSAPEDGELRSVRPQGSDSGSSPEDANSAPSDPRARARTQPRKTTNSAPPDPRARTRAQPRKTANSAPPDPRARTQPWPQPTVSASPDPGARTRPRPRKTDSTSTSEEPPHRPTQGTDRPRQQEAPSLPYPKLTHATGNKIGVPSGSLRQTSNDGAPHAL

SEQ ID NO: 61277 - protein, 884 aa, Zea mays
  Coding DNA Sequence Number=SeqID_19498
  Gene Ontology: Mol. function=ATP binding; Biological process=apoptosis
  Homolog annotation: Hit_ID=Q2R1P5; Match level="QueryCoverage=72%, HitCoverage=43%, E-value=1e-144, Identity=48%"; Hit description =Leucine Rich Repeat family protein, expressed
  Pfam annotation: Domain name=NB-ARC; Domain location=35-312; Score= -125.5; E_value=0.028; Accession=PF00931.13; Description=NB-ARC domain
MIQEAIHQLKEEKPADKKQETDVSGGQGSTAAAPRQENPDEKKAQPDTTGSSSAQQGSSQGAKASTVDEATKKTGELLVPIIKQTTEKMGDLQRKIKRQLDINGIVAKIRSHLTGQETMIILRVDYQHVDEWEKTRSALSLLPRVAVMMILTKTDRNLERARTEYCHPQGEPMDYTYLAAFYHHIALEITGLHQKSTSSDDDAAQQIRLLRAIFDKCEPYFMCMKIFAQTLYARPRRSKQELQKLYSTLEGLQQRSYRSIAMKMLKFSYRDVKKEYQSSLLYLAIFPPGHRIRRSTLIARWVVERMVTTEDWRWSSAVSIAEQCFDALVIRGLVHPTEISATGRVKSCMVGDVTYDFITKMAKKRRILEPRLSHHLACHFSVFSDLHLSVSDNISNFLNRLSESSQWPRLKVLDLEGCRGFRENRHYLPNICNKIVLLKYLSLRRTDVDKLPHEINNLRELEVLDIQQTEVPASCTMDLLLLKLKRLLAGNRNPSPRTHGHVLVPGKIDKMSDMEVLSNVRVKSDKDLEGIGRLWQLRKLGVVINVKDKDTLLKAVTNLHECLRSLSITLDATTSHKGTFSTIRGRRELEGSSTGRDEKKIMKEHPKVLESLSISGDVHITPKRILPSELTDKSTPLIKLTLSNTLLTQDDLVALANLHMLRCLKLRHNTYPGNKLAFKQVRFQKLEYLLVEGSNWIEISFEEDTAAPELVKVVLCFEIIESIAGVDRLKKLEELELNKCNKDSDKTDPATAAGVTNAPVPSTATAPYPAPSAPTAASAVATDHVPSSTPTIRNPAPSRTTTTASAANPTQTTTSTNQVLLPELLSSAKQVSKVTLHGTMLKQGDLRALARMENIRCLVLSHGSYDGKPTRRQQDEFPRLNVLL

SEQ ID NO: 61278 - protein, 516 aa, Zea mays
  Coding DNA Sequence Number=SeqID_19499
  Gene Ontology: Mol. function=ATP binding; Biological process=apoptosis
  Homolog annotation: Hit_ID=Q2R1P5; Match level="QueryCoverage=57%, HitCoverage=19%, E-value=5e-58, Identity=45%"; Hit description =Leucine Rich Repeat family protein, expressed
MAELASGAVTSLLGVIRSEWRLLGRVGGDVHFIREEMESMNSFLMHLARTTPPGGEHDEQVQTWMNQVRVLANDCNNCIDLYLYRGNPDIHLGRDRLRRYLRWVPWFLQKTVAQHRAALELSVLKERARDVGKRRLRYGVEVPKKAAVAPASPGAAAGAQGGNEAAAAALFHADDVEDGGGHDQAWERATAASSRIRRALFGIYVREDYLSDLLAEWIQQVRAQPQWSAPDDQGRHDTRCGAFLVPKEESVAIARQASAVAEKHVKNTILLDIPSLHRWRALGPKNVLYYILREIELKQQKTQADAKSQGWRPIREEKRRRIEEIKNEIEKLKAMDKIQEIKNLIENVKDNNQKLQPYLSKPKRKEDHITKEKIRNKNHALPELLVLLLMSSAAADKTDEKIQWKALEDHYDVILQNAAKSLKEHMDQVNKGAAKGQGIIHNVAQYARILQDVFPSVSSSSNNNSTRQPQDAQEQEATAEATTGKIQIIIDKVKQDILSEVFEAVGGAKGPGSHQD

SEQ ID NO: 61279 - protein, 204 aa, Zea mays
  Coding DNA Sequence Number=SeqID_19500
MEQHIGNTDLGVVIQRASTQPNWNRTPNVDDESLVCLIASASIQDLSLLLRVGEQQTTKVACALLQTWRRVPEPAAGRAVLASRNDQTSYATSDWERDLDLVRDDGVGEGMTARKGRNPCRRARITNGGAVTLSFLRCPPADQSLGGDIRRRSSVDTNARRKGLGREWFGEAGGHGAGRAPCSQLGQQGGANGAGLAVWERRRG

SEQ ID NO: 61280 - protein, 69 aa, Zea mays
  Coding DNA Sequence Number=SeqID_19501
  Subcellular localization annotation: CTP_CleavageSite=53; ConfidenceScore=5.00e-01
MESIAPMWSQKRSNACKSQERHVMLGLQLLPSTRRPTRLHSVAQAERLTTEVLAADGRGRVVLTGSGAE

SEQ ID NO: 61281 - protein, 959 aa, Zea mays
  Coding DNA Sequence Number=SeqID_19502
  Gene Ontology: Mol. function=microtubule motor activity; Cellular component=nuclear chromosome, telomeric region; Biological process =microtubule-based movement
  Homolog annotation: Hit_ID=Q1S4T2; Match level="QueryCoverage=96%, HitCoverage=98%, E-value=0.0, Identity=40%"; Hit description =Calponin-like actin-binding; Kinesin, motor region
  Pfam annotation: Domain name=CH; Domain location=23-140; Score=20.4; E_value=0.00095; Accession=PF00307.21; Description=Calponin homology (CH) domain
  Pfam annotation: Domain name=Kinesin; Domain location=317-634; Score =407.3; E_value=2.2e-119; Accession=PF00225.13; Description=Kinesin motor domain
  Pfam module annotation: Pfam domain module=CH::Kinesin; Domain location=23-140::317-634
MARPAAGAHDVGMALRKAEEAAARRCEAARWLRQMEPAAAESLPERPSEEDFCAALRNGLVLCKVLNRVNPGAVPKVVENPVITVQTFDGPAQSAIQYFENMRNFLVAVSAMNLLTFETSDIEKIKLMAYLTGHYIAYREGYHEWKISGGIGIWRYGGIVKIASSSKRPASHLNRGGGSDQQMLEFVHLLSEVSLEESRVEEAQHSLFQRFVLQVVRAFLLEWGEAEDLPLDDMVIETVLEQACKEFTILLASHRNQVRSLLRKMMKDDNGTLSKMDLIETITKCLKENGECMSSSLRLPRGSHGHLDDVGLLENQQEGLEKLKMSFNEMKLQVESTRAEWEEDLRRLESYFEAQNHNAYQKLLEENRKLYNQVQDLKAEVFADTQPLIRSVMDGYNVCIFAYGQTGSGKTYTMSGPDVTAEETWGVNYRSLNDLFEISQTRADSITYDVKVQMIEIYNEQIRNNSHVNGLNIPDANIVPVKCAQDVLDLMKVGQRNRAVGSTALNERSSRSHSVLTVHVQGKEVISGSTLRGCLHLVDLAGSERVDKSEATGERLTEAKHINKSLSALGDVISALAQKSSHVPYRNSKLTQVLQDALGGQAKTLMFVHVNPETDSFSETMSTLKFAERVATIELGAARANKEAGQVKDLKEEIAKLKLALDEKENEVAQFKDLANRVTSEMRNARTRSPLTASMSLKPEVSQESSVDTCTSEIRSSSSGKQRRFRSPLSVRELDDKSPVISRELYLSARKYKTPSPPVRSSLSVERGSFAKIVENTGSIDCTPISKVEVPPKVWSSNSKTTPSSVLTAQSLRKFRDSEENRTKIPPAVRQSMAKNRSESTPKTHNEEKPANRHHSGTKARSEARNTRDSSEIENEFAGDEPTFHFNRTAKKLPTKVMSRQSQNIDVSVRASVRGEMEPLTEGRQRRNWSKPPHAERTNMPLPDIRRSVSLPRGKNPLV

SEQ ID NO: 61282 - protein, 673 aa, Zea mays
  Coding DNA Sequence Number=SeqID_19503
  Homolog annotation: Hit_ID=Q9LG26; Match level="QueryCoverage=7%, HitCoverage=6%, E-value=2e-07, Identity=66%"; Hit description =Poly(A)-specific ribonuclease PARN
MAEALERSCGDACGRPHPWGGPGDERRHERAPWRDAFELDRADVRCLKLRDPAERFAALQLGLGGCPFRWGTLARNNQHCLPKAAPDAWLVLKDTLCAVQTMKIDDERPYQTHIFHDLASNGSPKLDCEAERQSNHKVEADKMVEQTNQSEVSFVKAEHLNGGKIRKTRIEDYSYDKDVVEIKLPDTDLSSDYGVHFVKDVCIDEGVLPDQKISSEKQVDQKVSINFDSSEYTNGDLREDISADSTKTAHELKTEIVVLPVLCDTHNNNTVEQNSSCKKQDLEDNNTTDVSTDSHDEGLNPKQLPFHEVAQDYQEVDSVIPESNENQDRLFTGDATHQVSSNDCYEAGIGIASEASNIIHNDLPEESAAADFPVVIPEEVAVTAALGMEVSNQVNHYNPFIAYGSLDETWEPNLSLPTTVDAASIAPICPVEKTDSFSDLVNRPLEGFDPIELDEAIIEENRSDSVEESSSTLDVQASEQRDDQRESLTNNDVKTDAAHETGTAISLSTSNGEHSGVKGEKCQKHETDGRDTDDFNPRDVEPGTKVSEDTTDVKSSAHVQTESVVQQNGPDSAKVTTAQTVIRNPFESSFSGPSITSGPLTPSGHIPYSGNISLRSESSTTSTRSFAFPVLQNEWNSSPVKMAKADRRRQKEDRGWGYRILCFWAKQDVQLEG

SEQ ID NO: 61283 - protein, 148 aa, Zea mays
  Coding DNA Sequence Number=SeqID_19504
MNLVVVTLLIVSLLTVHLPAVACARQVAVLNPYKNELDNRGNKNLGAALAATASTDDDDGLAASGKVFPGRKLGAPNKEGTKATVGATTTTSAAGSRPRTVKMRAAARHGGDEATEMYDMLRRDYTSKANRRRPINNGATPLQVNKKP

SEQ ID NO: 61284 - protein, 102 aa, Zea mays
  Coding DNA Sequence Number=SeqID_19505
MDGPHGLAERVLPCAQDQAEPSCTLCASELYGEDGSGKSDPRASDRKRRRAPFGNGRLALGPFDGAVSSYRLRPAAAPHPSDDLGRKTSDKWARQHSITARE

SEQ ID NO: 61285 - protein, 1205 aa, Zea mays
  Coding DNA Sequence Number=SeqID_19506
  Gene Ontology: Mol. function=translation initiation factor activity
  Homolog annotation: Hit_ID=Q5SN81; Match level="QueryCoverage=98%, HitCoverage=98%, E-value=0.0, Identity=54%"; Hit description =Eukaryotic translation initiation factor 3 subunit 10-like
  Pfam annotation: Domain name=DUF1777; Domain location=176-299; Score=- 77.6; E_value=0.006; Accession=PF08648.2; Description=Protein of unknown function (DUF1777)
MPRSSRHRSHRSHRRGGSADRSESDGEESAPVAGAREEAAAARVSRDPEPERRRSSSGQEAVRSGNGYAEHGKKRKERVEEAVVDVVSDRWNSGVCDDHLVDKRSKSETFGHAEVEKLADRSRGSGDESKRSSRRAVAVDDRAEEVLSKSDSGKRRSEKQKDVGRKESTGHYKDNRDRENERERGEEWERQKERDRGRSRDREREKERAREKEREREREREKDRDRERDREHERERDRQKEREWDKKDHDSKHERYEDGGSRKSGLKMSRTEQEAYSYRRDTDVNEISAKEKYNNPDMQAEKHSRRKDDSEDTDKWSTDNRDSDDRKTLSRYEHGKSRSSKEQRFDDDKYKEKYKDDYVRDKRQHDDKFSNERVARSHESDRAEYKSAKDGRRSSESHYRKDAVQDVDHYEDYNNRYKESRGKKRPPEENDDQYDLKPPSTRDQRVHLEKSSGSGRLDSLTERARPDRSSSPSKIHSRSSPSPSSYHDKDQSRHGSKVVDHGKREIPYDERNNRPRASSGRERTPASRLRDRDAENWSSERLKQKDDYQPRDVTLEISTSHYDRTPSKDKHTSPKQLSEKSPSSGDHRFSGRLSGGRSLDNKGERKSLTKYRDRDGDIAQERSHHQDRMPAKVPFREPTPSNSSISRGGHFLGSSPNNPLPPARNGDPSFQGPHDDDRRPQNGDRRFHGHQKRNDMNSVRGHGHGWNSQPNWPSPVSNGFVPIQHGGAPGFHPPVHQFPGPPMFNLRPQMKLNQPGVSYPMHDAVDRFSTHMRPFGWPNHLDESCPPHMQVWNGGSGVFPGEPYIYGRQEWDQNRPHAGSRGWELTGDVSKGPNDVPDAELLVAKKDPDSAITAVSDSGGQHNLQPEADQKEIGRLTAENFEAKNHTKSSKSLEAPQGAQLVTSMLSKNSVVFCKNYLSRISVSHDLVEPELYKRCISLLGDLDVTKTSHLVRNEIQRALALHKNQTQKGLTTASASVKMEEKMAVPEDDHDMELLEPVVSNPAPQRHTDVMEEGSVSKHELGDGIGRTIAATIGSGVLDAPPEISLPQPEVVVATTVITQPNKHMEDVLPPAIEDGALQATLEHAVGIPEVTPADVLLDVAPSAVGESGDDMEIIPSAMAEPQLGKEPAPVASPDSQEKPFMLDSETGMEVEVKVIDDNPGDGRVSSILGTKLDFAAIDGDSEALLVESRVNLSRIPNSPESTH

SEQ ID NO: 61286 - protein, 322 aa, Zea mays
  Coding DNA Sequence Number=SeqID_19507
  Subcellular localization annotation: CTP_CleavageSite=83; ConfidenceScore=5.34e-01
MAARPWRAPGSPACGRGAPSPDVPAQPPAALGARLHARAPDRGAAPSSAMAARPRPPGAALPRRPALPRPWRGPSSLPALACPAPARRDRDMPARRDLELGPTCLWHAALSSASTRPRAVGLGMASLSLAARNAARAQLGPGVAMRLRVLGFDSGNGSNKKTSPGTEGQDDYLFNIRLLKQRSTSSQAPLSRFRPDFYLHGSTPSSRFNALNSGEDSPDWPRRKPAASPPGTIILLLPCECGNRESGKPNDRREVGTAVGLGRHVGRTGWPDGVPGGLGLGCDRAHPDPPMGPPLSVGMREDSETTSNSHNEHFTSCNLQSK

SEQ ID NO: 61287 - protein, 71 aa, Zea mays
  Coding DNA Sequence Number=SeqID_19508
MEMNSFNKMMGDDPIFQRGWGRAQTQHGRRYNGRQWDHRKEHMFSLRAAIPAYTAILEDGRLVILLRCLDN

SEQ ID NO: 61288 - protein, 221 aa, Zea mays
  Coding DNA Sequence Number=SeqID_19509
MAHRTVPVHTGQSGCPLPTSSLPLDSTVEASDLWARLGVRCTPDSYCTLSGVPVWARLTSARAERALNARQRAVGAEKTVAPESHRTVRCTPDSPVNYSGLAVGVSRSWRVPEADLPWRTGHCPGSDSGSAPEDDELRLARPRARTRAQPRKTANSASPDPGLGLGLSPGRRRTPPRPTQGSDSTSTSEDRLDLDLGGASASPYPGLGPTTSQEGPSLPYP

SEQ ID NO: 61289 - protein, 94 aa, Zea mays
  Coding DNA Sequence Number=SeqID_19510
MAGAGRWALPTGTGGLGPRLALGAWAWPSGTWWSAHSALEQSGEGDWASDDSWWPGGVTVMAHLAFADLAIIPSLSSRARLDGTTSLQNRLGSI

SEQ ID NO: 61290 - protein, 75 aa, Zea mays
  Coding DNA Sequence Number=SeqID_19511
MDDDDLRVIELKNCADLSTTLFHITRCPPAATSVIRHCIRELVLQFAGTFYILRFFGERGMDSNPAAKMHKNYAV

SEQ ID NO: 61291 - protein, 84 aa, Zea mays
  Coding DNA Sequence Number=SeqID_19512
  Gene Ontology: Mol. function=homocysteine S-methyltransferase activity; Biological process=methionine biosynthetic process
  Homolog annotation: Hit_ID=Q9FUM9; Match level="QueryCoverage=62%, HitCoverage=15%, E-value=9e-20, Identity=84%"; Hit description =Homocysteine S-methyltransferase 2
MHSFYSHVVRLQGLRERFSHCNSNMGASQESTGVSDGDFVSYVNEWCIDGATLIGSCYRTTPNTIRAIHRTLNQGSNEQQLPLA

SEQ ID NO: 61292 - protein, 117 aa, Zea mays
  Coding DNA Sequence Number=SeqID_19513
MAGARPPCSASLPRKEDGIARRDAVGACGAQRLGARPQRRLPRHKENEEGCARLLTSRHSLTERARGCLLVKLRHAVLNDGLADDNLRRKGKRDPRPDVEARKALVRLISGAQSATT

SEQ ID NO: 61293 - protein, 135 aa, Zea mays
  Coding DNA Sequence Number=SeqID_19514
MSSDGGVERGRATCVGRSRIANKTGGMGSSRAAPWRREGRASAARREHAQKCRTTHGRSSRAARPRLHGQQRLCLVEVSVRRQQRLCLLPRYGLLATSKSSAPTASNNFALSRCSRRRSMLVRLAVIVRAAPLQL

SEQ ID NO: 61294 - protein, 50 aa, Zea mays
  Coding DNA Sequence Number=SeqID_19515
MGTLPGGFFAECPGWHSTKIDSLPSAAGQTLGKDIFNLAIAVCGVVTYYI

SEQ ID NO: 61295 - protein, 193 aa, Zea mays
  Coding DNA Sequence Number=SeqID_19516
  Homolog annotation: Hit_ID=Q1S808; Match level="QueryCoverage=76%, HitCoverage=30%, E-value=2e-30, Identity=41%"; Hit description=Plus-3
MALSRRNEAAAARIRAKLKNLQSRPQLMSKVNKAANLETMNWKKRLDNFKNASKLKPVNISLKAGESGYDPFSRMWTRSRNYYASKPGGDNVEETTNKSSSIVEPSNEDIKSKAQTEFGGAEGLFNGYMARRQKIEATTGYKGSDNDGKRHALTLSVSDYKRRRVSSEGYLLLCWVLNRFNYVPGFQHLCALL

SEQ ID NO: 61296 - protein, 165 aa, Zea mays
  Coding DNA Sequence Number=SeqID_19517
MPVPLPRTGDRSSAREPDAAAHRQLAKPPASAHAARPSGWSRALPGGRAGDRCCTATARRWRFGAGAFRCSAAPPFTTKAPASSQSRQPTVTPKSLALARSLEMVIGNAAHEESKVTGKNKKVSASHHIAYPDLGTREEDFWRFAPGLLGLSHDSRDHQGTSLAA

SEQ ID NO: 61297 - protein, 114 aa, Zea mays
  Coding DNA Sequence Number=SeqID_19518
  Homolog annotation: Hit_ID=Q6QP51; Match level="QueryCoverage=46%, HitCoverage=37%, E-value=8e-08, Identity=48%"; Hit description =Putative growth-regulating factor 1
MSGLQATPRPYVHAAAGDSSGPCLDPSHRHQDVTLGRNRELRLARPQASTSASASEEGLRLARPQASASGEVTASPDLGLGPTMPQGAKKRQQDPGPHRQLRFYRAQTLLRLPR

SEQ ID NO: 61298 - protein, 75 aa, Zea mays
  Coding DNA Sequence Number=SeqID_19519
  Gene Ontology: Mol. function=oxidoreductase activity; Biological process=metabolic process
MATPRHLASGILNKLNAGWKVRYCLNISEDEYRKTIKVNVIRPWFLMKIIGAERGLYPGATTYGNSLGATKPVYT

SEQ ID NO: 61299 - protein, 753 aa, Zea mays
  Coding DNA Sequence Number=SeqID_19520
  Gene Ontology: Mol. function=potassium ion transporter activity; Cellular component=integral to membrane; Biological process =potassium ion transport
  Homolog annotation: Hit_ID=Q652J4; Match level="QueryCoverage=98%, HitCoverage=98%, E-value=0.0, Identity=72%"; Hit description =Probable potassium transporter 13
  Pfam annotation: Domain name=K_trans; Domain location=23-753; Score =1251.8; E_value=0; Accession=PF02705.7; Description=K+ potassium transporter
MKPSILKPKAMFFWKGLRKATLLLAYQSFGVVYGDLCISPVYVYKNTFSGKLRLHEEDEEILGVLSLVFWSLTLIPLLKYIILVLGADDDGEGGTFALYSLMCRRSRMGLLMNSINDGCLSVYSQEEEPREEELKSSLAIKSFIERHYSLRVLLLLFVLMGTSMVIGDGVFTPTMSVLSAVSGLRIKFPELHENYTVLLACFILVVLFALQHYGTHRVGFLFAPILLAWLGCIGGIGIYNIFRWNPSVVRALSPYYIYNFFRKAGKDGWSSLGGIVLCITGAEAMFADLGHFSKLSLRLGFTIVVYPCLVLAYMGEAAYLSKHREDLQSSFYKALPDRVFWPVLIIATLATVVGSQAIISATFSIISQSRALGCFPRIKIVHTSSHVHGQIYIPEVNWALMFLCLAVTVGFRDTEMIGNAYGLAVILVMFATTCLMFLVITVVWSRSVALAALFTAGFGSVELTYLSACLAKVPHGGWLPLLLSLGTLLAMSTWHYGTKRKREHEAQSKVRLDRFLGLSAGMGLVRVPGVGFVYAASAAAGGVPPVFAHFVTNFPAFHRVLVFVSLQTLAVPRVPPGERFLVGRVGAPAHRMFRCVVRYGYKEGRRDHFNFENQLLMKVVEFLQLQDAAAAAKAGGCVSGSGELSVIPAHVDAGSAPPSCSEIDAGRRVRFEEPSGAAAGSEEEVKTLLEELESGVSYMIGHTCVQAHESSPAVKKFAINVVYGFLRRNSRRPAVELGIPNTSLIEVGMTYKI

SEQ ID NO: 61300 - protein, 88 aa, Zea mays
  Coding DNA Sequence Number=SeqID_19521
MTGDKQKPSSKISNTYIDKGAQHFRAWAIALLDHPRSSPPCPAPVCSGVWPGKTETVLAEPGCQRAGSSRHGSWRQVVGSSNPPIAVV

SEQ ID NO: 61301 - protein, 110 aa, Zea mays
  Coding DNA Sequence Number=SeqID_19522
  Subcellular localization annotation: CTP_CleavageSite=22; ConfidenceScore=5.11e-01
FVVADQADAGPGALLLDCLSPRSQSGFFFSPHSAGHSHSSQLRQLRGLPATATDLVPIQWHPGGGERACWHAHYAVVDLALDTLAAARSFGVEELLLLTQVILFFLLSTG

SEQ ID NO: 61302 - protein, 58 aa, Zea mays
  Coding DNA Sequence Number=SeqID_19523
MAPSGSKSYQRPTYHSKRYVLLVLTETWEIHSSLQRNPLDTTMVHVAKIGKHDKIKWG

SEQ ID NO: 61303 - protein, 1082 aa, Zea mays
  Coding DNA Sequence Number=SeqID_19524
  Homolog annotation: Hit_ID=Q2QM08; Match level="QueryCoverage=33%, HitCoverage=76%, E-value=1e-71, Identity=63%"; Hit description =Expressed protein
MEAAKPGFKKVEKCSENALRSVSELHVGDEKQTGSNKFDMEKVLKGFGARDAFVASGLNGPNGQVGGTVSKPSDICPSKITVPGEKAPLDFTLKTSLQFVSSSSVKWWGVCFSMPLCSTEVEQATEDDLIELSEIERRNVGQALHLDALSDVDNTTQSLLSFTGNENVHGLYDVLLNYKSLLNSLSAVDVPVLYSPQPFQNGCLHIPEVKCREMRRADMSSGGFDTEQGSAFASTAGNVCYSMEVKDAVLPPWVVSGLCAAMSLDATSFDLTYVRATTPPPDTDSSSALSFCRGFSRRIATEPSSMGLNVALDSMGTTTTDVQPEGSTPSSCSAPTTPLVGAVPDAALVPALHSASLRRLTYTDGGGVEALPLCYAAAATRSEKASSFSLAPSPHIRSSHPSTFRVCARPPMSACGGTIPASRFLRRRAAVRDLGGDAAAGDTDAFWAAPPRLYDFSQQQQQQHTAQAARRSPSPAPTSPCLLARKRHQQSPSPPPSPRRSPSSPGTCLLSALHRTCVGWGVTRRAEYPRRHRPVSPAACGQVTGMHTHGRAAARCVDEDEESTSKNSKCLLAVGKNELEEEVGQDHESCLHRRRRAKKAPWAVKEEQETSGEAAEEGAKRAKRTPLKHEAAAAAESKPAGAATATATPDSGSPRGNGKVDRWAAWRYAAGEAALANILRERGATAGNPTPRAVLRAQARRFISDTGLLDNLLRHVADKVPAGTADRVRRRYNPAGGMEYWIEPAGLAAARREAGVEDTYWVPPPGWKPGDPVSPEARTLEVQKQVEVLAGELAVGYDCMVKANGKLEKEVLSLEEKYETAAQVNGELKELLLLLKDKYDTVLEKNEKLEGQMVALSTSFQSMKEELLLQRMEEHPLLMLAQEPWEGDKREAGGANKALVVCAGDQLAGADAFDGSFSSNHSAYGDEKMVLRKRICVREGACQWPRSATSSGATAGSPGDLPEPLTPGADLIVTDFDTMIDSLALPSMEEYLQVDGLPTPTSASSTTASPKLQLLPSPASPSQVQPLPSTTMVVGDFNMQLRHMDTSSSSSSGPCGAKALKLDAGAGGGEVGTELVLATPTY

SEQ ID NO: 61304 - protein, 232 aa, Zea mays
  Coding DNA Sequence Number=SeqID_19525
MPRALDLNPLYITQSRLRQISGETKNVRGIEEMKAHLPRSAMPDESTNSPTRRRRGGRGLSRRNGACEPGVKLGFGGRLLQWKEEEGDGAEGGGGDAEGGGGGSGPAVAMRVGADSDGWRSKRWAGATRPTRHGTALTDLAAARRATEATRSSHPCSPSLRPSTFLKLPGAGATGRIRWREGREGTAELGRKWNCGRRDLKRQRRACSRRHGADRVLVWFGLLGPGPQDEDN

SEQ ID NO: 61305 - protein, 378 aa, Zea mays
  Coding DNA Sequence Number=SeqID_19526
  Gene Ontology: Mol. function=amino acid transporter activity; Cellular component=membrane; Biological process=amino acid transport
  Homolog annotation: Hit_ID=Q2QLZ1; Match level="QueryCoverage=99%, HitCoverage=70%, E-value=1e-168, Identity=73%"; Hit description =Amino acid permease family protein, putative, expressed
  Pfam annotation: Domain name=AA_permease; Domain location=1-304; Score=-128.7; E_value=0.026; Accession=PF00324.11; Description=Amino acid permease
SSFVQGVVTVLNCFVMLFVIIAGSYIGFQTGWVGYKVAGGFFPYGANGMLAGSATVFFAYIGFDSVASTAEEVKNPQRDLPLGIGTALSICCSLYMLVSVVIVGLVPYFAMDPDTPISSAFAKHGMHWAMYLVTTGAVLALCSTLMGSILPQPRILMAMARDGLLPSFFSDVHKTTQVPVKSTVVTGICAAALAFFMDVSQLAGMVSVGTLLAFTIVAVSILILRYVPPDEVPLPSSLQASFRLSQENDEEKLRGTLGDDDHEQGSAEISDVVVEPITDPLIEKQLYASNLSEAKRRKTAACSITSVCIGVLILTTSASATFLPFGGTWMRVGVWLVMGVFVYIFYGRTHSSLTDVVYVPVAEANEIYGSSSSLGFVA

SEQ ID NO: 61306 - protein, 103 aa, Zea mays
  Coding DNA Sequence Number=SeqID_19527
MAGAPDSVRWRTGLSGHHHHQGCTVNQVDDKWEKFLYQRVLSAWELTKVPPEAKSSGGVLAFGRGVSRGKQISQTHSFTSATDGKKRFYMKTIWKIIAWFNAL

SEQ ID NO: 61307 - protein, 199 aa, Zea mays
  Coding DNA Sequence Number=SeqID_19528
  Gene Ontology: Mol. function=receptor activity; Cellular component =integral to membrane
  Homolog annotation: Hit_ID=Q8H399; Match level="QueryCoverage=61%, HitCoverage=26%, E-value=3e-21, Identity=43%"; Hit description =Putative membrane protein PTM1
  Pfam annotation: Domain name=Lung_7-TM_R; Domain location=1-136; Score=-97.1; E_value=0.00015; Accession=PF06814.3; Description=Lung seven transmembrane receptor
MEAATRYFDLAEFNESRVCPHGATFAVATSGALRVAAACVLVVAMGHRVVRPTLAGLKSARVVGLGVAFFATMEALEIFSSLSKTLNKLKAKRMTTKLEMYRKLKNALIIAVAVSLGWITFELWRAPRAPASSTGSGDGVVNSGDGGGGSNGEELEREAGSLGGVPGASGGALAAREVGKRKRGGVGVAGVRGGFLAAH

SEQ ID NO: 61308 - protein, 96 aa, Zea mays
  Coding DNA Sequence Number=SeqID_19529
MKLTGRIGPTGHYEFLTRRHGFQLRRRGAAVRCAPTSPPRLPCVCAAEGIPTPPCPAQLQGWSVVNVRRMALSVDQRMDDRDRVLNTYLAQGLVRR

SEQ ID NO: 61309 - protein, 265 aa, Zea mays
  Coding DNA Sequence Number=SeqID_19530
MWQYTGDGDSDRHSAENLTKEELRARILAITAGVTSDFLDESGPLPFNQSRLSDLRKAEKKRARLARAEPRRSITPSTDTEDLTSTDAEASSNVQPQRVGDAAEAASPAALEDRRGRGPEAAGSSSSPTTTTVRDGLGEMGSPPPVAAATVERREEAEPTAVPPPAPSAPLVAMPRVRRAVVARTRSSRYVVVVFPSHYHLSRALTSFNSIQRVCAGQDGEKRGPCGERGHLDHSAFLGGRWRDRLGFLSPQGNAGRVRCRHGRP

SEQ ID NO: 61310 - protein, 493 aa, Zea mays
  Coding DNA Sequence Number=SeqID_19531
MFDDMSFTEVVWDDEGALFDEMHCTDVIWDEETHHGFDSHGLLQHHAEAMDNQMQGKEKLAQSGDYYDERKVNIEPDINNLLIHVNDHFSMLVIGADSRRSDVVWDEDMLSDLDTHGGLLQLLACCKDDELNQDRDTPFLLGLGMDQVDEMLASPSSLGMNEDLPSVPETHGSLLQQVAWDRKHFAYEMCTLIAEMVLEDVLTDVGNLAFSIDSSMQISDQPSKYALVIDAYLLKTQYKKPYISISQWDPGIWCKGTMAHEQQQLEIYRMFEKQWDSVILKWFRNPFVLLQSCNGEDLNEQGTVPVNDIFDVLAAGQELNFGNVTLIIYGGCQGAMGLQVLFAELHPWHHNVFTSIELAIQSWRINGFSPGSCKLNRQSILVATNLQFNYKASKFVSFTDTYQIYKNTCICIGELEPASWRDTCWLPEISHANVSTLASEEIDNMLFQVGDFHPGESEQLELYMITLIQWDLGPVEFYKSNCRCPAAELIGWC

SEQ ID NO: 61311 - protein, 290 aa, Zea mays
  Coding DNA Sequence Number=SeqID_19532
  Homolog annotation: Hit_ID=Q1SKW8; Match level="QueryCoverage=39%, HitCoverage=20%, E-value=4e-26, Identity=49%"; Hit description =Membrane attack complex component/perforin/complement C9
  Pfam annotation: Domain name=MACPF; Domain location=28-193; Score= -42.2; E_value=0.025; Accession=PF01823.10; Description=MACPerforin domain
MAEEVNQSLSLAGSKIPSGAFNAEPLCFDALLVNLYSVEAVRASLALRDHVKQDLPPFWDPTALAEFIDRYGTHVIVGVKMGGKDVVCVKQLKGSSLMQSDVQARLKKLADDRFSEDSTASSTSTAEDADVVPFITNVLMAMYTQCSNVDFGLIANPGETKVKREATKKSQKELEKFGSKEPNLGWSGSAGQSAAESDPKSPGRGGPGLAAAIARWPLREQHRHRMPLGKGANWWPDEAGRGPQESLANHDMQILVFCDDSGAPADRAVLELPNEDSNGSKAPWGYKRDP

SEQ ID NO: 61312 - protein, 170 aa, Zea mays
  Coding DNA Sequence Number=SeqID_19533
MQNLMAGNKEEGPAANPIRTYLRKEKRNQPPVGRKGGVEDTCGGPDRGRGRHGVGCWERIGEEGRAWRRWASCPVVPRGNGFGNGELPHRERLLRREDGGVVVDGPAPSLRRRDVGLDDVGPPPRGGCDSGGGAVERPAEGGEEREVWLTSTREARRGRVERRKVGGGEG

SEQ ID NO: 61313 - protein, 53 aa, Zea mays
  Coding DNA Sequence Number=SeqID_19534
  Gene Ontology: Mol. function=zinc ion binding
  Homolog annotation: Hit_ID=Q2QWV7; Match level="QueryCoverage=77%, HitCoverage=11%, E-value=1e-10, Identity=76%"; Hit description=TRAF -type zinc finger family protein
MELPVADPGTERGEGPLNQSPYCDSEAMHKLAQILLPGLAAMPMRWLRYSGSE

SEQ ID NO: 61314 - protein, 118 aa, Zea mays
  Coding DNA Sequence Number=SeqID_19535
  Subcellular localization annotation: CTP_CleavageSite=47; ConfidenceScore=5.45e-01
MVLSNPPPRTRHRAASTSAMICAAHPSSYSARPASWSSDSAAAERFRATAPAEFQSTAVDLLHTSADKRCRSTAAERLRAYSPTEIHSTAAELLHAAAAKRVRAYRSRGRLRPSSSTQ

SEQ ID NO: 61315 - protein, 442 aa, Zea mays
  Coding DNA Sequence Number=SeqID_19536
  Pfam annotation: Domain name=DUF755; Domain location=56-160; Score= -43.9; E_value=0.1; Accession=PF05501.2; Description=Domain of unknown function (DUF755)
MEATKPHAKPEKLTKAERKEAKLNAIACDAIFGALSLDVFNRVGRGTKLTDADVARKIIQVLPNKIYASIITYLLNNEEFSTMTPTKVLGKITAFEMYHKIGQEPSSPKLCGLISHEEEKKRKGKSKKIESSSSSSEEEDDEKDGDEDDQKQSSSSSDDEEMKMLIKRLERTMKKLNSKGIPITIEDVQFNNQNGENFVGDQEYFDSQQDQQEFSDQGKVLKGFIVDPVDLPWKWVKRLAASDKGVNHDSWGKCQVIRSPFAPVLLPTVPGPLLEHLEWNLRSSSSDDEEPMMVEEAEDVEEMAAPTPTPTPPIAAPAPAPAPAPAAPPSPDHSSATSPAPVVNEIRWTCKNYFTQAPDTAYFHSLLAWMMDEYYHDMFVSIKYYCAEHTHPTEATYWKAHVIVTAWNVITNAQKVETTHRHRAHRADVLDSMEDVAQEAYH

SEQ ID NO: 61316 - protein, 107 aa, Zea mays
  Coding DNA Sequence Number=SeqID_19537
MDKGLSGEPAGQRLLPAPTVGRNQRRPRGGCVADANGQQVAPDMSGVHRTVRCARRGSAANGRLGPVWKEIDTVECPVVHHCAEGKQRPFNWKSNDSLAPWGYKRGP

SEQ ID NO: 61317 - protein, 112 aa, Zea mays
  Coding DNA Sequence Number=SeqID_19538
  Homolog annotation: Hit_ID=Q1HFN6; Match level="QueryCoverage=28%, HitCoverage=6%, E-value=2e-09, Identity=81%"; Hit description =Immature pollen 1
MKENQSVLIVQSCDASGPAKISFCVVFPFGLATGVDALEDGEDLQFDPEAYNYLRGFGIGWSCLSSQRTVPTSATEEEEVNLDRRVGRILEELEMVSIEEGRLRFESLMPLF

SEQ ID NO: 61318 - protein, 167 aa, Zea mays
  Coding DNA Sequence Number=SeqID_19539
MNPDTRLLMDEIIKRLIELDHRLKEQERKLGNRFAKVDRKFANLEDRQTTRVVALEKACESFDEWRTGIDGTIDDICLKVKKRPKHEERAVMDLATSSNPWSPRAHLPDSRSNGPASTTTTGRMDLVSLLITLYLPIKGAYSLPVPHLQIPFTLHSMLPPVIVMSTI

SEQ ID NO: 61319 - protein, 213 aa, Zea mays
  Coding DNA Sequence Number=SeqID_19540
MTPGVTTPISTEACLTLRMLFPLHGWFIVGDGSVLHASVDEEDVWEVGPQRHLLESGRCPCRWGSRSGHRSRPDDRGGIRGPHPFLPSNPSPHSGLLPCVRDAVQDSFSVSEAGEGSEVEDLPGIEDDRSVEGDGHGAVVKRRHTPYLARQLSVFGTDCALRGGPRSAFGRAAMSIVARWYVWMHVGTRGLYRFGPQECITPYVLCDVGYVIA

SEQ ID NO: 61320 - protein, 142 aa, Zea mays
  Coding DNA Sequence Number=SeqID_19541
  Homolog annotation: Hit_ID=Q5Z9X4; Match level="QueryCoverage=62%, HitCoverage=8%, E-value=7e-11, Identity=53%"; Hit description =Putative RNA helicase
MRHMKDVVMSSTLLYINDVTFDFVSWVIVPGGVWTRRGGRVTRVGDVGCFVCLDGGRKGLVHVSQMLGRRRAGATFTLGQVSFKVVLVDGAKLGLSMVDVDQDIGKGLQSMRRRHPVEEDALRANPPTNRSRLTGRRMAADR

SEQ ID NO: 61321 - protein, 129 aa, Zea mays
  Coding DNA Sequence Number=SeqID_19542
  Subcellular localization annotation: CTP_CleavageSite=32; ConfidenceScore=5.05e-01
MALRGGPVSSGVGHHVAALGPLGQRSGWPVMRVRAVPGGLAIEHRFREPSSSRHVVDPDPLYWGSRALITTTGLHPSSVGLLERVEPFPATMEKDKQNEVSGREILGPLWQGFSFWKNNFDSDFFVRGS

SEQ ID NO: 61322 - protein, 215 aa, Zea mays
  Coding DNA Sequence Number=SeqID_19543
  Gene Ontology: Mol. function=ATP-dependent helicase activity; Cellular component=nucleus
  Homolog annotation: Hit_ID=Q1S5T4; Match level="QueryCoverage=86%, HitCoverage=24%, E-value=7e-39, Identity=50%"; Hit description =Helicase, C-terminal
MCYLSPREVSYLHRVGRTARAGREGYAVTFVTDDDRCLLKAIAKKAGSQLKSRIVAEKPVAECARLIEQLEGQISIIIREERVEREARKAEMEIAKAENMIAHKDEIYSRPKRTWFATEREKKLLAAAAKESLDHGKSTSGVISAKKAEDLRLKEKRRREHEKNLPRKKRRRLEAQREMLEDEDDEKTKVQFFELFCYLRLPIPNYPYGFDASNY

SEQ ID NO: 61323 - protein, 163 aa, Zea mays
  Coding DNA Sequence Number=SeqID_19544
MAGEHQEDKEGECFVRFGHGGGLTPSSIIAKVRTCKKGKSFGIRISRREGDRWSELLARALSDLPGAPPLLSTHLWSPSYGQSPTTGFVGSPSSALAHLGDPRPPGTQARLVSGDLTIAGESDDAHSRSEPLDPLGAQSRPPPLSNGLDPRIPVRVGSLNQGP

SEQ ID NO: 61324 - protein, 197 aa, Zea mays
  Coding DNA Sequence Number=SeqID_19545
  Gene Ontology: Mol. function=ATP-dependent helicase activity
  Homolog annotation: Hit_ID=Q9ZRZ8; Match level="QueryCoverage=30%, HitCoverage=7%, E-value=5e-07, Identity=47%"; Hit description=DEAD -box ATP-dependent RNA helicase 28
  Subcellular localization annotation: CTP_CleavageSite=33; ConfidenceScore=5.12e-01
MAVGHDLKNRHGRWSHTQRRGVLSRDSLTLRVAATARSAARVASLLLGCGSHGFGRRGLHALSLGSKGAAAKRCGSLLTYVIVISGLYSALSLKNLLQENDRGKQPMKGQSLVDAAYRKAKSLKAASKRAPGARKGKKEKNERQHSEKAPNRHEEMRDLFQNDMSEWKQGRSSKKNNKFAPKKSRNSFKSKARYKRK

SEQ ID NO: 61325 - protein, 858 aa, Zea mays
  Coding DNA Sequence Number=SeqID_19546
  Gene Ontology: Mol. function=RNA-directed DNA polymerase activity; Cellular component=intracellular; Biological process=RNA-dependent DNA replication
  Homolog annotation: Hit_ID=UPI00005A975E; Match level="QueryCoverage =99%, HitCoverage=48%, E-value=0.0, Identity=86%"; Hit description =PREDICTED: similar to Retrovirus-related Pol polyprotein from transposon 297
  Pfam annotation: Domain name=RVT_1; Domain location=56-225; Score =135.7; E_value=1.3e-37; Accession=PF00078.17; Description=Reverse transcriptase (RNA-dependent
  Pfam annotation: Domain name=RnaseH; Domain location=455-582; Score =10.8; E_value=5.8e-06; Accession=PF00075.14; Description=RNase H
  Pfam module annotation: Pfam domain module=RVT_1::RnaseH; Domain location=56-225::455-582
MPGIPRDVAEHSLDIRAGARPVKQPLRRFDEEKRRAIGEEIHKLMAAGFIKEVFHPEWLANPVLVRKKGGKWRMCVDYTGLNKACSKVPYPLPRIDQIVDSTAGCETLSFLDAYSGYHQIRMKESDQLATSFITPFDMYCYVTMPFGLRNADATYQRCMNHVFCEHIGRTVEAYVDDIVVKTRKAFDLLSDLEVTFRCLKAKGVKLNPEKCVFGVPRGMLLGFIVSERGIEANPEKIAAITSMGPIKDLKGVQRVMGCLAALSRFISRLGERGLPLYRLLRKAECFAWTPEAEEALGNLKALLTKAPISVPPADGEALLVYIVVTTQVVSAAIVVERQEEGHALPIQRPVYFVSEVLSETKIRYPQVQKLLYAVILTRRKLRHYFESHPVTVVSSFPLGEIIQCREASGRIAKWAVEIMGETISFAPRKAIKSQVLADFVAEWVDTQLPMAPIQPELWTMFFDGSLMKTGAGAGLLFISPLGKHLRYVLRLHFPASNNVAEYEALVNGLRIAIELGVRRLDARGDSQLVIDQVMKNSHCRDPKMEAYCDEVRRLEDKFYGLELNHIARRYNETADELAKIASGRITVPPDVFSRDLHQPSVKIDDSPEPEAPSVQPERPRHSPGHPRLGPRRPRFDPRYPRASEGEALRIEKERSGATPDRNWQTPYLQYLRQGELPLDRAEAWRVARRAKSFVLLGDEKELYHRSPSGILQRCISVAEGQELLQEIHSGACGHHATPRALVGNAFRQGFYWPTAVADATRIVRTCEGCQFYAKQTHLPAQALQTIPITWPFVVWGLDLVGPLQKAPGGYTHLLVAIDKFSKWVEVRPLNSIRSEQAVASFTNIIHRFGVPNSIITDN

SEQ ID NO: 61326 - protein, 488 aa, Zea mays
  Coding DNA Sequence Number=SeqID_19547
  Homolog annotation: Hit_ID=Q337M3; Match level="QueryCoverage=77%, HitCoverage=97%, E-value=3e-34, Identity=40%"; Hit description =Expressed protein
  Subcellular localization annotation: CTP_CleavageSite=41; ConfidenceScore=5.54e-01
MRSKWRLRRSLSYTSAHAATLRFPSSNTPALPPLPPRHSVVAAVGSAAVAKRVGSEDCFSLQALSPPPPPLISPLCGEALRVDGLIGCLISIMMGVRLLIRMAPVGDHIVDISSDEEDLFIGTSLNILLEPLDPVKWVDEVCGVADYVAGEDIDDLMIMSEISAPPVLQKIAKPDELVVMGELSSPPAPQQKASANGGCHEDDDDCVVLDGDPDKAITVAEEGSLGDGSSDELQIVAEKGPGQQSVLQELEEVLAMLTLLKQALSHASQPVQVAPTTNAFTGASQNNHFQRSFSAPIAPQVQQGQPAARYQVAINGMHAVGPQLARSTSLTTQRTQCLPEPAIIDVSTTSWQDILATVASNLGVADYNTSTPESQHVTVDSLAMHPTANHGLDLQHEPIAESENLTYSLLHDSSNGAAGGSVQADGPMQTPENLDHLIGQSNPVPNEAHLDDFAGAPANQLPIEEEEAHQPEMSRLEPTNILFEFDWV

SEQ ID NO: 61327 - protein, 197 aa, Zea mays
  Coding DNA Sequence Number=SeqID_19548
  Pfam annotation: Domain name=DEK_C; Domain location=3-58; Score=23.0; E_value=0.0011; Accession=PF08766.1; Description=DEK C terminal domain
MVSDQEIASCVGSVLRGSAGGPGEVSLAAVLQQAEDTLGVDLSHKAGFIRDQLDLFFGPRLQPQPLTTPQPTPPSPQAVVAPADAVPQPQHQVLPQAPPSAQQMQPQPQQLTSLQQQLMFQTIHQLPAIAPVLVVSSPPAVPAMAFYPPPPLAFRYTTGLAGAAAGGTVSFQQSAPGAGGTASPTAAPQVTGDNKER

SEQ ID NO: 61328 - protein, 137 aa, Zea mays
  Coding DNA Sequence Number=SeqID_19549
MVVKSRTEKTWSRELPTSTHGGTRRSERRRLDCENSETHQTTSKVLENGRRSPADKATDSSRENGWRAPSNGISLGDGASEPMVSLAPAFEGATSDLTMAPPTLQSPITIDAGTQAGEDIGSTSGRLTRSEHVDSNR

SEQ ID NO: 61329 - protein, 479 aa, Zea mays
  Coding DNA Sequence Number=SeqID_19550
  Gene Ontology: Mol. function=metal ion binding; Cellular component =nucleus; Biological process=regulation of transcription, DNA -dependent
  Homolog annotation: Hit_ID=Q6ZFR3; Match level="QueryCoverage=93%, HitCoverage=63%, E-value=1e-116, Identity=54%"; Hit description=Zinc finger (C3HC4-type RING finger) protein family-like
  Pfam annotation: Domain name=VWA; Domain location=14-200; Score=96.9; E_value=5.9e-26; Accession=PF00092.18; Description=von Willebrand factor type A domain
MAGAVGAVARAPLDLVTVLDVSGSMAGTKLELLKQAMGFVIDNLGPRDRLCVVSFSSGANRLMRLARMSDAGKSLARRAVQSLAAGGGTNIGEALRRAAKVIDERMHRNAVASVVLLSDGQDTYTVPRRGGYGGRGANYDALVPPSFAYPGAGSRCAPVHTFGFGTDHDAAAMHTIAEATGGTFSFIEDEAAIQDAFAQCIGGLLSVTVQELRLDIACVHPGVRLRAVKSGSYGSHIDADGRSASVDVGELYADEERRFLLFLHVPRARSADADTHTQLVRVACAYRDTATGRGKNAAGEDAKVLRPWGPVTLERSVEVERERVRVEATHGIAAARAAAERGAHAEAVEILRHRQRSVTRSAAARAGDSTCLALSRELREMRARVASRQQYELSGRAYVLAGLSSHAHQRATSRQVMSGGVAEATRGGESAQVRSGALETSGITMSYMTPAMLDMLGRSRRSRELLQQRQQQTELRRTF

SEQ ID NO: 61330 - protein, 241 aa, Zea mays
  Coding DNA Sequence Number=SeqID_19551
  Homolog annotation: Hit_ID=Q8H925; Match level="QueryCoverage=68%, HitCoverage=31%, E-value=2e-62, Identity=72%"; Hit description =Putative WD domain containing protein
MDLPESSVPRADKGPAPRRLCPVDREELVRAMAQSLYSLGYRRAAAALEAESGVPLYPPEHDRLLLEVMAGQWDASAEIVRSVAGVGEADRTVAEFLVWRGYYLELLGMRGDAGLRRAREVLRRRIAPLGVDRRCVHLLARAMVSSEGAVAPEAVVGWRIAVFLDLVEVLPPWFHVASGRLEHLVESAQANVDYDKTFRLVVKLAMINTILGIAASHAWWIHQVDMKNAFLHGHLEETVYS

SEQ ID NO: 61331 - protein, 54 aa, Zea mays
  Coding DNA Sequence Number=SeqID_19552
MSGVAPDCLVQLQDKGFQRSTAPNPNERADVVSSDLNQKGRSSKDTKVDTVPKL

SEQ ID NO: 61332 - protein, 56 aa, Zea mays
  Coding DNA Sequence Number=SeqID_19553
MPQSGRMQCNKEATTVGNLSCPVRKGEPLGGRHNLGDPRSGTSGLALCGVKSSSCF

SEQ ID NO: 61333 - protein, 55 aa, Zea mays
  Coding DNA Sequence Number=SeqID_19554
  Subcellular localization annotation: CTP_CleavageSite=13; ConfidenceScore=5.06e-01
MAPSQLPSTKSIAAQGRKRITHCRLPKRSLSDRSRDGRYRTIGSSHNNIQFDLKA

SEQ ID NO: 61334 - protein, 157 aa, Zea mays
  Coding DNA Sequence Number=SeqID_19555
MATYLDLTFNRAVSTTISVEEKNSGQGKKKCLDVKEPIFIRPTTAPTQTTQLGGPGTRFLALPSSSNNCFNYGNARNFIKDCPYPKQNKQNFQKTFGNTSWGMGNMVATTPEGEAVLMDIEQSMVLECVAEDLPEKQPGRDAGNMEDFEEFQDYGEF

SEQ ID NO: 61335 - protein, 117 aa, Zea mays
  Coding DNA Sequence Number=SeqID_19556
MRVLMCLLQLQAPGLKRGSDTAESATSSDSGVMFRPIMEGLLVGDAGVAVEVVEAVAVPASGGGRGGRGGGRGGARRGRRGRGRERRARRGQGRSRPGMGEKGARERQPVGRETERR

SEQ ID NO: 61336 - protein, 201 aa, Zea mays
  Coding DNA Sequence Number=SeqID_19557
MRLTAAESSLRRHRKLHLARPWASASGEVSASPDLRARPPTSASEDGLRLARPQGSALASTSEDGLRLARPQGPPSNSTSGGIASSPGPGLGLRRSLRLARPWARTDHAAGGRARALIREGGRAGLSLSLSLANLVTPTASAPTLAQDNTKPRFPPFVFRLAPTHLGWGTQRQFTRRSRDPPGLKRRQYSYLSLTMTTNIN

SEQ ID NO: 61337 - protein, 133 aa, Zea mays
  Coding DNA Sequence Number=SeqID_19558
  Subcellular localization annotation: CTP_CleavageSite=47; ConfidenceScore=5.21e-01
MADTGEGRGRSNESAKAQATDRTTATSSDGKLSMARVEVATLRLRVRVRVASGSWRACGRRRAGQLAHGAGFSWARSRESRGEGEAVAAAAGSGGWLGAGWALAPMRQGDEAEATRSYEQATNGRKLVWEKKR

SEQ ID NO: 61338 - protein, 168 aa, Zea mays
  Coding DNA Sequence Number=SeqID_19559
  Gene Ontology: Mol. function=peroxidase activity
  Homolog annotation: Hit_ID=Q1SXL4; Match level="QueryCoverage=53%, HitCoverage=31%, E-value=2e-21, Identity=57%"; Hit description=Acid phosphatase/vanadium-dependent haloperoxidase related
  Pfam annotation: Domain name=DUF212; Domain location=63-159; Score= -23.4; E_value=0.00023; Accession=PF02681.5; Description=Divergent PAP2 family
  Subcellular localization annotation: CTP_CleavageSite=35; ConfidenceScore=5.74e-01
MARPFSSPHIPSSSWVTRRPPPWTSSPSVSTTRTSASSITACRPRRRAVAPAASLHLGPGEIAELARNKVLIAATVASAIGQLSKPFTSVKNGGVGAGLDLRTVFRSGGMPSTHSASVVAVATSLGLERGFADSIFGMSVVFAAIVMYDAQSPLLVSYLDLGQIKAFL

SEQ ID NO: 61339 - protein, 380 aa, Zea mays
  Coding DNA Sequence Number=SeqID_19560
MSAAEEHRWRSLVFGEAVAAQRSALVLASYPLLLLLVVLAAFVRYLWIALAMYCALLFVLSCAARALAAQPAGAAGAEAARVSRGGLSAAAIAAVAPAFRVFVTNWGLTDIDSTARVNCDCKQPVCDSGMKTSGRKLPVKAPFDRNMFLTEQHCREYFGGSIETLNCWPQTARSTSRPRCSSSSALESSVCCGSGGQGGYNFNLRLPAVEDWVLDSIPYSVKKHVQQGLGATEFEGWYRPAFGPCFCFRLLFSGRARAKRPTHIPSTSDGYGKCDDLSRIGGEISQSSPTRLPRHIPVNRIQYLQATAAVNAQLASACSPSPRVHQAISSGSRQQHHLRARGPHREQASNRSTVVHAQLRYGLGWWALELEESKLSHPNQ

SEQ ID NO: 61340 - protein, 418 aa, Zea mays
  Coding DNA Sequence Number=SeqID_19561
  Gene Ontology: Mol. function=hydrolase activity, acting on ester bonds; Cellular component=cellulose and pectin-containing cell wall; Biological process=lipid metabolic process
  Homolog annotation: Hit_ID=Q5Z787; Match level="QueryCoverage=97%, HitCoverage=97%, E-value=0.0, Identity=75%"; Hit description =Putative lipase
  Pfam annotation: Domain name=Lipase_GDSL; Domain location=35-404; Score=101.5; E_value=2.6e-27; Accession=PF00657.12; Description=GDSL- like LipaseAcylhydrolase
MPGDGGAAGSARWVCAVLSVFPLLAAAAQGRYRAVFSFGDSLVDAGNLVTEGIPDYLATARPPYGQTYFGYPTGRCSDGRLVVDFIGKFRRFQAPLTFSRACVRAFLGVASVRTEFDGSDSFWPSPPAAQELGLPLPPPSKAKNASFAQGANFAITGATALDTDFFRKRGLGSTVWNSGSLRTQIQWLRDLKPSLCSSAQGTRCKEFFAECLFVVGEFGGNDYNAPLFAGKDLREAYKLTSHVIRAISDGVEQLIAEGAKDLIVPGVMPSGCFPVYLTMYADPKEGHGSRTGCLKRFNTFSWVHNAMLKRALVKLRAKHPGARIIYGDYFTPIIQFILQPKKFGFYKQPPRACCGAPGRGPYNFNLTAKCGEPGASACADPKTHWSWDGIHLTEAAYLHIARGWLHGPFADQPVVQAS

SEQ ID NO: 61341 - protein, 96 aa, Zea mays
  Coding DNA Sequence Number=SeqID_19562
MAIKETLLMEAPSLVAEDKLEFVFRCSLYLFQIYCITVYCFSTFAISQDRHGPIRNGDALSEAGGHGRREPEAKADFQPIQLAAAGGEWMRLLDEC

SEQ ID NO: 61342 - protein, 163 aa, Zea mays
  Coding DNA Sequence Number=SeqID_19563
  Homolog annotation: Hit_ID=Q94F85; Match level="QueryCoverage=33%, HitCoverage=13%, E-value=6e-20, Identity=87%"; Hit description =Plastid division protein FtsZ
MGVSLVNDGPVTMQIDSPSPQDAARSWYIEIWSALYCRCVRLSTKAVGVQDYYGLLKSILLWYDGLCLIVTSLSNPYVNIIFGVVVDDRYTGEIHVTIIATGFPQSFQKSLLADPKGARIVESKEKAATLAHKAAAAAVQPVGAMLQELEKEIDDVDAQIRNL

SEQ ID NO: 61343 - protein, 418 aa, Zea mays
  Coding DNA Sequence Number=SeqID_19564
  Gene Ontology: Mol. function=binding
  Homolog annotation: Hit_ID=Q10PF0; Match level="QueryCoverage=78%, HitCoverage=16%, E-value=4e-19, Identity=43%"; Hit description=TPR Domain containing protein, expressed
  Subcellular localization annotation: CTP_CleavageSite=30; ConfidenceScore=5.00e-01
MPLSAASSILLLHALVSLTLLLGDMTTTTPAAAVPAAVDVNTTAFTMHDSAASASPHGAENFEMYYCFLCTERHPLLIHYCPIYWDECHLNCWDDDTPTSMVTVQGKECYVMKLYMSGRYVIVQRLSCDGVASCFPHLRRRGAGRQSCCRCHGNHGRRRARSSSRGTLCLSSCAAHSSQICSTCDVPGVPSFMLVKLYRDQQAVTAVLLTRSSFASQAITYASILLLLHACSLSLLAAARVPDPVEHGDVNTAMLTNGSASATPSSPDSSSNGNFDMYFCFLCSGRDPLLIHHCPIYWDECHLICDDDMSTATPTPPAVAVSSSSSSRPVPMVQVQGDDDCYVMKLYMSGRYVIVEHRPCKYIAWCFLTCGGGELAAADRKAVTATAIQGTSLPAELCGTQVVNAPPSAAAGGAHRRR

SEQ ID NO: 61344 - protein, 184 aa, Zea mays
  Coding DNA Sequence Number=SeqID_19565
  Homolog annotation: Hit_ID=Q9FIY6; Match level="QueryCoverage=16%, HitCoverage=22%, E-value=2e-07, Identity=74%"; Hit description =Arabidopsis thaliana genomic DNA, chromosome 5, TAC clone:K9D7
  Pfam annotation: Domain name=zf-C2H2; Domain location=54-76; Score =21.2; E_value=0.0037; Accession=PF00096.16; Description=Zinc finger, C2H2 type
MELGLTVDRKKDDEGAPRASSSSSPSCEADDDDLPKKQQQRPSGDDDEGTRQPYKCTFCRRGFPTAQALGGHMNVHRRHRGRPAAVSTGAAAGSSAASVYDYDQPCSTTTTPVLAFARQATTTQRRPHELPLFVARGDCCAAGRGSTGTAAGDDVPQDHRYYLPKNGDGGEELDLELRLGGAGP

SEQ ID NO: 61345 - protein, 278 aa, Zea mays
  Coding DNA Sequence Number=SeqID_19566
  Gene Ontology: Mol. function=ubiquitin thiolesterase activity; Cellular component=intracellular; Biological process=ubiquitin -dependent protein catabolic process
  Homolog annotation: Hit_ID=Q6K6Z5; Match level="QueryCoverage=99%, HitCoverage=99%, E-value=1e-116, Identity=68%"; Hit description =Putative ubiquitin C-terminal hydrolase
  Pfam annotation: Domain name=Peptidase_C12; Domain location=2-157; Score=213.1; E_value=6.5e-61; Accession=PF01088.11; Description =Ubiquitin carboxyl-terminal hydrolase, family 1
MSWCTIESDPGVFTELIQQMQVKGVQVITNACATQAILSVLMNRPEIDIGPELSQLKEFTGAFTPDLKGLAISNSESIRTAHNSFARPEPFISDEQRAATKDDDVYHFISYLPFEGVLYELDGLKEGPVNLGQCDGADDLDWLRMVQPVIQERIERYSQSEIRFNLMAIIKNRKEVYSAELEELEKRREQILQEMNNASSTESLSSSLTEVISAIETVTEKVIMEEEKFKKWKKENIRRKHNYIPFLFNLLKMLAEKQQLKPLVEKAKQQKSASPSTS

SEQ ID NO: 61346 - protein, 321 aa, Zea mays
  Coding DNA Sequence Number=SeqID_19567
  Gene Ontology: Mol. function=RNA-directed DNA polymerase activity; Cellular component=nucleus; Biological process=RNA-dependent DNA replication
  Homolog annotation: Hit_ID=Q8S472; Match level="QueryCoverage=99%, HitCoverage=29%, E-value=1e-167, Identity=87%"; Hit description =Putative gypsy-type retrotransposon RIRE2
MLKESCPYHQGPVKHTLEECAMLRRHFHKARPPAEGGRAHNDDKKEDHKAGEFPEVHDCFMIYGGQVANASARHRKQERRVVCSVKVAAPVYLDWSDKPITFDQGDHPDHAPSPGKYPLVVYPVIGNVRLTKVLMDGGSSLNIMYAETLGLLRIDLSSVRAGATPFHGIITGKRVQPLRQLDLPVCFGTPSNFRRETLTFEVVGFRGTYHAVLGRPCYAKFMAVPNYTYLKLKMPGPNEVITVGPTYRHAYECDMECVEYAEALTESEALIADLESLSKEAPDVKRHAGNFEPAETVKSVPLNPSNDASKQIRIGFELDPK

SEQ ID NO: 61347 - protein, 237 aa, Zea mays
  Coding DNA Sequence Number=SeqID_19568
  Homolog annotation: Hit_ID=Q6QP51; Match level="QueryCoverage=81%, HitCoverage=77%, E-value=2e-23, Identity=50%"; Hit description =Putative growth-regulating factor 1
MMTAKGDISKGVLLREGSGPRALLLIRGSKAGPSEGGSKAGPSEGFDSRPRARIARDDSGYVRYMVEARATLPRSRLRLLKGRDLASPEPSLSHFALPLTDHTGKQRRPPRSNYCATHQGEADNSQVQPHAQQEAPPRPTLGLGLRRRSPPCPTPGLGPHLGLRRKSRPRPTLGLSPHLGLGRWSPPRPTPGLGLNLDLGRNRVLARPRPRPQEESPPRPTLGSDRPRHGDTSLLYP

SEQ ID NO: 61348 - protein, 113 aa, Zea mays
  Coding DNA Sequence Number=SeqID_19569
MALDAWTMAATDGVRWQWHRGGGRRGRGQRKGLVACGRQIDSRVVTVEFDSGLFVPVNGPFRACLNGPGSCPPVGLGLGPCTALNNFVPCHAWVVLFFRASCQPIKPDPNVQL

SEQ ID NO: 61349 - protein, 186 aa, Zea mays
  Coding DNA Sequence Number=SeqID_19570
MASMKRGINGGGETDTMKLLEWRGKTVAWDFGWRVVQDGSGGLARCGRVRLPGVGSWRRRARRGFRLLLVRCMGTGWGAVRCPGAALLGSWAQGRLVDQPRRRAWGGAVQGQGATGLGRVPRRWLPGGTCGRSREERGNREAGWDRLQEREEGEGGKVPGGGGQQGGGRGRAADPSWASSGLLGLG

SEQ ID NO: 61350 - protein, 119 aa, Zea mays
  Coding DNA Sequence Number=SeqID_19571
MEVDDQGGLGGQGNGRDRRAARTELRRGSTDSGTDGDGVDEQGSEERGRARRGSIESLGVGFLAARVEEAGKREGKGRPSGTTCKCEKREKGETFLAAAASREETGGTRPILAGPLVGF

SEQ ID NO: 61351 - protein, 178 aa, Zea mays
  Coding DNA Sequence Number=SeqID_19572
  Gene Ontology: Mol. function=small conjugating protein ligase activity; Cellular component=intracellular; Biological process =protein modification process
  Homolog annotation: Hit_ID=Q2QLM1; Match level="QueryCoverage=93%, HitCoverage=95%, E-value=4e-57, Identity=65%"; Hit description =Ubiquitin-conjugating enzyme family protein, expressed
  Pfam annotation: Domain name=UQ_con; Domain location=22-175; Score =123.0; E_value=8.3e-34; Accession=PF00179.16; Description=Ubiquitin -conjugating enzyme
  Subcellular localization annotation: CTP_CleavageSite=39; ConfidenceScore=5.26e-01
MASPSSSSFPSRKALSKIACRRLQKELTEWQVNPPRRLRAQGHRQPSRGAASPSPHFLSPFSPSSPCAGAPGTLYTGETYKLQVDFSEHYPMEAPQVIFLHPAPMHPHIYSNGHICLDILYDSWSPAMTVSSICISILSMLSSSPAKQRPADNDRYVRNCRNGRSPKETTWWFHDDTV

SEQ ID NO: 61352 - protein, 695 aa, Zea mays
  Coding DNA Sequence Number=SeqID_19573
  Gene Ontology: Mol. function=binding; Cellular component =intracellular; Biological process=RNA processing
  Homolog annotation: Hit_ID=Q9FJ37; Match level="QueryCoverage=84%, HitCoverage=100%, E-value=0.0, Identity=56%"; Hit description=Cell cycle control crn (Crooked neck) protein-like
  Pfam annotation: Domain name=HAT; Domain location=131-163; Score=8.1; E_value=1; Accession=PF02184.7; Description=HAT (Half-A-TPR) repeat
  Pfam annotation: Domain name=HAT; Domain location=165-196; Score =11.1; E_value=0.31; Accession=PF02184.7; Description=HAT (Half-A -TPR) repeat
  Pfam annotation: Domain name=HAT; Domain location=198-229; Score =37.1; E_value=6.3e-08; Accession=PF02184.7; Description=HAT (Half-A -TPR) repeat
  Pfam annotation: Domain name=HAT; Domain location=231-266; Score =11.6; E_value=0.25; Accession=PF02184.7; Description=HAT (Half-A -TPR) repeat
  Pfam annotation: Domain name=HAT; Domain location=268-302; Score=4.4; E_value=4.8; Accession=PF02184.7; Description=HAT (Half-A-TPR) repeat
  Pfam annotation: Domain name=HAT; Domain location=368-402; Score=3.5; E_value=6.9; Accession=PF02184.7; Description=HAT (Half-A-TPR) repeat
  Pfam annotation: Domain name=HAT; Domain location=404-438; Score=7.2; E_value=1.5; Accession=PF02184.7; Description=HAT (Half-A-TPR) repeat
  Pfam annotation: Domain name=HAT; Domain location=440-471; Score =20.1; E_value=0.0074; Accession=PF02184.7; Description=HAT (Half-A -TPR) repeat
  Pfam annotation: Domain name=HAT; Domain location=63-95; Score=3.4; E_ value=7; Accession=PF02184.7; Description=HAT (Half-A-TPR) repeat
  Pfam annotation: Domain name=HAT; Domain location=97-129; Score=27.8; E_value=3.9e-05; Accession=PF02184.7; Description=HAT (Half-A-TPR) repeat
  Pfam annotation: Domain name=TPR_2; Domain location=117-150; Score =5.3; E_value=8; Accession=PF07719.7; Description=Tetratricopeptide repeat
  Pfam annotation: Domain name=TPR_2; Domain location=217-250; Score =17.2; E_value=0.059; Accession=PF07719.7; Description=Tetratricopepti de repeat
  Pfam annotation: Domain name=TPR_2; Domain location=390-423; Score =5.6; E_value=7.4; Accession=PF07719.7; Description=Tetratricopeptide repeat
  Pfam annotation: Domain name=TPR_2; Domain location=83-116; Score =12.0; E_value=1.3; Accession=PF07719.7; Description=Tetratricopeptide repeat
  Pfam module annotation: Pfam domain module=HAT::HAT::HAT::HAT::HAT::HA T::HAT::HAT::HAT::HAT::TPR_2::TPR_2::TPR_2::TPR_2; Domain location
  Pfam module annotation: Domain location=97-129::117-150::217-250::390- 423::83-116
MRRRRRPLPIPASAFSPSATPRSSYPAPIQITAEQILREARERQEPEIRPPKQKITDPQELSEYRLRKRKEFEDVIRRVRWSVSAWVKYARWEEQQLDFARARSVYERTLDVAHRDHTLWLKYAEFEMRNRFVNHARNVWDRAVSLLPRVDQLWYKYIHMEELLGAVANARQVFERWMSWRPDTAGWNSYIKFELRYGEVERARAIYERFVAEHPRPDTFIRYAKFEMKRGEVERARRVYERAADLLADDEDAEVLFVAFAEFEERCREVERARAIYKYALDRVPKGRAEELYRKFLAFEKQFGDREGIEDAIVGKRRFQYEDEVRKNPLNYDSWFDYIRLEESVGNNDRIREVYERAIANVPPCRSAEEKRYWQRTLYEKYIEWSPANCYAWRRYAELEKNLSDTDRARSIYELAIVQTALDMPEILWKEYLQFEIDENEFERTRQLYERLLDRTKHLKVWTSYAEFEASAGLGGEDSEGEEKKNDKEQKMEQVKKCRAIFERAFDYFRTSASELKEERAMLLEEWLNKEVIFGDLGDVTLVQKKAPRKVKRKRPIPTEDGSTIAYEEYIDYIFPDEVALAPNLKILEAAYKWKKQRTDDDNFGGRESLPYVGSGSEQWEEGLIQAATVYDSLYSNCKGALPVAMLRLQLSSTSIAVLTVWPCRVTQDCYDLFYAWASNFKKLNVSVALELIHF

SEQ ID NO: 61353 - protein, 639 aa, Zea mays
  Coding DNA Sequence Number=SeqID_19574
  Gene Ontology: Mol. function=ubiquitin-protein ligase activity; Cellular component=intracellular; Biological process=protein modification process
  Homolog annotation: Hit_ID=Q9AUK0; Match level="QueryCoverage=53%, HitCoverage=45%, E-value=1e-139, Identity=72%"; Hit description =Putative ubiquitin protein ligase
MSVPPAGKRQVSLRGSSAKEITRDALLQKVSEERQLRSHLRRAAAAAFSIQPNPTMTRPAEALIPGLRPERRIWRRYHVIRMVSEQLHEDWELLMNQPNIDLTTQWISKKMLRPFLFFITQPSSWYIGQWSKTVESILTCFKIILNSINSMDARKNFCSFAVGIPEERSIWLYQAKKLISLCSSILARYDHSCCKDGSIVDMTAIAMRLAVSLTDCKTWKSLNSENTSAADASVQSLIEFIGCFIQELDFCLYVDVINCISENLLESFEKSKGTSQNVGNITFHADTSVAEEEDTNDDCRMRTLFMDLLKPIYQQWHLRKLLMLAKEDFPCRRATDYDPNLKNIHFRILKLSDVICFYYHMLRIFSSLNPSIGAMPILNMLAFSPGFLVDLWEALEMPIFGPPIQNSQETGHEKQLATSSSGVQVSSMRQRRNAKDTANRWSNVLQKITGKSNDSEEGTLSDSILFSHESNDDALTSWDIEAMRHASEGIGKDLMCIMYLFCAIYGHLLLVLDDIEFYEKQVPFTLEQQRKIASALNTFVYNSFIQNSGSYSNPLVDVAVRCLNLLYERDSRHKFCPISLWLAPARNGRIPIAAAARSHEAAFGIFPGIPHRSSVLTTLPHVYPFEESGFCVFSVSGYH

SEQ ID NO: 61354 - protein, 545 aa, Zea mays
  Coding DNA Sequence Number=SeqID_19575
  Gene Ontology: Mol. function=protein phosphatase type 2A regulator activity; Cellular component=protein phosphatase type 2A complex; Biological process=signal transduction
  Homolog annotation: Hit_ID=O04376; Match level="QueryCoverage=81%, HitCoverage=82%, E-value=1e-151, Identity=60%"; Hit description =Serine/threonine protein phosphatase 2A 57 kDa regulatory subunit B' beta isoform
  Pfam annotation: Domain name=B56; Domain location=88-533; Score =936.2; E_value=1.3e-278; Accession=PF01603.10; Description=Protein phosphatase 2A regulatory B subunit (B56 family)
  Subcellular localization annotation: CTP_CleavageSite=93; ConfidenceScore=5.19e-01
MFNKIIKRGNRKGARGDSAEVAARPAAPSSSSGSGGGGAGGAAPVTVNHASRATAPSPSSPTSPHVTPSRVCDQPGGGGRRHRPLLEPLPLLRDVAAADRPGLILRKLRLVAALFDLSDSLKHPREKEAKRQALLELVDYVQAPAQAAGANAPTRLPDHVQEALVLAISANIFRPLPPALHESAAAIDPGAAPDDDEEPYLDPSWPHLQLVYELLLRYVVSPDTDTKVAKRYVDHAFVLRILDLFDSEDPREREYLKTVLHRIYGKFMVHRPFIRKAINNVFYRFIFETQRYNGIGELLEILGSIINGFALPMKEEHKLFLARALIPLHKPKSVVIYHQQLSYCIVEFVEKDYKLADTVIRGLLKYWPVTNCQKEVLFLGELEEVLEATQPAEFQRCMVPLFKQIARCLNSSHFQKTFFLTQWNTMAALNPRLGDSVAERALFLWNNDHIVSLIAQNRGVIFPIIFEALERNIHSHWNQAVHGLTANVRKMFLDMDSELFEECQQQYMDKQAKAKEMQEQRESAWRQLEAVVAAKAAGDDMVLVN

SEQ ID NO: 61355 - protein, 358 aa, Zea mays
  Coding DNA Sequence Number=SeqID_19576
  Gene Ontology: Mol. function=nucleic acid binding; Biological process= cold acclimation
  Homolog annotation: Hit_ID=Q7Y008; Match level="QueryCoverage=69%, HitCoverage=65%, E-value=4e-52, Identity=47%"; Hit description =Putative RNA-binding protein
  Pfam annotation: Domain name=RRM_1; Domain location=9-127; Score =28.3; E_value=2.7e-05; Accession=PF00076.12; Description=RNA recognition motif. (a.k.a. RRM, RBD, or
  Pfam annotation: Domain name=zf-CCHC; Domain location=161-178; Score =33.5; E_value=7.3e-07; Accession=PF00098.13; Description=Zinc knuckle
  Pfam module annotation: Pfam domain module=RRM_1::zf-CCHC; Domain location=9-127::161-178
MEGKEEGRIFVGGLSWQTDERKLQDAFGRFGKVVDVQVPVPPRPSPLVLMPAPGWSGMQEYASGHICYIVLSSEYAEFFEKFMAIMLERHTYRHRGFGFVTFEDRRAVDSAIKEMRGQELDGRTISVNKAEPKMNTDDTRFDSGGGRGEYRGGRGDGPPPGNCYECGRPGHWVRDCPSAAGGRSGRFPSKFSGGGRGDRFSGSDRFNDRYMDDRYDGGRYGYRDQVDARDKYGGGRDRYANDRYPAGGDHFDGDRYGGGLDRYAPNGYGRERERSYERDGVRGGGGYDRSGSRGGGSYDRDGPRGGKGGGYVRDGPRGGVADRYGGGGPARYDGGSYRERPGPYDRPSRGGGRFDERH

SEQ ID NO: 61356 - protein, 957 aa, Zea mays
  Coding DNA Sequence Number=SeqID_19577
  Gene Ontology: Mol. function=translation initiation factor activity; Cellular component=cytoplasm; Biological process=multicellular organismal development
  Homolog annotation: Hit_ID=Q2LFC4; Match level="QueryCoverage=89%, HitCoverage=87%, E-value=0.0, Identity=50%"; Hit description=AGO1-1
  Pfam annotation: Domain name=DUF1785; Domain location=297-349; Score =106.3; E_value=9e-29; Accession=PF08699.1; Description=Domain of unknown function (DUF1785)
  Pfam annotation: Domain name=PAZ; Domain location=350-485; Score =151.6; E_value=2.1e-42; Accession=PF02170.12; Description=PAZ domain
  Pfam annotation: Domain name=Piwi; Domain location=599-917; Score =350.4; E_value=3e-102; Accession=PF02171.8; Description=Piwi domain
  Pfam module annotation: Pfam domain module=DUF1785::PAZ::Piwi; Domain location=297-349::350-485::599-917
MQQQAVEVTAKGGAVEGAAEVAPAAVAVAANGGPKAARSLAVAEVEPSAQRVAAAEVQPQWQVAAPPSTSRPTPAEVEELRGEVERKAAVAVPDAEAHEGPSSGTAHEPSAAPARVEAEQGTSLVVEADQAAQGRLPPSSSKALVFPARPGYGTLGRRCRVRANHFFVQVADKEIYHYDVVISPESQSRKRNRWILNELVKLHKNYLNGRLPVYDGRKGLFTAGPLPFKTKEFVLELTNPERANQGAKEYSVTIKDAAKLDLYSLRQFLAGRQRELPQDTVQALDIAMRECPTEKYVSISRSFFSQSFGHGGDIGSGVECWRGYYQSLRATQMGLSLNIDISATAFYKAQPILEFALEYLNIRDTSRRLSDQDRLKLKKVLKGVRVVATHRRDIAIHYKITGITSLPLNSLTFNQDGASVSVVQYFKHQYNYSLKHIHWPCLQSGNDSRPTYLPMEVCSILGGQRYSRKLNEYQVTSILKKACERPPQREGSILEVVNRNDYGNDHCAKEFGIKVTNELALVDARVLPAPTLKYHDSGREKVCSPSVGQWNMNNKQINGRPCVDVGQARPDNLEAALRNTHRQSAQMLAQQGVTRQLDLLIVVLPDANASVFYGRIKRLCETELGLVTQCCQPKNVFKGGRQYLQNLALKINVKVGGRNTVLEDALNRRIHLLTDLPTIIFGADVTHPAPGEDASPSIAAVVASMDWPQVAKYRCLVSSQGHREEIITDLFTQVKDPQKGLINGGMIRHAEHLRELLVSFYKANGSRKPSRIIFYRDGVSEGQFSQVLLYEVDAIRKACASLEEGYLPPITFIVVQKRHHTRLFPEDHHAHGQMDRSGNILPGTVVDTKICHPSEFDFYLCSHSGIQFTGVILHVLYVVFFLFMDDRSSRTVLLLHNTVPPAYYAHLAAFRARHYMDDDLSDQGSSSVASSRMKDGAVPVKQLPKVMESVKQFMFYC

SEQ ID NO: 61357 - protein, 52 aa, Zea mays
  Coding DNA Sequence Number=SeqID_19578
MAARGYFPKWTTLLVCGPLGQNFGLHGYFHEWVILLVERILVRNSNGFGLVW

SEQ ID NO: 61358 - protein, 582 aa, Zea mays
  Coding DNA Sequence Number=SeqID_19579
  Homolog annotation: Hit_ID=Q10NT0; Match level="QueryCoverage=95%, HitCoverage=97%, E-value=1e-145, Identity=64%"; Hit description =Expressed protein
  Pfam annotation: Domain name=DUF593; Domain location=211-304; Score =172.1; E_value=1.4e-48; Accession=PF04576.6; Description=Protein of unknown function, DUF593
MSASASAGKLAAALHRRTRRVTSALACAALEWVLIALLLVNGLLAYAVARFADYFGLSPPCLLCSRVDRLFQAEGGGGGDASGAGARWLRDALCDAHAAEISALGYCLRHRRLAEAGEMCVGCRPSSWKERTSDAEAGEVEQEDVTTSTGLDLQPNEQNEIEEDRAPETPTNSVATQRSDRMFLLERKRSLSLSLDGSVASEMEGSEPSTVDQLKSALQAERKALGALYAELEEERNAAAIATNQTMAMINRLQEEKAAMQMEALQYQRMMEEQSEYDQEALQLLNELVSKRAREKQELERELELYRQKVQHYEDKERRRTASFKANGVSPSGSGTSVSSSGEDSDGHSDDYCELGDSPDGGNVQSSSDAALSSMRDQDDGTKHLAALDDSLTYFEVERLSILEELKTLEERLFTLEDDDINTSKEVTGHSSSDMDLPHDGLQSPEYILTGDRPRFGGRASISRGKSLLPLFDAVGDEACDRMPPSAGAGEADQADDAATKPASVLVKEQERLAIIEEVDHVYERLQALEADKEFLRHCIKSLKKGDKGMDLLQEILQHLRDLRSVELHVKNAGGAMAANSA

SEQ ID NO: 61359 - protein, 70 aa, Zea mays
  Coding DNA Sequence Number=SeqID_19580
  Homolog annotation: Hit_ID=Q10NS8; Match level="QueryCoverage=67%, HitCoverage=6%, E-value=6e-18, Identity=79%"; Hit description =Ser/Thr protein phosphatase family protein, expressed
MNVGIRFPANLFGHSTDKRIEAGSLFQHTYVVISMQKLVSSFGGIMKSEQQKITSQAFGNGNLETGRTPD

SEQ ID NO: 61360 - protein, 571 aa, Zea mays
  Coding DNA Sequence Number=SeqID_19581
  Gene Ontology: Mol. function=binding; Cellular component=endoplasmic reticulum; Biological process=Notch signaling pathway
  Homolog annotation: Hit_ID=Q10NT7; Match level="QueryCoverage=94%, HitCoverage=76%, E-value=0.0, Identity=61%"; Hit description=Sel-1, putative, expressed
  Pfam annotation: Domain name=Sel1; Domain location=101-139; Score =0.1; E_value=17; Accession=PF08238.2; Description=Sel1 repeat
  Pfam annotation: Domain name=Sel1; Domain location=140-175; Score =19.0; E_value=0.017; Accession=PF08238.2; Description=Sel1 repeat
  Pfam annotation: Domain name=Sel1; Domain location=258-294; Score =32.7; E_value=1.3e-06; Accession=PF08238.2; Description=Sel1 repeat
  Pfam annotation: Domain name=Sel1; Domain location=295-330; Score =36.1; E_value=1.3e-07; Accession=PF08238.2; Description=Sel1 repeat
  Pfam annotation: Domain name=Sel1; Domain location=331-367; Score =30.4; E_value=6.5e-06; Accession=PF08238.2; Description=Sel1 repeat
  Pfam annotation: Domain name=Sel1; Domain location=447-478; Score =1.3; E_value=12; Accession=PF08238.2; Description=Sel1 repeat
  Pfam annotation: Domain name=Sel1; Domain location=527-562; Score =19.8; E_value=0.0098; Accession=PF08238.2; Description=Sel1 repeat
  Pfam module annotation: Pfam domain module=Sel1::Sel1::Sel1::Sel1::Sel 1::Sel1::Sel1; Domain location=101-139::140-175::258-294::295 -330::331-367::447-478::527-562
MARIFHRHLLLAVVTLAVAASLLRPAAAVRPFVLVLSGEDFLKDPAAHPSLPSADSDDDDGWDDFADDSPAADPLLSPSSWAPLLDPTISLPSGDETDSPADALFVAGTRAMLSAASDGDDAAFTTAAAQIEASAEAGHPGAQSALAFLTGAGMTRPASRSLAFLLHKFAADAGDLQSKMALAYSYFRQEMYEEAVILYAELAEAALTSSLISKEPPVIEPIRLHSGTEENKEALRKSRGEDDEDFQITEYQAQRGNAANMYKLGLLYYYGLRGLRRDYGKAFHWFSKAVEKGETRALELLGEIYARGAGVERNYTEAYKWLALAAKQQHYSAYNGLGYLYVKGYGVEKKNLTKARELFELAAENKEAGGHYNLVNAGQPKAIYQVAKLFQKGIGLKRNLHMGWTLPVSHQASIDRLYPKTHPPNTRLFFPSEATMLYKSIAERGPWSSLSRWALESYLKGDVGKALLLYSRMADLGYEVAQSNAAWILDRYSDQSICMGESSFCTDMERHLRAHALWWHASEQGNEHAALLIGDAYYYGRGVARDYERAAEAYMHARSQSNAQAIFNLGC

SEQ ID NO: 61361 - protein, 74 aa, Zea mays
  Coding DNA Sequence Number=SeqID_19582
  Gene Ontology: Mol. function=protein serine/threonine kinase activity; Biological process=protein amino acid phosphorylation
  Homolog annotation: Hit_ID=Q7XIR5; Match level="QueryCoverage=81%, HitCoverage=17%, E-value=4e-21, Identity=75%"; Hit description =Serine/threonine-protein kinase bub1,checkpoint-associated-like protein
GRKYQIKGSTGTGAFAKVYKATVDSNADEMVALKIQNPSFTLEFYMYRQLDLRISDVERPSYLDLRISDVGYIF

SEQ ID NO: 61362 - protein, 155 aa, Zea mays
  Coding DNA Sequence Number=SeqID_19583
  Subcellular localization annotation: CTP_CleavageSite=32; ConfidenceScore=5.29e-01
MAMLLAAPPRLQEGRAALAVAVAWPSGGRSPRSMARGRRGPSITRRCAPAVGDLPRELPAVSARTGAGSGRTVADHRRASRKPRRGPPTSRAGVSLPGPGRARFGALRRARRWCLAAPAGAEAKAGRARPCALRGWPARPCGSRTVMRGAPCTVG

SEQ ID NO: 61363 - protein, 93 aa, Zea mays
  Coding DNA Sequence Number=SeqID_19584
MGGEGRAEDGGANLLGRQGRAALPVCWCLATWGIGDQRTMTGQLAKHRAERLCAARVGEVADRAGRRVLGKQERRPSEWVRGAVRQASRGGMV

SEQ ID NO: 61364 - protein, 144 aa, Zea mays
  Coding DNA Sequence Number=SeqID_19585
  Gene Ontology: Mol. function=protein binding; Cellular component =cellular_component; Biological process=defense response
  Homolog annotation: Hit_ID=P24120; Match level="QueryCoverage=97%, HitCoverage=100%, E-value=2e-33, Identity=46%"; Hit description=Salt stress-induced protein
  Pfam annotation: Domain name=Jacalin; Domain location=16-144; Score =57.8; E_value=3.6e-14; Accession=PF01419.7; Description=Jacalin-like lectin domain
MSTTLVKVGPWGGQGGNPQDIDVLPDERLTSMTIRSGDVIEAYVDTAGNDYTTDLWGGGNGSFTKIELGDDEYVREISGTYGPYDNVLNLVTSLNIIVTNVASFSFGNAQGDTFSIPVENGGQIAGFYGRSGWLIDAIGVYIHP

SEQ ID NO: 61365 - protein, 75 aa, Zea mays
  Coding DNA Sequence Number=SeqID_19586
MESKGKEQGPESHDGLGQTGGARRDLYQTKGELGWRPGHYGRGSSGSSPTRECDGPGTQRRRPPSMQGRELRELE

SEQ ID NO: 61366 - protein, 162 aa, Zea mays
  Coding DNA Sequence Number=SeqID_19587
MGIKAERAERACWRAGNRASTGQGKRRARRHEKLSPATTRRWRHGRAWIGAREAERMVSITEEGGQIGAMGDQGKSRGWGKHREGTGMAGLGDHGEGAETAHWASSRGRAEGPLSDQGELGWRPMHYGRGSSASSPTRERDGQGTQQRWLPWMQGRELREPE

SEQ ID NO: 61367 - protein, 112 aa, Zea mays
  Coding DNA Sequence Number=SeqID_19588
MAPPVDVAGLRPRLGDVEAPPKPRSSLSSVAEVESEPWVGRSGIRRLPGLSPSPSLGSGGAEFAVFQGLARVRALGRAEQSRSVEQRSDGGHFGSVSWGARVRIKGVRPPLH

SEQ ID NO: 61368 - protein, 59 aa, Zea mays
  Coding DNA Sequence Number=SeqID_19589
MESHDLRAERESWLVGGNEIDGSGYDYGTGQRTLAFTKQMLRVFNFVELEELDHLVAEA

SEQ ID NO: 61369 - protein, 53 aa, Zea mays
  Coding DNA Sequence Number=SeqID_19590
MELRQDSRNGEMEKTITGKVGKNPKGLEGHGKGHLQRYHKHKSEIRSNRLREV

SEQ ID NO: 61370 - protein, 114 aa, Zea mays
  Coding DNA Sequence Number=SeqID_19591
  Homolog annotation: Hit_ID=Q8SAX6; Match level="QueryCoverage=96%, HitCoverage=18%, E-value=4e-17, Identity=45%"; Hit description =Putative organic solute transporter
MEWASVEYTAAALVCAAAASVVALAHMYRHLLHYAEPIYQRFIVRIIFMVPVKLSARRSHPQQILAAKGALAPDLSPAFAVAFPYWVYAMMSFLSLILPDNAVYFNSIREMSGM

SEQ ID NO: 61371 - protein, 93 aa, Zea mays
  Coding DNA Sequence Number=SeqID_19592
MALPPRFCFCRSAGKRPPASMDPLPPLSSVAENRSHPLHREWEPEAITQTPPRPRTLPLAKSVISDAHPRKQLRVMHITKDRGGHCGLQPVVV

SEQ ID NO: 61372 - protein, 151 aa, Zea mays
  Coding DNA Sequence Number=SeqID_19593
MKVGITVVESWEGVGHGAERGDGGDVAPARNSDGVGGNPRVACHDYFPLVPKELPSPGPRPDDGQDGVSPTSAPTSLPSAPQLVIQWFQEIWRRGGRGEPAVVGSHIFVKLTKAPQRTAKLRRGAPPCAEVRLEHDGATARPDPHVSALKW

SEQ ID NO: 61373 - protein, 98 aa, Zea mays
  Coding DNA Sequence Number=SeqID_19594
  Homolog annotation: Hit_ID=Q2QNI2; Match level="QueryCoverage=85%, HitCoverage=6%, E-value=1e-17, Identity=60%"; Hit description=Zinc knuckle family protein, putative, expressed
MVNSSGITELGEREKVLLLMESGVRIPWCIHICIHICSDKSTTPLDFNLKLRKRIHNKRLEDVHMLRYDRVLFQFFFLSDKHFILSFSNLGFAVMHIS

SEQ ID NO: 61374 - protein, 229 aa, Zea mays
  Coding DNA Sequence Number=SeqID_19595
MQQNKQIWVVPTVRMVRTKNVTPVRGGDDQDPPSPFRRDKGKEVYPEQQGGEKKRKLDGAIRAAVAERAEQGGHMRIGLDQIVFHVRRLSFRVCSTPTRFDPSALVTTTTPPSTTTPASATTVPTSPLATPIASTTPASTAPATSITPPVPPTHFREHDETEVWPLAADSRLFDLHRATAAKVCRFRHVHVDTWLPAQCDPAAGPFFSIQTQESFYRAQPTAQKALRAY

SEQ ID NO: 61375 - protein, 237 aa, Zea mays
  Coding DNA Sequence Number=SeqID_19596
MEARRALRYRVHRRRSKRPRNPKLGVKKKTCKVKVDRVKESYGIIPKKTNWSKEVALVWEHRTVRCALDSVRCPGWSSVNRLLSRSSWRRCGYKSPDGPSAVKKVASSHDNVVTTINILEGSICHVDKFEHIGGQSDIQIMFLGIGNFQYRLVFNLTLGGQRIQRSSIQGTGTGVSLILRCRAVKYKHESSRIKSGLELRRFDQLREDVAEVLSLRQLTTSTKSIQDNVLYLIDQKA

SEQ ID NO: 61376 - protein, 106 aa, Zea mays
  Coding DNA Sequence Number=SeqID_19597
  Gene Ontology: Mol. function=potassium ion transporter activity; Cellular component=membrane; Biological process=potassium ion transport
  Homolog annotation: Hit_ID=Q1T760; Match level="QueryCoverage=76%, HitCoverage=10%, E-value=4e-23, Identity=62%"; Hit description =Potassium transporter
MLCYDRSPWLVLDFFLFASIEALYFSVSLIKFLEGAWVPILLALILLVIMFLWHHTTIQKYEYGVHNKVTLEWLLTLGDMLGTTQCLPDDTNGFPETVVAQFSNPS

SEQ ID NO: 61377 - protein, 128 aa, Zea mays
  Coding DNA Sequence Number=SeqID_19598
MPYRKPTYGPYSDELQENDSHDYYGLVSTMDSGVIHLDGTATAKRNGLLLLIGSIPYIREIQFEKDLIPEKQPPGNGGDKIEEASKGTKKPEVAAGEDPKNQPLGDVREDAGNPEQQAAGFLDMSRGG

SEQ ID NO: 61378 - protein, 95 aa, Zea mays
  Coding DNA Sequence Number=SeqID_19599
MPESLITGVDWPHRAAWIRSRSCRGADRDPLAARHLLVGHGLMMTCLVLSSRSARARSGASPRQVAQQGPGRAINLMQFLAVKLGQWPPVYDYVD

SEQ ID NO: 61379 - protein, 136 aa, Zea mays
  Coding DNA Sequence Number=SeqID_19600
  Subcellular localization annotation: CTP_CleavageSite=42; ConfidenceScore=5.02e-01
MAQSPSSAGGETFAPRSRIMFGSLDFLATATGELCHVGPNVSTAAGMGPTRITRSKAEKRRLKGRAAALKRRLNRLVAAAKQRTKGALPSTLVAVVGQQPNSILDLLEDESSHASTEASFDSDEAVRRTCFVATPP

SEQ ID NO: 61380 - protein, 281 aa, Zea mays
  Coding DNA Sequence Number=SeqID_19601
  Gene Ontology: Mol. function=RNA-directed DNA polymerase activity; Cellular component=nucleus; Biological process=RNA-dependent DNA replication
  Homolog annotation: Hit_ID=UPI00004C1732; Match level="QueryCoverage =68%, HitCoverage=13%, E-value=6e-48, Identity=49%"; Hit description =UPI00004C1732 related cluster
MGCLMIFGGVEVYGYRRHRKMAYREMVGVPDRLRPPRSSRQDPTPRAYPLIAEPIVGSKRLYKVLMDGGSDLNIMYIETFNGLAIARSALRPSPEPFHGIIPGHQAYPLGRVTLPVTFGDPSNFRTERLQFKVVDFPESYNAILGRPCYTKFTAIPNYTYLKLKMPRPHGVITASASFKAVYTCERANYELASTLAMAMERTKPQKIATLGDTQAPQGGPNIPRSAEDKGDAPANSDDCPKRTRTNAAPPPIRRADSPLRQKEGATKAGGEEDAQVLSHQG

SEQ ID NO: 61381 - protein, 335 aa, Zea mays
  Coding DNA Sequence Number=SeqID_19602
  Gene Ontology: Mol. function=nucleotide binding; Cellular component =endoplasmic reticulum; Biological process=protein folding
  Homolog annotation: Hit_ID=Q69TV0; Match level="QueryCoverage=90%, HitCoverage=73%, E-value=2e-49, Identity=49%"; Hit description =Putative dnaK-type molecular chaperone BiP
MDNGTILSGEAAMNHAAVSPGTAISGFTRLLNQKLKDDLVKSEMKLSPSYKFSEREGRAAIQIQAAGGGQVIELCPLDLADILFSELKHRAEAHLGCELSAAIIAMPHHLNYNGRQDVVNMARYDAGFRRAAKAIDRQIAAAVAHHRHTEQGDDFTARIIDYMGGAHQGAAPVGHQAGRGGAAQAKGVLRARQEGIERPGRDDGADTCHRCRVIGAPRGPSWRSSTRTCSTGSCDLWMGSGWLPRPHDESRKDMVDEIVLVGSGARMPKLHQLVEDYFHGRQPNSRKGVEPEDAIVRGTAILSRPKAACYLEECFDFLYGKDGRGLPSFLFRTSD

SEQ ID NO: 61382 - protein, 159 aa, Zea mays
  Coding DNA Sequence Number=SeqID_19603
  Homolog annotation: Hit_ID=Q655S9; Match level="QueryCoverage=21%, HitCoverage=9%, E-value=8e-07, Identity=74%"; Hit description=Zinc finger POZ domain protein-like
MELGRAIAALSVALSSRIRCARVRAVATTRPCEEDGSDKGPTRKVTGNGNSGQCGWLTPLGPPVSVASCHPLGWAARRMMGKSYIKKGFSIVVEDDSGNCSSMTQNIVYKEIFERIVQQESHQAETLDAVLATDGYAHLVESCPLVLTELVRAARGRKI

SEQ ID NO: 61383 - protein, 304 aa, Zea mays
  Coding DNA Sequence Number=SeqID_19604
MEEGCEGWSGWEWSNELVVGVVWKEAPESTTQSVVVGGGGGGEGSVGSARGSGKIFSPLALLGNRALTPEFKKRMSTPRRDGQHHGDKRTVTRAAYVFVQPPDDPSTLTVLWGPPGEVPVAGFAAAPERLPEAFTGSTSCLLHARQVGLQAASGQQGAHNFVVSPLSFHAALALVATGARGETQRELLRFLQQRRGGWRLGRDRQGRRGGQQRRAGGGWLGWCGRDRARADPAGGGDGAGARRSWGARPGRGGKRRGWRPSQGGGEGVGGWEAAQGSAGGWAGEGGWAGKKFWLYTILETLTLE

SEQ ID NO: 61384 - protein, 173 aa, Zea mays
  Coding DNA Sequence Number=SeqID_19605
MTKVDASLKVVEVSIPETKVMKDIPSSFQHVRININDIYNTMVPSVPQKGTTIHAEIPGALMAEKGSLIQVDKVYELKRFHIAPSRNYFKLLTMIWYLQTRVKSIYDEKSMIVTKVELLRSYVQRSFDKMAEKGTDLKGKRLSSPHRIVYKLIINVKGMNVNSHRLRPVPINR

SEQ ID NO: 61385 - protein, 146 aa, Zea mays
  Coding DNA Sequence Number=SeqID_19606
MAEKGTDLKGKRLSSPHRIVYKLIINVKGMNCFFTNYTNVLRIMTEIRPLHPVGFHNSNIIRDIFLKDINNVSSKVTLWGQQASIFSVDDICTKNDNKPVVILFIGCLAKRFKGQPYISGTEHVYGTSTQTFLKHKCITTGHNLVR

SEQ ID NO: 61386 - protein, 149 aa, Zea mays
  Coding DNA Sequence Number=SeqID_19607
MAGWTVDTALAGGRTKRGGGGERAVTHGKARELPLGSAAAGDTVASRERRPRGGGTRSGMEHGHGSGVPAKPYPLLLAPTFWALTVSGKNPQGSSWMPEASNMLADDREMAEKEVSKVGAEEMEEQQQEGEAEEVDVKLQHCRHHRCRT

SEQ ID NO: 61387 - protein, 52 aa, Zea mays
  Coding DNA Sequence Number=SeqID_19608
MAPRTVPVRHRCANGAPPGKASAADQPGPTWQRVHRTVRCTPDSPVPQGQKH

SEQ ID NO: 61388 - protein, 234 aa, Zea mays
  Coding DNA Sequence Number=SeqID_19609
  Homolog annotation: Hit_ID=Q84JF4; Match level="QueryCoverage=21%, HitCoverage=8%, E-value=1e-10, Identity=60%"; Hit description =Putative amino acid acetyltransferase
MPPPRESSPSPKISPSQGRCPKIECAEIAERPDRGSESAWDRRASTRNPLAPERKGRGADSGAWEETRPRPHQLRWVLLSFVAACAFVPSPSTVVRASIDEEALATSAALELRQRGVAGGLCDGAFEQYVAKRHSQGPSLPRSCSTRPRSLADTEIQPQQLLAKLLEGTIFGIRAWPDLELANGIDYGFTGEVTKIDVSRIRKRLDSDSIVVINNMGFSSSGDVLNCNVYIKIL

SEQ ID NO: 61389 - protein, 384 aa, Zea mays
  Coding DNA Sequence Number=SeqID_19610
  Gene Ontology: Mol. function=protein serine/threonine kinase activity; Cellular component=membrane; Biological process=protein amino acid phosphorylation
  Homolog annotation: Hit_ID=Q9ASK4; Match level="QueryCoverage=99%, HitCoverage=56%, E-value=1e-161, Identity=71%"; Hit description =Putative LRR receptor-like protein kinase
  Pfam annotation: Domain name=Pkinase; Domain location=54-284; Score =61.7; E_value=2.5e-15; Accession=PF00069.15; Description=Protein kinase domain
  Pfam annotation: Domain name=Pkinase_Tyr; Domain location=54-292; Score=60.2; E_value=3.7e-16; Accession=PF07714.7; Description =Protein tyrosine kinase
  Pfam module annotation: Pfam domain module=Pkinase::Pkinase_Tyr; Domain location=54-284::54-292
  Subcellular localization annotation: CTP_CleavageSite=21; ConfidenceScore=5.31e-01
MPSPASTPTQVLGYSAKTNFSAGSPESKDSMPEFSMSNCRFFTYEELYQITNGFSSQNLLGEGGFGSVYKGCLADGREVAVKKLKDGGGQGEREFHAEVDIISRVHHRHLVSLVGYCISDDQRLLVYDFVPNDTLHYHLHGQPRIIHRDIKSSNILLDNNFEALVADFGLARYLAPEYASSGKLTERSDVFSFGVVLLELITGRKPVDASKPLGDESLVEWHSYLQARPLLTQALETGNAGELVDARLNKNYNEVEMFRMIEAAAACIRHSASRRPRMSQVYKDKRRAREHLIRVPDTDQNLTFSPPPLASSQVVRVLDSLADVDLTNGVQPGKSEMFNVANTAEIRLFQRMAFGSQDFTTDFSQSSWNNSQSRGLDASGSRPL

SEQ ID NO: 61390 - protein, 450 aa, Zea mays
  Coding DNA Sequence Number=SeqID_19611
  Gene Ontology: Mol. function=transferase activity; Cellular component= peroxisome; Biological process=isoprenoid biosynthetic process
  Homolog annotation: Hit_ID=Q9ASK5; Match level="QueryCoverage=94%, HitCoverage=97%, E-value=1e-164, Identity=71%"; Hit description =Putative acetoacetyl-coenzyme A thiolase
  Pfam annotation: Domain name=Thiolase_C; Domain location=323-426; Score=119.4; E_value=1e-32; Accession=PF02803.8; Description =Thiolase, C-terminal domain
  Pfam annotation: Domain name=Thiolase_N; Domain location=19-316; Score=380.4; E_value=2.7e-111; Accession=PF00108.13; Description =Thiolase, N-terminal domain
  Pfam annotation: Domain name=ketoacyl-synt; Domain location=20-200; Score=-97.1; E_value=0.044; Accession=PF00109.16; Description=Beta -ketoacyl synthase, N-terminal domain
  Pfam module annotation: Pfam domain module=Thiolase_C::Thiolase _N::ketoacyl-synt; Domain location=323-426::19-316::20-200
  Subcellular localization annotation: CTP_CleavageSite=43; ConfidenceScore=5.16e-01
MASSSSAATTSGDSQGLKARDACIVGVARTPIGALLGSLSSLPATKLGSIAIQGTYLSRHSLGSDVFGRISNNPSTNCRNTCGPSQIPGALKRAKVDPALVQEVFMGNVLSANLGQAPARQAALGAGLPNSVPCTTVNKVCSSGMKAVMFAAQSIQLGINDVVVAGGMESMSNAPKYVAEARRGSRFGHDVLVDGMLKDGLWDVYNDFPMGMCAELCSDQHSISREEQDSYAILSNERGIAAQDSGAFSWEIVPVEISSGRGKPPVVVDKDESLAKFDPVKLKKLGPTFKTNGSVTAGNSSSISDGAAAIVLVSGEKAKNLGLEVIARITGYADAAQAPELFTTAPALAIPKAISNAALQTSQIDYYEGKLNLSGGAVSLGHPIGCSGARIIVTLLGQILRQKNGKFGVAGVCNGGGGASALVLELIGSDMMQATLFAYPFIIVKLVRAN

SEQ ID NO: 61391 - protein, 130 aa, Zea mays
  Coding DNA Sequence Number=SeqID_19612
  Gene Ontology: Cellular component=nucleus; Biological process =regulation of transcription, DNA-dependent
  Homolog annotation: Hit_ID=Q1SQF4; Match level="QueryCoverage=70%, HitCoverage=19%, E-value=3e-12, Identity=41%"; Hit description =Paired amphipathic helix
  Pfam annotation: Domain name=PAH; Domain location=49-95; Score=53.2; E_value=9e-13; Accession=PF02671.11; Description=Paired amphipathic helix repeat
MTYSSFSSDRPDADGGGAKNPPGPSPSPSVEDAMSFVQMVKEAFKERQPDKYGLFLRVMEDFRNQRLDIAEVASTAKALFQDNPDLALRFNVFLPKGHQIQLGLDELAAYLVRDINLGADNNDDDSDGGQ

SEQ ID NO: 61392 - protein, 128 aa, Zea mays
  Coding DNA Sequence Number=SeqID_19613
  Subcellular localization annotation: CTP_CleavageSite=44; ConfidenceScore=5.04e-01
MDVSTVAIQQLRRQPVAPRGASSWLARATTTLVDGRASESTPPKAKIKECAFLTALSNLDHDSNDAASSSSEEETDRRVEDKMNGLCFLVDTAGSLCTSMAFGDDAVGDDSQDIGDDSTSEDGGLENI

SEQ ID NO: 61393 - protein, 100 aa, Zea mays
  Coding DNA Sequence Number=SeqID_19614
MAMATTRLAADEPQPKGEAGLLGGTIDRTLRLLLRWSWDCEGDGLMGGAVGCSRAPVGQCLPGCGTWGTATARAHEAAKQRLEHERAHTRPGIGSERNEN

SEQ ID NO: 61394 - protein, 113 aa, Zea mays
  Coding DNA Sequence Number=SeqID_19615
MAAPWPDYTRPTNPTTTLQSAICGVRGDAVVVASSWRNYRGDRRDAARKPYTQVGPPVIRQSWFSVRRSASPGEAPRIVREVGDDVRPPRGNDTVRGADRWDCRVGPCAGESA

SEQ ID NO: 61395 - protein, 399 aa, Zea mays
  Coding DNA Sequence Number=SeqID_19616
  Gene Ontology: Mol. function=transferase activity, transferring hexosyl groups; Biological process=carbohydrate metabolic process
  Homolog annotation: Hit_ID=Q6UTZ2; Match level="QueryCoverage=100%, HitCoverage=78%, E-value=1e-124, Identity=58%"; Hit description =Putative monogalactosyldiacylglycerol synthase
  Pfam annotation: Domain name=MGDG_synth; Domain location=76-292; Score=169.5; E_value=8.2e-48; Accession=PF06925.2; Description =Monogalactosyldiacylglycerol (MGDG) syntha
MVISVPAARRSTSVRDAVLGGGGRQLYQPLRCAFYDGLAAALSESEEPSDSDAAAPRPRWLQAAGGEERADPDERHRAAATAPPPRPCATPFRIEFGDAYKVDVLGLGPGAQVFVTDLGKEYGGWPLNDMERSYKFMIRHARLWKVAFHGTSPRWVHGVYLAALAYLYAKYVGASYFGRRATTVALPLNEYIYACSEVVAGITKYEPDMIISVHPLMQHIPLWVLKWQQSLRQHHPKAVVPFVTVVTDLNTCHPTWFHHGVTRCYCPSAEVASRALLRGLSPSQVRVFGLPIRPSFCRAVLDKDEVRKELGLDPQLPAVLLMGGGEGIGPVEETARALGEELYDRRRRRRVGQVVVVCGRNRALRSTLQSLRWKVPVKIRGFETQMEKWMAACDCIITK

SEQ ID NO: 61396 - protein, 375 aa, Zea mays
  Coding DNA Sequence Number=SeqID_19617
  Gene Ontology: Mol. function=transferase activity; Biological process= D-ribose metabolic process
  Homolog annotation: Hit_ID=Q6Z1P3; Match level="QueryCoverage=96%, HitCoverage=90%, E-value=1e-129, Identity=71%"; Hit description=PfkB type carbohydrate kinase protein family-like
  Pfam annotation: Domain name=PfkB; Domain location=9-343; Score= -61.4; E_value=0.0024; Accession=PF00294.14; Description=pfkB family carbohydrate kinase
MASASGSPNPVVLGCGGISVDYLAAVASFPNPDDKIRSLALKVQGGGNTGNALTAAARLGLRPRIISKVANDAQGRSILSELQTDGVDTSYILVRITIPQRFSDSHSGAKIVVLKNAASIHFFSQVAENGNSPFTYIIVDEQTKTRTCIHTPGSPPMVPEELTKANLSSALDGVDIVYFDVRLHDIALLVAEEASQRKIPILIDAERKREGLDELLNFASYVVCSAKFPQAWTGASSIPVALVSMLSRLPNIKFVIVTLGEKGCLMLERSSTDASEAGEIDAEALFESLEKSIDQSSTIPKCVASKSNFENKRGWSKLDKWQVYAPACHRRGCYLLLHEWLVVVAEVWGLEPAFPIAQTHAWLAIDPNSEGLHPP

SEQ ID NO: 61397 - protein, 1109 aa, Zea mays
  Coding DNA Sequence Number=SeqID_19618
  Gene Ontology: Mol. function=protein serine/threonine kinase activity; Cellular component=integral to membrane; Biological process=protein amino acid phosphorylation
  Homolog annotation: Hit_ID=Q8SB69; Match level="QueryCoverage=87%, HitCoverage=92%, E-value=0.0, Identity=46%"; Hit description =Putative receptor-like protein kinase
  Pfam annotation: Domain name=LRRNT_2; Domain location=29-77; Score =19.4; E_value=0.0082; Accession=PF08263.3; Description=Leucine rich repeat N-terminal domain
  Pfam annotation: Domain name=LRR_1; Domain location=108-130; Score =7.5; E_value=11; Accession=PF00560.23; Description=Leucine Rich Repeat
  Pfam annotation: Domain name=LRR_1; Domain location=132-154; Score =14.7; E_value=0.33; Accession=PF00560.23; Description=Leucine Rich Repeat
  Pfam annotation: Domain name=LRR_1; Domain location=156-177; Score =9.4; E_value=4.9; Accession=PF00560.23; Description=Leucine Rich Repeat
  Pfam annotation: Domain name=LRR_1; Domain location=193-215; Score =13.6; E_value=0.74; Accession=PF00560.23; Description=Leucine Rich Repeat
  Pfam annotation: Domain name=LRR_1; Domain location=217-239; Score =8.1; E_value=8.8; Accession=PF00560.23; Description=Leucine Rich Repeat
  Pfam annotation: Domain name=LRR_1; Domain location=241-263; Score =4.0; E_value=51; Accession=PF00560.23; Description=Leucine Rich Repeat
  Pfam annotation: Domain name=LRR_1; Domain location=265-287; Score =16.9; E_value=0.076; Accession=PF00560.23; Description=Leucine Rich Repeat
  Pfam annotation: Domain name=LRR_1; Domain location=289-311; Score =7.4; E_value=12; Accession=PF00560.23; Description=Leucine Rich Repeat
  Pfam annotation: Domain name=LRR_1; Domain location=313-335; Score =18.2; E_value=0.03; Accession=PF00560.23; Description=Leucine Rich Repeat
  Pfam annotation: Domain name=LRR_1; Domain location=337-359; Score =9.9; E_value=4.1; Accession=PF00560.23; Description=Leucine Rich Repeat
  Pfam annotation: Domain name=LRR_1; Domain location=361-383; Score =12.9; E_value=1.1; Accession=PF00560.23; Description=Leucine Rich Repeat
  Pfam annotation: Domain name=LRR_1; Domain location=385-407; Score =14.0; E_value=0.53; Accession=PF00560.23; Description=Leucine Rich Repeat
  Pfam annotation: Domain name=LRR_1; Domain location=411-430; Score =3.6; E_value=60; Accession=PF00560.23; Description=Leucine Rich Repeat
  Pfam annotation: Domain name=LRR_1; Domain location=435-457; Score =8.6; E_value=7.1; Accession=PF00560.23; Description=Leucine Rich Repeat
  Pfam annotation: Domain name=LRR_1; Domain location=459-478; Score =0.7; E_value=2.1e+02; Accession=PF00560.23; Description=Leucine Rich Repeat
  Pfam annotation: Domain name=LRR_1; Domain location=507-529; Score =21.0; E_value=0.0041; Accession=PF00560.23; Description=Leucine Rich Repeat
  Pfam annotation: Domain name=LRR_1; Domain location=531-553; Score =11.8; E_value=1.8; Accession=PF00560.23; Description=Leucine Rich Repeat
  Pfam annotation: Domain name=LRR_1; Domain location=555-577; Score =12.3; E_value=1.4; Accession=PF00560.23; Description=Leucine Rich Repeat
  Pfam annotation: Domain name=LRR_1; Domain location=579-601; Score =14.6; E_value=0.37; Accession=PF00560.23; Description=Leucine Rich Repeat
  Pfam annotation: Domain name=LRR_1; Domain location=603-625; Score =12.0; E_value=1.6; Accession=PF00560.23; Description=Leucine Rich Repeat
  Pfam annotation: Domain name=LRR_1; Domain location=628-650; Score =4.0; E_value=51; Accession=PF00560.23; Description=Leucine Rich Repeat
  Pfam annotation: Domain name=LRR_1; Domain location=652-674; Score =16.5; E_value=0.096; Accession=PF00560.23; Description=Leucine Rich Repeat
  Pfam annotation: Domain name=LRR_1; Domain location=676-699; Score =5.5; E_value=27; Accession=PF00560.23; Description=Leucine Rich Repeat
  Pfam annotation: Domain name=Pkinase; Domain location=798-1101; Score= 117.5; E_value=3.8e-32; Accession=PF00069.15; Description=Protein kinase domain
  Pfam annotation: Domain name=Pkinase_Tyr; Domain location=798-1101; Score=6.3; E_value=7.4e-13; Accession=PF07714.7; Description=Protein tyrosine kinase
  Pfam module annotation: Pfam domain module=LRRNT_2::LRR_1::LRR_1::LRR_ 1::LRR_1::LRR_1::LRR_1::LRR_1::LRR_1::LRR_1::LRR_1::LRR_1::LRR_1: LRR_
  Pfam module annotation: Pfam domain module=Pkinase::Pkinase_Tyr; Domain location=29-77::108-130::132-154::156-177::193-215::217 -239::241-263::265-287::289-311::313-335::337-359::361-383::385 -407::411-430::435-457::...
  Pfam module annotation: Domain location=459-478::507-529::531 -553::555-577::579-601::603-625::628-650::652-674::676-699::798 -1101::798-1101
  Subcellular localization annotation: CTP_CleavageSite=75; ConfidenceScore=5.30e-01
MSCAAALSLLVALAASVAPAAASQGAGNGDGDAAVLRAFLVSLPPSSQRILLPSWNATNSSSSTGSSHCAFRGVECTAAGAVAAVNLSGLALSGALAASAPGLCALPALAALDLSLNSFTGAVPAALAACSALATLDLSNNSLSGAVPRELAALPALTDLRLSGNGLTGPVPEFPARCGLRGALPRSLGNCVNLTVLFLSSNRIGGALPDVFGSLPMLQKLYLDSNLFAGALPESVGELGSLERFVASTNCFNGSIPASIGRCGSLTTLLLHNNQFTGPIPASIGNLSRLQWLTIKDTFVTGAIPPEIGRCQELVILDLQNNNLTGTIPPELAELKKLRSLSLYRNMLHGPVPAALWQMPELEKLALYNNSLSGEIPEEINHMRNLRELLLAFNNFTGELPQGLGSNTTHGLVWVDVMGNHFHGAIPPGLCTGGQLAILDLALNRFSGGIPSEIIKCQSLWRARLANNLFSGSFPSDLGINTGWSYVELGGNRFDGRIPSVLGSWRNLTVLDLSRNSFSGPIPPELGALAHLGDLNLSSNKLSGRIPHELGNCRGLVRLDLENNLLNGSIPAEIVSLGSLQHLVLGGNKLSGEIPDAFTSTQGLLELQLGGNSLEGAVPWSLGKLQFISQIINMSSNMLSGTIPSSLGNLRMLEMLDLSENSLSGPIPSQLSNMVSLSAANVSFNRLSGPLPVGWANKLPADGFLGNPQLCVRPEDAACSKNQYRSRTRRNTRIIVALLLSSLAVMASGLCAVRYAVKTSRRRLLAKRVSVRGLDATTTEELPEDLSYDDIIRATDNWSEKYVIGRGRHGTVYRTELAPGRRWAVKTVDLSRVKFPIEMKILNMVRHRNIVKMEGYCIRGNFGVILSEYMPRGTLFELLHGRKPQVVALDWKARHQIALGAAQGLSYLHHDCVPMVVHRDVKSSNILMDADLVPKIADFGMGKIVGDEDADATVSVVVGTLGYIAPGNSRNCRIHSHSDAVCHLLLCQLTCVVGKPAEHGYNTRLTEKSDVYSYGVVLLELLCRRMPVDPAFGDGVDIVAWMRLNLKHADCCSVMTFLDEEIMYWPEDEKAKALDVLDMAISCTQVAFESRPSMREVVGALMRIDDQYI

SEQ ID NO: 61398 - protein, 526 aa, Zea mays
  Coding DNA Sequence Number=SeqID_19619
  Gene Ontology: Mol. function=oxidoreductase activity; Cellular component=integral to membrane; Biological process=electron transport
  Homolog annotation: Hit_ID=Q8W352; Match level="QueryCoverage=94%, HitCoverage=93%, E-value=0.0, Identity=70%"; Hit description =Putative cytochrome P450
  Pfam annotation: Domain name=p450; Domain location=34-522; Score =288.4; E_value=1.4e-83; Accession=PF00067.12; Description=Cytochrome P450
MELTWRLLAALVLPLSFLLLYHAKNGGKASRRLPPGPAAVPVIGNLFWVRLQGIEILHAIRRFHARHGPLLTLRIGSHLEVTVSDRRLAHLALVERGAALADRPASASRDLLGLNASTISTSSYGPLWRMFRRNFVAEVANPARLRLFAPARAAVLAELTDKLRHQQEADGTIVQTFQYAMFRLLVAMCFGERLDERAVRDIAAAQRDLLLYSSTKMRVFAFLPAVTRLLFRGRLQAMVAMRQRLKDMYMPLIDARRERKNKNPGVGAAADRDAVEDEATQTTLPHSYVDALLDIRLNEDDGRELTDDEMIALCSEFLNGGTDTTSTALQWIMAELVKNPGIQDKLHDEIKATMATSGGSDGHVSEEDVHRMPYLKAVVLEGLRRHPPGHMVLPHAPAEDMELGGYMIPKGTMVNFLVVDMGMDQRAWERPTEFAPERFLPGGDGESVDITGTREIRMMPFGAGRRICPGLNVATLHLEFFVANLVREFEWRQLEGETVDVEGEKAEFTVVMAKPLRARLVPRASD

SEQ ID NO: 61399 - protein, 60 aa, Zea mays
  Coding DNA Sequence Number=SeqID_19620
MSVGLWCAGLEHTGWWSMAEVKVMGARADGPRMVKDKCLVLADGLEQPGEVWSTGAVIND

SEQ ID NO: 61400 - protein, 132 aa, Zea mays
  Coding DNA Sequence Number=SeqID_19621
  Homolog annotation: Hit_ID=Q6QP51; Match level="QueryCoverage=36%, HitCoverage=22%, E-value=3e-09, Identity=63%"; Hit description =Putative growth-regulating factor 1
MAMAGEPKQRSRRQPSSCPLMGQRENPLPRREDGAPVFRSSNGSRTRNGCPGPGKGILRKGSFSVRETGPEPPLLIKGLKAGPSEGFNSRLRALGLRAHYWSEVRRPAPRKGSTAASGHSGSVPNTDQGFVG

SEQ ID NO: 61401 - protein, 302 aa, Zea mays
  Coding DNA Sequence Number=SeqID_19622
  Gene Ontology: Mol. function=translation initiation factor activity; Cellular component=nucleus; Biological process=positive regulation of transcription
  Homolog annotation: Hit_ID=Q8LMN8; Match level="QueryCoverage=55%, HitCoverage=31%, E-value=3e-55, Identity=70%"; Hit description =Putative transcription initiation factor
  Pfam annotation: Domain name=TFIIF_alpha; Domain location=5-299; Score=-86.9; E_value=2.8e-05; Accession=PF05793.3; Description =Transcription initiation factor IIF,
MKGDTHAVGRRVDRCGAKDRRQGSGVRGRAKAGGGGGDIGSRRKGASREGRRRAARAGEFFSPDWFDFVFSLREDDEENEEEGGLSKSGKELKKLLGRAAGLNESDADEDEEDEDVLILLEIEYFNISFCTKVVDQEDDSSPVLAPKQKDQVKDEPVDSSPSKPAPSGHARGTPPASKSKQKRKSGVDDAKTSSGAASKKAKVELDAKASGLKEEASSLAKPASKTSAASKSGTSVSPVTEDEIRSVLLAVAPVTTQDLVSRFKSRLRGAEDKNAFAEILKKISKIQKTNGHNYVVLRDDKK

SEQ ID NO: 61402 - protein, 144 aa, Zea mays
  Coding DNA Sequence Number=SeqID_19623
MELLNKSYPTKEKTLKGMLVIRESRAILSIVKTFCKNRVLRKVIKFKEVADRLQKSPRGSIPLQTQVLDDVERDRAPGAKVNRGGAVARLGHAAQGRATAVHRRAYLLKPQSRGKYGGDSSEWCPAHGVMIFYPKRYLQARCTN

SEQ ID NO: 61403 - protein, 51 aa, Zea mays
  Coding DNA Sequence Number=SeqID_19624
MAFMSKKCIVDLKKKEKELQAMEAELNKREREKSVVEVTGTWVTLPMLTLK

SEQ ID NO: 61404 - protein, 111 aa, Zea mays
  Coding DNA Sequence Number=SeqID_19625
  Subcellular localization annotation: CTP_CleavageSite=60; ConfidenceScore=5.34e-01
MCLASQQHLAAALAQPFVPHHRCVLGASIAVLHLADCSQSQRTPSSTAFVTSVMRPCLAVVSSGKSFTGDPLSRPLSFRPLRSAYPPQSASIASSARLALAPRPVAAAVER

SEQ ID NO: 61405 - protein, 134 aa, Zea mays
  Coding DNA Sequence Number=SeqID_19626
MTSGARSRHEGAAPSVGHAGKEATLVARQNAAYGATQQGGVRRRGARDAWPGRISRPSWLATPGRWGLAACARELDGLAASTTARRRQDTNEEAKRDTAQGELAGMKWEDAMELTCTAATSSSGEARASNTVLI

SEQ ID NO: 61406 - protein, 672 aa, Zea mays
  Coding DNA Sequence Number=SeqID_19627
  Gene Ontology: Cellular component=nucleus; Biological process =regulation of progression through cell cycle
  Homolog annotation: Hit_ID=Q6ZIX9; Match level="QueryCoverage=99%, HitCoverage=72%, E-value=1e-140, Identity=72%"; Hit description =Cyclin-like protein
MAKLSREATTFRRILECLFRYFGNNSSWLSENGLALCVLLDMQLLVESSGQNMHLMLSLLIKHIEHKTMLKQPDMQLSIVEVAATLAEQSSAIASPATVGAISDLVRHLKRTFHITLGSKDMELVKWNEKFRKGIDECLVQLSKKVSDAGPVLDMMAVMLENIASTPVVARSTAAAVYRTAQIIASVPNLQYQNKVFPEALFHQLLLTMIHPDHEARVAAHRIFAIVLVPSSVSPSIQASPSGQESVLVKLSARQITLLLSSIWAQATSPENTPVNYEAIAHTYSLLLLFSGSKASTFEALTQSFQVAFSLRSYALTEADSLQPSRRRSLFTLSTAMIIFSSRAYNVLPLIPICKQMINDRAADPFLRLVDESKLTAVKDCSNDPSKIYGSPEDNANALKSLSEIELSESQSRECIVSTIMNNIANMMDVMLTFLAASCFRCLTEFHAAADDFPYLQAELHNVRSQLLSDFTPDDMCPTSTQFFEMHVDNPSGFHETGHHEEGLLIDLGNDHDAFGEASEGAEARTSSVPASDLLSIDQLLETVGAEPAPQAGVVSADIGFKDMTSHCEALTIGKQQKMSAFMSFQQSVQAAGVPGSQPNQTTELDLFQDLQLPQAGAQSTNPFSDESVQGYPQYMNGPNGDNAQPGQDFQQQSLKLPAASPYDNFLRAAGC

SEQ ID NO: 61407 - protein, 257 aa, Zea mays
  Coding DNA Sequence Number=SeqID_19628
  Gene Ontology: Mol. function=catalytic activity; Cellular component =intracellular; Biological process=metabolic process
  Homolog annotation: Hit_ID=Q6K1V9; Match level="QueryCoverage=83%, HitCoverage=20%, E-value=1e-54, Identity=62%"; Hit description =Ribosomal protein-like
MSGQSRLVKQVLDSSSSDDEEEFFFNAAHLIIDEDQFDEESRRRGSVHGRQTVRRNREEGHVRLYQDYLADYQTYGPSYFRRRFRMRRTLFIRILNAVEHHDEYFVQKRNAAGKLGLSSLQKVTAALRMLTYGMAADATDDYIRIGESTAIESLRRFVTAIVQVFGDEYLREPDEYDTARLLAVNESRGFPGMLGSIDCMHRRWKNCPSALQGATTSKSQTHARYDFFLCTLGHAQDDFFYCTGGSIVDMCMNPQLY

SEQ ID NO: 61408 - protein, 65 aa, Zea mays
  Coding DNA Sequence Number=SeqID_19629
MAVHCPWLQLNIRRRSILLALVHIRFKLFALSPAAAAVPGFSQLAGSYERPPPMLCCQVTTKLVY

SEQ ID NO: 61409 - protein, 165 aa, Zea mays
  Coding DNA Sequence Number=SeqID_19630
MLWKVGRRSGRRAMDEATLQDVGRASGGVWWVVVPWRMPLRAAVALMELREAYGGWQRPDGWRYRRRRLQLRRTDEPPAGGRGIDERVRARLLHGGEGGDDEQLRRGTKSGMGRERARAAGDGGAAYGVRESGRALVGRESETAWSGDVSINRRMSDDVSGSSGT

SEQ ID NO: 61410 - protein, 43 aa, Zea mays
  Coding DNA Sequence Number=SeqID_19631
MALRRGGPGLPSGRGLGGTTSAECKTGILAELTVMSSSGLSHD

SEQ ID NO: 61411 - protein, 88 aa, Zea mays
  Coding DNA Sequence Number=SeqID_19632
MAIGEAVCRWAHRTVPTTVGAVAVAPHGTPDSPVLHWTERLGRKNKTKVENTNGTSDDGENDMKVNGFVCKDPMAVNADDFFKAAKLD

SEQ ID NO: 61412 - protein, 152 aa, Zea mays
  Coding DNA Sequence Number=SeqID_19633
  Subcellular localization annotation: CTP_CleavageSite=57; ConfidenceScore=5.23e-01
MTPSRSFPLRGGVGTTWGLAGSRVAWPGAFHPPTRRLPCGRPPRLRGSALALPPQISSRHPWHPSAEIAAHPLSANLAWDILCFAPGLSSPSTEIVVAPYTSPLASSVAIPAPYASVVSTVEPPLFSSTSSPTTTPHARVMLTVQDQVPICL

SEQ ID NO: 61413 - protein, 77 aa, Zea mays
  Coding DNA Sequence Number=SeqID_19634
MRSSSPRPIFTKTMVAKTLHGTLDRPPDHLPSKACPRAAAKLDALGQMSESCVDASGREFERTRSARYSEMTQMKGN

SEQ ID NO: 61414 - protein, 242 aa, Zea mays
  Coding DNA Sequence Number=SeqID_19635
  Gene Ontology: Mol. function=protein serine/threonine kinase activity; Cellular component=chromosome, pericentric region; Biological process=protein amino acid phosphorylation
  Homolog annotation: Hit_ID=Q7Y0C4; Match level="QueryCoverage=54%, HitCoverage=47%, E-value=6e-64, Identity=87%"; Hit description =Putative aurora-related kinase
  Pfam annotation: Domain name=Pkinase; Domain location=30-222; Score= -9.1; E_value=5.1e-08; Accession=PF00069.15; Description=Protein kinase domain
  Pfam annotation: Domain name=Pkinase_Tyr; Domain location=1-220; Score=-163.1; E_value=0.018; Accession=PF07714.7; Description =Protein tyrosine kinase
  Pfam module annotation: Pfam domain module=Pkinase::Pkinase_Tyr; Domain location=30-222::1-220
  Subcellular localization annotation: CTP_CleavageSite=36; ConfidenceScore=5.11e-01
MAWAAMGLSARTTGLRARTSHYRATSGPIGSRKPVVAPGGVGQRRPDGAEGVATCRHGGGGGSGPRSARPLAWKWPGGGRRVGRRAAREGSRVGASGSAVCTLFEGRLKIADFGWAARSNAKRHTLCGTIDYLAPEMVEKKAHDHAVDNWTLGILCYEFLYGSPPFEADEQDDTLRRIVRVDLAFPSSPCVSSEAKDLISKLLVKDSSKRLCLEDIMKHPWIKKNADPSGSCIKQKDVTRSK

SEQ ID NO: 61415 - protein, 288 aa, Zea mays
  Coding DNA Sequence Number=SeqID_19636
  Gene Ontology: Mol. function=protein serine/threonine kinase activity; Cellular component=cytoplasm; Biological process=protein amino acid phosphorylation
  Homolog annotation: Hit_ID=Q7Y0C4; Match level="QueryCoverage=45%, HitCoverage=47%, E-value=8e-64, Identity=87%"; Hit description =Putative aurora-related kinase
  Pfam annotation: Domain name=Pkinase; Domain location=30-222; Score= -9.1; E_value=5.1e-08; Accession=PF00069.15; Description=Protein kinase domain
  Pfam annotation: Domain name=Pkinase_Tyr; Domain location=1-220; Score=-163.1; E_value=0.018; Accession=PF07714.7; Description =Protein tyrosine kinase
  Pfam module annotation: Pfam domain module=Pkinase::Pkinase_Tyr; Domain location=30-222::1-220
  Subcellular localization annotation: CTP_CleavageSite=36; ConfidenceScore=5.11e-01
MAWAAMGLSARTTGLRARTSHYRATSGPIGSRKPVVAPGGVGQRRPDGAEGVATCRHGGGGGSGPRSARPLAWKWPGGGRRVGRRAAREGSRVGASGSAVCTLFEGRLKIADFGWAARSNAKRHTLCGTIDYLAPEMVEKKAHDHAVDNWTLGILCYEFLYGSPPFEADEQDDTLRRIVRVDLAFPSSPCVSSEAKDLISKLLVKDSSKRLCLEDIMKHPWIKKNADPSGSCIKQKDVTRSKRMEVVLSSSKVGTNIVQNLHTAAKPGDITCYSNLKNPDSDPNYTNL

SEQ ID NO: 61416 - protein, 124 aa, Zea mays
  Coding DNA Sequence Number=SeqID_19637
MATQVSLVMWRAVFSALGLLVVATLVYTLATDGSLFHPELVTPGMFLTLIITGISMGRNGAATFGRSTTCCGPTCKPAPVVSLAIVVFPLVPVEARFSSIASSAVQVSVPVSSPVMISQPMEQD

SEQ ID NO: 61417 - protein, 219 aa, Zea mays
  Coding DNA Sequence Number=SeqID_19638
  Gene Ontology: Mol. function=protein serine/threonine kinase activity; Cellular component=chromosome, pericentric region; Biological process=protein amino acid phosphorylation
  Homolog annotation: Hit_ID=Q7Y0C4; Match level="QueryCoverage=61%, HitCoverage=48%, E-value=3e-63, Identity=84%"; Hit description =Putative aurora-related kinase
  Pfam annotation: Domain name=Pkinase; Domain location=1-149; Score= -22.8; E_value=3.3e-07; Accession=PF00069.15; Description=Protein kinase domain
  Pfam annotation: Domain name=Pkinase_Tyr; Domain location=4-147; Score=-171.9; E_value=0.063; Accession=PF07714.7; Description =Protein tyrosine kinase
  Pfam module annotation: Pfam domain module=Pkinase::Pkinase_Tyr; Domain location=1-149::4-147
MSSTSPRHGLGSDGSFSAYHGTVRLGSLQGFRGRLKIADFGWAARSNAKRHTLCGTIDYLAPEMVEKRAHDHAVDNWTLGILCYEFLYGSPPFEADEQDDTLRRIVRVDLAFPSSPCVSSEAKDLISKLLVKDSSKRLCLEDIMKHPWIKKNADPSGSCIKQKDVTRSKRMEVVLSSSKVGTNIVQNLHTAAKPGHITCYSNLKIPDSDPNSEFVAPDV

SEQ ID NO: 61418 - protein, 136 aa, Zea mays
  Coding DNA Sequence Number=SeqID_19639
  Gene Ontology: Mol. function=serine-type peptidase activity; Cellular component=integral to membrane; Biological process=proteolysis
  Homolog annotation: Hit_ID=Q67UZ3; Match level="QueryCoverage=65%, HitCoverage=28%, E-value=1e-33, Identity=63%"; Hit description =Chloroplast thylakoidal processing peptidase-like protein
  Pfam annotation: Domain name=Peptidase_S24; Domain location=3-69; Score=28.3; E_value=2.8e-05; Accession=PF00717.13; Description =Peptidase family S24
MRSMFPTFDVGDRILAEKVSYIFREPEILDIVIFRAPPVLQTLGYNLGDVFIKRVVAKGGDIVETVPEGYVFVLGDNRNNNFDSHNWSIFPFPADKGYAEPLEVDERASMSDKDVSSLVLCDDMVFETYVKRKYKT

SEQ ID NO: 61419 - protein, 152 aa, Zea mays
  Coding DNA Sequence Number=SeqID_19640
  Gene Ontology: Mol. function=protein serine/threonine kinase activity; Cellular component=chromosome, pericentric region; Biological process=protein amino acid phosphorylation
  Homolog annotation: Hit_ID=Q7Y0C4; Match level="QueryCoverage=65%, HitCoverage=35%, E-value=8e-45, Identity=85%"; Hit description =Putative aurora-related kinase
MVEKKAHDHAVDNWTLGILCYEFLYGSPPFEADEQDDTLRRIVRVDLAFPSSPCVSSEAKDLISKLLVKDSSKRLCLEDIMKHPWIKKNADPSGSCIKQKDVTRSKRMEVVLSSSKVGTNIVQNLHTAAKPGDITCYSNLKNPDSDPNYTNL

SEQ ID NO: 61420 - protein, 190 aa, Zea mays
  Coding DNA Sequence Number=SeqID_19641
  Gene Ontology: Mol. function=protein serine/threonine kinase activity; Cellular component=chromosome, pericentric region; Biological process=protein amino acid phosphorylation
  Homolog annotation: Hit_ID=Q7Y0C4; Match level="QueryCoverage=69%, HitCoverage=51%, E-value=4e-44, Identity=66%"; Hit description =Putative aurora-related kinase
  Pfam annotation: Domain name=Pkinase; Domain location=4-176; Score= -39.1; E_value=3.1e-06; Accession=PF00069.15; Description=Protein kinase domain
  Pfam annotation: Domain name=Pkinase_Tyr; Domain location=5-176; Score=-147.8; E_value=0.0021; Accession=PF07714.7; Description =Protein tyrosine kinase
  Pfam module annotation: Pfam domain module=Pkinase::Pkinase_Tyr; Domain location=4-176::5-176
KGNLRAVTIQSGYVVALKVIYKAKLQKYHFHAHLRREIEIQQSLDHPNVLRLFTWFHDEERVVLVLEYAARGELYKYVASLAGALAYCHKKQVIHRDIKPENLLIDIECTEGGVARAEGGKATRSPCTKESSRGSCSVATDEGQRRTERCRGASCLAASRTVDDRRRLSWSNHTLLDVALGVKGSGDGCP

SEQ ID NO: 61421 - protein, 72 aa, Zea mays
  Coding DNA Sequence Number=SeqID_19642
MTSLSNVSRQALDKDIFAECISVSRVLLSTNAIVTESRTLPSAALDKGFFIECPTKSTWRSAEHSAKSQFPI

SEQ ID NO: 61422 - protein, 468 aa, Zea mays
  Coding DNA Sequence Number=SeqID_19643
  Gene Ontology: Mol. function=sequence-specific DNA binding; Cellular component=nucleus; Biological process=regulation of transcription
  Homolog annotation: Hit_ID=Q32SG4; Match level="QueryCoverage=79%, HitCoverage=96%, E-value=1e-151, Identity=75%"; Hit description=WRKY1
  Pfam annotation: Domain name=WRKY; Domain location=354-410; Score =117.9; E_value=2.9e-32; Accession=PF03106.6; Description=WRKY DNA -binding domain
MPPSMRLIIVGICCCVSAGLLISVFVLDANLGAGPSMEGMEEANRTAVESCHRVLALLSNPHGQLVPSKELVAATGEAVAKFGSLTAKLSNSNGDGLLQGHARVRKVKKPLHIFDSNLFLESSAVAAAAAPAKTPSPSPILGLQLFPRYHQFEGSSSKDPVRIPTQFPKRLLLEKPTAGMEGSTSQSPPIVQMVQPVSVAPPAGTPTPALPPAHLHFIQQQQSYQRFQLMQQMKIQSEMMKRSNLGDQGGSLSGGGGGGRKGVNLKFDSSNCTASSSRSFLSSLSMEGSLASLDGSRTSRPFQLLSGSQTASTPELGLVQRRRCAGREDGTGRKLRIRRSIKVPAISNKVADIPADEFSWRKYGQKPIKGSPHPRGYYKCSSVRGCPARKHVERCVDDPSMLIVTYEGPILWLQCDIEPQLYVCASDAARHGGCRLRLSACRIRAVAFVLGRLPFERPVCCGLRVATV

SEQ ID NO: 61423 - protein, 67 aa, Zea mays
  Coding DNA Sequence Number=SeqID_19644
MVSKYPRHTLAKFEIKPKSFDTIWLDLGLEFQLGNIPNFTSSYLANPRSNPLERCMGNKGELQKLVT

SEQ ID NO: 61424 - protein, 50 aa, Zea mays
  Coding DNA Sequence Number=SeqID_19645
MKEVALDVEVLLWMADDRVRFDHALQWHHRGRLVMPSSSASGREKKASDH

SEQ ID NO: 61425 - protein, 140 aa, Zea mays
  Coding DNA Sequence Number=SeqID_19646
  Gene Ontology: Cellular component=nucleolus
  Homolog annotation: Hit_ID=Q651Q2; Match level="QueryCoverage=98%, HitCoverage=98%, E-value=4e-29, Identity=50%"; Hit description =Putative auxin induced protein
  Pfam annotation: Domain name=Auxin_inducible; Domain location=1-96; Score=15.8; E_value=8e-07; Accession=PF02519.5; Description=Auxin responsive protein
  Subcellular localization annotation: CTP_CleavageSite=32; ConfidenceScore=5.11e-01
MVSAKRLVQMAKKWQRMAATARRRIALAPPAKGAAEGSSPPCSTSRVAVPLPYLDTAVFGVLLGMSREEFGFAGGDGRITVPCDAAVMEYVMCLLRRDASEEVVRAFLSSVVSRPCSHCGNGSLVQSTTGVRQQAAVSSF

SEQ ID NO: 61426 - protein, 722 aa, Zea mays
  Coding DNA Sequence Number=SeqID_19647
  Homolog annotation: Hit_ID=Q6Z3H8; Match level="QueryCoverage=70%, HitCoverage=42%, E-value=5e-24, Identity=49%"; Hit description =Putative bzip-related transcription factor
  Pfam annotation: Domain name=DUF630; Domain location=194-248; Score =45.2; E_value=2.2e-10; Accession=PF04783.3; Description=Protein of unknown function (DUF630)
  Pfam annotation: Domain name=Extensin_2; Domain location=73-539; Score=-136.8; E_value=0.059; Accession=PF04554.4; Description =Extensin-like region
  Pfam module annotation: Pfam domain module=DUF630::Extensin_2; Domain location=194-248::73-539
  Subcellular localization annotation: CTP_CleavageSite=16; ConfidenceScore=5.02e-01
MTRGMQSQLTRCRPVSFQAVGTGARVGCACAAWPYGQGFTHMPGQPPARPSVPASRPPGPPPVKSSPQCLSVAVALAAAWLAMIAALAVQPGRSPPLLRPRLVLFHLAVAVGTLYRPRPVDEQPPRGNPEAAQQGRIQASTPATGVNVRMLSPRPEKEKEDLRRAHRDEPLSAGTHAKRRRFSAEPPSLPPSPASKTEEEYAVQHCRARSELLALAIRQRYMLADAHHAYAESLRAVGALLHDFLRGVQSLPPPPPEPALRLPLQRKGDGLPAASPPPPAIASSSSAAKQVRIAPNDGHIQFSDDDSDSDDGHIKFHSDEEPDPARRRPDVVHSAGAPGPPPPQMGPPYSSGYAPPPYGPGYGYGYANGPGPGPGPDYGGIGMSSGGGGGYGQSYGGMGGGGSGGGAGYNDQSYGGMGSGGGAGGYDQGYGGMGGYGQSFFNINYARSQPPPPSISHEQRLQATNARVHYYSGNDELQPPPRVYGGGYSYPPQSSSSYNQYAYGGYYGGGSAPAPPADIPSSSREPAAAPPPPSPPRVSTWDFLNPFETYDSYYEQPTATAAPYSPSRSSKDVREEEGIPDLEDEDMEVVKEAYGDEKHPMKGYMGNGKATKEDGRSSTRDELPRKSKSSEASSSGSSLEHDVHVVEKSVVGEQVQHSEPQQHVAGLPPTGSDKIYIDDTEVVVEIRTQFERASQSASEVSKMLEVGKDAFPTRRVQVSKGW

SEQ ID NO: 61427 - protein, 523 aa, Zea mays
  Coding DNA Sequence Number=SeqID_19648
  Gene Ontology: Cellular component=mitochondrion
  Homolog annotation: Hit_ID=Q3LHL2; Match level="QueryCoverage=46%, HitCoverage=38%, E-value=6e-55, Identity=47%"; Hit description =Hypothetical protein PPS5
  Pfam annotation: Domain name=DUF292; Domain location=46-209; Score =180.9; E_value=3.1e-51; Accession=PF03398.5; Description=Eukaryotic protein of unknown function, DUF292
  Subcellular localization annotation: CTP_CleavageSite=43; ConfidenceScore=5.53e-01
MAAMMMATSESKSPARALRRLAGAAVAAVLLRRTFSASKCKTEARMATARMKLLRNRREAQVRQMRRDIAALLRDKQEDTARIRSHMEDKSFLDFSVRSALGTPVMFNPYVEHVIREQNFMAANEIIELFCELIVTRLPIIAKQKFVFNYHHLPKLICSHKECPADLKEGICSLIFAAPRCSELPELGRIRDIFEKKYGKDFVSAAVDLRPDAAVNNLLIEKLSIKKPSGQIKLKVLKDIAKEHQIDWDTAESEQELLKPPEELIKGPSTFLEASNMPVKNILTPYTVQPDPVNFSYRCSDDEYDDRGTMQFKDAASAARAAAESAERATSAAKAAADFVNNNNNNHPFDEDEDCKASTHEFTHTLKRQSMSNSSRSSLKEDANAFDEQKPHEGKTYSARRFSGKNHVEYDKDGYPADLDLKTRRRNCRAARKVHSEIKFDDSEGLCSESEGENDVEIQSVERPLPPKSELFSENRHSEDEEHDQDFPELPKTNLHSRVHPNMPLDYETLTARFEALKSGKLP

SEQ ID NO: 61428 - protein, 74 aa, Zea mays
  Coding DNA Sequence Number=SeqID_19649
MPYAAIPHGVMEIGSKLPVPAVMEMTLSDRIKPAQQPRQLARQLYRPFDPSISDASCNTAPAALVALSLAALPD

SEQ ID NO: 61429 - protein, 169 aa, Zea mays
  Coding DNA Sequence Number=SeqID_19650
  Gene Ontology: Mol. function=DNA binding
MVHIAEHRDETSEDFLMEEEAASSAPQSSGRPAPGAAAVRPRMAAHTSAGVPDSIGGCSRRGALRGQGVVAPPAKLHSLARASMRSPSVRAAPTKDLRAELDHRRAVEDAQVPPERPEDLRDELNRRRAGEDARISLGRVRERRRNLEGHNLEQDFAAAAPQAPGDARF

SEQ ID NO: 61430 - protein, 498 aa, Zea mays
  Coding DNA Sequence Number=SeqID_19651
  Gene Ontology: Mol. function=transferase activity, transferring hexosyl groups; Cellular component=cytoplasm; Biological process =metabolic process
  Homolog annotation: Hit_ID=Q69JH3; Match level="QueryCoverage=93%, HitCoverage=97%, E-value=1e-121, Identity=49%"; Hit description =Putative indole-3-acetate beta-glucosyltransferase
  Pfam annotation: Domain name=UDPGT; Domain location=26-494; Score= -63.0; E_value=1.9e-07; Accession=PF00201.9; Description=UDP -glucoronosyl and UDP-glucosyl transferase
  Subcellular localization annotation: CTP_CleavageSite=77; ConfidenceScore=5.56e-01
MGSTSTSATSSSSSSAASGPGGGGGAHVLLLPYPGAQGHTNPLLQFGRRLAYHGFRPTLVTSRYVLSTTPPPGEPFRVAAISDGFDGGGAAACPDIAEYYRQLEAVGSETLAELIRTEAAEGRPVRVVVYDPHLPWARWVAQAAGVPAVAFLSQPCSVDVIYGEVWAGRLPLPVVDGKELFARGLLGVDLGPDDVPPFAARPDWCPVFLRATVRQFEGLEDADDVLVNSFRDIEPTVREVTVPRVTTAGTAPVCCFAQEADYMSLTWRAKTIGPTLPSFYLDDDRFPLNKAYGFNLFSSSDSCLPWLDKQRPRSVVLVSYGTVSDYDENQLEELGNGLYSSGKPFIWVVRSNEEHKLSDELRDKCKERGLVVSWCPQLEVLAHKATGCFFTHCGWNSTLEAIVNGVPMVAVPHWADQPTISKYMESVWGLGVKVRKDEKGLVTRDEVARCIKDVMDGDRKDEYRMNANVWMKKAKEAAQYGGSSDKNIAEFVAKYSSS

SEQ ID NO: 61431 - protein, 304 aa, Zea mays
  Coding DNA Sequence Number=SeqID_19652
  Gene Ontology: Mol. function=cysteine-type endopeptidase activity; Cellular component=endoplasmic reticulum; Biological process =proteolysis
  Homolog annotation: Hit_ID=Q2TN87; Match level="QueryCoverage=99%, HitCoverage=98%, E-value=1e-92, Identity=51%"; Hit description =Putative cysteine protease
  Pfam annotation: Domain name=Inhibitor_I29; Domain location=41-98; Score=86.3; E_value=9.1e-23; Accession=PF08246.2; Description =Cathepsin propeptide inhibitor domain (
  Pfam annotation: Domain name=Peptidase_C1; Domain location=127-303; Score=276.9; E_value=3.9e-80; Accession=PF00112.13; Description =Papain family cysteine protease
  Pfam module annotation: Pfam domain module=Inhibitor_I29::Peptidase _C1; Domain location=41-98::127-303
MVSSKAFLLLLAVLIGCVCSFPSPVLAARELSDDAAMAERHERWMAEYGRVYKDAADKARRFEVFKDNFAFVESFNADKKNKFWLGVNQFADLTTEAFKANKGFKPISAEKAPTTGFKYENLSISALPTAVDWRTKGAVTPIKNQGQCEQELVDCDTHSMDEGCEGGWMDSAFEFVIKNGGLATESSYPYKAVDGKCKGGSKSAATIKGHEDVPPNNEAALMKARGQTFMLYSGGVMTGSCGTQLDHGIAAIGYGVESDGTKYWIMKNSWGTTWGEKGFLRMEKDISDKRGMCGLAMKPSYPTE

SEQ ID NO: 61432 - protein, 84 aa, Zea mays
  Coding DNA Sequence Number=SeqID_19653
MAEVLPTPLTSRGRSTVQREFGEGLHSGEESMAIPTQTPPAEDSHSFPGIKRNFTASNRFRFWAWLDFQLRRRSGVFCVFSDWK

SEQ ID NO: 61433 - protein, 167 aa, Zea mays
  Coding DNA Sequence Number=SeqID_19654
MAELRVLLERRSNHRADTESGVHQRRGIKTRSRRRDHPIEPLPLPLFHKHHHAAVLAQTTPLQPNLDFVAVGVLGKGHGASPSHQEDVSASIQRDWSSGRPQFLAALHPPSRNRTTAWAEKSPPQFEGRQWGIQRLGALAALRAAGSNLGARSQIQRLISHHTASAV

SEQ ID NO: 61434 - protein, 153 aa, Zea mays
  Coding DNA Sequence Number=SeqID_19655
  Subcellular localization annotation: CTP_CleavageSite=44; ConfidenceScore=5.46e-01
MARRRSQKNKKTQENKEDQTARGSSPTRAQTRRRRQPRGGTRRRAARKAPRGLTLPALVLRIPENEADKMAEVLPTPLTSRGRSTVQREFGEGLHSGEESMAIPTQTPPAEDSHSFPGIKRNFTASNRFRFWAWLDFQLRRRSGVFCVFSDWK

SEQ ID NO: 61435 - protein, 688 aa, Zea mays
  Coding DNA Sequence Number=SeqID_19656
  Gene Ontology: Mol. function=nucleoside-triphosphatase activity; Cellular component=integral to membrane; Biological process=transport
  Homolog annotation: Hit_ID=Q8S628; Match level="QueryCoverage=95%, HitCoverage=97%, E-value=1e-96, Identity=60%"; Hit description =Pleiotropic drug resistance protein 13
  Pfam annotation: Domain name=ABC2_membrane; Domain location=428-634; Score=9.1; E_value=0.00076; Accession=PF01061.14; Description=ABC-2 type transporter
  Pfam annotation: Domain name=ABC_tran; Domain location=158-437; Score= 25.5; E_value=9.4e-10; Accession=PF00005.17; Description=ABC transporter
  Pfam module annotation: Pfam domain module=ABC2_membrane::ABC_tran; Domain location=428-634::158-437
MAASGAVQPHVALDVNVEEDANDDEAADRLWATIEQVASPQRRNLAIVALDPGSASQKKEEVMDVRRLDRRGAQRVLQRALATADCDNAKLLRGIRDRLDAAGLDVPRVEVRFRNLTVSTEVHYGRRALPTLLNYVHDIAERLLICCHLLRPKKTKLTILDDVSGLLQPGRKNDTVAGATIIWEIDALVGPCWTSAYVSQTDNHIGELTVRETLDFAAKCQGASENWQECLKELRDLEGKRGIRPNPEIDAFMKTASVGGQKHNLVTDYVLRVLGLDLCADTAVGTDMDRGVSGGQKKRVTTATMASAFKQSEYGRALDSVLCNSYDGTNSPKEFVEEVMALVELDQLRHALVGKEGSTGLSTEQRKRLTIAVELVANPSIIFLDEPTSGLDARAAAIVMRTIRNTVDTGRTVVCTIHQPSIDIFEAFDELLLLKRGGRVIYGGSLGVNSIDMIDYFQSIPGVNHISEGYNPATWMLEITTQACEEILGLDFAVVYKNSDQFRDTTEDLMLVMGSLYAACLFLGVNNASSVQPVVSTERTVYYRERAAKMYSSFPYAAAQTLIFGLITYFMINYERNIGKSHVIKENHSSSKDFMLSTHDVVSCVFARIPGWWIWFYYICPVAWTLRGIITSQLGDVQARIVGPGFDGTVQEFLEESLGFQQGMAGVTVAVLIGFSLFFFAVYATSIK

SEQ ID NO: 61436 - protein, 114 aa, Zea mays
  Coding DNA Sequence Number=SeqID_19657
  Subcellular localization annotation: CTP_CleavageSite=8; ConfidenceScore=5.17e-01
MNPLTRACATTRWTRGSWLRCPCRRQHGRRRRTVIRGRLGLGVADRTTASLDVAARRTECSSSRDQGSGCPATPPRHLRWPSGQQRHAAAVSGASGSGLSPEFQGSLAKYANTI

SEQ ID NO: 61437 - protein, 69 aa, Zea mays
  Coding DNA Sequence Number=SeqID_19658
MVCVAAHLPAVVGHRPHAHSRNLTAASSFSQFCANVCEHLEKKRCLKKEFTPEPLDPVVEFYLTTYRVE

SEQ ID NO: 61438 - protein, 69 aa, Zea mays
  Coding DNA Sequence Number=SeqID_19659
  Subcellular localization annotation: CTP_CleavageSite=25; ConfidenceScore=5.06e-01
MVCVAAHLPSVVGHRPHAHSRNLTAASSFSQFCVNVCEHLEKKRCLKKEFTPEPLDPVVEFYLTTYRVE

SEQ ID NO: 61439 - protein, 219 aa, Zea mays
  Coding DNA Sequence Number=SeqID_19660
  Subcellular localization annotation: CTP_CleavageSite=20; ConfidenceScore=5.00e-01
MDFMTANLSKSVLSKGLYVPQSDESSQGSSRQRTQQPVRLRRQEFAYTDGIRGGHKHGDGGVEHDEVVVEAKEDDFRCIANKGDSVTRLFDRLSEGVAGGGTASLFLFYLLRPRGDGSGRWVEKGFMIEANGGIDEDKLIRTRDGGNQWCGLISSKCNFFLKVVLYMSREELLEEDVALKRFKSYKNSVKQVSKIGNALTLAVVLACSYELAVLATSTK

SEQ ID NO: 61440 - protein, 208 aa, Zea mays
  Coding DNA Sequence Number=SeqID_19661
  Subcellular localization annotation: CTP_CleavageSite=55; ConfidenceScore=5.67e-01
MATRAWVAAAVALNPQLLPLRSCSPTKSVSPAQRSASMGLRLRSGRPCLGKFVCRRAKNAGYEDYKFPDPIPEFAEQETSKFREHMAWRLEQKKEDYFGDHVEEIVDVCTEAHRYDETTPVLYVDELNCTSRTSSTNIWLLSLWQQIMGTFLENDYRGPGTLLVHPFLDMKGEIKERGLPGAPQAARAAIAWAEKNVDKDWKAWTGEY

SEQ ID NO: 61441 - protein, 84 aa, Zea mays
  Coding DNA Sequence Number=SeqID_19662
MGTNGHLDLDTGGKSVDQKVDEATCRPASPATTVDRVKLALTKPTFLSGGGAMGFSLYPTKSSTRTPWSTSFFRHKFPAAAVSF

SEQ ID NO: 61442 - protein, 74 aa, Zea mays
  Coding DNA Sequence Number=SeqID_19663
MDRDRAWQTRFPGGEPSLGDWARASSVLRVRNFDGVAGPEDGRWQVILCLYFPRESVPPQLTPADTELGAVHAG

SEQ ID NO: 61443 - protein, 322 aa, Zea mays
  Coding DNA Sequence Number=SeqID_19664
  Homolog annotation: Hit_ID=Q10N06; Match level="QueryCoverage=89%, HitCoverage=39%, E-value=1e-61, Identity=42%"; Hit description =Expressed protein
MDMNSCLEGSSEGKYNSNISNIYNNGDNLSTPDWLNEKVLFTTNEHLGQQPAESEASRLNLQVSRKQWVFMLYYTVINSESDVIPFLFFYAGEYLVTMLPLHSHVYESISVSGHTDGCFNYDLRGMASEANFIFPMKTCITVICTSKVEENRDFSYLLDILICSGIIVADWQLICKSWYLPGCPVGPHVFDRLEIKYNKIATWAKPERRLLFDLLNSILSEVLAPCVDVHPWMHPNRHCVARWGPEGPVEKVWQTIVNQREDCVTGHHDEMVLDTNWLEVGNDVNMVGKQMARMLHGNLLEEVIVDFLGECNTSTHLLRIIE

SEQ ID NO: 61444 - protein, 60 aa, Zea mays
  Coding DNA Sequence Number=SeqID_19665
MDKGTRLGFTRRTPGAGRGDVGERTVCCNAQLDSSSELAGTALRVANATWERLGVKLGER

SEQ ID NO: 61445 - protein, 63 aa, Zea mays
  Coding DNA Sequence Number=SeqID_19666
  Subcellular localization annotation: CTP_CleavageSite=35; ConfidenceScore=5.40e-01
MALASVGVSLSGVGDHWSTKFIGGGGLKRSSSPPRASPTTPDGPAPIPTGSTGTFRCSCEYNT

SEQ ID NO: 61446 - protein, 481 aa, Zea mays
  Coding DNA Sequence Number=SeqID_19667
MPKIVKPIIYSNVDITKEGHRNLSSGLGVVNASISGSNIVVVLAFAEAHATTLDSTKAALGGDQSLIVMGDIGFELSLNGDRDSGNSRPSLTSNSLGLRLQHGIETWESRGPTVSANSHAQQKGESKDLPYSGPFVAFQGPRRGHRATPYLPPPRRGTDGGRQLQHGCAPSGSVLARAGLAVALPLHPRCSAVQRERRSGRSPFGKGGFRDSASGSGGQHRSPPPAGCSSPSTADAEGVDEDVRGPRGKNVFARAPGVFGSNAEVMEKDRQDAAQKRWTVVRIEDPFREAKKERGVAKSAAPGSSKPTAAVKPVVPRPRKSLAGAKAAASGARKPPLGEFAKERRLPSPPCSDKAVSRVADFDTDICVGDYLGGKFFLRLGLNQDQCVGSDVGQLAVVPPPVVSTSPTAVVGAKGASQDPWSTICASGAIPSAVAAKDVASSVSQQLRQASQQLSQQLKHATDFVDHVASGVLTAEFAAEV

SEQ ID NO: 61447 - protein, 128 aa, Zea mays
  Coding DNA Sequence Number=SeqID_19668
  Gene Ontology: Mol. function=acyltransferase activity; Cellular component=integral to membrane
  Homolog annotation: Hit_ID=Q9XEP1; Match level="QueryCoverage=80%, HitCoverage=21%, E-value=7e-35, Identity=65%"; Hit description =Putative beta-ketoacyl-CoA synthase
  Pfam annotation: Domain name=ACP_syn_III_C; Domain location=16-90; Score=-28.7; E_value=0.013; Accession=PF08541.1; Description=3 -Oxoacyl-[acyl-carrier-protein (ACP)
VFGAPRRAALHPGLKMRRALCITPAGRAVLDTIEKNLGLSAWHMEPSRMTLYRWGNTSSSSLWAACAAATRAWQIAFGSGFKCNSAVWRALRTIDPAKEKPAGGNPWVDEIHNFPVEVPKVESVVMSS

SEQ ID NO: 61448 - protein, 57 aa, Zea mays
  Coding DNA Sequence Number=SeqID_19669
MGEHGGGGGGNGNPRSLDWKRDFLSLQGALWMLLSEATLFPCSLFRVTLFRNDAAYI

SEQ ID NO: 61449 - protein, 149 aa, Zea mays
  Coding DNA Sequence Number=SeqID_19670
  Gene Ontology: Mol. function=chitinase activity; Cellular component =cellular_component; Biological process=defense response to bacterium
  Homolog annotation: Hit_ID=Q41802; Match level="QueryCoverage=78%, HitCoverage=80%, E-value=4e-54, Identity=79%"; Hit description =Defence-related protein precursor
  Pfam annotation: Domain name=Barwin; Domain location=30-149; Score =285.8; E_value=8.4e-83; Accession=PF00967.8; Description=Barwin family
MITGGARRAAVLAAAALLCAAAAAPAVAQQASNVRATYHLYNPAQNGWDLNRVGAYCATWDAGKPPSWRQQYGWTAFCGPSGPKGQAACGRCIRVTNRGTGASTTARVVDQCSNGGLDLDFETVFKKIDTDGRGYQMGHLDVDYQFVGC

SEQ ID NO: 61450 - protein, 73 aa, Zea mays
  Coding DNA Sequence Number=SeqID_19671
MGTRFLIPHQVKVTEGTMIFVDTDSIESEAEPTMPVSRAYAITAGLGEVEQVHVTASCHTEEMQTCSLRRPTP

SEQ ID NO: 61451 - protein, 60 aa, Zea mays
  Coding DNA Sequence Number=SeqID_19672
  Subcellular localization annotation: CTP_CleavageSite=41; ConfidenceScore=5.07e-01
MVVVVDCWRWSPHGHQGTGSAVHAVQSSLRPARVAKVLAPMAMRTGPWGPGCDDDATTDE

SEQ ID NO: 61452 - protein, 119 aa, Zea mays
  Coding DNA Sequence Number=SeqID_19673
  Gene Ontology: Mol. function=peptidase activity
  Homolog annotation: Hit_ID=Q2R1V5; Match level="QueryCoverage=80%, HitCoverage=23%, E-value=2e-20, Identity=62%"; Hit description =Intracellular protease, PfpI family protein, expressed
MARMAKAQPRRRHNFVVTTDWDDVCAGDFDCVVLPGGRTPELLVTLDDTVALFREFADKGKVVASQHRQGPLAPRPGGAAQGQEVRQRGAHELHEGDIEAGWWRRGRGGPRGGHPTGSS

SEQ ID NO: 61453 - protein, 417 aa, Zea mays
  Coding DNA Sequence Number=SeqID_19674
MVETGGILAEVVNFTEEAGTSTTLDPAGFQGDVASFSSGQGYGSAVSKVEGSSLGPPMAGPLAEALAQAVALINHALAKPAPETAADVKPVPLGSQFLSDAKGKNVMQGKGDGDQGVVGDLFGKGGEKEKAPYCWRVPNQQLIRLAMQWMGWGSIIYPILLLPSSPQTPDLNHMIEWGVVQTKFKSLMTIEEKSWPKEFIEVVIGECLFELQFRVEENMDSDSPVPVDMDDFSGGEDENKSDQLEDVVRGGNSLPPNNSAPDSGKSVSKGAGNDGNTGKKGAAHDVISSVVQYADLGLGMQGVEHAGNPTQAVVPATSSCMVVSVSCTPDVVAMAAVPEATMGLTESGRSKRRNRSGNGDSMQRASKLKVARNLDAVLSTDVFDIGAIDEGEFYVKFKVHTGLDSGLSYKRMKLMEF

SEQ ID NO: 61454 - protein, 679 aa, Zea mays
  Coding DNA Sequence Number=SeqID_19675
  Gene Ontology: Mol. function=protein serine/threonine kinase activity; Cellular component=nucleus; Biological process=protein amino acid phosphorylation
  Homolog annotation: Hit_ID=Q5Z9J0; Match level="QueryCoverage=75%, HitCoverage=88%, E-value=0.0, Identity=85%"; Hit description=Mitogen- activated protein kinase 12
  Pfam annotation: Domain name=Kdo; Domain location=86-277; Score= -77.4; E_value=0.017; Accession=PF06293.4; Description=Lipopolysacchar ide kinase (Kdo)
  Pfam annotation: Domain name=Pkinase; Domain location=90-381; Score =298.5; E_value=1.2e-86; Accession=PF00069.15; Description=Protein kinase domain
  Pfam annotation: Domain name=Pkinase_Tyr; Domain location=90-379; Score=25.6; E_value=4.8e-14; Accession=PF07714.7; Description =Protein tyrosine kinase
  Pfam module annotation: Pfam domain module=Kdo::Pkinase::Pkinase_Tyr; Domain location=86-277::90-381::90-379
MGGGGAIVHGFRRWFHRRSGSTSNQSSIAGDGEGEADGGSPDLEIVDDPDLLGLRAIRVPKRKMPLPVESHRKDSVEMEFFTEYGEASQYQIQEVIGKGSYGVVAAAVDTRTGERVAIKKINDVFEHVSDATRILREIKLLRLLRHPDIVEIKHIMLPPSRREFQDIYVVFELMESDLHQVIKANDDLTPEHHQFFLYQLLRALKYIHAANVFHRDLKPKNILANSDCKLKICDFGLARASFNDAPSAIFWTDYVATRWYRAPELCGSFFSKYTPAIDIWSIGCIFAELLTGRPLFPGKNVVHQLDIITDLLGTPSSETLSRIRNEKARRYLSCMRKKYPVPFTHKFRNADPLALRLLERLLAFDPKDRPTAEEALADPYFASLANVEREPSRHPISKLEFEFERRKLAKDDVRELIYREILEYHPQMLEEHMQGGEQISFLYPSGVDRFKRQFAHLEEHYSKGERGSPLQRKHASLPRERVVVSKDGDTDQHINDQERSADSVARTTVSPPRSEDDDMSDVKSTSLSSRSYLKSASISASKCVVATKKHPEVVPPPLLTFGFSARTMESLRKWKAPSMDCLKRSPGCTRKQDCPWQQQPCCKVSVSGTLYSDDSLGKANTVCHTAVQHTVLRGWVLLAYIHPQLVRLYLGGRGTHHRLMALSSSSAFPPCHASAAWHL

SEQ ID NO: 61455 - protein, 511 aa, Zea mays
  Coding DNA Sequence Number=SeqID_19676
  Gene Ontology: Mol. function=drug transporter activity; Cellular component=membrane; Biological process=multidrug transport
  Homolog annotation: Hit_ID=Q651I6; Match level="QueryCoverage=86%, HitCoverage=89%, E-value=7e-98, Identity=43%"; Hit description =Putative ripening regulated protein
  Pfam annotation: Domain name=MatE; Domain location=214-431; Score =11.9; E_value=0.00043; Accession=PF01554.9; Description=MatE
  Pfam annotation: Domain name=MatE; Domain location=42-202; Score =148.7; E_value=1.6e-41; Accession=PF01554.9; Description=MatE
  Pfam module annotation: Pfam domain module=MatE::MatE; Domain location=214-431::42-202
  Subcellular localization annotation: CTP_CleavageSite=30; ConfidenceScore=5.01e-01
MGGASVDVDGAAEASSPLLLPRSAPRPAVSAEVTRQVGLAAPLVACSLLQYCLQVVSVMFAGHLGELSLSGASVAASFANVTGFSVLLGMGSALDTFCGQSYGARQYDMLGTHTQRAIIVLMFTGLPLAFVLAFTGQILIALGQNPEISFEAGLYAQWLIPGLFAYGLLQCLTRFLQAQNIVHILVACSGLTLLLHVMLCWLLVQSFGLGHKGAALATSVSYWFNVALLAVYVKFSEAGRRSWHGWSGEALKLKDAKVYLKLAIPSTFMTCLNTMWMVYTIPSGLSSAISIRVSNELGAGNPHAARLSVYVSGIMCLAEGLFFAVITVLVRDVWGYLYSNEEEVVKHVYVKNDHISSMHDALISHKRKKSNVFGIARYKRVSPVSLIPLPKKSGTSIMHKSGAARGCGWQKVCSVINLFAYYAIGLPSAVTFAFVLKIGGKGLWLGIICAMAVQIFALVVMMLQTNWNEEFLLMELDCTSCEREQSGQELYTWSRLKRPELEFSVQMAALH

SEQ ID NO: 61456 - protein, 468 aa, Zea mays
  Coding DNA Sequence Number=SeqID_19677
  Homolog annotation: Hit_ID=Q2QXK7; Match level="QueryCoverage=89%, HitCoverage=90%, E-value=2e-26, Identity=29%"; Hit description=F-box domain containing protein
  Pfam annotation: Domain name=DUF295; Domain location=361-427; Score =33.3; E_value=8.4e-07; Accession=PF03478.8; Description=Protein of unknown function (DUF295)
  Pfam annotation: Domain name=F-box; Domain location=6-52; Score=23.8; E_value=0.00059; Accession=PF00646.23; Description=F-box domain
  Pfam module annotation: Pfam domain module=DUF295::F-box; Domain location=361-427::6-52
MSKLARGWADLPRDLLESVLARLPVPDLVRFPAVCTAWQSVHAAAAARLRQATPSSPWLMLPFNPTARAGGVAKLSVARFLSLAEGRVYVIRQPAPAARDRLCVGSSADGWLVTADARSELSLLNPITGAQLRLPPAATLPFVDARRGADGRVESYGLRSCFADGGGCGEEALVPTETLGPDRLRYEVYEKAIVVSAPRRVPPCSCWVGYAVLLICQPLGRLAVARAGDAEWALLDDADAPARCWVDAVRASFSGADGSRRDHQPVYTVDAAGRVDAWDTDAATTPSRAVAPPCGCSARSCAMSAACRKYLVELSPGRLLQVHRLRETAHARYAWEPRPEHMEYTTTGVELFEWTAATGLWARADGRVLGGRALYLGKSASLCVPVDVDDAGWCPGVRGGCVYFTDDGPWSHDRCHEVTPDVGVLDLDDGSYRPPRGAARDLLWKWPPPKTAAQLVVDLQQPVCTRVE

SEQ ID NO: 61457 - protein, 80 aa, Zea mays
  Coding DNA Sequence Number=SeqID_19678
MAANTPVVTAQHGPLPELPNLCCFFVGFHGVIIELQKTTKKRTPRHMYGKCPAFRMIVHPFLPDPGQGVKLGAAAYSLLS

SEQ ID NO: 61458 - protein, 206 aa, Zea mays
  Coding DNA Sequence Number=SeqID_19679
MGHKRDTKEDRDGERSLQRTRGDTETRGRRRRGGRSTERRGRRQRGDRDRYRDRGEAWACDGDGSTETGGATDPRSTDPRRWAAQRTHGSTERRGRRRRGDRDRYRDRGEAWACDGDGSTETGGATDPRSMDPRRGAAQRTHGSTERGGATERDGSTERRAVERRAGEWRLEIRVRVSGKRNAAGGGGGWGLGQRMWARACGARLA

SEQ ID NO: 61459 - protein, 119 aa, Zea mays
  Coding DNA Sequence Number=SeqID_19680
MQFVSQFCDATDTSLLDDPNEPPTLLSEVRIDSNLLLIAFECSSRRSSAASTRRTSGRLHTPHGSFYYEQGLNNWGLGLQLFIEYEFAMQEVSANVPARDKPTIINLAVGKVDTLSHCA

SEQ ID NO: 61460 - protein, 78 aa, Zea mays
  Coding DNA Sequence Number=SeqID_19681
MEQMEALLAVMCTNCATGEPIVCQQNLGEDQQGLGKGLGVEEEQQGCHNRKEIKSDSAATPSQAGIIPRGEVNRAVHG

SEQ ID NO: 61461 - protein, 126 aa, Zea mays
  Coding DNA Sequence Number=SeqID_19682
  Gene Ontology: Mol. function=catalytic activity; Biological process =cellular metabolic process
  Homolog annotation: Hit_ID=Q5QM39; Match level="QueryCoverage=74%, HitCoverage=27%, E-value=3e-42, Identity=86%"; Hit description =Putative cinnamyl alcohol dehydrogenase
MGTGKVVCVTGASGYIASWIVRLLLDRGYTVRATVRDTADPKKTLHLTALDGAKDRLHLFKASLLEEGSFDAAVHGCDTVFHTASPFYHNVKDAKGLATLALSQSLGLFVGGIVLQCVLLLVFLIG

SEQ ID NO: 61462 - protein, 97 aa, Zea mays
  Coding DNA Sequence Number=SeqID_19683
MGAAEQRQARAAGNGRAATLEEGGVGTGARNHGGTLGAASKGEELGGGALGYWRSEAAERAEGREKKRVWALGRLGDRLKKKTKITDILDPGTRFHG

SEQ ID NO: 61463 - protein, 246 aa, Zea mays
  Coding DNA Sequence Number=SeqID_19684
MAAVDPPSHGEVVPMLKQSAGIDQERYLGALQADVTEHCIVDFVGVWAKACLRDASVFLCRMTSRFLAMLIEVGGLLGRGGSLPEASDEPSRDVCHSRQSGLPWDSSRSSGEVENSPEGRTRRRAWWRNHPKAGPRVEQGGEFTRGLNLSLGEVEKSLEGWARGRARQRNHPWAGLCFGRGGDFAPEGQSALLVILDVPSGGWQAAPLSYPPEIGSCEIDGVAVTSGEAEFFPRRENLEEMPRFNR

SEQ ID NO: 61464 - protein, 373 aa, Zea mays
  Coding DNA Sequence Number=SeqID_19685
MEVGAASGAPDPPKVVAGGPTEASAGVVAAFHRRRVNGTVGKADYSVVVSMCPEQGHGLWGFRTARPPVPEDAAAREVRRLEAEEKKRKNDEEKKRAWKKMLACDSLEKCHRAYEREGLPLEASPSTEDEEDDDDDVRMEVCMGFSLEVGPSRAYPYPCLGGRGGGHGGGSHPLPLGSRRGACGSVGRVPSAAVRYREHGGGAHHSPSCGRSKAHSGPDRRSTPGPCAGGCGRGDHCPAYVHGGAAGARESEAEAFRHACLREPSREDAEVVVPAPGVPVKPGTATVEVAPACPASPMEAIVVSSKDEAEAGIAAPHVASPMVFDILRAIPNTPKVVSSSGAERAEEVSSSVPPGRIVGGSLLCNETIIKPLS

SEQ ID NO: 61465 - protein, 105 aa, Zea mays
  Coding DNA Sequence Number=SeqID_19686
  Gene Ontology: Mol. function=DNA binding; Biological process=DNA integration
  Homolog annotation: Hit_ID=UPI00004C1731; Match level="QueryCoverage =83%, HitCoverage=6%, E-value=2e-34, Identity=78%"; Hit description =UPI00004C1731 related cluster
MILQGLKPRIFNDLNKFGKRWLVELPFSVIWSLRTTPSRATGFTPFFLVYGAATVLPIDLEYGSSRLQAYSERNNLVSREDSLDQLDEALALPRKAHLTPRVPGR

SEQ ID NO: 61466 - protein, 81 aa, Zea mays
  Coding DNA Sequence Number=SeqID_19687
MTRNKGAHWEVGAQGTAGVEIFRPHDPDRDDHEEAKHDEARIERASEIKDDDTRHDEATYGGGKIGMDDDERTTRLRGTWR

SEQ ID NO: 61467 - protein, 54 aa, Zea mays
  Coding DNA Sequence Number=SeqID_19688
  Subcellular localization annotation: CTP_CleavageSite=42; ConfidenceScore=5.19e-01
MGSGSAAQANLLRISSNFTGKIPRRWGFVRVFSNELKTRSTRIMATNDSIGYLQ

SEQ ID NO: 61468 - protein, 128 aa, Zea mays
  Coding DNA Sequence Number=SeqID_19689
MGDGWASTSGRNVGCARQTESRTPRRACRLTGRALGRWIRARGDEEAPRQPGIRNQGGGASSMAKQGADMGAAEQRQARAAGNGRAAALEEGGAGTGARNHGGTLGAASKGEELGGGALDYWTPEAVE

SEQ ID NO: 61469 - protein, 189 aa, Zea mays
  Coding DNA Sequence Number=SeqID_19690
  Gene Ontology: Mol. function=pepsin A activity; Biological process =proteolysis
  Homolog annotation: Hit_ID=Q651C2; Match level="QueryCoverage=52%, HitCoverage=25%, E-value=6e-19, Identity=46%"; Hit description =Aspartic proteinase nepenthesin II-like
  Subcellular localization annotation: CTP_CleavageSite=57; ConfidenceScore=5.10e-01
MGGMVVARFVNGVADISAVWHLSRPSITRQSPLALCTTPIKCSITLGQSSELEKLVVSSPKASTNPLNISLTTEGGSVFPINDPIITITDTVSNPMAYCLAAMKSEGVNLIRGYSVGNSRSNLPVNSNPSCVPPRPALGPNSYTREATKGASPNGTQVNVLQPSASFSPKLHCNRNVLVAAALLFLLIL

SEQ ID NO: 61470 - protein, 382 aa, Zea mays
  Coding DNA Sequence Number=SeqID_19691
  Pfam annotation: Domain name=BSD; Domain location=137-194; Score =15.6; E_value=0.0039; Accession=PF03909.7; Description=BSD domain
MPLPASTSSSPPTPEPRAPPELRRVIPSFPPEPRRSVCEEEDDSPEPVLICLGTLAVAGSIRNCTLLSVLRLHPISTALPVLDFFPLRLESVGQVVDDLCAATAGLLLHANKALRFEAQVLALRAGPCSRFTVEPEDSEGFGKWSALFSIDEMKEQIETVLHESPELESFVERLVPSVVDFTLLHVSTVKSTILEVGNIELFELNEVLASQFFYYCKTNFEIKNLISHLIQHKGLIAGPKTHPKQGYYSAIAIGHPLGATGIQPYLLVAQATPSVSLKMKSQLLKAEMKSLMKEQRQNIQYLYYWDYEGDQRIVCNKVSTGSNLPNLGAAWVGLWICAATDYRFIEHAPCVLQELHSLDLFKQCHGLVISLLSIYTEGFCLC

SEQ ID NO: 61471 - protein, 167 aa, Zea mays
  Coding DNA Sequence Number=SeqID_19692
MEKSRGSTTHGGWRSSGDDELWRTPAVVLTAMRVREMGASLGRGKMERGFAAFYREQEGEERSPVVFNGHHMRQFLTRVMERNGRGSNGGFDAPLTARNRTDARGRRAVGWRLGSASVGCAWASRGWPDLHVGAGASSQLGACAVQGARRLGGSAAVRGSGVRAWAQ

SEQ ID NO: 61472 - protein, 230 aa, Zea mays
  Coding DNA Sequence Number=SeqID_19693
  Gene Ontology: Mol. function=polygalacturonase activity; Cellular component=cellular_component; Biological process=carbohydrate metabolic process
  Homolog annotation: Hit_ID=Q69X44; Match level="QueryCoverage=90%, HitCoverage=51%, E-value=2e-56, Identity=52%"; Hit description =Putative polygalacturonase
  Pfam annotation: Domain name=Glyco_hydro_28; Domain location=1-229; Score=127.2; E_value=4.5e-35; Accession=PF00295.8; Description =Glycosyl hydrolases family 28
MLSLPGASQCNRFSRKIREGDKNVLIDKVTVKAPGDSPNTDGIHIGDSSNVTISSTTIGVGDDCISIGPGSKMIRIHGVKCGPGHGISVGSLGRYKDEKDVEDVKVTGCTLAGTTNGLRIKSYEDSKSSPKASKFLYEGITMDNVSYPIIIDQNPAPPRWPSTTSSSRTSTAPPTRRRPSRSTAPTNLPCEGVQLVNIDIKYNGSGNKTMAVCKNAIGKSIGLAKELACI

SEQ ID NO: 61473 - protein, 158 aa, Zea mays
  Coding DNA Sequence Number=SeqID_19694
MPPPDWVIRREGEKIPRRYRSSIVGPLLSEVMLHHPCPALGDRLGRKPSAHGCSSRLRLGVIVLLATGILHRSRCSAALPPHIRPRSEHVYRLDLDPRIMIGRLRINLGILKSNASVIDPVALLLFTVHDKIIMLIGTWSDHPGKQCYHKGLWTPLAD

SEQ ID NO: 61474 - protein, 67 aa, Zea mays
  Coding DNA Sequence Number=SeqID_19695
MKPSNWRGTNKQLPSAPFPTALLRSNRDCSPDGLHFLESPPKTTIVALMKQYPVNEAPVPLDTKYEL

SEQ ID NO: 61475 - protein, 79 aa, Zea mays
  Coding DNA Sequence Number=SeqID_19696
MTKVMLAESVQDSKNGRKILSVPDKNAGSGVNTDSGATTEAPPQPVETSDKAEGTKVESGGDKVVAGEPNEGSCMPSKV

SEQ ID NO: 61476 - protein, 73 aa, Zea mays
  Coding DNA Sequence Number=SeqID_19697
MASPLVSGEPSPRDRAAPPRLDNEQLVVPECVAKDPSEQQPGEGYVVRPCQVTLVVINGEARTPDRMGITACG

SEQ ID NO: 61477 - protein, 109 aa, Zea mays
  Coding DNA Sequence Number=SeqID_19698
MEPGGGTAVGAVGSLLTSSCFLGVAQAALSFYQAGQWSGEVTAVTSALPGVRVRIKLYADGGYELRIRSLEGTPNYGPRHSCFLPSFETKGLHFPSMRLTAYNRLENKY

SEQ ID NO: 61478 - protein, 108 aa, Zea mays
  Coding DNA Sequence Number=SeqID_19699
MVWRDHVDDELPHALTVEMARRIGSSSVLLSEKVELPSNGQHAMDREGVTTHGGFSSAYEGREASDWVHGVCWRESVEGWAAWWCWSWARMSAGEGSWTGLMGQAGVD

SEQ ID NO: 61479 - protein, 66 aa, Zea mays
  Coding DNA Sequence Number=SeqID_19700
MAQPHHHVDKGAHAVILRLTNGWIGWCRCGGNFGPWISDPRADRAAGNQGHPFSRETNTKEPSVFF

SEQ ID NO: 61480 - protein, 145 aa, Zea mays
  Coding DNA Sequence Number=SeqID_19701
  Gene Ontology: Mol. function=pyridoxamine-phosphate oxidase activity; Biological process=pyridoxine biosynthetic process
  Homolog annotation: Hit_ID=Q8S7J1; Match level="QueryCoverage=76%, HitCoverage=23%, E-value=3e-53, Identity=88%"; Hit description =Putative pyridoxamine 5-phosphate oxidase
MAEGGAAGGGRSGGWGSRRLGGSPTAGGRRSATVRVEGSVEKVPEAESDKYFHSRPRGSQLGAIVSKQSTVIAGREVLQQDYKKLEQKYSDGSLIPKPEYWGGYKLTPTLFEFWQGQQSRLHDRLQYSQREVDGSTVWHIERLSP

SEQ ID NO: 61481 - protein, 114 aa, Zea mays
  Coding DNA Sequence Number=SeqID_19702
MSGAPEDSDFKLVTFGKFQRCLRYNSPDCPVYTGHVRCSKEERPPELASLGNSLKLLRYNSPDCPRPGTPMLTHRTIYSTCPVRHRTSRRAQKSELQRSEPNGIGDVAVAPDMS

SEQ ID NO: 61482 - protein, 181 aa, Zea mays
  Coding DNA Sequence Number=SeqID_19703
MALTRATCHQRESRATHALAWCSVADAVGPTGQGPVRVTGSTRGRAAYVRGLVVPYRRPWRGQLLIGACVVAADPLSSIDSPLRRIILGMDPYTVLAKSSFTCSSVQFVFGVRIQPIGNLAGVLRRACGAAPPRSTGGLGGLLDDRRIGQQWLRFDRMKLLGSVHVNRRSMIVRVMGDLSP

SEQ ID NO: 61483 - protein, 147 aa, Zea mays
  Coding DNA Sequence Number=SeqID_19704
MTAAPSLSFPVLLLASTYTFLLQEGVEPLHEELIDKESIIGSSGLFAGDVCANVADSSFVFYAVSMVFRERFCVPWYYGLMVDSSTISPRKQVQSDLKVRLAMLKPAKVERMVVESMADKVEWANNTKVIIRSKGVLSRVQVLRVVQ

SEQ ID NO: 61484 - protein, 738 aa, Zea mays
  Coding DNA Sequence Number=SeqID_19705
  Gene Ontology: Mol. function=protein phosphatase type 2A regulator activity; Cellular component=protein phosphatase type 2A complex; Biological process=signal transduction
  Homolog annotation: Hit_ID=Q6H5V0; Match level="QueryCoverage=60%, HitCoverage=99%, E-value=1e-130, Identity=54%"; Hit description=WD -40 repeat protein-like
  Pfam annotation: Domain name=WD40; Domain location=311-349; Score =41.2; E_value=3.5e-09; Accession=PF00400.22; Description=WD domain, G-beta repeat
  Pfam annotation: Domain name=WD40; Domain location=421-465; Score =39.6; E_value=1e-08; Accession=PF00400.22; Description=WD domain, G -beta repeat
  Pfam annotation: Domain name=WD40; Domain location=469-506; Score =6.1; E_value=7; Accession=PF00400.22; Description=WD domain, G-beta repeat
  Pfam annotation: Domain name=WD40; Domain location=529-569; Score =14.6; E_value=0.36; Accession=PF00400.22; Description=WD domain, G -beta repeat
  Pfam module annotation: Pfam domain module=WD40::WD40::WD40::WD40; Domain location=311-349::421-465::469-506::529-569
MSAGGGEEVFYESRDGVLSSSCSSASDDDDDDSDHPRRRRRDGAASTAAAAALDVWTSEPAPVQERRRKLLQMLGLAGDPALARLEMGRSVSYDDGPVPVRPAPASPPISRSRSDGGAVPASATKPPLGGRSPGSSEATPEGEEEEEEEADPRCLIRNLDDGSEFVVKEGSELREVGTGRQLTMEEFVDLCVGRSPIVQELMRRRENVASSGSSTPVQRSNSDSSNGATRHRRRRRHSSWLRGIRNVAGSVVASSRDRRSSDDKDTCSEKGGRRSSSATDDSQDSAGAVRHGPVRVKVRQYGKSYKELSGLFMNQEIQAHDGSIWSIRFSPDGRYLASAGEDCVIHVWEVSEFERKREENGACNPFVAMVCNGSPEPTLAVASSVDGSNREKKRRARFLEGRRSVSSDRLMLPEHVFALSEKPIRTFMGHSEDVLDLCWSKSQFNPVDDRYFISGSLDEKVRIWSIQNREIVDWKDLHEMITAACYTPDGQSALIGSHKGSCHIYDTSGSTSKVLITSADSRIRVVDGLNLVHKYKGFRNSNSQISASLAANGSYVISASEDSHVYIWRIDDNLEQGRSKGNVTVTNSYEYFHCQDVTVAVALPSNGSPVVSRANSAKHDERDSVSEHSALHAAPEKPQDSSDFQPQSGYTISTGSNDSGDRATWPEELMTPTKQSPRSSASLPSGADQAPGRSAWGTVIVTAGRGGESLGDLHSSLGLDFVAPRRTCLRISTNLVLK

SEQ ID NO: 61485 - protein, 404 aa, Zea mays
  Coding DNA Sequence Number=SeqID_19706
  Gene Ontology: Mol. function=transcription factor activity; Cellular component=nucleus; Biological process=regulation of transcription, DNA-dependent
  Homolog annotation: Hit_ID=Q6H5V2; Match level="QueryCoverage=56%, HitCoverage=50%, E-value=1e-60, Identity=54%"; Hit description=AP2 domain-containing transcription factor-like
  Pfam annotation: Domain name=AP2; Domain location=172-236; Score =134.5; E_value=2.8e-37; Accession=PF00847.10; Description=AP2 domain
MDASSESCGGGAGGGRGGRRWKGKGATPIQPRRQLAPVMEDASAALLRPLKKIGRAPDRFQRSASSLSTSTSSSAPPSPRATSPAPHSASVSQPASPQVQAPMQRQQQIISFGPPTQYQTPFLLPEGAQQQQHLLRYWSEALNLSPRGGQQVAGVLPSRYQHLLRAPPPPLQKLYRGVRQRHWGKWVAEIRLPRDRTRLWLGTFDSAEDAAMAYDREAFKLRGENARLNFPDRFFGKGHAGGSGRTGATSASGSTSSSSTPQTPGEQNTQQAPPDAEGSSDKRPQPPVATSSQLQGGSGETTLPDSDQMIHSPEAPGSEWGSADEAWLNVWGPGSSFWDYDIESTRGLFHHHGRFDGDETGINTATTAAATGAGMSCDHVPVTPASSSSSPLHSQSPPSPTFMD

SEQ ID NO: 61486 - protein, 268 aa, Zea mays
  Coding DNA Sequence Number=SeqID_19707
  Gene Ontology: Mol. function=phosphoric monoester hydrolase activity; Cellular component=cytoskeleton; Biological process=protein amino acid dephosphorylation
  Homolog annotation: Hit_ID=Q2QX07; Match level="QueryCoverage=66%, HitCoverage=48%, E-value=2e-57, Identity=62%"; Hit description =Protein-tyrosine phosphatase containing protein, expressed
  Pfam annotation: Domain name=Y_phosphatase; Domain location=77-258; Score=106.4; E_value=8.2e-29; Accession=PF00102.17; Description =Protein-tyrosine phosphatase
  Subcellular localization annotation: CTP_CleavageSite=49; ConfidenceScore=5.37e-01
MSSSPYYWFLICGWPAVGVLGGGARPPCSNAPTATRSRSRGHQGRGGLKQSAEGRRVEGGVRETRRDCCGGTAFQLAATKASIPPRHCDKYLPLGSERRTYGDYDIKITKTRTDSHHLQLRDVKVQNIETGKVHSVLHIEYPDWPDHGVATNTDAVREIWKRLHHIPTEHPIVIHCSAGIGRTGTYITIHTTIERILLGDKSSYDLAKTVKNFRSQRPGMVQTELPVVSNEPFHNVTVQVMFYDFKEQYKFCYRAIADELKDLLNSDH

SEQ ID NO: 61487 - protein, 96 aa, Zea mays
  Coding DNA Sequence Number=SeqID_19708
MASIGQLKIAAARPVLSQTDIACMGGKARGWYREGGRSGGSTGADRHWQTLERVVSSNAQSITALTAKAQLRYNSPDYPMHQRSNGYLRAMADSDG

SEQ ID NO: 61488 - protein, 298 aa, Zea mays
  Coding DNA Sequence Number=SeqID_19709
  Gene Ontology: Mol. function=DNA binding; Cellular component=nucleus; Biological process=RNA-dependent DNA replication
  Homolog annotation: Hit_ID=Q9LGH0; Match level="QueryCoverage=98%, HitCoverage=98%, E-value=1e-39, Identity=31%"; Hit description=NAM -like protein-like
MDSGYYTNLLVNGIEESQATRSDVRIQHGRAIAKSSQGRSKNFRDEEDILLVSAWLNVGMDPIQGVDQTHGTLWRRIHEYFNANMKFDSNRSEVSLMNRWVEARNHSGWSIDDKIANACVMFKAEDPKDKKFSYLHCWKILKDKPKWMDRRKEIGNAKKSATKKPKTTINSSPTSVANAIAVDAPLGGADHDEPSCTPDGKKKEKQKLRQRSSMEVVDYLIAKKKDSDLEKDLKKEERCNKAFALQEERIKLDKEKFAFQRQLKEDRIIGLDLSTMNYKQQQYYEDRQNEILARRFNI

SEQ ID NO: 61489 - protein, 165 aa, Zea mays
  Coding DNA Sequence Number=SeqID_19710
MELSSSCIAYPRLEWCRKHRLHKDVLNGHEAASLWLPSADLGPYAPAGQRTREETGARETWEQTSVTTSSPFLGTRMLLGRLSATELDANDLPPQFAPTWEIRAAGRVDNVGVGRKYPVWGESGCWRNRPSCPTTVNRVGITGVHRYPTRLRASKPYHVAVDRLR

SEQ ID NO: 61490 - protein, 229 aa, Zea mays
  Coding DNA Sequence Number=SeqID_19711
  Subcellular localization annotation: CTP_CleavageSite=68; ConfidenceScore=5.38e-01
MDRGAGGAFYAALSCRLPWLSLDSSAVVNARASSGHARSNVSPRPDFSSPCRRGLPPHAVADPATSVAAGGRSGEHPRGHRQPRHCPLLIGGFGLNPSELLPEGSGVRWMCERIARGGDGEVGGSWAGAAAATRAIDGVVREWAPRGPRASDQAWDDPSGGRPRHRDIHGGLKEERGRKLGGWDNGERRGQEVERHQGMAWDARERKSLGWWETEDVLLVQGRGSKGYR

SEQ ID NO: 61491 - protein, 46 aa, Zea mays
  Coding DNA Sequence Number=SeqID_19712
MESHDLKTEGESRLVGKVCNLCRVLETGGDAGNMEDFEVFKDYDKF

SEQ ID NO: 61492 - protein, 148 aa, Zea mays
  Coding DNA Sequence Number=SeqID_19713
  Subcellular localization annotation: CTP_CleavageSite=25; ConfidenceScore=5.58e-01
MPPGGSAFCVVSLRAGGSAPPCRTRASRPRAPAPGLAPHSPSRPAAAASRPRAPAPGGGGSAPCPSHPLPPSRPAPAAPWPHVPARPVCSALRHVSHDPAPRVPAAVCPVSPIVCPGVASRVPGVCAACGDKDDGYDYAYGTGRMRLQ

SEQ ID NO: 61493 - protein, 124 aa, Zea mays
  Coding DNA Sequence Number=SeqID_19714
MGSEPRQGFASQRATATPGCGRAGAGAAQGHRGGLHAGRGKEKRERREERGSSPQGSTIGSNRSPGSNLGQGEVEEREVAAHERKNEEEGWGAHRGGGARARAPRPGGRAMGRADYLLLDLAWF

SEQ ID NO: 61494 - protein, 61 aa, Zea mays
  Coding DNA Sequence Number=SeqID_19715
MAGEGPGYDERMGDPTHWIWWRRDPDHGEVQTAANLGSGEQFTGHHRLRRPRARLYMINAQ

SEQ ID NO: 61495 - protein, 134 aa, Zea mays
  Coding DNA Sequence Number=SeqID_19716
  Subcellular localization annotation: CTP_CleavageSite=56; ConfidenceScore=5.18e-01
MNVCELTLAVLTFPLGQEQISVPLKSRCDTAVVTSAARVIVVAATAKPQALSSPPLAASSSSLALPTLPLPTPRGELRNLPLFILEGSKGEKIEPDECHFIEAASDQADRSLEAVERFLRNFGEAVVITRSLMT

SEQ ID NO: 61496 - protein, 235 aa, Zea mays
  Coding DNA Sequence Number=SeqID_19717
MARAAAARPCGEAQGPPARERGAAGVQGGALPRVRQRPWGKFAAGRTMACAAAARPCGEAQGPPARERGAAGVQGGALPPGEAAAVGEVRGGDHTGKHGTLPDGTIHGNTELIREEEGGGITLLWRRRRIEGNRWRNRTYARETAGAGESDPMRIEGKTRKLIREEEGLGKPLSPPPHRPPVGYKMEHILAQLSVSLSVGQTAEQVPLNTQLRLAEPRNRIRCCHGLGPPAAEAC

SEQ ID NO: 61497 - protein, 64 aa, Zea mays
  Coding DNA Sequence Number=SeqID_19718
MPRSSAAATPTVCEEVGDDKRVPRLSEGLSSVRGRAGQWALGVGARFWVVRDWGNQSYKVNIQG

SEQ ID NO: 61498 - protein, 146 aa, Zea mays
  Coding DNA Sequence Number=SeqID_19719
MPRSSAAATPTVREEVGDDKRVPRLSEGLSSARGRAGQWALGVGARFWVVRGGPSAYNSGTDPKPPSSGQDCGRSGPKARTVRSAKEYRVNTNGQTSDPLEDRGQSAPKGRTVRATKTSQISNMLLNELLTHEMRSAVSPYANATT

SEQ ID NO: 61499 - protein, 161 aa, Zea mays
  Coding DNA Sequence Number=SeqID_19720
  Homolog annotation: Hit_ID=Q2QRD1; Match level="QueryCoverage=43%, HitCoverage=6%, E-value=3e-13, Identity=54%"; Hit description=HAT family dimerisation domain containing protein
  Pfam annotation: Domain name=hATC; Domain location=42-120; Score=2.9; E_value=0.016; Accession=PF05699.5; Description=hAT family dimerisation domain
MAEALAAMAGGIELAGAKESGWPVRPPLLQPPPSAGFPRHDARRQYASTPLLQPPDANFSSRQTPLLFSSRRHFSSPANNRRHFSSSESAFSLCGRLIEERRRSLTPEHVEMLSLAKDWEQAAVRQQHCVENKDLEELMENMYLDAQEGSTCVGGGDGHDH

SEQ ID NO: 61500 - protein, 154 aa, Zea mays
  Coding DNA Sequence Number=SeqID_19721
MVRCARNHREVLDGCTCRGAPSGGSPDLGLLLSSREGRAKRGRAPPFLLRVATAVEELLPAPCAEEGDGMGEKEKGLVAGGEEREDEVCGRRERVATIYRAKLWTCQTAPAGGRCYSDDLGWRVLAFSACFWIFVTAQNIFLDLHSTIVVQNLR

SEQ ID NO: 61501 - protein, 123 aa, Zea mays
  Coding DNA Sequence Number=SeqID_19722
  Subcellular localization annotation: CTP_CleavageSite=70; ConfidenceScore=5.16e-01
MALGRPYSPFDFVPISLKLAHGARPHLHLPASALPNPLCRAPGLSHGCRASLSLLAVPSLAPRGKALRVCAPSLSSLKSWPWFPSRSVSRKEIPRNRVMKQDSCNVCQVFDVLLDLGFVVIRV

SEQ ID NO: 61502 - protein, 53 aa, Zea mays
  Coding DNA Sequence Number=SeqID_19723
MNNEERVVVRDDMWVPLARDNGNKCEEEGKVFVAPNGVLLEKEFLSKGVSGIK

SEQ ID NO: 61503 - protein, 379 aa, Zea mays
  Coding DNA Sequence Number=SeqID_19724
  Gene Ontology: Mol. function=pepsin A activity; Cellular component =endoplasmic reticulum; Biological process=proteolysis
  Homolog annotation: Hit_ID=Q6ZC30; Match level="QueryCoverage=89%, HitCoverage=77%, E-value=1e-138, Identity=71%"; Hit description =Putative nucleoid DNA-binding protein
  Pfam annotation: Domain name=Asp; Domain location=88-370; Score= -198.7; E_value=0.072; Accession=PF00026.14; Description=Eukaryotic aspartyl protease
MASLVLLLLILLVPTLSLPAAHCNDNVGFQLKLTHVDAGTSYTKLQLLSRAIARSKARVAALQSAAVLPPVVDPITAARVLVTASSGEYLVDLAIGTPPLYYTAIMDTGSDLIWTQCAPCLLCADQPTPYFDVKKSATYRALPCRSSRCASLSSPSCFKKMCVYQYYYGDTASTAGVLANETFTFGAANSTKVRATNIAFGCGSLNAGDLANSSGMVGFGRGPLSLVSQLGPSRFSYCLTSYLSATPSRLYFGVYANLSSTNTSSGSPVQSTPFVINPALPNMYFLSLKAISLGTKLLPIDPLVFAINDDGTGGVIIDSGTSITWLQQDAYEAVRRGLVSAIPLTAMNDTDIGLDTCFQWPPPPNVTVTVPDFRTGHKN

SEQ ID NO: 61504 - protein, 66 aa, Zea mays
  Coding DNA Sequence Number=SeqID_19725
MANDEVDDAIGNQSRARKFARATRRNWEAMALEEHHGKSSQKLKSNGERMEEKALSVLLAGAQDSE

SEQ ID NO: 61505 - protein, 130 aa, Zea mays
  Coding DNA Sequence Number=SeqID_19726
MAHLWRAATREGELCVTAAVLACGSRCSSALRESVREEISARVALGGMAIPHRSPCPAAGPLCIVDRDRRDLITGIVAPMTFALSSTPCSISLIGFWGRGEPGGLHAGDSTATVGRVAPPSGVIVRGLVV

SEQ ID NO: 61506 - protein, 360 aa, Zea mays
  Coding DNA Sequence Number=SeqID_19727
MVEVFTCGEPPGGLLPSQAVGNYRSEDPVGTNSNAALDHQVNSLGVEITVGSDMPPWQKSRKKWFPQKRSVRRPRGDLLRRKLRPSSRKKGQSLLRLRLSSYVRRWLNYRHRRTPPWRSCPCSGFRSEGFEQSVQTNARAVFEDFCRVYELLGAANHPLEFEGDNLFDRWIKWLRTEMHGLPDVIGLLMTFSTLVTQESSFESLIREGCNHMACLSSEDLVVNFSVYSEERTSYITETGDTSDAVVTEPAEAAPAELHVNAAAAMEGVLHAAGIVVNVVQVEAASMRGETVRRASCACANDRLRNQRATRGPCQQSPGRTGLSGVLRGAWLQQSTSPEKEGDCALFTIRCAHGQKATIAF

SEQ ID NO: 61507 - protein, 82 aa, Zea mays
  Coding DNA Sequence Number=SeqID_19728
MEVPVLLHRLSTTSRSLASQEDGRWYATQEDGSGLQPYFSKFVGFVTSHAFMVYLTRQWYAFLWVPLQALLYASLQMQGFDF

SEQ ID NO: 61508 - protein, 207 aa, Zea mays
  Coding DNA Sequence Number=SeqID_19729
YVVSFVSFHEWGTRVSVSRFMRALPHYYGRLRDWGLNTIRVIVAFHHRRVLPLVERCLRLDEMTPEASMESSRMALAALSTNELLKRIKGGDGEGGLYHPCRNAPRAGLCIPEFPYGVTTLSTDELLKRIKGAMGKADYTIPVVMRPEQGYVSPMSPEPFASAFALISLSQSVLLSIRKGYGGTEPTCLRSYKTRLTGQRRLAIEQQ

SEQ ID NO: 61509 - protein, 100 aa, Zea mays
  Coding DNA Sequence Number=SeqID_19730
MKRKTWRTHWWGFDYEAGVREGRTVEERLWVGRGNSSEEFQPWGGGLRHARAWTGFSRARGTPETNAGALDRANSAGHRAGAADRHGRTPAKPKLPGDKA

SEQ ID NO: 61510 - protein, 87 aa, Zea mays
  Coding DNA Sequence Number=SeqID_19731
MHDLLLALELLGCSGCLLGQDGGVPGCSDANIDFLPAGCSGGTAAAAEETATGTTAAGSDADAGASAVMIALSFKCWKVGKVWFISW

SEQ ID NO: 61511 - protein, 198 aa, Zea mays
  Coding DNA Sequence Number=SeqID_19732
  Subcellular localization annotation: CTP_CleavageSite=85; ConfidenceScore=5.29e-01
MKTPMGINGHLDLDTEGKSVDQKPSGAGLSAPVALTSALLSLSASRAHLVSSLNRLPRVPVSSRCTVGPPCQIRLPRASPWTSTRAHTPRSPAMTLAHAPQLLFEHRLHPHSLPRAISHNLALSRALPSPLGLAGDLRPPCRSSSSPDAAPSNPELRPKAEKGSRLVGKVYNLCRLLETGGDAGNMEDFEQFQDYDEF

SEQ ID NO: 61512 - protein, 219 aa, Zea mays
  Coding DNA Sequence Number=SeqID_19733
  Gene Ontology: Mol. function=protein tyrosine/serine/threonine phosphatase activity; Cellular component=intracellular; Biological process=protein amino acid dephosphorylation
  Homolog annotation: Hit_ID=Q6K546; Match level="QueryCoverage=84%, HitCoverage=87%, E-value=1e-33, Identity=41%"; Hit description=Dual specificity phosphatase-like
METSQTSNLGIHQELGPEISQNPMGNHINPEKETNETPGSEVNQELVEICQGAVVETDMSQENQAVPEAGLEVNEETMETCQETAAESDVNPEKQTSDPGVIYRCRKCRRMLATQEFVVTHEVGAGGKSFRAGKRSNVHEDDEKPECPCIFVEPMKWMQTVEEGYVANKLFCMGCKAHLGQFNWAGNILLYCYQYLTAISTTLIVSTWAHFICLHIVYA

SEQ ID NO: 61513 - protein, 135 aa, Zea mays
  Coding DNA Sequence Number=SeqID_19734
FFAKKTLYTCADRLTHSVDPAARSRTVCTPIESTVSWFVLVFGARSAPTHILATSLGQGCLDLLKIGHHMAISKDHTDVSATNIIKPTMGALLANDQQPFDDLVRRKEEEVLRQLAEWREKTKEKYLPYFMVDRH

SEQ ID NO: 61514 - protein, 174 aa, Zea mays
  Coding DNA Sequence Number=SeqID_19735
MDVLVPVVHVFDSGRHVFHRQALGRERGIGRDGSAFMVVRWCARFKQQSFEFREAIPPWTGKVVGAATDGSGPTRSGSIEENARARGLPRRSHATVTQASVACPGETDVAGPHVGTMRRACSRNGQLGQIGDVRYYTLTRTQEFGPLQKPPCNSKVLHEGSEAALVYLGTWYPK

SEQ ID NO: 61515 - protein, 200 aa, Zea mays
  Coding DNA Sequence Number=SeqID_19736
MALISGGGSSSNPSPAIFALSYLLSITMEQVESLRDEELVLVASRFTQFHNNHQNRWHGRSKDGCFNMMTPTTPLLVAPKRASRRSRGGFVKEAIKDKYLQKAKIKVCAFITSLSDLDHNSDDEASSSSDEETDRRVEDKLNRLCFIAYTTGGLCTMALGNEAVGGNDQDIGNCSASEVSHSTDDLIAEINVLTYFGEFG

SEQ ID NO: 61516 - protein, 59 aa, Zea mays
  Coding DNA Sequence Number=SeqID_19737
MDLLQELEGCKGSTKIYVVHHDDHQSSPVAYEVAIVGHQPSSTLDTYEDGPSHCLTEEV

SEQ ID NO: 61517 - protein, 131 aa, Zea mays
  Coding DNA Sequence Number=SeqID_19738
  Pfam annotation: Domain name=VQ; Domain location=15-45; Score=31.3; E_ value=3.4e-06; Accession=PF05678.4; Description=VQ motif
MDNKSVATARGVKVTYIETQFVTSDAAGFKDLVQRLTGRSATPPVPHRPRPCRRDYDYGRRGTAAAGADAGQGYRYAVAQTRPPAVITSRTPSYLHEDGMGGLLHDIDMCDFSDFFYVGASHRSDGGGFPY

SEQ ID NO: 61518 - protein, 201 aa, Zea mays
  Coding DNA Sequence Number=SeqID_19739
  Gene Ontology: Mol. function=protein tyrosine/serine/threonine phosphatase activity; Cellular component=intracellular; Biological process=protein amino acid dephosphorylation
  Homolog annotation: Hit_ID=Q6K546; Match level="QueryCoverage=92%, HitCoverage=86%, E-value=1e-33, Identity=42%"; Hit description=Dual specificity phosphatase-like
METSQTANLGIHQELGPEISQNPMGNHVNPEKETNEIPGSEVNQELVEICQGAVVETDTIQENQAVPEAGLEVNEETVETCQETAAESDVNLEKQTSDPGVIYRCRKCRRMLATQEFVVTHEVGAGGKSFRAGKRSNVHEDDEKPECPCIFVEPMKWMQTVEEGYVAKKLFCMGCKARLGQFNWADVLEVTHPKGECPSAN

SEQ ID NO: 61519 - protein, 423 aa, Zea mays
  Coding DNA Sequence Number=SeqID_19740
  Gene Ontology: Cellular component=integral to membrane
  Homolog annotation: Hit_ID=Q337V5; Match level="QueryCoverage=99%, HitCoverage=74%, E-value=1e-104, Identity=52%"; Hit description =Sodium/calcium exchanger protein, expressed
  Pfam annotation: Domain name=Na_Ca_ex; Domain location=11-131; Score =39.2; E_value=1.4e-08; Accession=PF01699.14; Description =Sodiumcalcium exchanger protein
MAAWLAVLFYLLADTVAVYFCSSLEGLARLLRLPPAIAGATLLSLGNGTAAAVGLSGVLGGAMFVSSAVLGVIAIRLGGQEVAVHRASFFRDAAFLFLALVAVAVVVAAGQVTIWAAAGFASLYLVYVLAVAFTPDRWTRRHDAHAVDDPASAAAVSELHNVTETKFYTDQEARDPLLPDTAPLLQYYAGEANSNSNDGSTGNKSVFWTVLRLLELPLSLPAAADDSGREQRAVEQDGRGDRGHARPHLPVLALEPPRHGGPVRYRPPRRPCWSRAGPHCLPHHGSLRPTNPIPRRVARRRVRHERGVGVRDRQRGPVAAGLGGNHPFRGLGGAGGDRARLGKLHQRPNSERGGGISRRRRAGGRVRLLRRAGVQRSRGPGPVHAVSVLERVPAASGDTQGAWALPNSGFCCRWAFVGRCDAT

SEQ ID NO: 61520 - protein, 123 aa, Zea mays
  Coding DNA Sequence Number=SeqID_19741
MAPLREEYSRDNDTLNNTVALIRCVAKHQSIPIFYCLVPPDHVLVGLNIWHPPFVLRQTIPAMAPKKANLKATTSLDDAAKAVLLAEKKGKATLVGDVPHEALEDGAVHTEGTVCTCSSEGLP

SEQ ID NO: 61521 - protein, 184 aa, Zea mays
  Coding DNA Sequence Number=SeqID_19742
  Subcellular localization annotation: CTP_CleavageSite=94; ConfidenceScore=5.21e-01
MAPSTPLAPRAAPSTTPEPHTSLSNLPTPCAAPSISAAHFGDPALIYHRRKRATPSAHADQASSTSMTRFTNPNLVYHCRERATPVSPDTSSIRIEAPVYQPIAIDRNSGHVYLMVTLCTAGVLHPVDRLILATNKTTTPSNAYSVLSFVCASLASCYGEGVRGPVGQPHFGPSAASTQHQHSH

SEQ ID NO: 61522 - protein, 71 aa, Zea mays
  Coding DNA Sequence Number=SeqID_19743
  Subcellular localization annotation: CTP_CleavageSite=32; ConfidenceScore=5.05e-01
MPRWELHAPPPPPQGSGVMSHNMPPPVIPTLRGASGGEGATTGETPNQINDFVNDFFASGGSGHNSNDPYM

SEQ ID NO: 61523 - protein, 522 aa, Zea mays
  Coding DNA Sequence Number=SeqID_19744
  Gene Ontology: Mol. function=oxidoreductase activity
  Homolog annotation: Hit_ID=Q109M9; Match level="QueryCoverage=80%, HitCoverage=76%, E-value=3e-68, Identity=37%"; Hit description=ENT domain containing protein, expressed
  Pfam annotation: Domain name=ENT; Domain location=17-88; Score=40.3; E_value=6.8e-09; Accession=PF03735.5; Description=ENT domain
MEDSVQVACVISNATDAAFQIYSLRRSAYAAVLRAFCAQSDVLSMVKILSELKNELRISHGEYKEILMKASVNEHIKSLRKFSLAKLSVVTKNDPAFDVHAMLHDKIGSTGEVCTSSTSCLSLIQQSPISENSMSSTRDIGLSDSSNGAKEGPNFESRTVVSAKRLKTVNGHAPAYLKCGPSNQLPVEVCAMMVNGCTADTLDCETLCCQVKSGCVSSPIFQEKHSRLNAGQSSLSVDHARKESEKMKSEAPEMSVSESLGVVDRKYEIEYQKAKNKDSDLEHGSEIIKLCLTASLLNKVERIFKENPDSANLEKAKLTLKDQEKDLLDALAKLSEVAYDVVYFGADHNHRPVNLKKHDDGKSTEAVLPKLVSSSDETSPETRLGDCGTENKVKILMAVGPASAPLAAPRKKRVWTKLTAEQKERMLEFAQRFRWRVHKAGAEAVDAFCAQIGVTQRVFKNWINNNRHLAKIPPSALPSHHQDHPAATAQGSMTEEGKSLEAEVDVSADGGKDGENEVSDPI

SEQ ID NO: 61524 - protein, 118 aa, Zea mays
  Coding DNA Sequence Number=SeqID_19745
MGHWRRSLPGWVRYAVQDAFLICNARDGSEAEGLSSIEGDQGVEDDGHRVVVDQHRTPFLARQLKVTSELCDCSVAIDEDGLAALHIRGLDRLLVRVIAECLAPRVLTTAPPEISVLR

SEQ ID NO: 61525 - protein, 85 aa, Zea mays
  Coding DNA Sequence Number=SeqID_19746
MGRGVGRLTCAYTRLELFWSWIEGVVAGAEPHGCCSLASCRGMWRMWIWSRSVMAPEHNAEAEEGGGCGVNDGSGEALRTREGRQ

SEQ ID NO: 61526 - protein, 72 aa, Zea mays
  Coding DNA Sequence Number=SeqID_19747
  Homolog annotation: Hit_ID=Q10GR2; Match level="QueryCoverage=79%, HitCoverage=4%, E-value=5e-09, Identity=57%"; Hit description=HEAT repeat family protein
MSRRATLVVQTLPYIVTLVLTSNSSTRPVLRGLFVHRDALPLLNYDNDQSIFDFNMLLLICGDGGRGWDGSG

SEQ ID NO: 61527 - protein, 180 aa, Zea mays
  Coding DNA Sequence Number=SeqID_19748
MEEVDTLLCNHVAFIAEIHKRLFQAYHRACQCPAAAATTWPPRFSYADVGRLGGRELGDRSLLTVTGSLSSQAQAQDALARRALSGSSKSTWAGGTCVGVVRGKLTLMEPPAIDCKELKTRHGRVASQKSIQCNAHALTRPRAAAGGFADAGLQVVRTCMLVATIGHSEASAEVVEGLRQ

SEQ ID NO: 61528 - protein, 332 aa, Zea mays
  Coding DNA Sequence Number=SeqID_19749
  Gene Ontology: Mol. function=voltage-gated ion-selective channel activity; Cellular component=mitochondrial outer membrane; Biological process=anion transport
  Homolog annotation: Hit_ID=Q9SPD8; Match level="QueryCoverage=79%, HitCoverage=100%, E-value=1e-132, Identity=87%"; Hit description =Voltage-dependent anion channel protein 1b
  Pfam annotation: Domain name=Porin_3; Domain location=71-325; Score =355.7; E_value=7.5e-104; Accession=PF01459.12; Description =Eukaryotic porin
  Subcellular localization annotation: CTP_CleavageSite=66; ConfidenceScore=5.16e-01
KEKENKLGFSRGHTAGSTAWLCPPLFSPHSSASPPPIRRLPIILPPNSHPAASPRHHTSSRRVVTGVKMVGPGLYTEIGKKTRDLLYKDYQTDHKFTLTTYTSNGVAVTASSTKKADLILGEIQSQIKNKNMTIDVKANSESNIITTITVDEIATPGLKTILSFAVPDQRSGKVELQYLHDYAGVNASIGLTANPVVNLSAAFGTKAVAVGADISLDTATGNLTKYNAALRNNKGDSLTGAYYHKVSELTNTAVGAELTHSFSTNENTLTFGGQHALDPLTVLKARINNSGKASALIQHEWRPKSLVTISAEVDTKTIEKSSKVGIAVALKP

SEQ ID NO: 61529 - protein, 114 aa, Zea mays
  Coding DNA Sequence Number=SeqID_19750
MPNPKLGAASHPQFPFLFGLFLEHTFCRVPGSADGSWAARMSCSMGHEPSCGAELEKLHHRLGHLLDYVRARDTSLIEHVDNAPYRIRDTADFCVYRGAIVALLMGDICSGCRL

SEQ ID NO: 61530 - protein, 227 aa, Zea mays
  Coding DNA Sequence Number=SeqID_19751
  Homolog annotation: Hit_ID=Q6K559; Match level="QueryCoverage=90%, HitCoverage=88%, E-value=1e-74, Identity=71%"; Hit description =Putative holocarboxylase synthetase
MAGKKRKAEAARLEETDRALYGAFRGAANSLSQLYTLGMGAQKASFHAGERHAMPFPFWVEAAVGVSLCALQLARLRLALVRFRGMEKLYEWILRQHENGLRLTVADVASHIQHEIQYGGDNASASPRSQYPSQSTAPTMHIPNTSNQQPSPSLFASGNPGLTQSKNSMVFSSALSSPIRRSLQPYHLEQDGDAGYFANGASRDVNPTASNDSSMDMHSDSPAHDSY

SEQ ID NO: 61531 - protein, 203 aa, Zea mays
  Coding DNA Sequence Number=SeqID_19752
  Homolog annotation: Hit_ID=Q5U9F2; Match level="QueryCoverage=18%, HitCoverage=22%, E-value=2e-08, Identity=70%"; Hit description =Glucosamine-6-phosphate acetyltransferase
  Subcellular localization annotation: CTP_CleavageSite=35; ConfidenceScore=5.06e-01
MDPAPAAVPADRGCTQLPPTDLAHNRARTRMNPAPAAVPAEIASLNRAWTQPPRHAHSALALRDAGSPRALSRFSTSSLGAGRGGRSCAGSPASYPCACNRAGPPRPQLDLLGVGLIVRRVHHLSQKLPRTESGTAIVPERDYKSASLKKREEFVAHSSNVNCLKISRDVGCYKVILDCTPELGAYYAKCGFVEKGVQMVVYF

SEQ ID NO: 61532 - protein, 215 aa, Zea mays
  Coding DNA Sequence Number=SeqID_19753
  Gene Ontology: Mol. function=RNA-directed DNA polymerase activity; Cellular component=mitochondrion; Biological process=RNA-dependent DNA replication
  Homolog annotation: Hit_ID=Q8S461; Match level="QueryCoverage=99%, HitCoverage=11%, E-value=1e-106, Identity=90%"; Hit description =Putative prpol
MGPIKVLKGVQRVMGCLVALSRFISRLGDKGLPLYRLLRKTECLTWTLEAEEALRNLKALLTNAPILVPPAAGEALLIYVAATTQVVSAAIVVERREEGHALLVQRPVYFMSEVVSETKIRYPQIQKLLYIVILTRRKLRHYFESHPVTVVSSFPLGEIIQCREASGRIAKWAVEIMGETISFAPRKAIKSQVLADFVAEWVDTQLPTTPIQPEL

SEQ ID NO: 61533 - protein, 86 aa, Zea mays
  Coding DNA Sequence Number=SeqID_19754
  Gene Ontology: Mol. function=nucleic acid binding
MKVHLMYHCGPNAKRTEAQAKQQSKRKWDSSKEKVKEKRRVHKKGDEANKDFQELADELGRQLRGQSPLHSMRWERVILDEVVSAA

SEQ ID NO: 61534 - protein, 77 aa, Zea mays
  Coding DNA Sequence Number=SeqID_19755
  Subcellular localization annotation: CTP_CleavageSite=28; ConfidenceScore=5.57e-01
MSYFKTLKHSSFFSKNKSHSPMLNQRPLESKVSVKDCNFVSKFWSQYIPLSRKSLGPIRRYVGLDITNNMKFTFGSE

SEQ ID NO: 61535 - protein, 145 aa, Zea mays
  Coding DNA Sequence Number=SeqID_19756
  Subcellular localization annotation: CTP_CleavageSite=36; ConfidenceScore=5.36e-01
MYPIARMRSSRTFVYASHRLAWTAVSYTPAGHRIVRSSRTRRASPRAPSLRYSLYERGLLLRLELFGAASFEHLVEQANGTLRVAMKTEAMTWTTGARDAPMLQSGGAGSGDDGSQAGPVVAGGGGGAGVWLTGESWNRREHGAK

SEQ ID NO: 61536 - protein, 359 aa, Zea mays
  Coding DNA Sequence Number=SeqID_19757
  Gene Ontology: Mol. function=structural molecule activity; Cellular component=protein storage vacuole; Biological process=lipid transport
  Homolog annotation: Hit_ID=Q949F3; Match level="QueryCoverage=54%, HitCoverage=78%, E-value=2e-77, Identity=75%"; Hit description =Putative vesicle-associated membrane protein
  Pfam annotation: Domain name=Motile_Sperm; Domain location=65-185; Score=111.7; E_value=2.2e-30; Accession=PF00635.16; Description=MSP (Major sperm protein) domain
MIGIHPLQSGVASARGPNNGDGLLEGERGRKKYMERGFNSPKGLNKATAHASATRAAAMGGSGTLISVYPDELTFLFELEKPCYCNLKVVNNSEHHVAFKVKTTSPRKYFVRPNASIVQPWDSCTITMFVRLHAFLSGGTVTLQAQKEYPPDMQCKDKFLIQSTKVAASTDMDEIPPDTFNKETDKVIEEMKLRVVYTLPSGGGSDDSSVSSLGSRSFKAASDDLMMLKNASIEEIQTIQRVKEERDNMLQQNQQMQRELVFPDFTRIVLTFVLGLIFFFMNIYCFRMCFGGVGAAKIFDLSTRAWFILHLYLPLVFLFFLYKFKSWSDPLIRRPPTTYTNLERHPGAEADAVESKVEE

SEQ ID NO: 61537 - protein, 132 aa, Zea mays
  Coding DNA Sequence Number=SeqID_19758
  Subcellular localization annotation: CTP_CleavageSite=61; ConfidenceScore=5.01e-01
MDRWTGVVYVPLSRGGPLFRVAASLLLSPAKTLAVPRVNAILFTGDRVRGTGDPVIERLSDAAHLAGVLAGKLPGEANAWVVDAARFAGPFAVYRELVPTVDAAGDPKGYDPTGFPAAAGVANILARSIGEV

SEQ ID NO: 61538 - protein, 145 aa, Zea mays
  Coding DNA Sequence Number=SeqID_19759
MGKSKKGSSSSHHSGDKRKREPTPPSEDFGDSEYSEEEFSSESEGSPAPVPPPASSDDSDDSQGIAAEVWTYIRAVECAGLEGSDESEYSSDSSEEGSGGDGGDDDDGGDGDGGGDSGRGGDGGSKGGNGGGSKGSSKGSNKASG

SEQ ID NO: 61539 - protein, 267 aa, Zea mays
  Coding DNA Sequence Number=SeqID_19760
  Gene Ontology: Mol. function=ubiquitin thiolesterase activity; Cellular component=intracellular; Biological process=ubiquitin -dependent protein catabolic process
  Homolog annotation: Hit_ID=Q6H7H9; Match level="QueryCoverage=99%, HitCoverage=99%, E-value=6e-98, Identity=71%"; Hit description =Carboxyl-terminal proteinase-like
  Pfam annotation: Domain name=Peptidase_C12; Domain location=4-253; Score=223.2; E_value=5.8e-64; Accession=PF01088.11; Description =Ubiquitin carboxyl-terminal hydrolase, family 1
MGKRWIPLEANPDVLNQGFVSLSLIAAAELGYIQFIWGLGVHEEDVQFCDVYGLDDELLAMVPQPVLAVLFLYPLTSLDEEKEESSVSAATSTSAGKELSKKVYFTKQTVGNACGTVGVIHAIGNATSQIKLVEGSYFEKFYKQTADMDPAQRAAFLEEDDEMEDAHSVAASAGDTDVNVDVNEHFVCFSCVDGELYELDGRKSQPTSHGPSSPETLLQYWRAAGDSLASNMVVFIGYGKDAAKVIKARIAENPNSMNFNVMALSKK

SEQ ID NO: 61540 - protein, 212 aa, Zea mays
  Coding DNA Sequence Number=SeqID_19761
  Gene Ontology: Mol. function=nucleotide binding; Cellular component =membrane; Biological process=small GTPase mediated signal transduction
  Homolog annotation: Hit_ID=Q05737; Match level="QueryCoverage=61%, HitCoverage=65%, E-value=7e-69, Identity=99%"; Hit description=GTP -binding protein YPTM2
  Pfam annotation: Domain name=Arf; Domain location=63-211; Score= -62.5; E_value=5.9e-05; Accession=PF00025.11; Description=ADP -ribosylation factor family
  Pfam annotation: Domain name=MMR_HSR1; Domain location=78-193; Score =0.2; E_value=0.00096; Accession=PF01926.13; Description=GTPase of unknown function
  Pfam annotation: Domain name=Miro; Domain location=79-193; Score =87.8; E_value=3.3e-23; Accession=PF08477.3; Description=Miro-like protein
  Pfam annotation: Domain name=Ras; Domain location=79-208; Score =230.0; E_value=5.1e-66; Accession=PF00071.12; Description=Ras family
  Pfam module annotation: Pfam domain module=Arf::MMR_HSR1::Miro::Ras; Domain location=63-211::78-193::79-193::79-208
MDTKPFLLCLLRFSCAGGAVACLPAWTVLREETLPCLRRTEANAGPTATKASARARTAMTHAGRARGFRSAALDDYLFKLLLIGDSGVGKSCLLLRFADDSYLDSYISTIGVDFKILTVEQDGKTIKLQIWDTAGQERFRTITSSYYRGAHGIIIVYDVTDQESFNNVKQWLNEIDRYASDNVNKLLVGNKSDLTANKVVATETAKLTHPIP

SEQ ID NO: 61541 - protein, 401 aa, Zea mays
  Coding DNA Sequence Number=SeqID_19762
  Homolog annotation: Hit_ID=Q10AA9; Match level="QueryCoverage=88%, HitCoverage=74%, E-value=6e-24, Identity=42%"; Hit description=La domain containing protein, expressed
  Pfam annotation: Domain name=Extensin_2; Domain location=1-312; Score= -129.9; E_value=0.031; Accession=PF04554.4; Description=Extensin-like region
  Pfam annotation: Domain name=La; Domain location=300-387; Score=71.4; E_value=2.9e-18; Accession=PF05383.7; Description=La domain
  Pfam module annotation: Pfam domain module=Extensin_2::La; Domain location=1-312::300-387
  Subcellular localization annotation: CTP_CleavageSite=29; ConfidenceScore=5.25e-01
MEPPAAAAADSSPDPTPQDQFPAPSPSPSASPAKRSAWKHPSPNGPAVMDANHWPALSDAAKGIKLPDSSSSSPAPVAAPSAVANSSSSQKHGAHHVRHKSARRGGGGEHSPRDHPDRTTATGWDHAGGGGGRGAQRNHNNGGGRRGNAAAASAAGPSHHGAGGSGGGGGFGARRRGAYEPPFYRGPPPPVGMGHYMRGAPPPPPPPPPMTVAPPFMGPPPPPVSPMRPFAGPMVFHDMSSPVSPIYFYGPPPPEALRGLAIAPPMVGPPAYPYFQAQPEPQPEPQPDAEPDVEEERVKLLKQIEFYFSKENLCSDVYLRQQMDDQGWVDISLIAGFKKIFVLLNYEPAQPMMYRVFALLDLVFLCVEKVQGLKKDLQYIKETVQSSSILEMKAAVSVNAG

SEQ ID NO: 61542 - protein, 504 aa, Zea mays
  Coding DNA Sequence Number=SeqID_19763
  Gene Ontology: Mol. function=transcription factor activity; Cellular component=plastid; Biological process=regulation of transcription, DNA-dependent
  Homolog annotation: Hit_ID=Q9ZPL0; Match level="QueryCoverage=84%, HitCoverage=93%, E-value=1e-165, Identity=91%"; Hit description =Sigma factor SIG6
  Pfam annotation: Domain name=Sigma70_r2; Domain location=268-338; Score=83.9; E_value=4.8e-22; Accession=PF04542.4; Description=Sigma -70 region 2
  Pfam annotation: Domain name=Sigma70_r3; Domain location=342-423; Score=76.3; E_value=9.6e-20; Accession=PF04539.6; Description=Sigma -70 region 3
  Pfam annotation: Domain name=Sigma70_r4; Domain location=436-489; Score=72.8; E_value=1.1e-18; Accession=PF04545.6; Description=Sigma -70, region 4
  Pfam module annotation: Pfam domain module=Sigma70_r2::Sigma70 _r3::Sigma70_r4; Domain location=268-338::342-423::436-489
MANCGRTGLGDWLASPLVAQPGQGIWRMDMVAWQPHVALVSKLQEQCFRLLLPIPIPHHRYYCPWALAELIRYHLAAVPMIHDTSSSRASTACHYSPSLVAEEQLHGSKDTLTLKGEKALLELLLGMALDQHVDGRKLITQQEAEDSDFESYLREATSRVLYQPTFIEEDDDDDSVSESSSASLAKPAGTLDLGKLTEEPQLDVPQPHRRSIYIYFAQNLMKLEGAQRNLQAQCGREPTVEEWAQAVGMSCRELQSCVRTGRRCREKMARSNFRLVIHVARKYEGCGLDIQDLVQDGCCGLMKTFEKFNPSKGCRFPTYAYWWIRQSIKKSIFKNSRLIRLPESVYALLRKVGKARMECIMDGEQPTNEVVARRAGITIEKLAKLRAKTRKVRSMQDRVWSDDGVTYQEITEDPNIEGPEVSVDRLMMRQQVRSFLTGILSPREKEIIEHRFGIHDGQPKTLHVIGDMYGLSKERIRQVQNKALDKLRNSISAQGFHVYFDLLT

SEQ ID NO: 61543 - protein, 72 aa, Zea mays
  Coding DNA Sequence Number=SeqID_19764
  Gene Ontology: Mol. function=peptidase activity
  Homolog annotation: Hit_ID=Q10AA4; Match level="QueryCoverage=60%, HitCoverage=14%, E-value=2e-14, Identity=81%"; Hit description=OTU -like cysteine protease family protein, putative, expressed
MASPTRRACRTRLVVYGLVDLKVKGDGNCQFRALSDQFYRTPEHHRFVRQQVVKQSCRFWSLTTKGKGWWPF

SEQ ID NO: 61544 - protein, 390 aa, Zea mays
  Coding DNA Sequence Number=SeqID_19765
  Gene Ontology: Mol. function=RNA-directed DNA polymerase activity; Cellular component=mitochondrion; Biological process=RNA-dependent DNA replication
  Homolog annotation: Hit_ID=UPI00005A975E; Match level="QueryCoverage =89%, HitCoverage=22%, E-value=1e-173, Identity=87%"; Hit description= PREDICTED: similar to Retrovirus-related Pol polyprotein from transposon 297
  Pfam annotation: Domain name=rve; Domain location=141-300; Score =118.5; E_value=1.9e-32; Accession=PF00665.16; Description=Integrase core domain
MDSVYSGPGGYLSPTPSAQPEAPSAPEGEALRVEEERNGSRLIETGRPRTCNISIEESCPSTEPKLGDWRGAPSRSSCWGTRRSSTTAAPQASSSNAYPSPKGFYWPTAVADATRIVRTCQGCQFYAKQTHLPAQALQTIPITWSFVVWGLDLIGPLQKAPGGYTHLLVAIDKFSKWIEVRPLNSIRSEHAVAFFTNIIHRFGVPNSIITDNGTQFTGRKFLDFCEDHHIRVDWAAVAHPMTNGQVERANGMILQGLKSRIYNDLNKFGKRWMKELPSVVWSLRTTPSRATGFTPFFLVYGAEAILPTDLEYGSPRTGAYDDQSNRTNREDSLDQLEKARDMALLHSARYQQSLRRYHARGVRSRDLQVGDLVLRLRQDARGRHKLTPPW

SEQ ID NO: 61545 - protein, 45 aa, Zea mays
  Coding DNA Sequence Number=SeqID_19766
MGPQAGNFGALATAKISADASLAGGIIGKDGDLITTISGEVEAVV

SEQ ID NO: 61546 - protein, 93 aa, Zea mays
  Coding DNA Sequence Number=SeqID_19767
MDALKFEYPNYERINKGAKGAKRKRIVSVLSRQAVGMVKEDEKVLKKRKSTPEPKVAALKKRKAATPEPKVTEVEEETPSTPPAAEVEEILKV

SEQ ID NO: 61547 - protein, 98 aa, Zea mays
  Coding DNA Sequence Number=SeqID_19768
MGDCELGPEKARAMAGAEGRGAGLSAPCTQGKQQGKRSSAREGAWRGSRLKQGWRWEEREDAVAAGRSSLLLAICLYTEQSERGFGERTIEQLIQPRV

SEQ ID NO: 61548 - protein, 76 aa, Zea mays
  Coding DNA Sequence Number=SeqID_19769
MESHDLRAEWESRLVGKVCNLCRVLETGISAELTLKSGLGILSDYKNFGYFYDDGGDAGNMEDFEEFQDYDEFQLS

SEQ ID NO: 61549 - protein, 136 aa, Zea mays
  Coding DNA Sequence Number=SeqID_19770
MGEGVRASGVRGSSGQGRGVRVQHLILHNWEAKYPLTNKLGDLPPALAPPWSRNNKTRLFHHLQQHGFKNPEYRVYFRKSYPSKEKYSQGYAGFWESRWFRVRSTNVKVDVVLNRWILNLRDNFFFNYSLFLVFYT

SEQ ID NO: 61550 - protein, 71 aa, Zea mays
  Coding DNA Sequence Number=SeqID_19771
METLLSITVALGKVFVTVTWHHDGDFSLSTARQKVLSKEFIADVQFAETSLLSGFEALPSASGTRQISCVR

SEQ ID NO: 61551 - protein, 81 aa, Zea mays
  Coding DNA Sequence Number=SeqID_19772
  Subcellular localization annotation: CTP_CleavageSite=29; ConfidenceScore=5.41e-01
MARLWRATRPRPLPSAARPPLRSATSPARAAPVPGVATTVAMGLMVLGSDSGNGCPHCNHCSGEDEAVEGDFQEFQDYDEF

SEQ ID NO: 61552 - protein, 169 aa, Zea mays
  Coding DNA Sequence Number=SeqID_19773
  Subcellular localization annotation: CTP_CleavageSite=93; ConfidenceScore=5.40e-01
MARRPGAAPAPPDELPPSPPPSGARPGRGSVPARPGLAPAWRAPLPATGGARPPARPGLARPWRTRPLACRPHPTRPRSLPGLGVAQPWLPARGSPAKARLWRATRPRPLPSAARPPLRNATSPARAAPVPGVATTVAMGLMVLGCDSGNGEDEAVEGDFQEFQDYDEF

SEQ ID NO: 61553 - protein, 271 aa, Zea mays
  Coding DNA Sequence Number=SeqID_19774
  Homolog annotation: Hit_ID=Q6AVT7; Match level="QueryCoverage=16%, HitCoverage=25%, E-value=2e-08, Identity=72%"; Hit description =Putative ribosomal protein
MEFINWSPPQIWGIDANVPWARTAHLRGRPLVAVDNGRTGSPPHPTVVVTVDVIAGRCPPADLEEGGGGPSDLGGRERSEGELETVRSRFDGPVQLSNPLCNEKFPDESNLAPTAHIFSAILSTTSFQTPSFNTAGAFSTSSLASFRPRSLNGGGRRALGRGRGEVCHGGPGCHEHMVDAEAAAQASREEASRTYGEPAGLVNKHRAVWDRVDGGGGGSIILYVEEVGAAGGGGTSARAVALGGFVGVGVCLDEDTARCVATTQVVGNSST

SEQ ID NO: 61554 - protein, 113 aa, Zea mays
  Coding DNA Sequence Number=SeqID_19775
  Gene Ontology: Mol. function=4 iron, 4 sulfur cluster binding; Cellular component=chloroplast; Biological process=electron transport
  Homolog annotation: Hit_ID=P41347; Match level="QueryCoverage=91%, HitCoverage=61%, E-value=2e-44, Identity=97%"; Hit description =Ferredoxin-thioredoxin reductase catalytic chain, chloroplast precursor
  Pfam annotation: Domain name=FeThRed_B; Domain location=45-113; Score= -0.9; E_value=0.026; Accession=PF02943.6; Description=Ferredoxin thioredoxin reductase catalytic beta chain
  Subcellular localization annotation: CTP_CleavageSite=33; ConfidenceScore=5.39e-01
MTSTVTTTVGCGGLPVRPLSTATRGRPRRCAVRAQAAGADASNDKSVEVMRKFSEQYARRSNTFFCADKTVTAVVIKHCGYDLHLVCRDLLITGILLELLYALVGIMMTKLRR

SEQ ID NO: 61555 - protein, 121 aa, Zea mays
  Coding DNA Sequence Number=SeqID_19776
MAAVGKRRSDNFFIEEEAEEEVLTVTSSVGSSSGSSSEAAGHLLPWRRLRPVPRGLRAVPQRYLRQKLYDFMLKHGVRISVYCMYIGKYMSGTIIRGTLKTPNSQLVTPISIKLQRPDGYD

SEQ ID NO: 61556 - protein, 107 aa, Zea mays
  Coding DNA Sequence Number=SeqID_19777
MENRQCLEAAPTPTTRAADENYLDGGRTLLHSYLLPLRRWPNSGLVVRAKLAQNYNGSEVHTLIPAGKSAHDSAGAGILGRGRCRSPAMRAEQGESGANRQGPQSND

SEQ ID NO: 61557 - protein, 246 aa, Zea mays
  Coding DNA Sequence Number=SeqID_19778
  Pfam annotation: Domain name=Collagen; Domain location=150-210; Score= -46.2; E_value=0.081; Accession=PF01391.8; Description=Collagen triple helix repeat (20 copies)
MHIFISKPKLPETIYYTGKHVSYVFEDLRKRKAPNIDGAKCRWLELLIDYWRLFGEHGRKWTDFGDSEYSEEASSESDRSPAPASPPASSEDSDDFMGLSSTARAYWRSIECAGLGGSNESGVYSDEADSSDSFEEWSGGDGDDEGDDSGDDSGEGDGGESGSDGREGDSGNGSGDGGDDGSKGDGGDGGSDGGKGDDGGSGDGGKGDGSSNKGDGNGGMASGHTGTGNVRVMTEAFAFPSGDLAL

SEQ ID NO: 61558 - protein, 88 aa, Zea mays
  Coding DNA Sequence Number=SeqID_19779
MRRGSGAAATGLLRHYVEHAKGATQRRSTWLRELASRLLREVRQGGSHGSPGRDVTKSQSVRHGWKKRPVGRVLDWSRVCASGAQPSE

SEQ ID NO: 61559 - protein, 39 aa, Zea mays
  Coding DNA Sequence Number=SeqID_19780
MAKAFQVCAEVEHRSLRESAGVGSPELGPALFAIVDFGL

SEQ ID NO: 61560 - protein, 130 aa, Zea mays
  Coding DNA Sequence Number=SeqID_19781
MVRGAVTRAPWTSRSKGRKMAGEELEADAPMAVKARARARADHGKLLCRREEGHSEGRAPARVRTRGGPCEKEVEEGRRWSAASVREQWKSCPGWSSVEGGRRQGDARKCFCAKEHFCSKERWLLVDLMW

SEQ ID NO: 61561 - protein, 156 aa, Zea mays
  Coding DNA Sequence Number=SeqID_19782
  Subcellular localization annotation: CTP_CleavageSite=72; ConfidenceScore=5.28e-01
MRQPSLDSVPTGGPMAPVPLPPVLTIATDKWALEASRLSPSQSLARRVIASLTARARLASAPPCTLGLGRFSAMWARTVGVVSYPVSRMQQTLSRALNNLCEIFGADVANLPASPGYKKCGEFRRHGFGAIVADRPQMAILVNGGPCGWSATSRRR

SEQ ID NO: 61562 - protein, 122 aa, Zea mays
  Coding DNA Sequence Number=SeqID_19783
  Subcellular localization annotation: CTP_CleavageSite=72; ConfidenceScore=5.26e-01
MRQPNLDSVPTGGPMAPVPLPPVLTIATDKWALEASRLSPSQSLARRVIASLTARARLASAPPCTLGLGRFSAMWARTVGVISYPVSRMQQTPSRALNNLCEIFGADVANLPASPGYKSEPP

SEQ ID NO: 61563 - protein, 247 aa, Zea mays
  Coding DNA Sequence Number=SeqID_19784
  Gene Ontology: Mol. function=protein binding; Cellular component =chromosome; Biological process=chromosome organization and biogenesis (sensu Eukaryota)
  Homolog annotation: Hit_ID=UPI00005A5838; Match level="QueryCoverage =55%, HitCoverage=88%, E-value=4e-58, Identity=85%"; Hit description =PREDICTED: similar to histone 1, H2ai (predicted)
  Pfam annotation: Domain name=CBFD_NFYB_HMF; Domain location=175-240; Score=5.1; E_value=0.051; Accession=PF00808.13; Description=Histone -like transcription factor (CBFNF-Y) and archaeal histone
  Pfam annotation: Domain name=Histone; Domain location=169-243; Score =142.9; E_value=8.5e-40; Accession=PF00125.14; Description=Core histone H2AH2BH3H4
  Pfam module annotation: Pfam domain module=CBFD_NFYB_HMF::Histone; Domain location=175-240::169-243
DSASTAHRPPILSLGRTGRFLQRWWSSSALASHESENAHMLPVILAKAASANGLALSSKTWITTTSSAIRTVHIHPTDSVPSPPAPPKIFGIPRFHHHPSVDCSLLYAPLRMARTKQTARKSTGGKAPRKQLATKAARKSAPATGGVKKPHRFRPGTVALREIRKYQKSTELLIRKLPFQRLVREIAQDFKTDLRFQSSAVAALQEAAEAYLVGLFEDTNLCAIHAKRVTIMPKDIQLARRIRGERA

SEQ ID NO: 61564 - protein, 219 aa, Zea mays
  Coding DNA Sequence Number=SeqID_19785
  Gene Ontology: Mol. function=transcription regulator activity; Cellular component=nucleus; Biological process=regulation of transcription
  Subcellular localization annotation: CTP_CleavageSite=87; ConfidenceScore=5.22e-01
MEKFIKASPPPLSCRGFLAGASSACGCGSGLPAGPGTGARWVSFEGSGPLPVVGLGTGVLRLSLSSPVCWTAGGGGGGGGRGPRLVVAAARMQLREEIWDEAICQGRRGGTGFVDDGDGVVDPRHGVVEVKVKGGKAACWGGCFLVRACTTAWPFSHSSSAKSLLSDLLGSGLGEDRGHTLGLMKSATGGKVVGTGALAASGGRRGTVVVDKVGDLGKR

SEQ ID NO: 61565 - protein, 424 aa, Zea mays
  Coding DNA Sequence Number=SeqID_19786
  Gene Ontology: Mol. function=transcription regulator activity; Cellular component=nucleus; Biological process=regulation of transcription
  Homolog annotation: Hit_ID=Q2HRT7; Match level="QueryCoverage=33%, HitCoverage=21%, E-value=4e-34, Identity=56%"; Hit description=Basic helix-loop-helix dimerisation region bHLH
  Pfam annotation: Domain name=HLH; Domain location=171-220; Score =60.2; E_value=6.5e-15; Accession=PF00010.16; Description=Helix-loop -helix DNA-binding domain
  Subcellular localization annotation: CTP_CleavageSite=68; ConfidenceScore=5.66e-01
MARASLRQRPPQTGTDKASNATTSTRVESTVLQSASASGPRTAAAPAVFVDQRTAWPSQQPKEVRFPCAAAAPPPTPTAGNLQQERPSNNNMTPPQKEVETRKASEAAGATATSSVCSGNGAGTGKDDESWRQQKRKTLQAECSASQDDDPDDESGGMRRSCSRGAKRSRTAEVHNLSERRRRDRINEKMRALQELIPNCNKIDKASMLDEAIEYLKTLQLQVQMMSMGSGLCIPPMLLPPAMQHLQIPPAAAHFPHLGMGLGYGMGVLDMNSAAAAAAAVPFPHMPGAHFPCPMIPGAPLPRGLGIGMPARNTMPVFGVPPGQPIQPPFPSLAGLPVRPNLAPPHASSAAMANMVQEQQQQQQHQSLNNGASTAAATASDPQTIVQAERQHFSVPSSAQTESDQFLDGGGNRAICTGRNEAET

SEQ ID NO: 61566 - protein, 124 aa, Zea mays
  Coding DNA Sequence Number=SeqID_19787
  Subcellular localization annotation: CTP_CleavageSite=46; ConfidenceScore=5.53e-01
MGWGKGRGTTAQQRTSSTGSISRAPSRGPRAPGASPGRPPVWGSSEASAAAQAVPVHAPTAGGGATEDLEHQEHLQGALQSGVRLKRPQQHRLYQSTPPRSAAAQQRTSSTGSISRAPSSLGFV

SEQ ID NO: 61567 - protein, 493 aa, Zea mays
  Coding DNA Sequence Number=SeqID_19788
  Gene Ontology: Mol. function=glutamate-ammonia ligase activity; Cellular component=chloroplast; Biological process=nitrogen compound metabolic process
  Homolog annotation: Hit_ID=P14655; Match level="QueryCoverage=86%, HitCoverage=96%, E-value=0.0, Identity=82%"; Hit description =Glutamine synthetase, chloroplast precursor
  Pfam annotation: Domain name=Gln-synt_C; Domain location=154-426; Score=252.0; E_value=1.2e-72; Accession=PF00120.14; Description =Glutamine synthetase, catalytic domai
  Pfam annotation: Domain name=Gln-synt_N; Domain location=68-148; Score=147.3; E_value=4.2e-41; Accession=PF03951.9; Description =Glutamine synthetase, beta-Grasp doma
  Pfam module annotation: Pfam domain module=Gln-synt_C::Gln-synt_N; Domain location=154-426::68-148
  Subcellular localization annotation: CTP_CleavageSite=40; ConfidenceScore=5.63e-01
MAQAVVPAMQCRVGVKAAAGRVWSAGRTRTGRGGASPGFKVMAVSTGSTGVVPRLEQLLNMDTTPYTDKVIAEYIWVGGSGIDIRSKSRTISKPVEDPSELPKWNYDGSSTGQAPGEDSEVILYPQAIFKDPFRGGNNVLVICDTYTPQGEPLPTNKRHRAAQIFSDPKVAEQVPWFGIEQEYTLLQKDVNWPLGWPVGGFPGPQGPYYCAVGADKSFGRDISDAHYKACLYAGINISGTNGEVMPGQWEYQVGPSVGIEAGDHIWISRYILERITEQAGVVLTLDPKPIQGDWNGAGCHTNYSTKTMREDGGFEEIKRAILNLSLRHDLHISAYGEGNERRLTGKHETASIGTFSWVWMEHLSLFSFRESTECCLSGVANRGCSIRVGRDTEAKGKGYLEDRRPASNMDPYIVTGLLAETTILWQPSLEAEALAAKKLALKREAIMQGRGGEQEQQKQGLAYLQRRPAALLVQSNGTNYTASRQHKDKAGID

SEQ ID NO: 61568 - protein, 132 aa, Zea mays
  Coding DNA Sequence Number=SeqID_19789
MPAGSTTPVRRFRPGCVYRRRSRSAPRQELQAATSFIDSISAPVAQPILRPQDQGYELPKKTQKSFKGSAGTSTRRSARLATIAWPRGDIQSRARQVLMKRLGIFQSRTLIRCRTGQLTRSSSATSACSMAR

SEQ ID NO: 61569 - protein, 134 aa, Zea mays
  Coding DNA Sequence Number=SeqID_19790
  Subcellular localization annotation: CTP_CleavageSite=70; ConfidenceScore=5.52e-01
CRPPGAPRPHPSIARHQPPPPPLLLCAAPGGASAPARSMRSRRWSRAAVLAWLVLVAAAACVADESRAVPAARNRTGTGTAAVSVRQQQQQRGAFDVVVAGLVSIGLGRRWRAGGMVDEDKRRVPTGPNPLHNR

SEQ ID NO: 61570 - protein, 108 aa, Zea mays
  Coding DNA Sequence Number=SeqID_19791
  Homolog annotation: Hit_ID=Q10Q32; Match level="QueryCoverage=62%, HitCoverage=18%, E-value=6e-14, Identity=42%"; Hit description =Expressed protein
MSDRKSEHGVSRLHFLEKRDEETLPRRSPLANAMRIFEFMKAKGMATGHTYTMILKAVASNQGYVSALEMFNKIEEEEESKKIIDVRAMLGLPKAFPWNQRQASGTLK

SEQ ID NO: 61571 - protein, 46 aa, Zea mays
  Coding DNA Sequence Number=SeqID_19792
MGKYTYNMGKRGRICALKLISQPERKAYPKGMLELRNVNLDQVKPT

SEQ ID NO: 61572 - protein, 95 aa, Zea mays
  Coding DNA Sequence Number=SeqID_19793
MAPPRSKQRTASAEAESDKASAAAAQQCMDGRPALNPCSAPCLSCPTDQYLRVSNMSGVASNVVQRPTNQQLGARGTEALFLVRSRWLDWTKQLS

SEQ ID NO: 61573 - protein, 214 aa, Zea mays
  Coding DNA Sequence Number=SeqID_19794
  Subcellular localization annotation: CTP_CleavageSite=85; ConfidenceScore=5.54e-01
MSVPLGSSHNSQQPIVVKAARNPFPQLSPTLSYEPFPAAVANTELWACAPLSSSLLPPLSSSPLPPLYLVAKSALEVRHEPSRPPAQPLKCLLTIAKGRGLPAQPGQLAVVEERGHRGSDGVKGPRRRSLDSSAARSRGGEGPTPPPLALQGVLFPSPYASPRRRGDALTVEANALQTQGGLSSCHIDRRPEGRREPEVDHANGGSSAEGSTSA

SEQ ID NO: 61574 - protein, 509 aa, Zea mays
  Coding DNA Sequence Number=SeqID_19795
  Gene Ontology: Mol. function=transferase activity; Cellular component= membrane; Biological process=metabolic process
  Homolog annotation: Hit_ID=Q658E4; Match level="QueryCoverage=83%, HitCoverage=89%, E-value=1e-165, Identity=65%"; Hit description =Putative pectin-glucuronyltransferase
  Pfam annotation: Domain name=Exostosin; Domain location=163-472; Score=227.0; E_value=4.3e-65; Accession=PF03016.6; Description =Exostosin family
  Subcellular localization annotation: CTP_CleavageSite=48; ConfidenceScore=5.24e-01
MAPECSRRDAPPSATLLIVCVALYTVVLAVASSPKALASSSALSSRARAAPEQQLLLSADLTTRKETVKSLAKRSYVCQEESARRPGETRRPPSVEQELDVARAAIRRTAQRHGDAGRAGDGNVSSANTWFDAGVEYALLASVYRNPAAFHRSYAEMEKLFRVYVYEEGEPPILHAGPCKNIYTIEGRFIEQLELMAPSPASSSRRGTRRRSASDVRTSEPARAHAFFLPFSVSQMVQFAYRPNTYDKTPLRAIVADYVRVVASRHPYWNRSAGADHFMLACHDWGPEASTGHPELHANGIRALCNANSSEGFRPWQDVSVPDINLYDGDMPRQLLAPAPGVTSRPFLAFFAGGRHGHIRDLLLRHWKGRDPDFFPVYEHRHEDGFDYYSFMRRARFCLCPSGYQVASPRVVESIHAECVPVILSDGYVLPFADVLRWEAFSVAVPVADIPRLREVLERIPAPEVEKLQQGVRLVKRHFMLNQPPQRLDMFNMILHSVWLRRLNLRLDH

SEQ ID NO: 61575 - protein, 52 aa, Zea mays
  Coding DNA Sequence Number=SeqID_19796
MTLGWAAKRSAPRAHQRGDDELDGVTARNVGCGAQNNPRVAGIGDDHEGPPV

SEQ ID NO: 61576 - protein, 347 aa, Zea mays
  Coding DNA Sequence Number=SeqID_19797
  Gene Ontology: Mol. function=cysteine-type endopeptidase activity; Cellular component=endoplasmic reticulum; Biological process =proteolysis
  Homolog annotation: Hit_ID=Q2TN87; Match level="QueryCoverage=97%, HitCoverage=97%, E-value=1e-125, Identity=65%"; Hit description =Putative cysteine protease
  Pfam annotation: Domain name=Inhibitor_I29; Domain location=41-101; Score=107.8; E_value=3.2e-29; Accession=PF08246.2; Description =Cathepsin propeptide inhibitor domain (
  Pfam annotation: Domain name=Peptidase_C1; Domain location=131-346; Score=443.1; E_value=3.7e-130; Accession=PF00112.13; Description =Papain family cysteine protease
  Pfam module annotation: Pfam domain module=Inhibitor_I29::Peptidase _C1; Domain location=41-101::131-346
MGIPKALLLAILGCGVCLCSAAVLAARELGGDDELAMVARHEQWMVQHGRVYKDETDKAHRFLVFKANVKFIESFNAAAAAGNRKFWLGVNQFADLTNDEFRATKTNKGFNPNVVKVPTGFRYQNLSIDALPQTVDWRTKGAVTPIKDQGQCGCCWAFSAVAATEGIVKISTGKLTSLSEQELVDCDVHGEDQGCNGGEMDDAFKFIIKNGGLTTESNYPYTAQDGQCKSGSNGAATIKGYEDVPANDEAALMKAVASQPVSVAVDGGDMTFQFYSGGVMTGSCGTDLDHGIAAIGYGKTSDGTKYWLMKNSWGTTWGENGFLRMEKDIADKKGMCGLAMQPSYPTA

SEQ ID NO: 61577 - protein, 132 aa, Zea mays
  Coding DNA Sequence Number=SeqID_19798
  Gene Ontology: Mol. function=transcription initiation factor activity; Cellular component=transcription factor TFIID complex; Biological process=transcription initiation
  Homolog annotation: Hit_ID=Q10IZ0; Match level="QueryCoverage=60%, HitCoverage=9%, E-value=2e-10, Identity=43%"; Hit description =Transcription initiation factor TFIID component TAF4 family protein, expressed
MGYLYTRAVDDSVCMQTYKEDDDKMRTTAANVAARVAAGGDDMLSKWQLLAERNKQRSEGGDGSSGSVPGNMLQHRPSLKSGKDLREEHEVEKRGYSTMLGSGGTMILVVETFLNDKMPILLFVHTDCISNL

SEQ ID NO: 61578 - protein, 73 aa, Zea mays
  Coding DNA Sequence Number=SeqID_19799
  Homolog annotation: Hit_ID=Q10IZ0; Match level="QueryCoverage=93%, HitCoverage=8%, E-value=3e-26, Identity=82%"; Hit description =Transcription initiation factor TFIID component TAF4 family protein, expressed
MCVEERLRGFIRSIIRFSKQRVEVEKSRHHFYPLSSDVRSHIMRVNREAREQWEKKQAEDAERIRKQNDVSSA

SEQ ID NO: 61579 - protein, 291 aa, Zea mays
  Coding DNA Sequence Number=SeqID_19800
  Gene Ontology: Cellular component=extracellular space
  Homolog annotation: Hit_ID=Q6IS42; Match level="QueryCoverage=73%, HitCoverage=63%, E-value=6e-15, Identity=26%"; Hit description =Similar to proline rich protein MP4
  Subcellular localization annotation: CTP_CleavageSite=2; ConfidenceScore=5.21e-01
MAASGYSGSAPITDQGFEGWPPKGLAKGATTNSAPPDPRARTRAKTRKTANSAPPDPRARTRAKTRKTANSAPPDPRARTRAKTRKTANSAPPDPRARTRAKTRKTANSAPPDPRARTRAKTRKTANSAPPDPRARTRAKTRKTANSAPPDPRARTRAKTQKTANSAPPDPRARTRAKTRKTANSAPPDPRARTRAKTRKTANSAPPDPRARTPPWPRPNDLRLARPLGSGSATATEGKTQPRLRRKPHFALPRAQTATSTGNVIIILPRIDSGHGEQDRRLVRPAPPEGQ

SEQ ID NO: 61580 - protein, 156 aa, Zea mays
  Coding DNA Sequence Number=SeqID_19801
  Homolog annotation: Hit_ID=Q53MM4; Match level="QueryCoverage=47%, HitCoverage=17%, E-value=5e-30, Identity=80%"; Hit description=F-box domain, putative
MDEHASAFSRGPAEAFQWIGHPMRATLCRMKSGLILTGVGDKILCLWSAESCKFMNEYNVPNSKTLVDFDFDENKRRVVLNTRLVKLLRRRVAELSLSLARRLWKQDRGLRRRRQLRSNLPFTGGHMSSCLGSGHTKGLPTSVFEEFWYSLNISRD

SEQ ID NO: 61581 - protein, 134 aa, Zea mays
  Coding DNA Sequence Number=SeqID_19802
MALLPLALVNYPGVRSSQAQAKQPLVELPGDPPDSVLSASGSSSFTLSFTPWDNSKNLHKIDVTVNSYFAVLDGKKVYNRGRTINLVVNPEHYTLIDLEKDVDSYFKWGSCQKPIFWVVEKGDKWQFIYDNGKM

SEQ ID NO: 61582 - protein, 276 aa, Zea mays
  Coding DNA Sequence Number=SeqID_19803
  Homolog annotation: Hit_ID=Q53MM4; Match level="QueryCoverage=83%, HitCoverage=52%, E-value=1e-103, Identity=81%"; Hit description=F -box domain, putative
  Pfam annotation: Domain name=WD40; Domain location=114-151; Score =4.8; E_value=9.9; Accession=PF00400.22; Description=WD domain, G -beta repeat
  Pfam annotation: Domain name=WD40; Domain location=188-270; Score =0.9; E_value=29; Accession=PF00400.22; Description=WD domain, G-beta repeat
  Pfam annotation: Domain name=WD40; Domain location=27-66; Score=3.0; E_value=17; Accession=PF00400.22; Description=WD domain, G-beta repeat
  Pfam annotation: Domain name=WD40; Domain location=70-107; Score =15.2; E_value=0.23; Accession=PF00400.22; Description=WD domain, G -beta repeat
  Pfam module annotation: Pfam domain module=WD40::WD40::WD40::WD40; Domain location=114-151::188-270::27-66::70-107
MEHWSGWRPLGRCPNGCSKACLVHHYQLFEVMFEIGSYVCNVISWCSFADPEVVIGCEDGRAFVYDMYSRSCSRIYRLHSSPVTCLMITDDQLIVGGSTFGNVAIADQTSGQKLGVLKSDHGPLAIRSLSSCTNSHMIFAGSSAGYAHCWDLRTLRPLWEKRVSPNVIYSTRHLPGDTATLAVGGIDGVLRVICQRTGDIIRSLVVDADLPAEATSRSRQQIEKKRVRRIDPDAQLDGIPRRLRPQITSLSVGMKKIVTTHGENYIRVWKFRMKSS

SEQ ID NO: 61583 - protein, 580 aa, Zea mays
  Coding DNA Sequence Number=SeqID_19804
  Gene Ontology: Mol. function=binding; Cellular component=integral to membrane; Biological process=phagocytosis
  Homolog annotation: Hit_ID=Q2QWZ9; Match level="QueryCoverage=96%, HitCoverage=94%, E-value=0.0, Identity=80%"; Hit description =Endomembrane protein 70 containing protein, expressed
  Pfam annotation: Domain name=EMP70; Domain location=52-538; Score =925.2; E_value=2.7e-275; Accession=PF02990.7; Description =Endomembrane protein 70
MLRRGVLLLAAILIAVAHSPLAYASEAEHKYKTEEPVKLWVNKVGPYNNPQETYNYYSLPFCQPSENPAHKWGGLGEVLGGNELIDSQIDIKFIKNVDKGAICTIELDVQKVQQFANAIENSYWFELFIGFVGETDKNNEKKHYLYTHKNIVVKYNGNRIIHVNLTQESPKLLEAGKKLDMTYSVKWVQTNVAFARRFEVYLDYPFFEHQIHWFSIFNSFMMVIFLTGLVSMILMRTLRNDYAKYAREDDDLESLERDVNEESGWKLVHGDVFRPPRGQVFLSALVGIGTQLAALILLVIVLAIVVMLYVGRGAIITTFIVCYALTSFISGYVSGGLYSRNGGKNWIKAMILTASLFPFLCFSIGLLLNTIAIFYRSLAAIPFGTMVVMFILWAFISFPLVLLGTVVGRNWSGAPNNPCRVKTIPRPIPEKKWYLTPSVISLMGGLLPFGSIFIEMYFVFTSFWNYKVYYVYGFMLLVFVILIIVTICVTIVGTYFLLNAENYHWQWTSFFSAASTALYVYLYSIYYYHVKTKMSGFFQTSFYFGYTLMFCLGLGILCGAVGYLGSTLFVRRIYRNIKCD

SEQ ID NO: 61584 - protein, 124 aa, Zea mays
  Coding DNA Sequence Number=SeqID_19805
MEQGEQQGEQQHHQARLSKHKGLQAASTGRGCARHEDGERAARRSTSRDEGLANMEKSRALDLYRERERKKRALEEELERRLLMVLMEMNLVKKKLSEEVERARRGWVVCSAEGEKLLVLRGGS

SEQ ID NO: 61585 - protein, 120 aa, Zea mays
  Coding DNA Sequence Number=SeqID_19806
  Subcellular localization annotation: CTP_CleavageSite=61; ConfidenceScore=5.76e-01
MAAPTSVQNPTTTHSPNPYSSPSHLLCHSPTRRHPSSPSLVHCLFSELSEDRRRSPCPHARSAATVGALSAFHAQPESRRPSTQALIVSMPSFKGPRVFSRGGDAGNMEDFEEFQDYDEF

SEQ ID NO: 61586 - protein, 125 aa, Zea mays
  Coding DNA Sequence Number=SeqID_19807
MPVHAHLPWVLVTLSDRNPGAGREHSRGLTVGGHENWSSGGVDSTATKSRDPRSPPHPRTAAPAPEKVLGSLSTQSRSTPVSIGNDGDRWLWRLPARLSAPLSLTLCLMCHKGFLVTSRDEGWVL

SEQ ID NO: 61587 - protein, 135 aa, Zea mays
  Coding DNA Sequence Number=SeqID_19808
MRIEKRKRGRRRGVLLLRVDVELRLGPRPCGHGGHSAWLSCRAESASDGRGIARRPSSCAVEHSASWIGPLRRIILGMDPCTVLAKSSFTCSSVQFGFGVWVQPIGGLVGVLRRACGAAPPCVRALLGRRSWTVG

SEQ ID NO: 61588 - protein, 150 aa, Zea mays
  Coding DNA Sequence Number=SeqID_19809
MVKVGVEFSPAFLDRVNVTTIAPNPMPVHAHLPWVLATLSDRNPGAGREHSRGLTVGGRENCSGGGVDSTATKSRDPRSPPHPRTAAPAPEKVLGSLSTQSRSTPVSIGNDGDRWLWRLPARLSAPLSLTLCLMCLEGFLVTSRDGGWVL

SEQ ID NO: 61589 - protein, 159 aa, Zea mays
  Coding DNA Sequence Number=SeqID_19810
  Subcellular localization annotation: CTP_CleavageSite=48; ConfidenceScore=5.24e-01
MENHPGKQCYHKGAHSSAATITKVVSSSSLGPYRCLCHSDLRLTVSIVLSHRRVVTASEEIPSLALSRPSPAPSAEAENLVVIRARLVPSAEAENPSVIRAHLHGHGVHPQRAVPTLGMAVSALSELCPPSTWPCARVYPWCTVPTLDALCPSQRGRAT

SEQ ID NO: 61590 - protein, 255 aa, Zea mays
  Coding DNA Sequence Number=SeqID_19811
  Gene Ontology: Cellular component=chloroplast envelope
  Homolog annotation: Hit_ID=Q01BV2; Match level="QueryCoverage=20%, HitCoverage=78%, E-value=1e-07, Identity=45%"; Hit description =Homology to unknown gene
  Subcellular localization annotation: CTP_CleavageSite=30; ConfidenceScore=5.45e-01
MAPCASPSALALSASTRVSILRLPLALRQRAEARVPGAQFRPSTACSWARPLLPELAGAVPRAGARGTGRRTQPLFRPRALTTTSQIASCAFTLGTVAVLPFYTLMVVAPNADITKRTVESGAPYVALGLLYAYLLYLSWTPDTLRAMFASKYWLPERWDGTTWQLAGIVRMFASEMTVASAWIHLLAVDLFAARQVYHDGLRNNVETRHSVSLCLLFCPVGILAHVLTKDSSIVTMWRCGLSGIDRVYRLIHQM

SEQ ID NO: 61591 - protein, 163 aa, Zea mays
  Coding DNA Sequence Number=SeqID_19812
MGLAVACGSVIGLDEMLVARWLARFMSETGSNDERRKGRGRRLAKEVLRQPELLPEVSALPSKKPESLPPSGGMSTADGTLANQRQQPLCVAPSPKQREKRRVDGWMEWGSSGDGFSSSSVAFVASSTASWASGSTVMDWASPEVVEMQRGDGFSLLIYAWKS

SEQ ID NO: 61592 - protein, 188 aa, Zea mays
  Coding DNA Sequence Number=SeqID_19813
  Gene Ontology: Mol. function=carboxyl- and carbamoyltransferase activity; Cellular component=ornithine carbamoyltransferase complex; Biological process=amino acid metabolic process
  Homolog annotation: Hit_ID=Q8SA97; Match level="QueryCoverage=70%, HitCoverage=21%, E-value=5e-14, Identity=49%"; Hit description =Ornithine carbamoyltransferase
MAPPVDVAGPRPRLGDVEAPPRSRSSPSSVAEAESEPLGQARRRPLAEARAEFESWGRAKRSSSSSGAEPQPKSEPCVGRSRVHRLPGLCPSPSPGSGGAEFAVFRSLARVRALGRAERSSPSSGALPESEPWVGRSGVSYGVRPGLTACQPHSVKWHRSRSSAGGAVFLSDRSVEWRSDGGHFGSIS

SEQ ID NO: 61593 - protein, 136 aa, Zea mays
  Coding DNA Sequence Number=SeqID_19814
  Gene Ontology: Cellular component=membrane; Biological process =photosynthesis, light harvesting
  Homolog annotation: Hit_ID=Q41748; Match level="QueryCoverage=91%, HitCoverage=43%, E-value=8e-25, Identity=81%"; Hit description =Chlorophyll a/b-binding apoprotein CP24 precursor
  Pfam annotation: Domain name=Chloroa_b-bind; Domain location=10-133; Score=-19.7; E_value=0.0006; Accession=PF00504.12; Description =Chlorophyll A-B binding protein
  Subcellular localization annotation: CTP_CleavageSite=43; ConfidenceScore=5.78e-01
MALASTSATAPAVVLKTRSSAPGARSPMPSRPSPRHTLLAIAVAAAKKLWTRRVHQPALARQIVSLCRDEEGGWSSKLAVTPPPRLCRLPGDFGFDPLGLGKDPAFLKWYREAELIHGRWAMAAVLGIFMGQPRAE

SEQ ID NO: 61594 - protein, 139 aa, Zea mays
  Coding DNA Sequence Number=SeqID_19815
  Subcellular localization annotation: CTP_CleavageSite=36; ConfidenceScore=5.78e-01
MSSSAAAPRRALSSAVAALQATPTPSPSSPPPRRPSAVVVPPPVVAILTTVSFRLDLRHRWLDSYAISVGPSIARQSSSRSTRDTFADVHDDDNDDDDDDDDDDDDDTGAAGTDALGAKGKELCYVDIMDYVMWTFEST

SEQ ID NO: 61595 - protein, 106 aa, Zea mays
  Coding DNA Sequence Number=SeqID_19816
MALVGRGTSTGALMGAWDLAMLEWPRGPGESGGLGDDNDLVVGGEGDPRSGGNLVGVANPTSEGSRGGLVDEVIVRTSDRGSVGKGKGGLIKDHMTRDDDTICGEV

SEQ ID NO: 61596 - protein, 84 aa, Zea mays
  Coding DNA Sequence Number=SeqID_19817
MELDGEREGESIPELEAMFVVALESMYHSLLLRGESHGVEHSSEAHWGDAAQEASCWGILGMLAQGEGGDAIPAQGDEGTVGLT

SEQ ID NO: 61597 - protein, 59 aa, Zea mays
  Coding DNA Sequence Number=SeqID_19818
MEKGGTSFDADFSDGPCEAWWPTRIWIQASRGNRGTSDRREQMPRRCPDRACKRGSATG

SEQ ID NO: 61598 - protein, 123 aa, Zea mays
  Coding DNA Sequence Number=SeqID_19819
  Homolog annotation: Hit_ID=Q6AVF2; Match level="QueryCoverage=79%, HitCoverage=33%, E-value=7e-09, Identity=42%"; Hit description =Expressed protein
  Subcellular localization annotation: CTP_CleavageSite=32; ConfidenceScore=5.13e-01
MERAVPVRKPHTSTADLLSWSATAPDASASPAASSRPSLKPAAGITPAMFGAPVTEQEAEDLSKSERKFCSGSKLKEMSGSGIFAEKSENGDSEASNPDNKTSLRMYQHYCADPSIGEMIPGP

SEQ ID NO: 61599 - protein, 103 aa, Zea mays
  Coding DNA Sequence Number=SeqID_19820
  Subcellular localization annotation: CTP_CleavageSite=37; ConfidenceScore=5.33e-01
MTYRPLSLRPTHDLSSLGLSTLAAYRTHNTTSRAETQAMTTMGRRGTETVMLVSKLFAACHKEHDQGSPDDRDTDSALEIDRNTDPSHTSLMSNGGMTVAVRL

SEQ ID NO: 61600 - protein, 233 aa, Zea mays
  Coding DNA Sequence Number=SeqID_19821
  Homolog annotation: Hit_ID=Q6AVF2; Match level="QueryCoverage=99%, HitCoverage=62%, E-value=3e-30, Identity=40%"; Hit description =Expressed protein
QTVTGISQISFSADGSVSPKKPSSIPEVAKQRELSGTLEDADAKINKQLSEAKTKELSGSDIFGPPPEIPARPLAARNMELQGNVDFSLPQRSVHTSVKVSNFPIYSCPTFTNYQYIVRKKNTSIDIPLHVSCDLTHHSRKKGKPAGGPSNISFSEEPVVKTAKKIHNQKFQELTGNNIFKEDVPSSAEKSLSSAKLKEMSGSDIFADGTPAPREYLGGIRKPPGGESSIALI

SEQ ID NO: 61601 - protein, 223 aa, Zea mays
  Coding DNA Sequence Number=SeqID_19822
  Homolog annotation: Hit_ID=Q9FRT7; Match level="QueryCoverage=20%, HitCoverage=9%, E-value=5e-12, Identity=77%"; Hit description =Monosaccharide transporter 1
  Subcellular localization annotation: CTP_CleavageSite=50; ConfidenceScore=5.26e-01
GSGILCKPALINAMTASSSQLANSEPEHSPRVKAPSTQGTQSRLARAQPRAGTVDPGAIGSSASPDPRAWAQPRPRKMVSASPDPRARTQPRPRKTVSASPDPRARTQPRPRKTVSASPDPRARPPPRPRKTVSASPDPRARPQPRPRRSHCLARPWARADHATGGRGTNRMAGGVIVPSDGPAADHGGSLTLSVFMTCLVAASGGLIFGYDIGISGLPLLAL

SEQ ID NO: 61602 - protein, 127 aa, Zea mays
  Coding DNA Sequence Number=SeqID_19823
MLLATLNPPQFRRRVTPPSRDQPPLPPARHFGGQHELAFFSDSSDAAGSRHPIPMLIFLVGTLAQNLVQLKEKPAASTPDGRVRTAALAEALQILQEQAALAYLCAPSESDSVVDLFVGQCLSGDGG

SEQ ID NO: 61603 - protein, 128 aa, Zea mays
  Coding DNA Sequence Number=SeqID_19824
MDGKKGSMERVHDVRLSENDAGGDVGALLIPHEVRPIQGYMEGVYGVGHDEKDGSGVPPGTVPKICKHVKDLVWEIYNNNISEIIPPKLGNLTNLYKTAWALSNIVSAEDAIVSCKYWWYIRKQIIPI

SEQ ID NO: 61604 - protein, 221 aa, Zea mays
  Coding DNA Sequence Number=SeqID_19825
  Subcellular localization annotation: CTP_CleavageSite=60; ConfidenceScore=5.73e-01
MAAAFLAHLFCRATTTSTSTVAASLRHLLTATSTALILTYPSLSAPPTNNRPSHPPPVVPADSQGSRGQGTRGCSCESEILDSVGEVDDGDADELLEHGAVVKQVVDVPIVDDGSTESNLLEAGEHGGAAPRERDGVWKAPEVEVEGAEGGKVEDVYEEARLTEVDGRHSGHTIHVMSAVETESPNGDNGDISRTPSSLPAAPSADDDESPTGPESAAPPP

SEQ ID NO: 61605 - protein, 156 aa, Zea mays
  Coding DNA Sequence Number=SeqID_19826
  Homolog annotation: Hit_ID=Q6QP54; Match level="QueryCoverage=49%, HitCoverage=23%, E-value=3e-09, Identity=46%"; Hit description =Putative kinase
MEAPPKPRPSLSSMAEAESEPLGRARRRSSAEARAVSEPWGRAKRTRVRALGRAERSSPSSGAEPESEPWVGRSGVRRLPGLSPSPSPGSGGASYGAFGRAWLPVSITLSSGAAVGVAQAALSFCQTGQWSGEVTAVTSALPEGARQDKGVRPPLR

SEQ ID NO: 61606 - protein, 121 aa, Zea mays
  Coding DNA Sequence Number=SeqID_19827
  Homolog annotation: Hit_ID=Q2R068; Match level="QueryCoverage=41%, HitCoverage=12%, E-value=1e-08, Identity=54%"; Hit description =Peptide chain release factor 1, putative, expressed
MAVHESRDHMLQVRASISANEVGIWAGDLVGRMYQRYYEHNKWKFKSISCSYADEVDVVIDPKDIDLKITISVEKGIFGIYEDVEKLLQALSKEEEVVPGHLLRQRPYQLLREARSSSHHV

SEQ ID NO: 61607 - protein, 87 aa, Zea mays
  Coding DNA Sequence Number=SeqID_19828
MEEKGHGSWGARTLSFSAMPKEGGGKEEVCGLLFAPLVSVRDSWLQPKKAEATRARKAKAKARGSKAALAPMSRQNCWKHQQPNAEN

SEQ ID NO: 61608 - protein, 250 aa, Zea mays
  Coding DNA Sequence Number=SeqID_19829
  Homolog annotation: Hit_ID=Q7XE46; Match level="QueryCoverage=40%, HitCoverage=55%, E-value=2e-22, Identity=56%"; Hit description =Hsp20/alpha crystallin family protein, expressed
  Pfam annotation: Domain name=HSP20; Domain location=101-198; Score =25.8; E_value=1.6e-06; Accession=PF00011.11; Description=Hsp20alpha crystallin family
MGREGDCPVCRNRMCHWEGRGREAGRRLRVEAGKRRAGRWRPRVGWRLLPGKTKNPGVHRSNACYAAWVREREQKKAEEIEMQAAAARRPRVLTEIDPHSEWVHGRALDAIMLDVTGFSKDQLKVQVEPWGSLKVSGDQGAVDGGGGMQRRLFTKRFDLPAGCDVAAITVHLDKGMLYIQVPRPAGAAAAWWGTLQQHLLSAEEDVYEDAFRGVDETGDYAHGGGGLAPRRDGGRHPLRLLARGLIRHRQ

SEQ ID NO: 61609 - protein, 451 aa, Zea mays
  Coding DNA Sequence Number=SeqID_19830
  Gene Ontology: Mol. function=pyridoxal phosphate binding; Biological process=amino acid metabolic process
  Homolog annotation: Hit_ID=Q2JIS3; Match level="QueryCoverage=49%, HitCoverage=65%, E-value=7e-70, Identity=54%"; Hit description =Aluminium resistance protein
  Pfam annotation: Domain name=Alum_res; Domain location=68-379; Score =261.6; E_value=1.6e-75; Accession=PF06838.2; Description=Aluminium resistance protein
  Pfam annotation: Domain name=Cys_Met_Meta_PP; Domain location=112 -356; Score=-298.0; E_value=0.09; Accession=PF01053.10; Description =CysMet metabolism PLP-dependent enzyme
  Pfam module annotation: Pfam domain module=Alum_res::Cys_Met_Meta_PP; Domain location=68-379::112-356
MAVEEGRRGRRRHGAPGRGDRPHPEPHLGCLIRAGVRVGRDGRAVRGDADGCRDFTLDGVSVSEEEDLEGFYRRAVYRCSYMFAICVLAVLSILIKLGIRAPLRFTLVLCLASELTPQHFGGSTGYDHDDGGGREALDSVFADIVGAEAAIVRPQFFSGTHAIACALFALLRPGHELLAVAGPPYDTLEEVIGIRGSANVGSLKDFGVTYREVPMQNPNCMVMVDNCYGEFVEISEPAMVGADLIAGSLIKNPGGTIAPCGGYVAGKEHLVEAAAARLSAPGLGVEFGSTPGHVMRALFQGLFLGPQMVGEAVKGGLLIAEVMSAKGYKVEPLPRVPRHDIVQIEMTITKAKIGVDPSGCVELAKHVRLNNPNLVLSGLMIIGMLDYSSTPKNFKALANCREDVCKELGIPEEQLELFVDMSSDFEQTIEMGSTNVRVGSTIFGAREYPKN

SEQ ID NO: 61610 - protein, 274 aa, Zea mays
  Coding DNA Sequence Number=SeqID_19831
  Homolog annotation: Hit_ID=Q109M7; Match level="QueryCoverage=46%, HitCoverage=68%, E-value=2e-31, Identity=55%"; Hit description =Hsp20/alpha crystallin family protein, expressed
  Pfam annotation: Domain name=HSP20; Domain location=48-129; Score= -14.8; E_value=0.013; Accession=PF00011.11; Description=Hsp20alpha crystallin family
MASGERVYEDFKPPHKMEREPATHTLTVDLSAQGKQRRRARTMNKHFISLVQKYGYRKEHIRVQMVHSHRCLIVRGERPVDGNRWSRFRLDLPVPDGCDAKAVHARFDNGVVRVTMPGVQQPEPVLPVVAGTADQQQQQQETPLPKHAGTAAAAGDDDVQGRKGVVGAAGQDGGDRDRAAGGQDEVDKHETPRKQEARQRVVSSAKHAGGSSGRGDDTAAGGVGQEVMAAASPTSSRQGYGFLHNRKKVTFTVLGGVALVLISLGIYAKYSLSP

SEQ ID NO: 61611 - protein, 353 aa, Zea mays
  Coding DNA Sequence Number=SeqID_19832
  Gene Ontology: Mol. function=transferase activity, transferring glycosyl groups; Cellular component=chloroplast; Biological process =starch biosynthetic process
  Homolog annotation: Hit_ID=Q7XE48; Match level="QueryCoverage=90%, HitCoverage=42%, E-value=1e-177, Identity=91%"; Hit description =Soluble starch synthase 2-1, chloroplast precursor
  Pfam annotation: Domain name=Glyco_transf_5; Domain location=3-94; Score=-95.3; E_value=0.00015; Accession=PF08323.2; Description =Starch synthase catalytic domain
  Pfam annotation: Domain name=Glycos_transf_1; Domain location=140 -304; Score=38.3; E_value=2.7e-08; Accession=PF00534.10; Description =Glycosyl transferases group 1
  Pfam module annotation: Pfam domain module=Glyco_transf_5::Glycos _transf_1; Domain location=3-94::140-304
TRGISKELQNIHNHLNVLGSRPQGRGPIDDFRYLDLPGHYMDQFKLYDPFGGDHLNIFAAGIRAADRLLTVSHGYAWELKTPDGGWGLHSIINENDWKFQGIVNGIDTADWNPRHDVHLQSDGYTNYSLETVQTGKAQCKEALQKELGLPVRGDVPVIAFIGRLDHQKGVDLIAEAMPWIAGQDVQLIMLGTGRQDLEDTLRRLESQHYDRVRGWVGFSVRLAHRMTAGADILLMPSRFEPCGLNQLYAMMYGTVPVVHAVGGLRDTVQHYNPYEEVGVGWTFEKAEANRMIDALGHCLNTYRNYWSSWEGIQRRGMMQDLSWDNAAKLYEEVLLAAKYQWESSFRRFGTGGW

SEQ ID NO: 61612 - protein, 1116 aa, Zea mays
  Coding DNA Sequence Number=SeqID_19833
  Gene Ontology: Mol. function=heat shock protein binding; Cellular component=integral to membrane; Biological process=protein folding
  Homolog annotation: Hit_ID=Q2R254; Match level="QueryCoverage=99%, HitCoverage=99%, E-value=0.0, Identity=35%"; Hit description=DnaJ domain containing protein, expressed
  Pfam annotation: Domain name=DnaJ; Domain location=66-127; Score =94.9; E_value=2.4e-25; Accession=PF00226.21; Description=DnaJ domain
MECNKEEASRAKDLALVKLQEADYAGAKRIALKAQKLFSGLENISQLLTVCEVHCCAAIKINGETDWYSVLQVETTADDILLKKQYRKLALLLHPDKNKFVGAEAAFKLIGEAHMILTDKVKRSRHDSKRNPVIPKSAPKKRGRPSKETDYVAKRANKENTDAVYSTFWTICTTCGTKYQYPYSLLMKVLLCQVCSKSFFAYDLSKKPFVRVDASNPWSGIGMRHKMFPNQQHNYQSVPTQQNPVTGRQTPVPDQKQQPRNVSGKQTPGINQQQRSQKFPFSSRPKNVVNSHPWGGFGRQQEMCPLSQPTHVSDQKPYYQRAPGQQNPVNGHQTLVTDHQQHSLNTQQQSTNPPCNPGSKNVVNSQGAAFQNSNATANSNLTDEAGACNREKITRPSFNDEDRTKSQVANSDKVHLVNKQMKGNKVATGSSHPVAINGSQVARKDVLTAACADKTSGQHPCIASQQRNSVIVEDGSDGCGKVSDHLPNSSTKKRIRKDHSSYTAGKSDHTTENEVAEANSQHKYSIPSKEKITNEKEVISGLNLDVLQGTKRKQQTSSGSGSDAAAKSVNHSIPCNVTVSCPDPDFYDFEKNRDADRFTVDQIWAVYDDLEGMPRYYARIKQVYSPNFMLQFTWLEYDPLCDAEKEWSSKELPVACGNFRVGRTLLTEDTKMFSHVVSWTKGRKRNRYEIYPKKGEVWALFRGWDINWVSDSDDHRHHDYDIVEITSDFAMGLGTYVIPLVKIKGFVSLFVRSSSEAPFLIPSGNTLSFSHSIPFHRLVENGRQHIPTGALELDTASLPSDLEKAFTPVNLDNSFMSTGSGSTPCNVSSTSSCEVPVGKTEQTQDGTGTGVKDGVEKLNQNTKVEQDNGSEASTIDDCGDGWNDSSPPGSPAGFHYPDTEFCSFTSLRSFDKFKKGQVWALYCDTDKFPKYYGLVKSVDSEDCTVHIRWLEHCPREQVEEHLAQDGLSIGCGLFEVSRQSETYDCTEVFSHSVEVTGKGKRYEILPCAGQVWAVYKDWSRTWSFEDYSRCEYLLVEVMEVSDGDITVSCLTKAEGFSTVFMQEQNGKSRRIARSDLTMFSHQVPAYRLTDETGDLCGYWELDPASLPEVLLVRKTK

SEQ ID NO: 61613 - protein, 69 aa, Zea mays
  Coding DNA Sequence Number=SeqID_19834
MTNPSIKDGVRYSKYGGKSNGRKTLNLIMDALGKAGRILHSTFPKVVYSFLKTSSASFGFGPPTYSVGH

SEQ ID NO: 61614 - protein, 135 aa, Zea mays
  Coding DNA Sequence Number=SeqID_19835
  Subcellular localization annotation: CTP_CleavageSite=85; ConfidenceScore=5.57e-01
MVAGVGLAACAGGRARRRRVLQPAHGGRAQSNRSGSFTGGQRCFRRKESKSGSPCSSVYMRQRSNKVRRRQSGTSGDVVLGLRARGASLRSREASQGIGPGGGGPEWPIHGGQGSGSRWHAVRRANSGDLALGRG

SEQ ID NO: 61615 - protein, 102 aa, Zea mays
  Coding DNA Sequence Number=SeqID_19836
MGKGENGRLELHNVGRITVALEAPLMPWVNGRVASGIGTASGLLGQLGRARQHPGGVGSRQGRAPGALCLGAWAGVAQLRDFPLRRNAIKRLIINHAQSKTI

SEQ ID NO: 61616 - protein, 80 aa, Zea mays
  Coding DNA Sequence Number=SeqID_19837
MALPFPARNGKRRNGERRNERLGLHNAGRITVALEAPLMPWVNGRAASGIGTTSGLLGRLGRARQRPGGVRSRRGRDPSA

SEQ ID NO: 61617 - protein, 61 aa, Zea mays
  Coding DNA Sequence Number=SeqID_19838
MRNVKALEAALCYGHGLESGYEGASVASPAGANGYASVDENDDSGSPWSGNRVGDSGERSR

SEQ ID NO: 61618 - protein, 167 aa, Zea mays
  Coding DNA Sequence Number=SeqID_19839
  Subcellular localization annotation: CTP_CleavageSite=63; ConfidenceScore=5.45e-01
MIDQWLLAFFYPHGVQTQLSVHHGGTASACGRSPSQSTGDPQGSARALPRPLLICRVTRLSLECFAGKGKLSSPEGGARIRESGRCPLIRTQGRPYERAAKSKPYPVSRRSVGDVKYAARFVMETILTARARMQETHGFTRRGEQSLAQGPTCQPYRAVPATKVSTG

SEQ ID NO: 61619 - protein, 218 aa, Zea mays
  Coding DNA Sequence Number=SeqID_19840
  Homolog annotation: Hit_ID=Q8S9P9; Match level="QueryCoverage=20%, HitCoverage=11%, E-value=2e-09, Identity=71%"; Hit description =Purple acid phosphatase-like
MVDRAIWGEHEIACHQRKRISGDLTSIDRQPVTLVGLWLGMKTNANGRTNPSLVSIPAFYHRKRDWSGIVGNGNGYLTLLFILINDCNRVYMWRLEGARKAGTLTHFTTRSVGWFKVAMFADQLYDEDAWTDWCPAQDATSDRVMAVVLDAENLDKKYLTRVKRGRVLIGEFLHHHSNSRETTQLAAVTTRIANVHGDELIITTTSPYEQQAFASKTD

SEQ ID NO: 61620 - protein, 67 aa, Zea mays
  Coding DNA Sequence Number=SeqID_19841
MPTTKLDNWHGFTSVPKLVKFNPGTQKDLVTTENYGVRTNLDKDYRRQPVDESHVRGDVPRQYRSVL

SEQ ID NO: 61621 - protein, 240 aa, Zea mays
  Coding DNA Sequence Number=SeqID_19842
MEKEKEDLDRRLVDEKEDAEKAREEAQATRAEAQAACKRTADMELELKNICGHHERTESSTRAGVEQAHTLFVDAYRDLGMQTAPFDESREDVGLRFLGWLQDKLESLPSIVMGLMSYASLVTCEGAINALSREGCRHFEVFDRANEDFVRGVFQIEDGMLKHSIGALYDRMWGPHGRCIVRERADRALAHVMNKEGMEDLAGLECSVSQRSASVEAGAEEQTTLLGDADEGLAAADTSA

SEQ ID NO: 61622 - protein, 107 aa, Zea mays
  Coding DNA Sequence Number=SeqID_19843
MGAETRVRRARADLETAVHDAVTHGGAENRFGGNCDCSGYVLSDRGAIYNDLLRRGNKASSVACPGVTAIITTMVAQPCRRASGYDKAGSIHSPADLFTPAVISATH

SEQ ID NO: 61623 - protein, 110 aa, Zea mays
  Coding DNA Sequence Number=SeqID_19844
MLTVVLPTRKRKALSHRPAHTHPFRELLIMLSGHDMIGIALTGLGRCWYSWLRAASIVLDVSDEEAFVDKMIDAISVLKLAYAKVRDILDLEYVHMCYITNAVDMRNDSL

SEQ ID NO: 61624 - protein, 160 aa, Zea mays
  Coding DNA Sequence Number=SeqID_19845
MAQRTPWARAHASERGGLTAWNGDGGEGADFGSTAGEIPRRFSAGSPVLRRGSGGEARARVGDLGGGVNLTGGGLGWPVHGGWRALAVVKSLARPPGAIGDEQAPGGGGKGGGDDKRRRARHDGGRAVVGGERAGEDMGETRGLTSGPGLPAKERRERER

SEQ ID NO: 61625 - protein, 60 aa, Zea mays
  Coding DNA Sequence Number=SeqID_19846
MEATTGLILANDGFLPVVGWRHAAQRYDVAACPVKPSTPFPRYSVTPLDTALRLRRLIMI

SEQ ID NO: 61626 - protein, 51 aa, Zea mays
  Coding DNA Sequence Number=SeqID_19847
MANMTCGLVGKDVQPLQSVKLPYTSHELPPLVSKVHNKPIKKTKVGFKIES

SEQ ID NO: 61627 - protein, 191 aa, Zea mays
  Coding DNA Sequence Number=SeqID_19848
  Gene Ontology: Mol. function=protein binding; Cellular component =nucleus; Biological process=regulation of transcription, DNA -dependent
  Homolog annotation: Hit_ID=Q8W514; Match level="QueryCoverage=83%, HitCoverage=37%, E-value=1e-91, Identity=99%"; Hit description=MSI type nucleosome/chromatin assembly factor C
  Pfam annotation: Domain name=WD40; Domain location=119-158; Score =22.8; E_value=0.0012; Accession=PF00400.22; Description=WD domain, G- beta repeat
  Pfam annotation: Domain name=WD40; Domain location=70-109; Score =27.5; E_value=4.7e-05; Accession=PF00400.22; Description=WD domain, G-beta repeat
  Pfam module annotation: Pfam domain module=WD40::WD40; Domain location=119-158::70-109
MKTAAAICLHWSCEKAMVQIVQQINHDGEVNRARYMPQNSFVIATKTVSAEVYVFDYSKHPSKPPLDGACNPDLRLKGHNSEGYGLSWSIFKEGHLLSGSDDAQICLWDIKANSRNKSLDALQIFKHHDGVVEDVAWHLRHEYLFGSVGDDYHLLIWDLRSPAPTKPVQSVVAHQGEGIGNLCPDFFGCTN

SEQ ID NO: 61628 - protein, 144 aa, Zea mays
  Coding DNA Sequence Number=SeqID_19849
  Gene Ontology: Mol. function=protein binding; Cellular component =nucleus; Biological process=regulation of transcription, DNA -dependent
  Homolog annotation: Hit_ID=Q8W514; Match level="QueryCoverage=84%, HitCoverage=28%, E-value=7e-46, Identity=74%"; Hit description=MSI type nucleosome/chromatin assembly factor C
MPKAVGGAADEEEFRAEVEERLINEEYKIWKKNTPFLYDLVITHALEWPSLTVQWLPDRTEPPGKDHSVQKMILGTHTSDNEPNYLMLAQVQLPLDDAEADARHYDDDHADIGGFGAASGKVEFPPPPLPQTLLRVLLDLSGVN

SEQ ID NO: 61629 - protein, 98 aa, Zea mays
  Coding DNA Sequence Number=SeqID_19850
MAGGGMVGGAFWATRALEVVKRNDSPGLLWKRIKLTTTRKNNAKKRLKRLWQQVSVDALELDAAAYEHGDDAKEEVDDVLACPCDDRTTIWTSLAMSS

SEQ ID NO: 61630 - protein, 154 aa, Zea mays
  Coding DNA Sequence Number=SeqID_19851
MWAPLSNSPLCVGVAVGWACAVRVFFIRATAAHRAHRPYAADSVGASSTELAPTTTADVAGFGHCDSCARVGWLGPSRQAPFRLRLQQTPSSSHVVRPNPRTVISLGVVHLLLAPAEYKTKLCAGSPFNPPVPRAPSPVASARRAPSLLPSPCR

SEQ ID NO: 61631 - protein, 529 aa, Zea mays
  Coding DNA Sequence Number=SeqID_19852
  Gene Ontology: Mol. function=DNA helicase activity; Biological process=DNA replication, synthesis of RNA primer
  Homolog annotation: Hit_ID=Q016M7; Match level="QueryCoverage=80%, HitCoverage=69%, E-value=8e-97, Identity=41%"; Hit description =Homology to unknown gene
  Pfam annotation: Domain name=Toprim; Domain location=284-362; Score =21.7; E_value=0.0012; Accession=PF01751.12; Description=Toprim domain
  Subcellular localization annotation: CTP_CleavageSite=37; ConfidenceScore=5.32e-01
MPPRPSLHSLLLMAASAAAASGDSGPLLAARRRLAATAAAGGHRIRLLHSFSPGRVPRRPEVYIKRTLSGFGLGAKHPGKYVLSAKNYSTASEERLGKIIQKLKNEGINPKQWRLGNFQRMLCPQCNGGSSEELSLSVYIRKDGINATWNCFRSKCGWRGFVQADGVTNISQGKSGIESETDQEVEAKKAANKVYRKISDEDLNLEPLCDELVEYFATRMISAETLRRNKVMQRNWNNKISIAFTYRRDGALVGCKYRAVDKTFSQEANTEKIFYGLDDIKRAHDVIIVEGEIDKLSMDEAGYRNCVSVPDGAPPKVSSKIPDQEQASRIILATDNDRPGQALAEELARRLGKERCWRVNWPKKNDTDTCKDANEVLMFLGPQALRKVIEDAELYPIRGLFSFEQFFPEIDNYFLGIHGDELGIHTGWKSMDDLYKVKEHARKLLEKHIQKPFFNARYGGSAQRMTPDEFEAGKQWLNKTFHLIRCEDDSLPSINWVLDLAKAAVLRHGVRGLVIDPYNELDHQRPSNQ

SEQ ID NO: 61632 - protein, 147 aa, Zea mays
  Coding DNA Sequence Number=SeqID_19853
  Gene Ontology: Mol. function=DNA helicase activity; Biological process=DNA replication, synthesis of RNA primer
  Homolog annotation: Hit_ID=Q016M7; Match level="QueryCoverage=50%, HitCoverage=10%, E-value=1e-19, Identity=61%"; Hit description =Homology to unknown gene
MESGLFPHSCPRGWLQNWNGGPPNIYDISGSAHFINKCDNGIVIHRNRDPNAGPLDTVQVCVRKVRNKVVGQIGDAFLTYDRVTGEFKDAGKATTAPSAKAAKQSRKEAYKMPFQHAAEDGTNAFNVAVFFKKDAFNVTQLRIQLEQ

SEQ ID NO: 61633 - protein, 77 aa, Zea mays
  Coding DNA Sequence Number=SeqID_19854
MAKSFIIALEGPALTWFTRLPPVIPDCRVYFEDRLEFRRDLMVRPYRYNEHHMFPREGAPDHWLWEARDVAARPPHF

SEQ ID NO: 61634 - protein, 85 aa, Zea mays
  Coding DNA Sequence Number=SeqID_19855
MEIVYRFGDRQIRSGRSFLIQRPMTLGTPSQIIIVYFIYMFGVMLIFAILCMFVLMRVDEQATEDPGAQQIEVAEQELIEGKLCP

SEQ ID NO: 61635 - protein, 52 aa, Zea mays
  Coding DNA Sequence Number=SeqID_19856
MAKRWRLKSPWFTAVKTRSTAQGGAAASWELRLLKAMLSLNHFPWLCTSFIR

SEQ ID NO: 61636 - protein, 118 aa, Zea mays
  Coding DNA Sequence Number=SeqID_19857
MPLMAFKELEWRKRNGRVESPLTKEKQTVVARGYSVGVLARRCLGQGVGWLGASGTRAVRSRPWELRAVLQHGSPWLFQMCVGSLSVQHGWLQLAVLVHSPSWKRPMVLAGSCMGSWQ

SEQ ID NO: 61637 - protein, 1449 aa, Zea mays
  Coding DNA Sequence Number=SeqID_19858
  Gene Ontology: Biological process=pollen maturation
  Homolog annotation: Hit_ID=Q5Z6I4; Match level="QueryCoverage=65%, HitCoverage=95%, E-value=0.0, Identity=73%"; Hit description =Putative Osnop
  Pfam annotation: Domain name=C2; Domain location=3-83; Score=107.5; E_ value=3.8e-29; Accession=PF00168.20; Description=C2 domain
  Pfam annotation: Domain name=C2; Domain location=555-637; Score=65.2; E_value=2.2e-16; Accession=PF00168.20; Description=C2 domain
  Pfam annotation: Domain name=GRAM; Domain location=707-773; Score =73.4; E_value=7.4e-19; Accession=PF02893.10; Description=GRAM domain
  Pfam module annotation: Pfam domain module=C2::C2::GRAM; Domain location=3-83::555-637::707-773
MRLVVRVIEARGLPPTDADGTRDPYAKAQLGKQRAKTKVMRKTLCPAWDEEFAFRVGDLRDNLLVSVFHEDRYFAADVLGQVKLPLTAVLDADNRTLGTQWYQLQPKSKKSKLKDCGEIRLNVSLAQNYSEEETTAPAHWASDDLASNSDKSTELVKGSSLLNVPIEVSTAVPEIYEIEAAEEDKSNAAPSFVNKLYQMFNSKPKDTEASAPLPSKLNDPSDIAEETLSTSSEAPEKQDHDVSATMTFDELLKAFGSQHEGKEMPENLSGGVVLDQVYAVAPSDLNTLLFSPSSDFLQSLAEIQGTTGLEIQQWRLENDGEILRRVVSYTKAPTKLVKAVKATEDMTYLKADGEMFAVFADVSTPEVPFGNTFRVEVLTCIMPGPELRGDEKSSRLMVSWHINFVQSTMMKSMIENGAKQGLKDNYVQFSELLAKHCRPVDTKDTTSSNEVLSSVQPEQESDWKLAFRIFGNFALLSSVFAFFYVSAHIILASPSIIQGLEFPGLDLPDSAGEVVVCGVLVLQGQRVLNMIARFIQAKRQRGDHGVKAQGDGWLLTVALMEGTNLAATKSSGYSDPYVVFTCNGKTKTSSINFHTLDPQWNEIFEFDAMEDPPSVMKIHVYDFDGPFDEVASLGHAEVNFLKYNNISELADIWIPLKGKLAQACQSKLHLRIFLNNTRGTEVVKDYLDKVEKEVGKKIAMRSPHTNLAFQKIFSLPPEEFLINDFTCHLKRKMLTQGRIFLSPRIFGFYTNLFGHKTKFFFLWEDIEDILLVPATLSSMGSPSLVIILRKDRGMDAKHGAKQLDSQGRLKFHFQSFVSFNVAHKTITALWKARSLTPEQKVSTLMGIFEGGPLECRVMEKVGCMDYSVTAWEPVRADIYQRQVHYKFDKKSARHGGEAMSTQQKSPLSNKNGWLVEEVMTLEGIPVGECFNLHIRYQLESNASKHKTCTIQILGIDRGWFVKGPFRTGAALSTLKHGLSEDGHTRRRERTRTSDLWAWSINPSGIAKEVWLTITDPDEFPSSDFQVHHSAPARLKFGLSYKLLIHVDVVEDLSFIEGRNIQDRRRRREFEWNYGGGREDTTEGMMRIGRIRAVEVAIFGAGLGGMGEALIVGGLLMTAIPTTTSIILGAVPPIAAVVFPKILGGHGSWLSNQVAVVELQHKGTYPLKPPSIGKNVSFASPIATVLGATITGDLRGPSVFISNSPSTVSCAFHDPMLDEAFLYSGVVGGHNSSVMCEERQNSVARVGSAASPPTMMEVDGSNLSANTAALEPSLLLSEVQPSPCLVDFISSITRPVSPPLIAQTPLTNPDRTGLNRFPHESNHSAPHLIIPTDSLNHIPSDIAVEPALPQPHVHETNGYSPLHIMGAASEPTSTPQDQLPKTVPFSGPSTSTQMPIKTVAYALVQHFDQPLSKGKIEAIKNLLENGKQLKKKARGTKVAPAVLACPSALG

SEQ ID NO: 61638 - protein, 702 aa, Zea mays
  Coding DNA Sequence Number=SeqID_19859
  Gene Ontology: Mol. function=protein serine/threonine kinase activity; Cellular component=cell surface; Biological process =protein amino acid phosphorylation
  Homolog annotation: Hit_ID=Q8H4I6; Match level="QueryCoverage=88%, HitCoverage=94%, E-value=0.0, Identity=63%"; Hit description =Putative receptor-type protein kinase LRK1
  Pfam annotation: Domain name=APH; Domain location=362-561; Score= -15.8; E_value=0.077; Accession=PF01636.13; Description =Phosphotransferase enzyme family
  Pfam annotation: Domain name=Lectin_legB; Domain location=32-273; Score=372.1; E_value=8.8e-109; Accession=PF00139.10; Description =Legume lectin domain
  Pfam annotation: Domain name=Pkinase; Domain location=359-646; Score =184.5; E_value=2.6e-52; Accession=PF00069.15; Description=Protein kinase domain
  Pfam annotation: Domain name=Pkinase_Tyr; Domain location=359-646; Score=95.3; E_value=1.8e-25; Accession=PF07714.7; Description =Protein tyrosine kinase
  Pfam module annotation: Pfam domain module=APH::Lectin_legB::Pkinase:: Pkinase_Tyr; Domain location=362-561::32-273::359-646::359-646
MATSKLITITMTILLFLIVGFIPELCVAASSDHEQFVFNGFTGSNLSLDGAARITSTGLIELTNDSARIKGHAFHPSPLRFRRSSDGTVQSFSVSFVFGILSSFGDIRGHGFAFFVSPSKDFTAAYPIQFLGLFNSTNNGSLSNHIFAVELDTIQNTEFGDINDNHVGIDINSLNSLKSYAAGFYNDQNSGRFTNLPLIGSQQPIQAWVEYDGNKTRIDVTIAPLGLAKPLTPLLSLAFNLSTVLTEEEAYIGFSSSTGLSTGHHIILGWSFGMNRPAPAIDSTKLPKLPYLGPRAPSKLLEIVLPIASALFVLVVGTTAVILVRRHLRYKEDVREDWEVEYGPQRFTYKDLSHATKGFSSKHLVGVGGFGRVYRGVLPKSRSQVAVKTVPYNSKQGVKQFTAEVASMGHLQHSNIVQLHGYCRRKGEFFLVYDYMVNGSLDRYLYGYGGEEGRPPGATATVVLDWAQRFKIVRDIASGLLYLHEEWDKVVVHRDVKPSNVLLDNNMNGRLGDFGLARLYDHGTDPHTTHVVGTIGYLAPELAHRGKASTRTDVFAFGVFVLEVTCGRKPVVVSEDTDTPGRGTQLMLVDWVIQNWHKGSLVDAIDIKLQGRYDVDQACLALKLGLLCSHPSPDARPSMRQVLQYLDGDLPLPELLPAHFSFHMLALLQSETRLNTSTVSLYPSPAMTMMDYGSVSFSLDGR

SEQ ID NO: 61639 - protein, 116 aa, Zea mays
  Coding DNA Sequence Number=SeqID_19860
  Subcellular localization annotation: CTP_CleavageSite=62; ConfidenceScore=5.37e-01
MTVTLRTAQHGPPGDTLGGPPVSVTRGAQHLAPTIHATMITPMMPPKKNTLPSSPSNNEYARVALVAKKGKVVLTSDHSPAPKLKASVDPQGEGLIAKQKQKEVSTEQKVKSTPPA

SEQ ID NO: 61640 - protein, 115 aa, Zea mays
  Coding DNA Sequence Number=SeqID_19861
  Subcellular localization annotation: CTP_CleavageSite=16; ConfidenceScore=5.04e-01
MARRPVPAVPPWLLAPASQVQQFRHERLPLLPSVTTSAVVESNCAIQGSDHLGMCCLTKACQCPMHSSQQGMLQPLTLNADGKVASSRRLVPRANGPRGGFGPLPERKVGAKSAY

SEQ ID NO: 61641 - protein, 194 aa, Zea mays
  Coding DNA Sequence Number=SeqID_19862
MSNSVISDPPWFDCAAELLHVQTRTQQAALGDPIDSIGARRLRQTSPYLSRCSLGGAHGSTAITALVLGSALMSRGGEAGVTATKTPTRNGVYMARGAARVQVFVAGTSGSRDPQQPDIYGQALLLSIPSMAAKFREMSEEFVGIPADAREHREGDEVRPGGKTADPIAWACDAESVRESNRVLNFTYTRKPPA

SEQ ID NO: 61642 - protein, 62 aa, Zea mays
  Coding DNA Sequence Number=SeqID_19863
MGEASAARAMLSGPSFTVERRRNRARKSREFCYGDFGPYMEALWKLWDRGLIAAGVVATFHL

SEQ ID NO: 61643 - protein, 176 aa, Zea mays
  Coding DNA Sequence Number=SeqID_19864
  Subcellular localization annotation: CTP_CleavageSite=59; ConfidenceScore=5.40e-01
MPHSPDSISQQRGSGPSASTNAARAVSEGGLHWTDSFPFLRQRPTRKSGSQRAARNPREASHEPHDRLSHKTYVPRLLCPFALGCDCLGSHGIARAGNLEPSPSTVVGSSDFGRGCTGVAALDCRACAHCISEARTPGVRPIIAPVSFAAALLRSCSAPQLVTIGKPPKPLLTFAQ

SEQ ID NO: 61644 - protein, 629 aa, Zea mays
  Coding DNA Sequence Number=SeqID_19865
  Gene Ontology: Mol. function=RNA-directed DNA polymerase activity; Cellular component=intracellular; Biological process=RNA-dependent DNA replication
  Homolog annotation: Hit_ID=UPI00004C1733; Match level="QueryCoverage =99%, HitCoverage=50%, E-value=0.0, Identity=80%"; Hit description =UPI00004C1733 related cluster
  Pfam annotation: Domain name=RnaseH; Domain location=334-461; Score =13.0; E_value=3.5e-06; Accession=PF00075.14; Description=RNase H
  Pfam annotation: Domain name=rve; Domain location=501-628; Score =50.8; E_value=4.6e-12; Accession=PF00665.16; Description=Integrase core domain
  Pfam module annotation: Pfam domain module=RnaseH::rve; Domain location=334-461::501-628
MKESDQLATSFITPFGMYYYVTMLFGLRNAGATYQRCMNHVFSQHIGRTVEAYVDDIVVNTRKASDLLSDLEVTFRCLKAKGVKLNPEKCVFGVPRGMLLGFIVSERGIEANPEKIAAITNMGPIKDLKSVQRVMGCLAALSRFISRLGERGLPLYRLLRKVECFTWTPEAEEALENLKALLTNAPILVPPAAGEALLIYVAATTQVLSVAIVVERREEGHALPVQRPVYFTSEVLSKTKIRYPQVKKLLYAVILTRRKLRHYFESHPVTLVSSFPLGEIIQCQEASGRIAKWAVEIMGETISFAPWKAIKSQVLADFVAEWVDTQLPTAPIQPELWTMFFDGSLMKTGAGAGLLFISPLGKHLRYVLRLHFPASNNVAEYEALVNGLRIAIELGVRRLDARGDSQLVIDQVMKNSQCRDPKMEAYCDEVRCLEDKFYGLELNHIARRYNETADELAKIASGRTAVPPDVFSRDLHQPSVKIDDTPEPEAPSAQPEVPLAQSEAPSARPEASSVQPEKAPGGYTHLLVAIDKFSKWIEVRPLNSIRSEQAVAFFTNMIHRFGVPNSIITDNGTQFTGRKFLDFCEDHHIRVDWATVAHPMTNGQVERANGMILQGLKPRIYNDLNKFGK

SEQ ID NO: 61645 - protein, 194 aa, Zea mays
  Coding DNA Sequence Number=SeqID_19866
MSNSVISDPPWFDCAAELLHVQTRTQQAALGDPIDSIGARRLRQTSPYLSRCSLGGAHGSTAITALVLGSTLMSRGGEAGVTATKTPTRNGVYMARGAARVQVFMAGTSGSRDPQQPDIYGQALLLSIPSMAAKFREMSEEFVGIPADAREHREGDEVRPGGKTADPIAWACDAESVRESNRVLNFTYTRKPPA

SEQ ID NO: 61646 - protein, 153 aa, Zea mays
  Coding DNA Sequence Number=SeqID_19867
MVEERDSGRRRRGTEQEAGSCCGSTAAATVAARNIAGGGELLRWRRRTMESRDGEEWSRRRGAAVDRRRLLPQRRGTEQELRSCCGLAPAAAAAAWSGGRVESAAAWINEQSAGRLDRDSKWERGHICRSLRKNGENDVGNTIKLDQTDKKAV

SEQ ID NO: 61647 - protein, 127 aa, Zea mays
  Coding DNA Sequence Number=SeqID_19868
  Gene Ontology: Mol. function=kinase activity; Cellular component =ornithine carbamoyltransferase complex; Biological process=amino acid metabolic process
  Homolog annotation: Hit_ID=Q6QP54; Match level="QueryCoverage=79%, HitCoverage=37%, E-value=4e-14, Identity=60%"; Hit description =Putative kinase
MAPPVDVVGPSPRLGEVEAPPRSRSSLSSEAEVESEPPGRARRRPSADARVELESEPWGWAKRSSSSFGAKPESDPSSSSFGAKPESEPWGRAKRSSSSSGAEPESEPWGRAKRSSSSSGAEPESEP

SEQ ID NO: 61648 - protein, 107 aa, Zea mays
  Coding DNA Sequence Number=SeqID_19869
  Subcellular localization annotation: CTP_CleavageSite=68; ConfidenceScore=5.74e-01
MPNLTTLEAGGARSGVLASKSCRGASGGSLTRSQSLSGGLRCLLSRTLVRLPPSSRTSWCTLGWSKARTNAAAPLALRDSLPLHLAKQNTFGFQVRWPCLEASRKMG

SEQ ID NO: 61649 - protein, 82 aa, Zea mays
  Coding DNA Sequence Number=SeqID_19870
MVKPTIPQVPLINQGTEGFFYKKTKRRGIGFPRPLDLGSTVEIRPAGQAREVWVDDREAQGQWRIEGAGLWPLDGESRALVQ

SEQ ID NO: 61650 - protein, 125 aa, Zea mays
  Coding DNA Sequence Number=SeqID_19871
MLQLRLLWRIPTDWRLLQQPLGALFDRSICSRAPHFQENRAQRGVAIDRRESAVGGQVGTTNPVGARRGGADPAIGMRGRELGNAIRDSMCDYKKREKKELCSGTHEDLDLNSTMNMNFVLKLKV

SEQ ID NO: 61651 - protein, 194 aa, Zea mays
  Coding DNA Sequence Number=SeqID_19872
MAQRAVRKELWQGKKAASEIWRGERTRRVFTGDGAHGFLYPELSPIWGGLGQRSAPCARASSGEDKSVACSSSDCYGGSQLTGVCYNNRCAALFDRSICSRAPHVQGNRAQRGVTIDRQESAVAGQVGTTNPVGARWGGADPAIGMRGRELGNAIRDSVCDYKKREKKELRSGTHEVLDLNSTMNMNFVLKLKV

SEQ ID NO: 61652 - protein, 203 aa, Zea mays
  Coding DNA Sequence Number=SeqID_19873
MPRPWQFDNIVLCISYFLYDYLDCVAVFVYGTLLLRHCHPGASWCATGLPVCFAYIRDLCSSSSSASSTATLTIATQCTTPQQWLDALALGYLDIIGTKGYHLYGLVQSQYWGPSSSEGAHGMKGVVWKKDESVPKLWVEKLRLSAKTHLRTSDQHWRPPPVNSFDHLRQAMTFVMPLKKSSGLEAALQPLDVNQDTLREARS

SEQ ID NO: 61653 - protein, 88 aa, Zea mays
  Coding DNA Sequence Number=SeqID_19874
MAGAEMKVQDVPEKTTGSSPSSFVDVSEILKPTAVERRRDLNKAQEERRLLRLPGKMSGSEEIANDGRNASRPKDHALNFGGKNWCAC

SEQ ID NO: 61654 - protein, 86 aa, Zea mays
  Coding DNA Sequence Number=SeqID_19875
MARARLGAMWGAWGLASGVLWRGASSEMKVHDGGLLLRRRSLRRRYSLKMTTMNAKAIAEEQQLRLKVVSKIKHDAEPKRKRLARA

SEQ ID NO: 61655 - protein, 796 aa, Zea mays
  Coding DNA Sequence Number=SeqID_19876
  Gene Ontology: Mol. function=protein serine/threonine kinase activity; Cellular component=ubiquinol-cytochrome-c reductase complex; Biological process=protein amino acid phosphorylation
  Homolog annotation: Hit_ID=Q0ZCC5; Match level="QueryCoverage=92%, HitCoverage=36%, E-value=1e-167, Identity=43%"; Hit description=CCHC- type integrase
  Pfam annotation: Domain name=B_lectin; Domain location=72-183; Score =61.6; E_value=2.5e-15; Accession=PF01453.15; Description=D-mannose binding lectin
  Pfam annotation: Domain name=Pkinase; Domain location=506-776; Score =169.1; E_value=1.1e-47; Accession=PF00069.15; Description=Protein kinase domain
  Pfam annotation: Domain name=Pkinase_Tyr; Domain location=508-776; Score=109.0; E_value=1.4e-29; Accession=PF07714.7; Description =Protein tyrosine kinase
  Pfam module annotation: Pfam domain module=B_lectin::Pkinase::Pkinase_ Tyr; Domain location=72-183::506-776::508-776
  Subcellular localization annotation: CTP_CleavageSite=27; ConfidenceScore=5.22e-01
MAAPLLLPLILLLSSTPPLQAQQNITQGSSLTPQGPTTSWHSPSGDFAFGFQPIDGNTSVYLLAIWFNKIGNLTVTWYAKTSDQDPVPVQVSSGSRLQLNSNGALSLQDSTGTEVWSPQVVGASYAAMLDSGNFVLAAADGSTRWESFKYPTDTILPTQVLTPGMSLRSRIIPTDYSNGRFLLDLQSTGVSLYTVAVPSGYKYDPYWSMDVNTTDLVFNATGAIYIGNNTEITSWVISSIADYYLRATLDPDGVFRQYMYPKKDNNQSNQAWSAVDFKPPNICGAQLTKIGSGICGFNSYCLWNGANNQSTCKCPDQYSFIDGERKYKGCKPDFQPQSCDLDEAAIMTQFMLMPTSLVDWPLSDYEQYTSITKDQCQKLCLTDCFCAVAVFHSEDNTCWKKKMPLSNGNMADNVQRTVYIKVRKNNGTQSEITDPNKWKKDKKNWIIGSSLFLGSSVLVNILLISIILLGSYCTITIKQVPAMQSSNNIGLPLKAFTYTELEKATGGFQKVIGTGASGIVYKGQLQDDLSTHIAVKKIDKLAHETEKEFTSEVQTIGRTHHKNLVRLLGFCNEGKERLLVYEFMTNGSLNRFLFGDAKLQWSIRAQLVLGVARGLVYLHEECSTQIIHCDIKSQNILLDDNFTAKISDFGLAKLLRTNQTQTNTGIRGTRGYVAPEWFKNIGITAKVDVYSFGVILLELVCCRRNVELEAAEEDQKILTDWANDCYRYGRIDFLVKGDEEAISDLKNVERFVAVALWCLQEDPTMRPTMLKVTQMLGEAAVVPSPPDPTSFVSTLA

SEQ ID NO: 61656 - protein, 168 aa, Zea mays
  Coding DNA Sequence Number=SeqID_19877
  Gene Ontology: Biological process=response to stress
  Homolog annotation: Hit_ID=Q8S292; Match level="QueryCoverage=62%, HitCoverage=49%, E-value=3e-16, Identity=44%"; Hit description =Putative early nodulin ENOD18
MAAARADGERRIGVAIDYSESAKKALDWAIDNLLHHGDTLVVVHVLHHGAEETKHTLWAKSGSRKLPPLKLSPHPSLPYPYPNAHPLPAALIPLSEFREPEVMQGYGVRPDARGARRDRHGSAPEAGLECAVQPLIDSPGKRDKLRAVKRIVPGDSRQGEVVAWAACQ

SEQ ID NO: 61657 - protein, 129 aa, Zea mays
  Coding DNA Sequence Number=SeqID_19878
MGDGTRSNKVTEMTEEISQEFEEFAKGGRKCILKHSRELRGSENRGRLTEGREEEGDEVAGAQSRTVAAGGGSSPVGEQRIAKNREQLAVEEKSEPLARMRAGGLFLKRRYGRTGQSTVPVRCTPDSAQ

SEQ ID NO: 61658 - protein, 374 aa, Zea mays
  Coding DNA Sequence Number=SeqID_19879
  Homolog annotation: Hit_ID=Q2HS22; Match level="QueryCoverage=24%, HitCoverage=29%, E-value=3e-08, Identity=47%"; Hit description=IMP dehydrogenase/GMP reductase
MSTTECADLGEEFWLPEDFLDDDFFSEEEKAAVAARSESDEEDSLAGLSRRLAGLLGDGGELSGACVRAGVSDGAFLVRQAEVTVGSPQSTLCGLPKSGQESPSGGASKGTSPPSSPLDQRPADPWDLLYEAAGQVARMRAANSVPVPAANGFHGRSGFAPPPRKPSPPPIAPPSTKVPAGGHYYDPFARLVSQRQMQAAQFHLLKQQQLLKLQRERHQLAAAAAWSARQGACAKPVGCVRGDALLGLNPAACLPPQKPQHHHHPHHAPAAPASGMRAVFLTPSGPKRERNGTGVFLPRPAGAPAEPKKKTGCSTVLVPARVVQALNLNLDDLGAQPRYPGGFVLDHEALISRSNAMLASQKRRAASQALCHSS

SEQ ID NO: 61659 - protein, 262 aa, Zea mays
  Coding DNA Sequence Number=SeqID_19880
  Gene Ontology: Mol. function=penicillin binding
MYIARETSKVWRKVATEVSVELQLLREKWGLLLAGLIFQYIHGLAARGVHYLHRPGPLLQDLGFMALPELGQDKGYLSETIFSSIFISFVLWTFHPFIYHSKRFYTVLIWRRVLAFLVGSKLATLPPPNSVLEVLLINFPRGVLFGCGDLIFSSHMIFTLVFVRTYQKYGSKRFIKFLAWFMAIIQSLLIIASRKHYSVDVVVAWYTVNLVVFFVDNKLPGAGLCHIRTCDLCVTLRQRAQMNGRHDEDINHALSEATANGT

SEQ ID NO: 61660 - protein, 117 aa, Zea mays
  Coding DNA Sequence Number=SeqID_19881
MARPVIAKVKLLWQWLMLPRKLMQIVACGCTEKGNDQVSEDWHRRRCSCLHQRIRRVAHIRLLAELNEIGGKHGRRLPRLMTGKSITRLTPRGGHQALVSRPGSGRCWRRVSESFFV

SEQ ID NO: 61661 - protein, 55 aa, Zea mays
  Coding DNA Sequence Number=SeqID_19882
MAINLAIAVAIQYLESSHLYRTGDDAAGRAEPRIPHVESYRAQKPDGKQMLDAPI

SEQ ID NO: 61662 - protein, 272 aa, Zea mays
  Coding DNA Sequence Number=SeqID_19883
  Gene Ontology: Mol. function=zinc ion binding
  Homolog annotation: Hit_ID=Q6I648; Match level="QueryCoverage=99%, HitCoverage=100%, E-value=6e-69, Identity=53%"; Hit description =Putative zinc finger protein
  Pfam annotation: Domain name=zf-C3HC4; Domain location=128-200; Score= 36.9; E_value=7.2e-08; Accession=PF00097.15; Description=Zinc finger, C3HC4 type (RING finger)
MVGGGGHSSMDHTGAKDLERGELRRGAPEFADGDDGDGEESQYFSDAEDRSWPSHSRHDSTAYEDYVSPCVSARASSVDADADADGEAVRQHCRKSSCVSEGSLDDVDLEAGLSEIIKASPEKTEQNCRICHLGLESAAAESGAGITLGCSCKGDLSYAHKQCADTWFKIRGNKMQLDLDSVYGLKMPLLFFTARVCEICSSTASNVVVLGDPEFSDQWSETNSAAAAAAQAPPPPAEPRRFWQGHRFLNFLLACMVFAFVISWLFHFNVPG

SEQ ID NO: 61663 - protein, 174 aa, Zea mays
  Coding DNA Sequence Number=SeqID_19884
  Homolog annotation: Hit_ID=Q43589; Match level="QueryCoverage=72%, HitCoverage=69%, E-value=1e-23, Identity=45%"; Hit description=PAR -1c protein
  Pfam annotation: Domain name=PAR1; Domain location=1-172; Score =138.2; E_value=2.2e-38; Accession=PF06521.2; Description=PAR1 protein
MASSTALAAILLVLAVAVQSARGGQLACEELPPDACAFAVSSGGRRCVLERTPEGAHRCQTSAVRGARGLAGWVETGACVRACGVDRAALGLPVASAAAEDRRSFGALCSPACRDACPNVVDLYATLAAAEGMSLPALCEAQNKAGNRRMMAGMAPVAAPVAAPVAAAPAPCED

SEQ ID NO: 61664 - protein, 62 aa, Zea mays
  Coding DNA Sequence Number=SeqID_19885
MTRLIGFSCRLGSGPGAFTLIVDSIVGHGNQTCSVLKVHLIGHSDFSFEWKRKYHPKFMRMQ

SEQ ID NO: 61665 - protein, 369 aa, Zea mays
  Coding DNA Sequence Number=SeqID_19886
  Gene Ontology: Mol. function=rRNA N-glycosylase activity; Biological process=negative regulation of protein biosynthetic process
  Homolog annotation: Hit_ID=P22244; Match level="QueryCoverage=75%, HitCoverage=88%, E-value=2e-09, Identity=25%"; Hit description =Protein synthesis inhibitor I
  Pfam annotation: Domain name=RIP; Domain location=4-288; Score=-27.0; E_value=1.7e-05; Accession=PF00161.9; Description=Ribosome inactivating protein
MALPLDRTFNVVADCERFEEYIGELREAVRDPTEPPPLAATHPNLYRLRQTTRREPRQWLHLRMVARNAEIIVWIRTDNLYVVGFEQVRGARYEFGVDPANDAKEKNKKKKDKEKKAKKKNKKEDQEQQERRPLISGATFLGFNGGYGDLRQLQTGPDPERRTVPDLGREPLVEAIQGLAAYTPAAPGLVRDWLRTIVVTVSESLRLHNVCRHIARLLLGEYTRGWLDQSLVDCIRDWGDVSACVLASAAHPEGDAHGRYSQLSHICENTDQACEVVAILNAGAVPDEPGPSRRPKREAAVGDGDDDGSVPPLGLTFVEVFSAVVEGGGGTGRNRSLLYGHIAIDDGLSSGSSQLLFMRGPLQRAAGES

SEQ ID NO: 61666 - protein, 74 aa, Zea mays
  Coding DNA Sequence Number=SeqID_19887
MNINHEAKPRTVCCQQGENDENITRSDMTMLKAPATKVKLFHIVTTFDIEELILCCKVCVWEVNDLGVEKATRQ

SEQ ID NO: 61667 - protein, 63 aa, Zea mays
  Coding DNA Sequence Number=SeqID_19888
MGGGAPQVVPGTACVEANWTACVEVYCSSAITDNGYDLCSRSPPTLGITALDRSWGPHAREGE

SEQ ID NO: 61668 - protein, 183 aa, Zea mays
  Coding DNA Sequence Number=SeqID_19889
  Homolog annotation: Hit_ID=Q6QP51; Match level="QueryCoverage=71%, HitCoverage=54%, E-value=6e-10, Identity=36%"; Hit description =Putative growth-regulating factor 1
  Subcellular localization annotation: CTP_CleavageSite=22; ConfidenceScore=5.05e-01
MDGFTPRPRTSSGSRRTPGSPEAKLKKTLSYSNLSQIGLPTDRKKDTIHPVLTTVPTTRGAPPRPTSGLGLSLGLGRRSPPRQTLGLGLSLGLGRRSSPRPTLGLGLSLGLRRRSPPRPTSGLGLSLGLGRSHNLTQSQPWPREKSPPRPTSASDRLCHRGYIITLPLASCLRLRRNKDWCPI

SEQ ID NO: 61669 - protein, 162 aa, Zea mays
  Coding DNA Sequence Number=SeqID_19890
MASIDKIIKDLEPKKMSEEIVELRRSALLLLLEVFVLRTFGIRRANFLWHFAEEPKLSALRFRTSASSLDQLRLKETENSNGQKETTTEGATAETEQTVAEDGSDSESEEDNNILSPTKPSHIEFGRSTVTAGDLVLMKKLGYLGITEREMCPWAISKYFGD

SEQ ID NO: 61670 - protein, 347 aa, Zea mays
  Coding DNA Sequence Number=SeqID_19891
  Gene Ontology: Mol. function=ribonuclease H activity; Cellular component=mitochondrion; Biological process=DNA integration
  Homolog annotation: Hit_ID=UPI00004C1731; Match level="QueryCoverage =99%, HitCoverage=26%, E-value=1e-145, Identity=70%"; Hit description= UPI00004C1731 related cluster
  Pfam annotation: Domain name=RnaseH; Domain location=8-124; Score= -23.7; E_value=0.0094; Accession=PF00075.14; Description=RNase H
  Pfam annotation: Domain name=rve; Domain location=163-313; Score =93.0; E_value=9e-25; Accession=PF00665.16; Description=Integrase core domain
  Pfam module annotation: Pfam domain module=RnaseH::rve; Domain location=8-124::163-313
MFFDRSLMKTGAGAGLLFISPLGKHLRYVLRLHFPASNNMAEYEALVNGLRIAIELGVRRLDARGNSQLVIDQVMKNSHCRDPKMEAYCDEVRRLEDKFYGLELNHVARRYNETADELAKITSRQTTVPPDVFSRDLHQPSVKTDDTPEPEEASAQPEAPSTQPEAPQPPRKAPGGYTHLLVAIDKFSKWIEVRPLNNIRSEQAVAFFTNIIHRFGVPNSIITDNGTQFTGMKFLDFCEDHHIRVDWAAVAHPMTNGQVERANGMILQGLKPRIYNDLNKFGKRWMKELPLVVWSLRTTPSRATGFTSFFLVYGAEAILPTDLEYGSPRTRAYDDRSNQTNREDSLD

SEQ ID NO: 61671 - protein, 118 aa, Zea mays
  Coding DNA Sequence Number=SeqID_19892
MTSCSLEHALRRGGMGARRWMGEEYGAWPDEAVRSKGALVAWNREWWCLGGCELGSGTPAGEEHSAPGAEVWGALAGGQQGTPADWNRERRWSYRKGIIGEVFTDPLAGCPKCIRDPF

SEQ ID NO: 61672 - protein, 100 aa, Zea mays
  Coding DNA Sequence Number=SeqID_19893
  Homolog annotation: Hit_ID=Q1SKW8; Match level="QueryCoverage=99%, HitCoverage=19%, E-value=7e-09, Identity=38%"; Hit description =Membrane attack complex component/perforin/complement C9
MAEEVNWSLSLPASKIPSGAFNAMFDATRSLCFDARLVELYSVEAVRASPQPSGTAVDRPSSSGDWFIDKYGTHVVVAVKMGGKDVFDCGSSIMGPMKVQ

SEQ ID NO: 61673 - protein, 130 aa, Zea mays
  Coding DNA Sequence Number=SeqID_19894
MGATLFGGLTESRFAKRRPGFADRRKRASLRAEGPPYRVKCEPDEPVPASQPNQGSVRVRGRKDRKRIKQRDDFITAEKEKRRAQYSAAVKRKEAERTEREMAAVARDRAWAERLVELKQLEEEKNTAMA

SEQ ID NO: 61674 - protein, 1732 aa, Zea mays
  Coding DNA Sequence Number=SeqID_19895
  Gene Ontology: Mol. function=DNA binding; Cellular component=nucleus
  Homolog annotation: Hit_ID=UPI0000E810AC; Match level="QueryCoverage =18%, HitCoverage=12%, E-value=2e-15, Identity=21%"; Hit description =PREDICTED: similar to silencing mediator of retinoic acid and thyroid hormone receptor alpha
  Pfam annotation: Domain name=Myb_DNA-binding; Domain location=1018 -1063; Score=31.7; E_value=2.6e-06; Accession=PF00249.21; Description= Myb-like DNA-binding domain
  Pfam annotation: Domain name=Myb_DNA-binding; Domain location=808 -853; Score=44.3; E_value=4e-10; Accession=PF00249.21; Description =Myb-like DNA-binding domain
  Pfam module annotation: Pfam domain module=Myb_DNA-binding::Myb_DNA -binding; Domain location=1018-1063::808-853
  Subcellular localization annotation: CTP_CleavageSite=56; ConfidenceScore=5.03e-01
MRFAAAAGGWHSRRWGDDDNGAVDASAAAGSKGLFVPGGPQARRRRGRPAPAARPNAAALAGLAVPPVATTTSAGPCAALAAPGADVGLLRGGGAYDRSYPDDPPPVYTPSRSDRYWPEDDGGQYKGFGRYGGGGRRDGRDMRGSYRRSPYRGGYGSDFSRNHPEQPPPPPPRRSPLRSVAVPICYDSPGNRVDRGDRDNLPRVTPWRRRESRSEPADAVGLLSVGQTTRLSASGKEASAQPLSVSGPHGTEDEAPRKKARLGWGQGLAKYEKQKVQGPVDPAEAVADGSPADGELKTTSPVPVPVHPVPVPVPYVAPAPPAAPVLAPAPAPSAAPALLSAPMQCSSPVTGPPYCSSAPEDKSCEMMPNAVTNSTKDVLEADDTTFNNEFLIKLDQLGDDPVISLGNMLVELIQHEDSCSGDSNGPTSTYKLLLLKESISKEIEKTELEIDSLEGELKSVNTEAATTLEGSPTGVTHTENLSPSSGTSKVPGSVEICDTSDMIKEPGELIGSPKVPVVQYDDVKSADMMEIETAPVHNAKTVPSEAGAISPVVAEGKACAAADLSSLKASEEAGSQNDIDNGRLETSSRQANADSMKIEISDDLPVKKWTYHDHKSDLLSSVTSANSAIAKEINEVLFKSLPADTPRLDLFASSHLLSQRKSDLIVKERLGVCKTRLRLKEQMLTMKFKAYCHLWKDVQLFSANKQRSKSNKRTDQSNRTSQIGSQRQRSSNRSRLTMPAGNLSTFSTPEMSDVAMRLFSEFKIKRCRNYLKMPALIIDEKEKEWLKLMNKNGLVEDPVLVEKERVMINPWTQEEKKIFMELLAKFGKDFSKIASFITHKSTADCVEFYYKHHKSDSFREVKKLLDLRQQQPTSNFLGAKSGHKWNPESNAASLDMLGVASVVAAHGLEYAKQVEKISAKSLIRTAYGPNVTSVANKSSDKECIDHVPLHERESVAADVLAGICGTLSPDGMGSCITSSADPGQKISMKRVEHVLSQENDKTVEEEDTLSDQECEVDPVDWNDDEKSIFIEAMNNYGKDFARISSCVKSKSYEQCKVFFSKARKSLGLDLIHQGAADVSMPASDTNGGKSDTDEACAVEMDSAICSTQSCSKIAMDVCPTEGAIGGPNSVIISKQAEAYISNGCNADVKIEEDEKRSSDATHEAGPIDINCPGSTDKLQGTDDVVDLVNMHSNSGISSSAKHAVAIHSEMRSTLHSVEVLQTDKGEGTGTDLSWVEECSHHALDNTPMKNGNSGAPAFLASDSGIKDNVRISNITAASTVSPAFTSSYQHSVPGDMPLPKPKPLVTPLTPKDLMPVQFSSVLPDPTAIRFEGIASITTPNFEDTGNRVSGALGAKEMSKYPAFRDPSGNQQSTLFCNIDGYMNHRLTTELPFFSERTASGTVNTSQADRLTQTKLQNGRSSSLCLQNNSDGIQWPRDHEGGLEGSLRPCSRNTSSEGDEQQKRPGDVKLFGQILSHQSTLQSSGLSCNGNKSKPPSPKIDTSVRSMNNPMDRVVCSSRPGTTPHLGLEERLARCYGHLDGSTAQPEPLLVMAKRQRSLAGVQFYSAKNGTLGVLPDYQQPSTQPQQSDPKRVERLSDPQKRNVLELISGFQQPGRVARFGGAGILVSGNVSDPVAAALKAQYGPGSKIMGSDVDPWTDIGSRWHRHVVLDLSLLSFDFVAREFLAGGGFPWAAPADRDRFSVSRASFGVGSALSVACRAVVVLLQQQQLRQP

SEQ ID NO: 61675 - protein, 318 aa, Zea mays
  Coding DNA Sequence Number=SeqID_19896
  Gene Ontology: Cellular component=integral to membrane; Biological process=autophagy
  Homolog annotation: Hit_ID=Q75IM5; Match level="QueryCoverage=88%, HitCoverage=98%, E-value=1e-105, Identity=63%"; Hit description =Putative senescence-associated protein
  Pfam annotation: Domain name=Tetraspannin; Domain location=6-239; Score=181.7; E_value=1.7e-51; Accession=PF00335.10; Description =Tetraspanin family
  Subcellular localization annotation: CTP_CleavageSite=63; ConfidenceScore=5.20e-01
MYPYRMSNVMIGYLNLATLLASLPIIGAGLWLARGSSSSSSTTCSSILQTPLLAVGFAALLVSLAGFVGACFHVAWALRLYLAAVALLVAFLLGLTAFGFAVTAGGGGAQVYGRPYREYRVTDYSAWLQKRMQDDRYWRPALACVVGSKACPKIQNWTPMDYLQHDLTPIQSGCCKPPTACQYSGGMPVGAQDEDCYRWNNAPDILCYRCDSCRAGVMEQVRQDWHKIFVLDVAVLAALVCICSCGCCAFRNARRSRSQYPYGVNQTSKINPRWDYWYSKRESSVVYSLCFLPLIVCRVKFKIGDVISTTAEDNLIGQ

SEQ ID NO: 61676 - protein, 300 aa, Zea mays
  Coding DNA Sequence Number=SeqID_19897
  Gene Ontology: Mol. function=DNA binding; Biological process =regulation of transcription
  Homolog annotation: Hit_ID=Q69NI4; Match level="QueryCoverage=98%, HitCoverage=35%, E-value=1e-112, Identity=69%"; Hit description =Putative nodule inception protein
MEEGGDPQLPSISVARTTSEGAGAVDLDLLEQLLSGDNGWLEVVSRSPNSVAFPPPSAFFSADATATTVTTTAAPAANASWLIQTGGASTPSVRERFSQALSYIRDTQSDGDVLVQLWVPVNRDDGKLVLTTSGQPFTLDHRSDSLIRFREVSTKYQFPADVRSGESPGLPGRVFIGRLPEWSPDIRCFTSYEYARVTDAKYLDVHGTMGLPVFEKRSYSCLGVIELIMTKQKLNFTSELNTICSALQFSTASYKDALPEILEVLRAACLTHKLPLAQTWVTCTQQGKRGSRHSDENYRL

SEQ ID NO: 61677 - protein, 179 aa, Zea mays
  Coding DNA Sequence Number=SeqID_19898
  Homolog annotation: Hit_ID=Q6QP51; Match level="QueryCoverage=37%, HitCoverage=37%, E-value=6e-13, Identity=61%"; Hit description =Putative growth-regulating factor 1
MAVAGRQEQRSRRQPSLRPILGQRENPLSRREDGAPVFHSANGSRTHNGRPASYSPRRINYAAGQAAPLAGVFFLHFAFAITTASKKGPRKGDTPKRILLREGNRLRASLLIRGSKAGPSEGFNSRLRTRGLHTHYWSEVRRPAPRKGSTAASGHSGSAPTTDQGFEGWPSKGSQPPQT

SEQ ID NO: 61678 - protein, 153 aa, Zea mays
  Coding DNA Sequence Number=SeqID_19899
  Gene Ontology: Mol. function=transcription factor activity; Cellular component=nucleus; Biological process=regulation of transcription, DNA-dependent
  Homolog annotation: Hit_ID=Q67VJ6; Match level="QueryCoverage=38%, HitCoverage=13%, E-value=3e-11, Identity=59%"; Hit description =Aintegumenta-like protein
MMLAGAAAASQATMPPSEKDYWSLLALHYQQQQEQQFPASAYEAYGSGGVNVDFTMGTSNGSYLKSGGAKGSQYANKKTKKGFKQRELKRSQRHPGLAQRTVRCTTGQCPMHQGTQSRTRYLQENQRALRYNSLDCPVCQWSNGYFTRNGEST

SEQ ID NO: 61679 - protein, 135 aa, Zea mays
  Coding DNA Sequence Number=SeqID_19900
MAMKHVIICCLLLALMLQSDQTSAADICSYADFRAMFCKNWMCKSQCWFQSQLITPPNVVKEHRTLSRNHLTLEAFVEDQISQNTCEDVLTFIFWNEVAKKGKYGEAILMYNLSRLDPSYIIEVHRFIDGNKNHA

SEQ ID NO: 61680 - protein, 116 aa, Zea mays
  Coding DNA Sequence Number=SeqID_19901
MTWPGPSSRRLEEDGGKEGSKKQGTAPDAPMDPTGVDGDSAAARGSGGGGGGGTGAGRWAVGAVCGGLVYYHCAVRRASAVSLAADVLLVLLCSLSILGLLFRHLHISDLFGNMLT

SEQ ID NO: 61681 - protein, 116 aa, Zea mays
  Coding DNA Sequence Number=SeqID_19902
  Subcellular localization annotation: CTP_CleavageSite=58; ConfidenceScore=5.72e-01
MAGPSAPPESTSQGGPAVIPRRPRRHPPRHRLLPFSRWARSLCRVHGFTLQPPLPPPRSSSRRTTWTSRTLASAPLPPRPSDSTALSPQARAAGFLPRGAAAAAFFFKLQYAMGLL

SEQ ID NO: 61682 - protein, 299 aa, Zea mays
  Coding DNA Sequence Number=SeqID_19903
  Homolog annotation: Hit_ID=Q9LVD1; Match level="QueryCoverage=75%, HitCoverage=79%, E-value=1e-49, Identity=60%"; Hit description =Arabidopsis thaliana genomic DNA, chromosome 5, P1 clone:MJB24
  Pfam annotation: Domain name=DUF266; Domain location=57-148; Score= -13.4; E_value=0.00014; Accession=PF03267.4; Description=Arabidopsis protein of unknown function, DUF266
MKGTAVPRTRASPRRRIWISVVVVFVAITVLWAYLYPPQDYTYPVRDWFPSEPTRELTDAETAARVVFRQILSTPPFISRNPKIAFMFLTPGKLPFEKLWELFFKPFTFLCIYWIVFTTLGPHGVYRYSKNMLPEVRESEFRKGSQWFSMKRQHAMVVIADSLYYSKFRLYCRPGMEEGRNCYADEHYLPTLFHMMDPAGIANWSVTYVDWSEGKWHPRSFRAKDVTYERLKNMTSIDVSYHITSDDKKDLLQRPCMWNGLKRPCYLFARKFYPEALDNLIAGGADILTLTQYMHDSEQ

SEQ ID NO: 61683 - protein, 98 aa, Zea mays
  Coding DNA Sequence Number=SeqID_19904
MVVAVGAEARKLVNGLPKQQKLQVDFPHILNQRKEKKEKTWLEQPRLSAVWHTGLPGGAPDSVWCARLASGELATLGNSSAAYGYNSPDCPVVHRTVR

SEQ ID NO: 61684 - protein, 358 aa, Zea mays
  Coding DNA Sequence Number=SeqID_19905
  Gene Ontology: Mol. function=protein binding
  Homolog annotation: Hit_ID=Q7F0Z3; Match level="QueryCoverage=90%, HitCoverage=85%, E-value=1e-47, Identity=38%"; Hit description=Zinc finger POZ domain protein-like
  Pfam annotation: Domain name=BTB; Domain location=191-309; Score =83.8; E_value=5.4e-22; Accession=PF00651.21; Description=BTBPOZ domain
  Pfam annotation: Domain name=MATH; Domain location=25-166; Score=5.9; E_value=0.025; Accession=PF00917.16; Description=MATH domain
  Pfam module annotation: Pfam domain module=BTB::MATH; Domain location= 191-309::25-166
MPLTVWADPIAGDARQQGAHMLEVIRYSTLHRRRGVGTGGRRCVESVGFTVGGYQWAILFYPDGDDAPGSSGYVSVSLALLTRPARVRASFNLGLVNRATGLPSFQPKDTTAVFDNAACCCRMYPIPTCRHERKRSCHGMPRLVKRCDLEAYLRDDAVTVACVVTAVTGTALTSRGAPEIRVPGGNLHLHIGELLVSKEGADVTFGVDGEAFAAHRIILAARSPVFEAELYSSTCTAETTDARTVVVGDMRPDTFRALLHFIYTDSLPAMSHMGMDETRELVQHLLAAADRYAIDRLKAMCEHILARTLHVDNAASTLVLADRHGCDTLKHASIYFIASSDNSEMGHDDVSVEALEKT

SEQ ID NO: 61685 - protein, 139 aa, Zea mays
  Coding DNA Sequence Number=SeqID_19906
  Pfam annotation: Domain name=RWP-RK; Domain location=23-67; Score =15.8; E_value=0.00017; Accession=PF02042.6; Description=RWP-RK domain
MAGGKRSKLLQGAPPPPPPPQWSDVRGLLHMRLTDAAAELNVSITYLRRLCRQNGFAQWPGKKIRYMNSTGKKVMLEADDALLDASPSAGLAGTSGLRQAMSAETRNEEEDDEPVANQELTTLNLIDKLCWLISHLRCN

SEQ ID NO: 61686 - protein, 462 aa, Zea mays
  Coding DNA Sequence Number=SeqID_19907
  Gene Ontology: Mol. function=transferase activity, transferring nitrogenous groups; Cellular component=cytoplasm; Biological process= biosynthetic process
  Homolog annotation: Hit_ID=O24220; Match level="QueryCoverage=99%, HitCoverage=99%, E-value=0.0, Identity=78%"; Hit description=1 -aminocyclopropane-1-carboxylic acid synthase
  Pfam annotation: Domain name=Aminotran_1_2; Domain location=59-444; Score=411.6; E_value=1.1e-120; Accession=PF00155.11; Description =Aminotransferase class I and II
  Pfam annotation: Domain name=Beta_elim_lyase; Domain location=108 -386; Score=-102.5; E_value=0.00081; Accession=PF01212.11; Description=Beta-eliminating lyase
  Pfam module annotation: Pfam domain module=Aminotran_1_2::Beta_elim _lyase; Domain location=59-444::108-386
MGGKLLLGASQSRHAHAVASPPLSKVATSGLHGEDSPYFAGWKAYDENPYDAVSNPGGVIQMGLAENQVSFDLLEGYLRDHPEAAGWGGSGSGVASFRDNALFQDYHGLKAFRKAMANFMEKVRGGKARFDPDRIVLTAGATAANELLTFVLANPGDALLIPTPYYPGFDRDLRWRTGVNIVPVHCDSANGFQVTAAALQAAYEEAEAAGTRVRAVLLTNPSNPLGTTVTRPALEDVLDFVARNNIHLISDEIYSGSVFAAPDLVSVAELVESRGDPGVAERVHIVYSLSKDLGLPGFRVGVVYSYNDAVVTAARRMSSFTLVSSQTQKTLAAMLSDAGFADAYVRTNRQRLRARHDHVVAGLARAGVPCLRGNAGLFVWMDMRRLLGEATTVAGELRLWDRMLREAKLNISPGSSCHCSEPGWFRVCFANMSLDTLDVALARMSRFVDTWNKETTASTQQH

SEQ ID NO: 61687 - protein, 241 aa, Zea mays
  Coding DNA Sequence Number=SeqID_19908
  Gene Ontology: Mol. function=ammonium transporter activity; Cellular component=integral to membrane; Biological process=ammonium transport
  Homolog annotation: Hit_ID=Q947N1; Match level="QueryCoverage=49%, HitCoverage=35%, E-value=2e-40, Identity=59%"; Hit description =Ammonium transporter 1-1
  Pfam annotation: Domain name=Ammonium_transp; Domain location=38-238; Score=-221.1; E_value=0.037; Accession=PF00909.11; Description =Ammonium Transporter Family
  Subcellular localization annotation: CTP_CleavageSite=38; ConfidenceScore=5.40e-01
MDAAPTVPPGLAAISPGGCSARNPVPQTLAPPLAQPPACALPVAQPSASHPPRPCRAPSAATGPSLQLVHEHGLRGGRPRTCSSRPTSSLPCSSASPSACRPTTSSAGFSSCSIVEWIQFVAYLIYSVFLTAFMYPMASHWFWSADGWDATRRTSGPLLFGSGTIDFAGYGVVHMVGGIAGFWGALVEGPRTGRFDHVGCEPLALDRGYEIDGFGYDYGAGKEEGVEADLQELQDVDEFED

SEQ ID NO: 61688 - protein, 97 aa, Zea mays
  Coding DNA Sequence Number=SeqID_19909
MEEWSGMMILLCYGCGVVVGEGYAGESGGGERLENKNAERSAEFSITTVGAHIRESVHQTTLYQLVIRIIALYLMDQSQNSSKNLENHTGPKLELTE

SEQ ID NO: 61689 - protein, 316 aa, Zea mays
  Coding DNA Sequence Number=SeqID_19910
  Gene Ontology: Mol. function=protein binding; Cellular component =proteasome regulatory particle (sensu Eukaryota); Biological process= proteolysis
  Homolog annotation: Hit_ID=Q8W423; Match level="QueryCoverage=100%, HitCoverage=99%, E-value=1e-99, Identity=60%"; Hit description=26S proteasome regulatory particle non-ATPase subunit12
  Pfam annotation: Domain name=SAC3_GANP; Domain location=87-259; Score= 77.3; E_value=4.7e-20; Accession=PF03399.6; Description=SAC3GANP family
MDPKMTEVTQMFARFKAAYARNDLNTCVTLLSQLKVHLTQFPSLPPLFQQTPNIVEELKLAKSQICSKLFLTYVFVLMTKLSSDLVAEKIKRSLNCYAVLLVTLPSTEQVLNSAQNISGDIYEHAVVLSVKLEDQDAFERDFCQLKPYYMDTCGIIPASPEEYPILGLNLLRLLVQNRIAEFHTELELLPAKALEHPCIKHAVELEQSFMEGAYNRVLSARQAVPHETYVYFIDLLAKTVSEKGYDSLSVSDAKQMLMFSSDQDLHEYITEEHPEWEIKNGAVFFQKAKESQPCKEIPSLQLINQTLSYARELERI

SEQ ID NO: 61690 - protein, 774 aa, Zea mays
  Coding DNA Sequence Number=SeqID_19911
  Gene Ontology: Mol. function=electron carrier activity; Cellular component=chromatin; Biological process=electron transport
  Homolog annotation: Hit_ID=Q337A7; Match level="QueryCoverage=41%, HitCoverage=88%, E-value=1e-127, Identity=66%"; Hit description=HIT zinc finger family protein, expressed
  Pfam annotation: Domain name=SHQ1; Domain location=553-733; Score= -70.7; E_value=0.022; Accession=PF04925.6; Description=SHQ1 protein
MKNTHIPNDDTLADKLEVKLDMLRALVLYELGGELTKPCCLGYAVSHNTVLGLGVGAGDDWLPLQRPRDKTVAEEHGETGGGSTCVRIAGPVGVDVDGEVVGRRSSKEPEVGSALEVPQDPLHSSEMWLLRGVHMVAHMLDDVCDVGPDEDEVLQCPNKTLDVDDVLVLVEKQALGPALHGDPQEVVQLTQVLHRELLLEGGDDTPQEFVRGGRGDDVIDIEEAPTGPNEPCADPRSHPPSASVEDPFPGDPFGLSVKDLATRILHTRCDSSEPLYTIRLLASNSPTSTLHALTAATSSITWRHRLGHPRPDFGLTIRAVQCDTGREFDNSASCDFFLSHDVQWRMLPPFPLATGLATATYLLNRLPTKAVHHPTPYFALFGTSPSYDHLRVFGVFLGYSPAHKGYRCLDLSTYRVLVSDFPFSVSPSAASSFEYDNLLEALCGSPSCSLASHTPVCDVLSRSLPCRHGHSVQCTESFMRENVMDELKQMQPEDESKKKMLDILKRLHLEEEMASDGEDGEEIKLEDLSDCEIKRFRQALASEDTAVPYPDPNTDQEASINEIPEGPESPLPSLKQLTRTEPSPLLAVHLVDILYSYCFTLRLYNGDWHSDPLGACTVALSMSKVMGQDAKPETVPEALAACIEETCSPAYRHTGGFRFAIGLVDDIIAILSLGQNALICALCDFHRLIEVGKSMLKVEKVGKTERAQNSPKLRSAARKLFFMTCWVHEQPDEAWPSLAHIVQVQKASMEELETGNWKADRKSKPQSAVLIEEL

SEQ ID NO: 61691 - protein, 160 aa, Zea mays
  Coding DNA Sequence Number=SeqID_19912
  Gene Ontology: Mol. function=nucleic acid binding; Cellular component= intracellular
  Homolog annotation: Hit_ID=Q337G3; Match level="QueryCoverage=72%, HitCoverage=22%, E-value=7e-54, Identity=84%"; Hit description =Expressed protein
AYHLFHTSCLLHWTILCQYEMLNDEIARKGKSNRGRKAKNAPKRSKITSIVCPECQGTGIHVNGDELEKPSISLSEMFRFKMKAIEAHKAWLKRPEVLENCSTGLHFPSEHVENPEGGIRGHTVRKCSVNTVLLDAHLRALSQLTCVRQMITKTFKLATG

SEQ ID NO: 61692 - protein, 91 aa, Zea mays
  Coding DNA Sequence Number=SeqID_19913
MALTANPSRGFAQSNRECTEQSSLDGTERRLGREELEGEGELLVPAVGARGARGGGRARGREELEGERRLGRVRDCASRDWGEETGEGEKP

SEQ ID NO: 61693 - protein, 159 aa, Zea mays
  Coding DNA Sequence Number=SeqID_19914
  Homolog annotation: Hit_ID=Q6QP54; Match level="QueryCoverage=41%, HitCoverage=26%, E-value=2e-08, Identity=48%"; Hit description =Putative kinase
MMYPPVTWSVRAQGRARRRPSSEVEAEFEPWGRARRRPSSEVKAGAEPWGRARWRPSSEVEAGAEPWGRARQNFLWRLRLDSAAVSLTLAGGTAVGAGQAALFSCQLFHHYIATINIMQTSIYATICMVSSLKSTFHTCRKKFPRTSLVIRHAPPYSLA

SEQ ID NO: 61694 - protein, 191 aa, Zea mays
  Coding DNA Sequence Number=SeqID_19915
MVHLRWVQSEVAETYGYIGQVVCQGRQGLRGPRHLSFVDDEIQTPKANGCPGSLDRGSATLDPGLGATWFDRGQYYLEKNILDILVVGDQRNMKWNRVSMAQRRADPASRSFLDPSLLFLRTMKLENHATPASVMWMWFTTASRICDTRSSRKLESHINIEDKRANKTLVSDHIDETKTFLYIKAMQLDVR

SEQ ID NO: 61695 - protein, 1391 aa, Zea mays
  Coding DNA Sequence Number=SeqID_19916
  Gene Ontology: Mol. function=ATP-dependent helicase activity; Cellular component=intracellular; Biological process=RNA processing
  Homolog annotation: Hit_ID=Q5N870; Match level="QueryCoverage=97%, HitCoverage=97%, E-value=0.0, Identity=58%"; Hit description =Putative Endoribonuclease Dicer homolog
  Pfam annotation: Domain name=DEAD; Domain location=43-176; Score= -13.9; E_value=8.3e-05; Accession=PF00270.19; Description=DEADDEAH box helicase
  Pfam annotation: Domain name=DUF283; Domain location=433-522; Score= -8.7; E_value=0.016; Accession=PF03368.5; Description=Domain of unknown function
  Pfam annotation: Domain name=PAZ; Domain location=677-834; Score =35.7; E_value=1.6e-07; Accession=PF02170.12; Description=PAZ domain
  Pfam annotation: Domain name=ResIII; Domain location=39-151; Score =13.0; E_value=3.8e-06; Accession=PF04851.6; Description=Type III restriction enzyme, res subunit
  Pfam annotation: Domain name=Ribonuclease_3; Domain location=1082 -1147; Score=89.6; E_value=9.7e-24; Accession=PF00636.16; Description= RNase3 domain
  Pfam annotation: Domain name=Ribonuclease_3; Domain location=871 -1005; Score=119.9; E_value=7e-33; Accession=PF00636.16; Description =RNase3 domain
  Pfam module annotation: Pfam domain module=DEAD::DUF283::PAZ::ResIII:: Ribonuclease_3::Ribonuclease_3; Domain location=43-176::433-522::677 -834::39-151::1082-1147::871-1005
MDASTAGDGDTNTLKRPCKTSPPEGETDKYKRQKRECQDFSPRRYQLDVYEVATRHNTIAMLDTGAGKTMIAVMLIKHFGKINKANNDRKLIIFLAPTVQLVTQVMVMTPQVLLDALRQAFLILDMVSLMIFDECHHATGNHPYTRIMKEFYHGSEHKPNVFGVSSDLDCKNQLSELENILDSKIHSVVDREEIELCVPSAKEVNRYYEPRTVSFDDLSEELEILCSKYDGLIIQLHNRSTNQYKDADEITKESRKRLSNSLAKICYCLEDAGLLCASEATKICIERGQRKGWLKGGSDTTDQQSGQNGPILFAEISMLHMEFFQEVLDIIGKRVQQQQGIDALLNSERGCVEAKNMGYISPKLYELMQVFLSFRGNVKQDDLISGIMRSKASMTGIASNREPEDSHPSFLPTEEINEYHISKTGAKITTDSSISVLNQYCDKLPKDKYGDYISFLSFYMATQYTYSIHSEILHTKFLLGQKARNMQKAKQLVCLDACTTKRKELHGTTKVLSMSGSWGSDRSVTKLQGYKLNFVCDQVGQKYSAFVLLIDASIAKEAATLDIDLYLHDKMVKASVSPCGPLELDAWQMEQTKLFQALLFNSLFGKLFIGSKASKTPREFILKKDDVFLWNKENMYLLLPVDSTLDSHKSVCINWSVIDVVATAVGFMRSIYSDGKCNLTDKLNYEKNGEDLIHLANKSCKGNDLKNMVVLAIHTGKIYTIVVVSDLCANSKFDGTTDKKEAKFRTFAEYFEKKYSIFLCHPLQPLLVLKPTHNPHNLLSSKNRDEDNVVENKNRANSLVHMPPELLIPLDLPIDVLRVFYLFPSLMHRLESLMLASQLRSEIAYRDSDISSFVILEAMTTLRCCEDFSMERLELLGDSVLKYAVSAHLFMTFLNKHEGQLSSRRQETICNATLYRLGIERRIQGYIRDAAFDPRRWLAPGQLSRRPCPCECPVNSEVVTEDIHRIDDKSIIIGKACDKGHRWICSKTISDCVEALIGAYYVEGGLKAAFAVLKWFQIETEIEEELIMEALSSASVRNYLPKVDVVELLEAKLGYTFQMKGLLIEALTHSSQQESGATYCYQRLEFLGDAVLDILITRHLFLSHKDTDEGELTDLRSASVNNENFAQVAVLGDIVESIAGAILIDSKLDLDLVWRVFKPLLSPIVTPENLELPRFRELNEWSDKNGYFIGIKCENRGDSTMAILNLQLKDLLLVRQGCGKNKVDAKAHAASLLLRDLEEKGLIIPRNASRVEQLEKNSGTVKHCNNVLDVMDTQNVAPPRQKEVAVLSTTTPGSVLDKPLVVKVKLSKGGPRISLYESCKKLQWPMPTFEFVKVEPSGNVDSKFKKYEESPRGSITKDAMLPPPAIIAWASWSNVTAKSVFSRQPHGGVRK

SEQ ID NO: 61696 - protein, 166 aa, Zea mays
  Coding DNA Sequence Number=SeqID_19917
  Gene Ontology: Mol. function=nucleic acid binding; Cellular component= intracellular; Biological process=regulation of transcription, DNA -dependent
  Homolog annotation: Hit_ID=Q94F81; Match level="QueryCoverage=58%, HitCoverage=33%, E-value=2e-48, Identity=98%"; Hit description=HD2 type histone deacetylase HDA106
  Subcellular localization annotation: CTP_CleavageSite=56; ConfidenceScore=5.04e-01
MEVGGNHLHFVPLFPSLLSLSAQCGLRLGFSTTAPLWSRCQFIYALCYFWNSTEVVAMELDSARWVGSQEVKPGATVSCKVGDGLVIHLSQAALGESKKASENAILSVNIDDKKLVLGTLSVEKHPQISCDLVFDKDFELPHNSKTRSVFFRGYKSPVPLFEYPFL

SEQ ID NO: 61697 - protein, 110 aa, Zea mays
  Coding DNA Sequence Number=SeqID_19918
MSTSCVRQRGRVATSKSPPTYEKGQDNTPCMCSNMLEGDAVELTKDEVILKTNLDLTGSTFCGTHLMDVIERHVRNTEAHDMLEGAIPCAGTPQDWPRRGPLRTVDEGAS

SEQ ID NO: 61698 - protein, 74 aa, Zea mays
  Coding DNA Sequence Number=SeqID_19919
MASRFTCWTPPTEHACGRSRSLKPDWRPFSSVTSVLQAMKGHVIGQWWFMAKAHFHDQGDVHNIAIECSGGVRT

SEQ ID NO: 61699 - protein, 383 aa, Zea mays
  Coding DNA Sequence Number=SeqID_19920
  Gene Ontology: Mol. function=binding; Cellular component=ubiquitin ligase complex; Biological process=protein ubiquitination
  Homolog annotation: Hit_ID=Q7F1U7; Match level="QueryCoverage=55%, HitCoverage=58%, E-value=4e-98, Identity=56%"; Hit description=Arm repeat containing protein homolog-like
  Pfam annotation: Domain name=Arm; Domain location=102-142; Score =34.5; E_value=3.7e-07; Accession=PF00514.13; Description =Armadillobeta-catenin-like repeat
  Pfam annotation: Domain name=Arm; Domain location=143-183; Score=9.3; E_value=0.84; Accession=PF00514.13; Description=Armadillobeta-catenin- like repeat
  Pfam annotation: Domain name=Arm; Domain location=184-224; Score =23.2; E_value=0.00094; Accession=PF00514.13; Description =Armadillobeta-catenin-like repeat
  Pfam annotation: Domain name=Arm; Domain location=226-274; Score =15.0; E_value=0.16; Accession=PF00514.13; Description=Armadillobeta -catenin-like repeat
  Pfam annotation: Domain name=Arm; Domain location=61-101; Score=20.6; E_value=0.0058; Accession=PF00514.13; Description=Armadillobeta -catenin-like repeat
  Pfam module annotation: Pfam domain module=Arm::Arm::Arm::Arm::Arm; Domain location=102-142::143-183::184-224::226-274::61-101
  Subcellular localization annotation: CTP_CleavageSite=21; ConfidenceScore=5.13e-01
MDLSADAAPAGAPGAVRAGVRAGAGGPAPAPDARRAAAARIRLLAKHRESAATALLNLSLEDRNRSAITTAGAIKPLVYALRTGTAPAKQNAACALLSLSGIEDNRATIGACGAIPPLVALLSAASTRGKKDALTTLYRLCSARRNKERAVSAGAVVPLVHLVGRRGSGTCEKAMVVLGSLAGIDEGRQAVVQAGGIPALVEAIEDGPAREKELAVVALLQVCSDSPRNRALLVREGAIPPLVALSQSGSARAKHKKRNSQGECLGFALCRICASSFVSRNWERIRRSTNRDVVPDDLHRRRAPRRVLVQARANSHESTKSHDAHRVERWSSEGSGREYCREDAGDRREIVELFSSETTREIPREGGASRVTLRAGRGRMVGI

SEQ ID NO: 61700 - protein, 115 aa, Zea mays
  Coding DNA Sequence Number=SeqID_19921
  Subcellular localization annotation: CTP_CleavageSite=41; ConfidenceScore=5.16e-01
MGLAAPRDWLPRPRGKKGAWELGLRAGPVGRPRAGASRPRRASQPATPGRTAGLGRTTEGKGATRGITERKRTARPGDREDCSPGKENGVTRGCREGKREGKRRAERVTPEFGGY

SEQ ID NO: 61701 - protein, 100 aa, Zea mays
  Coding DNA Sequence Number=SeqID_19922
MGIATPAGWQEHRALEGTVSKGRLGCARAPCCLRLGASSQAGKSDHGARAGARQGPDAQGLHAGALGSLRAAGRGGSRPSAVHRDREQGPNAWRVGEPPS

SEQ ID NO: 61702 - protein, 124 aa, Zea mays
  Coding DNA Sequence Number=SeqID_19923
MARGEPAEGHGRAGAAPATGCCDLGDEGRLGSWAARWPVGRPRQGRAAAQGLLAATRGGTVGLGRITEGKGATRGITERKRTARPGDREDCSPGKENGATRGCREGKREGKRRAEGVTSEFGGY

SEQ ID NO: 61703 - protein, 377 aa, Zea mays
  Coding DNA Sequence Number=SeqID_19924
  Homolog annotation: Hit_ID=Q2QMG9; Match level="QueryCoverage=99%, HitCoverage=26%, E-value=5e-78, Identity=49%"; Hit description =Expressed protein
MLKEEEKPSSPQLSKIDVRPSEDENTTKMVKDMELQKLHGTIKALQKVVSDTGVVLEQERLDFNSNLQDARKQIEMLKLKEILDSDASDVNYERMMKDIQLDLVQTPSRRAAASHGRHRKKNSVAAAAQSDDKMLALWSVDRVSSGSRWHDVDLRPPQSEAAENDKGKKRSSSEPVVTVKDLSVDKQEVLLRPIVGAVVVATGSTTEPHREWKKKVIDRLSSEAQRLRDLRASSDAELDGVKAQMADAEDAIAELADANAKLLKKAEEFTSAGDGCGDVDLRSRSQRKILERVRKMSEKAGRLELELQRFQHALLRHEEERAARRAAKAAASTAVQVQRRSRVHLVEYLYGRRRDNRRPKQKARGPSCCMRAKAIDD

SEQ ID NO: 61704 - protein, 59 aa, Zea mays
  Coding DNA Sequence Number=SeqID_19925
MAQGGCGSGGDARAGSVGDGGSAQQLDRKFDVMFHDHGAQNSGLYIVVTVGDFFSNAMS

SEQ ID NO: 61705 - protein, 70 aa, Zea mays
  Coding DNA Sequence Number=SeqID_19926
METNHIYATTGGIMTNPHLLEGRNDVTPEWITKTDAFLEWAFGEGAKGARLVPYPCNKGANRKRKTKKII

SEQ ID NO: 61706 - protein, 282 aa, Zea mays
  Coding DNA Sequence Number=SeqID_19927
  Gene Ontology: Mol. function=DNA binding; Cellular component=nucleus
  Homolog annotation: Hit_ID=Q67UM4; Match level="QueryCoverage=68%, HitCoverage=58%, E-value=4e-58, Identity=60%"; Hit description=Gt-2 -related-like
MSTAGDPAVAAAAAAAAATPSGRAPRLPRWTRQEILVLIEGKRMVEGRGGRGARGRAAAAAASGEASAVAALEPKWAAVAEYCRRHGLERGPVQCRKRWSNLAGDYKKVKEWERAAAASREPSFWAMRNDARRERRLPGFFDREVYDILEGRGRAIVDGRSARNAAAEQPAPVRVDEDKEAEVPEAVFDSGRPATEEALFSEDEEEEEEDAPPVAPPPPPPPVIAVPVSEKPEASRQQQSAEQARLQLKRTIECLCRFACITSVNCIISYEPSIVITYNRHY

SEQ ID NO: 61707 - protein, 147 aa, Zea mays
  Coding DNA Sequence Number=SeqID_19928
  Homolog annotation: Hit_ID=Q6QP54; Match level="QueryCoverage=39%, HitCoverage=20%, E-value=1e-13, Identity=81%"; Hit description =Putative kinase
MESRERRRLDFENRPESFTVARRRIKGHGGRHIGVRLHRRSAIGNSPRDFTGGSDSGSAPEDDELRLARPQGSDSALASADGLRLARPRGSDSTSASKDRLDLDLGGASTSPNPGLGPATSQEAPSLPYPKLTQATGNKTGVPSGSP

SEQ ID NO: 61708 - protein, 131 aa, Zea mays
  Coding DNA Sequence Number=SeqID_19929
  Gene Ontology: Mol. function=RNA-directed DNA polymerase activity; Cellular component=chromatin; Biological process=RNA-dependent DNA replication
  Homolog annotation: Hit_ID=Q947Y6; Match level="QueryCoverage=78%, HitCoverage=7%, E-value=4e-31, Identity=67%"; Hit description =Putative retroelement
MARLAEMVEGRGSDSGNLYKEQGSPTQDGHGVTVVDELAVVAHQVEEAAHSPCQTTRRLVEDSPHFGWIHGDAFRGYHMAEVGDGGGAKRASGALDEEVVLAQLGEDGTNVKVIRPSLARDQNVVKKTRTK

SEQ ID NO: 61709 - protein, 75 aa, Zea mays
  Coding DNA Sequence Number=SeqID_19930
  Homolog annotation: Hit_ID=Q75HB6; Match level="QueryCoverage=51%, HitCoverage=8%, E-value=7e-09, Identity=74%"; Hit description =Putative Interferon-related developmental regulator
MEKACKRNKGGRGGGGADDKLDGGGDADSVTSMSSGLSDLQFAQATEHISSQEFVLDKYVDALYEKRWVPGWSYS

SEQ ID NO: 61710 - protein, 57 aa, Zea mays
  Coding DNA Sequence Number=SeqID_19931
MARKKKFRGSGATITQTQHYPQVDRGLIPLKPEDSFVKPTGRRGNSGFEPFDHRSTA

SEQ ID NO: 61711 - protein, 132 aa, Zea mays
  Coding DNA Sequence Number=SeqID_19932
MQSPAREPLYSTYRVVVYSSRVDDADPAAAVMADGRPKLVKATTDSSVARTAAAEALTRWLNRRRLGCVLRALVGAHHLRTWLAILIQYLWFPTDLTCAPVRDRDRPGFITGLDWSNLVLFAANQGGPALAP

SEQ ID NO: 61712 - protein, 178 aa, Zea mays
  Coding DNA Sequence Number=SeqID_19933
  Gene Ontology: Cellular component=chloroplast thylakoid membrane
MASPLLKSHSQLAAAAALHSVRRADRCPATIHLGKFHDHGLRSGRSKRSGSAKVGAFPSLDVVPLMVTMVEHVDMSRDYVVTKSIWHLSDAALKSVLFMAQLACVHGSNRKQDPFYDSETYRSQGGDGTVHWYYDRQEDLEASAREELLREELLEEIEQRVGGLRELEEASKEEQLTK

SEQ ID NO: 61713 - protein, 882 aa, Zea mays
  Coding DNA Sequence Number=SeqID_19934
  Gene Ontology: Mol. function=protein serine/threonine kinase activity; Cellular component=membrane; Biological process=protein amino acid phosphorylation
  Homolog annotation: Hit_ID=Q6Z2V3; Match level="QueryCoverage=94%, HitCoverage=71%, E-value=0.0, Identity=66%"; Hit description =Putative MAP kinase kinase kinase
  Pfam annotation: Domain name=Pkinase; Domain location=712-882; Score =58.1; E_value=2.9e-14; Accession=PF00069.15; Description=Protein kinase domain
  Pfam annotation: Domain name=Pkinase_Tyr; Domain location=712-882; Score=55.5; E_value=7.1e-16; Accession=PF07714.7; Description =Protein tyrosine kinase
  Pfam module annotation: Pfam domain module=Pkinase::Pkinase_Tyr; Domain location=712-882::712-882
MWEGWELDTAWGYGSRTRRYLKAQFEDEFASGPLHNFNALGYDDKILDGFYDLFYVGNGPAAVTMPSFAELRVQPFSHKVDWEAVLVHRGEDPELMKLQQEALIMNHELHSRTSESVGNALVKGLANLVARHMGGVFDPERMSAKYQNMLSYLRSDIGSVIVPLGQLKIGLARHRALLFKVLADGLDVPCRLLKGKRYTGSDDGALNIVKFKDGRNLLRNPLPPYNKPPILRLWRHALKIDFTEDMEPKFSGKDTTNQQIPWEFIVDLVSDPGTLIPSDVSVLSTELDRNFVSDNQHFGQDDNTNLLGSSLSGVSSSAYGSFEYELLDRRSTSSNVGPSDTDGPTTNLTSNQQNMSSNSFDKLSVSTFTSENRPVSKESTNPDYIIVGKNKEKYTAAVDSSSSSPSTPDMGSAPAVRRMKVKDISEYMINAAKENPQLVQKIHEVLLENGVMAPPDLFSEDSMEEPKDLIVYDTTLFQSKDEMKRRMNELGSREYTDRGHDPLLPHHPGHELQPKVAPHRAPLESLKPVEGLGIYHPHDIRDIASPFVSQYEPSAPPQEASSQLTKQLPVTAAAVATAAVVASSMVAAAALSTNDVNFDVPVAAAATVTAAAVVATTAAVSKQYEHSDPGNQLFSVPSTSQGNKSVEKAGGDLWDKHHVETDHGQDNCLDQEVPQEAERTSDKSNKSSGTEDVKSDLALDNVAEFEIQWEEISIGERIGLGSFGEVYRGEWHGTEVAVKKFLQQDISSDALEEFRAEVRIMKRLRHPNVVLFMGAITRVPNLSIVTEFLPRGSLFRLIHRPNNQLDERKRLRMALDVARGMNYLHNCSPVIVHRDLKSPNLLVDKNWVVKVCDFGLSRMKNNTFLSSRSTAGTVYPNCLKCV

SEQ ID NO: 61714 - protein, 187 aa, Zea mays
  Coding DNA Sequence Number=SeqID_19935
  Homolog annotation: Hit_ID=Q6Z2V1; Match level="QueryCoverage=74%, HitCoverage=73%, E-value=2e-34, Identity=56%"; Hit description =Glycine-rich protein-like
MAGVFWGGGRADEVADFDEYDPTPYGGGYDIALTFGRPLPPSEETCYPISTASSYDRPQQHGGRRPGAEESHGSAAGFIRRRETPGYGRKGGHDDDHEQQAYRKPKPSYGHGDGDDDHQAYRKPKPSYGDERPSSGRKKKNDDDDDSDDDGARKPRYKKKDDDDSDDDDRKKRYEKNDRRRRHDYDD

SEQ ID NO: 61715 - protein, 853 aa, Zea mays
  Coding DNA Sequence Number=SeqID_19936
  Gene Ontology: Mol. function=RNA-directed DNA polymerase activity; Cellular component=intracellular; Biological process=RNA-dependent DNA replication
  Homolog annotation: Hit_ID=UPI00005A975E; Match level="QueryCoverage =99%, HitCoverage=48%, E-value=0.0, Identity=87%"; Hit description =PREDICTED: similar to Retrovirus-related Pol polyprotein from transposon 297
  Pfam annotation: Domain name=RVT_1; Domain location=56-225; Score =137.0; E_value=5e-38; Accession=PF00078.17; Description=Reverse transcriptase (RNA-dependent
  Pfam annotation: Domain name=RnaseH; Domain location=455-582; Score =13.5; E_value=3.2e-06; Accession=PF00075.14; Description=RNase H
  Pfam module annotation: Pfam domain module=RVT_1::RnaseH; Domain location=56-225::455-582
MPGIPRDVAEHSLDIRAGARPVKQPLRQFDEEKRRAIGEEIHKLMATGFIKEVFHPEWLANPVLVRKKGGKWRMCVDYTGLNKACPKVPYPLPRIDQIVDSTAGCETLSFLDAYSGYHQIRMKESDQLATSFITPFGMYCYVTMPFGLRNAGATYQRCTNHVFGEHIGHTVEAYVDDIVVKTRKASDLLSDLEVTFRCLKAKGVKPNPEKCVFGVPRGMLLGFIVFERGIEANPEKIAAITSMGPIKDLKGVQRVMGCLAALGRFISRLGERGLPLYRLLRKAECFAWTPEAEEALGNLKALLTKAPILVPPTDGEALLVYVAATTQVVSAAIVVERQEEGHALPVQRPVYFVSEVLSETKIRYPQVQKLLYAVILTRRKLRHYFESHPVTVVSSFPLGEIIQCREASGRIAKWAVEIMGETISFAPRKAIKSQVLADFVAEWVDTQLPTAPIQPELWTMFFDGSLMKTGAGAGLLFISLLGKHLRYVLHLHFSASNNVAEYEALINGLRIAIELGVRRLDARGDSQLVIEQVMKNSHYRDPKMEAYCDEVRRLEDKFYGLELNHIARRYNETADELAKIASGRTTVPPDVFSRDLHQPSIKIDDTPEPEVPSVQPEVPSARPEAPSVQPEVPSASEGEDLRIEEERSGATPDRNWQTPYLQYLHQGELPLDRAEARRVARRAKSFVLLGDEKELYHRSPSGILQRCISIAEGQELLQEIHSGACGHHAAPRALVGNAFRQGFYWPTAVADATRIVRTCEGCQFYAKQTHLPAQALQTIPITWPFAVWGLDLVGPLQKAPGGYTHLPVAIDKFSKWIEVRPLNSIRSEQAVAFFTNIIHRFGVPNSIITDNGT

SEQ ID NO: 61716 - protein, 274 aa, Zea mays
  Coding DNA Sequence Number=SeqID_19937
  Gene Ontology: Mol. function=transporter activity; Cellular component= mitochondrial inner membrane; Biological process=transport
  Homolog annotation: Hit_ID=Q66PX5; Match level="QueryCoverage=99%, HitCoverage=100%, E-value=1e-142, Identity=92%"; Hit description =Mitochondrial uncoupling protein 3
  Pfam annotation: Domain name=Mito_carr; Domain location=1-76; Score =29.6; E_value=6.8e-06; Accession=PF00153.17; Description =Mitochondrial carrier protein
  Pfam annotation: Domain name=Mito_carr; Domain location=181-273; Score=106.0; E_value=1.1e-28; Accession=PF00153.17; Description =Mitochondrial carrier protein
  Pfam annotation: Domain name=Mito_carr; Domain location=80-176; Score= 111.0; E_value=3.4e-30; Accession=PF00153.17; Description =Mitochondrial carrier protein
  Pfam module annotation: Pfam domain module=Mito_carr::Mito_carr::Mito_ carr; Domain location=1-76::181-273::80-176
MAEASTYPLDAVKTRLQLHRNPGGAPGRGVIRVAAELVRDGGVYRGFCPAVLRHLIYTPLRIVGYEHLRSTLASEGREVGLSEKALAGGLSGVAAQVVSSPADLIKVRMQADSRMLSQGIQPRYTGMADALTKIIRAEGFRGLWKGVVPNAQRAFLVNMGELTCYDHAKHLIIHKEICSDNLYAHTLASVASGLSATTLSCPADVIKTRMMNQGKEGKAMYRSSYDCLVKTLRHEGVTALWKGFLPTWARLGPWQFVFWVSYEKLRQASGISSF

SEQ ID NO: 61717 - protein, 558 aa, Zea mays
  Coding DNA Sequence Number=SeqID_19938
  Gene Ontology: Mol. function=galactoside 2-alpha-L-fucosyltransferase activity; Cellular component=membrane; Biological process=cell wall biogenesis
  Homolog annotation: Hit_ID=Q6Z7Q2; Match level="QueryCoverage=88%, HitCoverage=83%, E-value=1e-116, Identity=43%"; Hit description =Putative galactoside 2-alpha-L-fucosyltransferase
  Pfam annotation: Domain name=XG_FTase; Domain location=30-530; Score =604.6; E_value=8.9e-179; Accession=PF03254.4; Description=Xyloglucan fucosyltransferase
  Subcellular localization annotation: CTP_CleavageSite=61; ConfidenceScore=5.47e-01
MAARWQPGSKSRSSALRPTVLVAAASVAAVLLTAAVLFGARWTPSSDAETWVSAGVRVVMNAMSDKGGIPLATVPNPGDRLLGGLLSPDFDDSSCLSRYRASLYRRASLHALSPHLVSALRRYESLHRLCAPGTPAYARATERLRASPNASGDGADPSSSGARCNYLVWTPNAGLGNRILSIASGFLYALLTDRVLLLHSSSSHDLGDLFCEPFPGSTWILPEKDLPAVHEGLSTRTNASLGNTLRRGEALRGAPWLYVHLLHNYNVQDKLFFCDEVQAELRRVPWLVFQADNYFAPGLFLVPRHERELARMFPRRDAVFHHLGRYLFHPSNAVWGMVTRYHGSYFARADERVGVQVRVFKWAPISTDQFYAQILKCAEHENILPGVSVPRANTTAAAVGSAAQPAKRKAVVVVSLYNEYSEKLSELYHEHGAAGGEAVSVFQPTHLGEQRFGDRQQDQKALAEMVLLSFADVLVTTGVSTFGYVSQGLAGLRPWVLMPPNHGKAPDTPCRLAPTIEPCFHSPPNYDCRAKARGDTGRMVRHIRHCEDFPQGVQLLQS

SEQ ID NO: 61718 - protein, 459 aa, Zea mays
  Coding DNA Sequence Number=SeqID_19939
  Gene Ontology: Mol. function=pepsin A activity; Cellular component =cellulose and pectin-containing cell wall; Biological process =proteolysis
  Homolog annotation: Hit_ID=Q766C3; Match level="QueryCoverage=89%, HitCoverage=87%, E-value=6e-59, Identity=34%"; Hit description =Aspartic proteinase nepenthesin-1 precursor
  Pfam annotation: Domain name=Asp; Domain location=91-453; Score= -127.0; E_value=4.1e-06; Accession=PF00026.14; Description=Eukaryotic aspartyl protease
MELLVLLLLFLALPVLPARCGSVTPRRSLHLELARVDAAAAANLTDQELIRRAVQRSLDRPGIVARSGGGAADEAGKAVASEAPLVPGGGEYLVKLGTGTPQHFFSAAIDTASDLVWMQCQPCVSCYRQLDPVFNPKLSSSYAVVPCTSDTCAQLDGHRCHEDDDGACQYTYKYSGHGVTKGTLAIDKLAIGGDVFHAVVFGCSDSSVGGPAAQASGLVGLGRGPLSLVSQLSVHRFMYCLPPPMSRTSGKLVLGAGADAVRNMSDRVTVTMSSSTRYPSYYYLNLDGLAVGDQTPGTTRNATSPPSGGAGGGGGGGGGGIVGAGGANAYGMIVDVASTISFLETSLYDELADDLEEEIRLPRATPSLRLGLDLCFILPEGVGMDRVYVPTVSLSFDGRWLELDRDRLFVTDGRMMCLMIGRTSGVSILGNFQLQNMRVLFNLRRGKITFAKASCDSLP

SEQ ID NO: 61719 - protein, 642 aa, Zea mays
  Coding DNA Sequence Number=SeqID_19940
  Gene Ontology: Mol. function=steroid hormone receptor activity; Cellular component=nucleus; Biological process=regulation of transcription, DNA-dependent
  Homolog annotation: Hit_ID=Q45GJ7; Match level="QueryCoverage=86%, HitCoverage=86%, E-value=2e-94, Identity=38%"; Hit description =Expressed protein
MESVKGWVAADYAAEPMASVQHSLRVAYVVFSFCAAFFLGGIKGTPFLSSVVVGPVAAAVMIVGNVGVILVLFPAHVWWAIYSLIKTDRINAGLKLAVLLALPVLFGLWLGLGILGSALVGLGYGFFTPWISTFEAFRQESEAKKFVHGIVVRQADQTASPAPAQDGTWGTIKGSCTVVRDFADICFHSYPVYLKELREGSQNREPHSIRLLDVPSCIVVALLGLVVDIPLYTVIALVKSPYMLFKGWQRLLHDLISREGPFLETVCVPIAGLAILFWPLVVVGSVLLAIVSSIFVGLYGAVIVFQERSFQRGVSYVVAMVAEFDEYTNDWLYLREGTVLPKPSYRKRKPSNSTEFSVRTNASGGKGADHPPGPSEAPAMLVPNLAPARSVREAIQEVKMVQIWENMMKSCEQRGRDLLNQNVITAAGLAEWLRGAKEGGHHETVSLGLPSYSLLCTVLQSIRAGSGGLVLGSFEVNQHNRPQDRLLDWFFHPVLVLKEQIQALRMTEEEVRFLEKLTVFAGNVAGAGAGGWENGAGMMVVPQDPVRLAQIQAISRRHVCCSVHLLFMTCVWCGVSPCSEWCCLSGRLVGIVRSLSKFPTYRRRYRHVVKLLIAYSVERESSGRSSASGRSASYFEITQLDV

SEQ ID NO: 61720 - protein, 70 aa, Zea mays
  Coding DNA Sequence Number=SeqID_19941
MAFGAVSDFPESVDFRPRLHEHQTRTMQSLACQLQLGAVAPTAYAPLLGLELEQHRSEDRIHAWYYLASE

SEQ ID NO: 61721 - protein, 62 aa, Zea mays
  Coding DNA Sequence Number=SeqID_19942
MQIHYVIPNENLSLKDCNLADGEYILVPEQGAAQEVAPDPAPEPAPEDLPATALEGKPRFYA

SEQ ID NO: 61722 - protein, 186 aa, Zea mays
  Coding DNA Sequence Number=SeqID_19943
  Gene Ontology: Mol. function=protein serine/threonine kinase activity
MALLFLQISIIFCGLTFFSALREFFRAKNGNCSCMEFSSGELTRDTGLPQGENQRINLEMQQENENGRLEGPTEGSLGGSNRHLSSTGSFVQLNDAADEFFDVPDESEYDQREVMFPSDESLHAADQRHAKLSTAAVFVKRLHDLAVQKRGYIDLQGAADADNGPCCYGYTLPKDSSYTVPLLTNL

SEQ ID NO: 61723 - protein, 159 aa, Zea mays
  Coding DNA Sequence Number=SeqID_19944
  Gene Ontology: Mol. function=protein serine/threonine kinase activity
  Homolog annotation: Hit_ID=Q337P5; Match level="QueryCoverage=92%, HitCoverage=22%, E-value=1e-37, Identity=51%"; Hit description =Pleckstriny domain-containing protein, putative, expressed
  Pfam annotation: Domain name=DUF1336; Domain location=1-157; Score =210.4; E_value=4.2e-60; Accession=PF07059.3; Description=Protein of unknown function (DUF1336)
IKANSTLMQMVGADWIKSDKREDDLAGRPGGLVQVPGSTTYSLALYYMMDTPLEKVPLLERFVNGDEAFRNSRFKLIPYISKGSWIVKQSVGKKACLVGQALEINYFRGRNYLELGVDIGSSTVARGVVSLVLGYLNNLVIEMAFLVQMSIHLVKIKKI

SEQ ID NO: 61724 - protein, 78 aa, Zea mays
  Coding DNA Sequence Number=SeqID_19945
MAQSTAFAGVIGHQPTPVLDLLEDDSSHGLTGAISDVEEATERDCFLAMPPPNDNDKGNKEAPNQEEHLRQCQALKKH

SEQ ID NO: 61725 - protein, 57 aa, Zea mays
  Coding DNA Sequence Number=SeqID_19946
MAWARRRRHAPSPARGPVWPACLRAHGSAMPYAAQCALSNQVATMSLAPHTRSVPSL

SEQ ID NO: 61726 - protein, 108 aa, Zea mays
  Coding DNA Sequence Number=SeqID_19947
MSHGLRQGTLRTRRPRPRRRPCRAYVEHWPRHGPSHTDRGLSRGDGRAQASRAHNHDEHHADEEEKRELWGGGEREEGRRLTPTTNLSMTTTTTPRQEHGSGERRHNR

SEQ ID NO: 61727 - protein, 101 aa, Zea mays
  Coding DNA Sequence Number=SeqID_19948
MSPSSSLSALRHRLMATVCCCFGQGAGGLGERTRWRRRADVGEFRYDPLSYALNFDEGDGDEEEEEEEEGQRGARARRGDGLLYHSFSSRLSTPAAVVEVA

SEQ ID NO: 61728 - protein, 301 aa, Zea mays
  Coding DNA Sequence Number=SeqID_19949
  Gene Ontology: Mol. function=oxidoreductase activity; Cellular component=vacuole; Biological process=response to oxidative stress
  Homolog annotation: Hit_ID=Q5U1M3; Match level="QueryCoverage=99%, HitCoverage=100%, E-value=1e-110, Identity=61%"; Hit description =Class III peroxidase 70 precursor
  Pfam annotation: Domain name=peroxidase; Domain location=46-262; Score=314.5; E_value=1.8e-91; Accession=PF00141.13; Description =Peroxidase
MRSTWLAFALSALVVVSSSAAHVHASPGKLEVGFYEHSCAQAEDIVRNAVRRGIAREPGVGAGLIRMHFHDCFVRGCDGSILINSTPGNLAEKDSVANNPSMRGFDVIDDAKAVLEAHCPRTVSCADIVAFAARDSTYLAGGLDYKVPSGRRDGRVSKEEEVLDNNVPAPTDERLYNFSGQLGQTDPSLDPAYAGHLKARCPWPSSDDQMDPTVVPLDPVTPATFDNQYYKNVLAHKVLFISDNTLLDNPWTAGMVHFNAAVEKAWQVKFAKAMVKMGKVQVLTGDEGEIREKCFAVNPHY

SEQ ID NO: 61729 - protein, 102 aa, Zea mays
  Coding DNA Sequence Number=SeqID_19950
  Subcellular localization annotation: CTP_CleavageSite=56; ConfidenceScore=5.86e-01
MVCAPGLGFIPKAVPTTRPRPTEIPNRNPTVSVSAARFNSRVTRSAASKLDRGLLRSSRREEGTTDSMVPFVSVRERNNEPRLLADAHAGERVRPVSEGRKC

SEQ ID NO: 61730 - protein, 50 aa, Zea mays
  Coding DNA Sequence Number=SeqID_19951
MDYGWGEGESPIAAVTVDRGVPVGKTGEQMGPRIMERVKVVRDMEININT

SEQ ID NO: 61731 - protein, 196 aa, Zea mays
  Coding DNA Sequence Number=SeqID_19952
  Gene Ontology: Mol. function=protein transporter activity; Cellular component=nuclear pore; Biological process=protein import into nucleus, docking
  Homolog annotation: Hit_ID=Q7XDD1; Match level="QueryCoverage=93%, HitCoverage=20%, E-value=2e-65, Identity=63%"; Hit description =Importin-beta N-terminal domain containing protein
VMSLLPCLPHHEQLLQTVCSTIGAFSKWIDAAPAELSILPPLVDILNKGMSTSEDTAAAASMAFKYICEERAGELRILYIREEMLLSKSPKNPHKPEDCRRKFSGSLDGLFQIYHIAISGVGGYKVSSEDSLHLVEALSNVKQPEVVAEAVYRYWPTLKSIFDQRAWDTRTMESICRSCKFACGNAIENALWNYYC

SEQ ID NO: 61732 - protein, 139 aa, Zea mays
  Coding DNA Sequence Number=SeqID_19953
  Homolog annotation: Hit_ID=Q7XDD1; Match level="QueryCoverage=27%, HitCoverage=4%, E-value=7e-09, Identity=76%"; Hit description =Importin-beta N-terminal domain containing protein
MATSLYKNKLTGQRKIRPMTSEISPNLSVMVWRLDPEAASDMVLKKRKRSASVRACGGSLWSLWKTRNDMVFNNKILASPVVVVHKTLMMLCNWKPLLKNTAVEKAAMFGDTWVHLEVVSSFVKLVSPSVGSGFQHYAF

SEQ ID NO: 61733 - protein, 84 aa, Zea mays
  Coding DNA Sequence Number=SeqID_19954
MPNPISCVSSIVLMGRETSPLQLLASLLLTGGKGADLVIRGNDVQQSSTVSHVRVRAKPQQLVDAIVCFMTVLPHSKILALLRI

SEQ ID NO: 61734 - protein, 1051 aa, Zea mays
  Coding DNA Sequence Number=SeqID_19955
  Gene Ontology: Mol. function=protein serine/threonine kinase activity; Cellular component=integral to membrane; Biological process=protein amino acid phosphorylation
  Homolog annotation: Hit_ID=Q2R0X3; Match level="QueryCoverage=96%, HitCoverage=89%, E-value=0.0, Identity=44%"; Hit description=Leucine Rich Repeat family protein
  Pfam annotation: Domain name=LRRNT_2; Domain location=10-51; Score =43.9; E_value=5.4e-10; Accession=PF08263.3; Description=Leucine rich repeat N-terminal domain
  Pfam annotation: Domain name=LRR_1; Domain location=105-127; Score =13.1; E_value=1; Accession=PF00560.23; Description=Leucine Rich Repeat
  Pfam annotation: Domain name=LRR_1; Domain location=129-151; Score =6.6; E_value=17; Accession=PF00560.23; Description=Leucine Rich Repeat
  Pfam annotation: Domain name=LRR_1; Domain location=153-175; Score =19.6; E_value=0.011; Accession=PF00560.23; Description=Leucine Rich Repeat
  Pfam annotation: Domain name=LRR_1; Domain location=177-199; Score =14.3; E_value=0.45; Accession=PF00560.23; Description=Leucine Rich Repeat
  Pfam annotation: Domain name=LRR_1; Domain location=202-224; Score =10.3; E_value=3.4; Accession=PF00560.23; Description=Leucine Rich Repeat
  Pfam annotation: Domain name=LRR_1; Domain location=226-249; Score =8.4; E_value=7.5; Accession=PF00560.23; Description=Leucine Rich Repeat
  Pfam annotation: Domain name=LRR_1; Domain location=250-273; Score =1.5; E_value=1.5e+02; Accession=PF00560.23; Description=Leucine Rich Repeat
  Pfam annotation: Domain name=LRR_1; Domain location=275-297; Score =13.1; E_value=0.99; Accession=PF00560.23; Description=Leucine Rich Repeat
  Pfam annotation: Domain name=LRR_1; Domain location=299-321; Score =7.9; E_value=9.5; Accession=PF00560.23; Description=Leucine Rich Repeat
  Pfam annotation: Domain name=LRR_1; Domain location=323-345; Score =8.7; E_value=6.9; Accession=PF00560.23; Description=Leucine Rich Repeat
  Pfam annotation: Domain name=LRR_1; Domain location=347-370; Score =7.1; E_value=13; Accession=PF00560.23; Description=Leucine Rich Repeat
  Pfam annotation: Domain name=LRR_1; Domain location=372-394; Score =3.5; E_value=65; Accession=PF00560.23; Description=Leucine Rich Repeat
  Pfam annotation: Domain name=LRR_1; Domain location=396-417; Score =11.3; E_value=2.2; Accession=PF00560.23; Description=Leucine Rich Repeat
  Pfam annotation: Domain name=LRR_1; Domain location=419-444; Score =6.9; E_value=14; Accession=PF00560.23; Description=Leucine Rich Repeat
  Pfam annotation: Domain name=LRR_1; Domain location=446-468; Score =13.1; E_value=1; Accession=PF00560.23; Description=Leucine Rich Repeat
  Pfam annotation: Domain name=LRR_1; Domain location=471-493; Score =18.8; E_value=0.019; Accession=PF00560.23; Description=Leucine Rich Repeat
  Pfam annotation: Domain name=LRR_1; Domain location=495-517; Score =16.9; E_value=0.073; Accession=PF00560.23; Description=Leucine Rich Repeat
  Pfam annotation: Domain name=LRR_1; Domain location=519-541; Score =10.9; E_value=2.6; Accession=PF00560.23; Description=Leucine Rich Repeat
  Pfam annotation: Domain name=LRR_1; Domain location=543-565; Score =10.5; E_value=3.1; Accession=PF00560.23; Description=Leucine Rich Repeat
  Pfam annotation: Domain name=LRR_1; Domain location=567-590; Score =5.8; E_value=23; Accession=PF00560.23; Description=Leucine Rich Repeat
  Pfam annotation: Domain name=LRR_1; Domain location=592-614; Score =6.5; E_value=17; Accession=PF00560.23; Description=Leucine Rich Repeat
  Pfam annotation: Domain name=LRR_1; Domain location=616-638; Score =15.3; E_value=0.22; Accession=PF00560.23; Description=Leucine Rich Repeat
  Pfam annotation: Domain name=LRR_1; Domain location=640-662; Score =11.4; E_value=2.1; Accession=PF00560.23; Description=Leucine Rich Repeat
  Pfam annotation: Domain name=LRR_1; Domain location=664-686; Score =14.6; E_value=0.35; Accession=PF00560.23; Description=Leucine Rich Repeat
  Pfam annotation: Domain name=LRR_1; Domain location=688-711; Score =4.9; E_value=35; Accession=PF00560.23; Description=Leucine Rich Repeat
  Pfam annotation: Domain name=LRR_1; Domain location=81-103; Score =12.9; E_value=1.1; Accession=PF00560.23; Description=Leucine Rich Repeat
  Pfam annotation: Domain name=Pkinase; Domain location=803-1036; Score= 74.9; E_value=2.5e-19; Accession=PF00069.15; Description=Protein kinase domain
  Pfam annotation: Domain name=Pkinase_Tyr; Domain location=803-1051; Score=41.3; E_value=5.3e-15; Accession=PF07714.7; Description =Protein tyrosine kinase
  Pfam module annotation: Pfam domain module=LRRNT_2::LRR_1::LRR_1::LRR_ 1::LRR_1::LRR_1::LRR_1::LRR_1::LRR_1::LRR_1::LRR_1::LRR_1::LRR_1: LRR_
  Pfam module annotation: Pfam domain module=LRR_1::LRR_1::Pkinase::Pkin ase_Tyr; Domain location=10-51::105-127::129-151::153-175::177 -199::202-224::226-249::250-273::275-297::299-321::323-345::347
  Pfam module annotation: Domain location=419-444::446-468::471 -493::495-517::519-541::543-565::567-590::592-614::616-638::640 -662::664-686::688-711::81-103::803-1036::803-1051
LHVAATSNERENDQQALLCFKSQLSGTVGTLSSWSSNTSMEFCSWHGVSCSEHSPRRVIALDLASEGITGTIPPCIANLTSLTRLQLANNSFRGSIPPELGLLSQLRILNLSMNSLEGTIPSELSSCSQLQALGLWNNSLRGEVPPALGQCVQLEEIDLSNNDLEGSIPSRFGALPELRTLVLAGNRLSGAIPPSLGRSSLSLTHVDLGANALTGGIPESLAGSSSLQVLRLMRNSLGGELPRALFNTSSLIAICLQENKFVGPIPPATAVVSPPVKHLHLGGNFLSGTIPASLGNLSSLLDLRLTRNRLHGRIPESIGYLPALSLLNLNLNNLSGPVPLSLFNMSSLRALAMGNNSLSGRLPSGIGYTLPRIQILILPSNRFDGPIPASLLHAHHMQWLYLGQNSLTGPVPFFGTLPNLEELQVSYNLLDAGDWGFVSSLSGCSRLTRLYLAGNSFRGELPSSIGNLSSSLEILWLRDNKISGPIPPELGNLKNLSTLYMDHNRFTGSIPAAIGNLKRLVVLSAARNRLSGTIPDAIGDLVQLTDLKLDANNLSGRIPASIGRCTQLQILNLARNALDGGIPRSILEISSLSLELDLSYNRLAGGIPDEIGNLINLNKLSVSNNMLSGSIPSALGQCVLLEYLKMQNNLFTGSVPQSFAGLVGIRELDVSRNNLSGKIPGFLTSLNYLNYLNLSFNDFDGAVPEGGVFGNASAVSIEGNGRLCAAVPTRGVTLCSARGQSRHYSLVLAAKIVTPVVVTIMLLCLAAIFWRKRMQAAKPHPQQSDGEMKNVTYEEILKATDAFSPANLISSGSYGKVYKGTMKLHKGPVAIKIFNLGIHGAHGSFLAECEALRNARHRNIVKVITVCSSVDPAGADFKAIVFPYMLNGNLDMWLNQKTHQNSQRKTLSLSQRISVSLDVANAVDYLHNQCASPLIHCDLKPSNVLLDLDMVAYVGDFGLARFQRDTPTAHEGSSASFAGLKGSIGYIPPEYGMSEGISTEGDVYSFGVLLLEMMTGRRPTDEKFSDGSCRQLGLAGQSTPMTPLMSGPEAL

SEQ ID NO: 61735 - protein, 170 aa, Zea mays
  Coding DNA Sequence Number=SeqID_19956
  Gene Ontology: Mol. function=sugar porter activity; Cellular component=endoplasmic reticulum; Biological process=transport
  Homolog annotation: Hit_ID=Q69XD4; Match level="QueryCoverage=87%, HitCoverage=43%, E-value=2e-76, Identity=85%"; Hit description =Putative UDP-galactose/UDP-glucose transporter
  Pfam annotation: Domain name=UAA; Domain location=1-169; Score=-64.5; E_value=3.4e-07; Accession=PF08449.2; Description=UAA transporter family
MLMGTLLYGVKYTLPEYFCTFLVAGDKLQETKTVKKLANPNAPLGYTLCFLNLAFDGYTNSTQDLIKSRYPKTNPWDIMLGMNLWGTIYNAVVMFVAPLLFSNWPYADGFEALRFCQENPEVAWDIFLFCLCGAVGQNYIFLTISRFGALTNTTITTTVFLFYCPESNLL

SEQ ID NO: 61736 - protein, 148 aa, Zea mays
  Coding DNA Sequence Number=SeqID_19957
  Gene Ontology: Mol. function=oxidoreductase activity; Cellular component=mitochondrion; Biological process=metabolic process
  Homolog annotation: Hit_ID=Q69XE0; Match level="QueryCoverage=57%, HitCoverage=16%, E-value=1e-25, Identity=67%"; Hit description =Putative cytosolic aldehyde dehydrogenase
MCLMKFKTVEEAIARANDTRYGLGAGVVTRDLDVANRVVRSVRAGVVWVNCYFAMGSDCPFGGRKMSGFGKDEGMHALDKYLAVKCLALLITLLPALFFVLPRMPQPAHDRRREAAARATTRIYWQAVDQMVACALVLTALLATYIYH

SEQ ID NO: 61737 - protein, 267 aa, Zea mays
  Coding DNA Sequence Number=SeqID_19958
  Gene Ontology: Mol. function=sugar porter activity; Cellular component=endoplasmic reticulum; Biological process=transport
  Homolog annotation: Hit_ID=Q69XD4; Match level="QueryCoverage=75%, HitCoverage=59%, E-value=6e-96, Identity=80%"; Hit description =Putative UDP-galactose/UDP-glucose transporter
  Pfam annotation: Domain name=TPT; Domain location=19-189; Score= -30.7; E_value=0.035; Accession=PF03151.7; Description=Triose -phosphate Transporter family
  Pfam annotation: Domain name=UAA; Domain location=1-195; Score=53.9; E_value=4.1e-13; Accession=PF08449.2; Description=UAA transporter family
  Pfam module annotation: Pfam domain module=TPT::UAA; Domain location =19-189::1-195
MLMGTLLYSVKYTLPEYFCTFLVAGGVSSFALLKTSSKTVKKLVNPNAPLGYTLCFLNLAFDGYPKTNPWDIMLGMNLWGTIYNAVVMFVAPLLFSNWPYANGFEALRFCQENPEVAWDIFLFCLCGAVGQNFIFLTISRFGALTNTTITTTRKFMSIVVSSVISGNPLSSKQWGSVAMVFLGLSVQIYLKWKRKKGRDRNEEEMQQTVLHSGWWGEGKLYDDQCIFVLLSRKRCYESIIHVDIRIQWVLNAPLRNVNDRLILAKPF

SEQ ID NO: 61738 - protein, 34 aa, Zea mays
  Coding DNA Sequence Number=SeqID_19959
MGIEALKYISYPAQVLAKSSKMIPVSLHLLKHTA

SEQ ID NO: 61739 - protein, 87 aa, Zea mays
  Coding DNA Sequence Number=SeqID_19960
MKDVEDVNEAPKKSSVSRDELEGQADYMDDMVERENDEADVETTPVREDVETALVRCQRHYKTEEDLIDVTPLEVVAEGKENNGLED

SEQ ID NO: 61740 - protein, 98 aa, Zea mays
  Coding DNA Sequence Number=SeqID_19961
MDPKLLYGSPIGPRDTIAYTMIPCMTSMASSITTMSTYHHRKPMSSSSEESEKCLDLDFIDDLDWDNYLGEDDVDDDDSDEDSCNDEDKQPLVKRRRM

SEQ ID NO: 61741 - protein, 375 aa, Zea mays
  Coding DNA Sequence Number=SeqID_19962
  Gene Ontology: Mol. function=protein serine/threonine kinase activity; Cellular component=membrane; Biological process=protein amino acid phosphorylation
  Homolog annotation: Hit_ID=Q33AH3; Match level="QueryCoverage=94%, HitCoverage=38%, E-value=1e-141, Identity=69%"; Hit description =Calcium binding EGF domain containing protein, expressed
  Pfam annotation: Domain name=EGF_CA; Domain location=20-62; Score =14.4; E_value=0.0059; Accession=PF07645.6; Description=Calcium binding EGF domain
  Pfam annotation: Domain name=Pkinase; Domain location=131-369; Score =115.0; E_value=2.1e-31; Accession=PF00069.15; Description=Protein kinase domain
  Pfam annotation: Domain name=Pkinase_Tyr; Domain location=131-366; Score=45.5; E_value=2.9e-15; Accession=PF07714.7; Description =Protein tyrosine kinase
  Pfam module annotation: Pfam domain module=EGF_CA::Pkinase::Pkinase _Tyr; Domain location=20-62::131-369::131-366
MGMRGCGGSKGEKKAVTTNIDECKTQHICKENEVCNNVAGSYYCTKTTKQQGLVLGVIIGLCVGFGILVSCLGGMLVIRRWKRDIQKQLRRKYFRKNQGLLLEQLISSDENARNNTKIFSLEELKKATNDFDTSRILGRGGHGMVYKGILSDQRVVAIKISKIMEQGEIDSFINEVAILSQINHRNIVRLFGCCLETEVPLLVYDFVSNGSLFEILHAAEASNDFQLSWDDCLRIALEAAGALYYLHSSASVSIFHRDVKSSNILLDGNYTAKVSDFGASRLVPIDQTHVVTNIQGTFGYLDPEYYHTGQLNEKSDVYSFGVVLVELLLRKKPVFTNETGTKQNLSNYFLWEKKMKPVTEIVASQVLEEATEEEN

SEQ ID NO: 61742 - protein, 99 aa, Zea mays
  Coding DNA Sequence Number=SeqID_19963
MAREDGRRDRDTVAVLVEEREGLLEREPLLVRQPVHATDSKALYGTNASCQVKCFVSIDYNRNSSDFNPRSEQPSVVNPVCLHRSLVTVAVTPYQTTLE

SEQ ID NO: 61743 - protein, 170 aa, Zea mays
  Coding DNA Sequence Number=SeqID_19964
  Subcellular localization annotation: CTP_CleavageSite=66; ConfidenceScore=5.20e-01
GPARLPFPEALARPASHPGGASQKQPLEPSPYLAAALGRARRSPPVPAPRRRPPVPDPRRRPRRTRSSTARVQRDLGATTAWLGAAPVAHAKRRGPGAASGPRRVPGAAPAGSAAPGRFNRPGPGSAARSPVPASPDRGYEIDGFGYDYGAGEDEAVEGDFQEFQDYDEF

SEQ ID NO: 61744 - protein, 84 aa, Zea mays
  Coding DNA Sequence Number=SeqID_19965
  Gene Ontology: Mol. function=pyridoxal phosphate binding
  Homolog annotation: Hit_ID=Q0MRQ7; Match level="QueryCoverage=56%, HitCoverage=14%, E-value=4e-14, Identity=77%"; Hit description =Molybdenum cofactor sulfurase-like protein 1
MDNWLSIILHISMGRLFGVHQVEPVATTAIYKDKTQAIESRCQPLIKRTEYLALNQLKLYEHFGLTKCFIQAIKINDMCTLDRI

SEQ ID NO: 61745 - protein, 89 aa, Zea mays
  Coding DNA Sequence Number=SeqID_19966
MEPGAQTKSEQGKQAFAMKDRRESSRWPTSMASSKSARQPGSSASWEMEHFGWPDLGSGSWRNASEQGEEDTREREGDAAREKKLHSWR

SEQ ID NO: 61746 - protein, 72 aa, Zea mays
  Coding DNA Sequence Number=SeqID_19967
MARWRALTAVKSPTRLPGTISEEEVWPGRGKGGEVASTGKLAMTVVMAQSGNGMARGAWALLGRGRVGAAVS

SEQ ID NO: 61747 - protein, 244 aa, Zea mays
  Coding DNA Sequence Number=SeqID_19968
  Gene Ontology: Mol. function=ribonuclease H activity
  Pfam annotation: Domain name=RnaseH; Domain location=89-211; Score =1.2; E_value=4.4e-05; Accession=PF00075.14; Description=RNase H
MTVDFRFGDSGLEFVELGFHKDSICVLATFLTNLSETRLCALVRHAYFLCAEGGGYPRRTSVLVDRVSVWRRQTPQDPEGGLEAERWMPEAATVYHDGSARASIGGAIRDSDGRVVLAFAEPTEHSTVGIVEARAMARVLRLALGLNLQRVVVEGDDLMLVRLLRGEDTRTRIPVALQEIHGLLRCFAGCDVRHVYREGNQVAHTLCRQAYHCPGVWVGTVPSVVFDKAEEDRRGVLHERSVVR

SEQ ID NO: 61748 - protein, 128 aa, Zea mays
  Coding DNA Sequence Number=SeqID_19969
MGIRTREQERRTHRGLAVGSSQFATLRPTPYLLASAEAPPRISPTAAPSQESARRRGVRRQRNNGRRISPPPGRCTQFSTSWSDRQVEARDGSNYHSSHEKIEMVTIVDDIDYSHCFEKLTEPTVGSP

SEQ ID NO: 61749 - protein, 199 aa, Zea mays
  Coding DNA Sequence Number=SeqID_19970
  Gene Ontology: Mol. function=ribonuclease H activity
  Homolog annotation: Hit_ID=Q0KIQ6; Match level="QueryCoverage=72%, HitCoverage=14%, E-value=1e-08, Identity=28%"; Hit description=RNase H family protein
  Pfam annotation: Domain name=RnaseH; Domain location=46-166; Score= -8.8; E_value=0.00038; Accession=PF00075.14; Description=RNase H
MAPPNDPNLYHHTSQLSPWARPYHPGRVVMVQWSLPPHGWYKLNFDGSVYHDGSARASIGGAIRDSDGRVVLAFAEPTEHSTVGIVEARAMARVLRLALGLNLQRVVVEGDDLMLVRLLRGEDTRTRIPVALQEIHGLLRCFAGCDVRHVYREGNQVAHTLCRQAYHCPGVWVGTVPSVVFDKAEEDRRGVLHERSVVR

SEQ ID NO: 61750 - protein, 142 aa, Zea mays
  Coding DNA Sequence Number=SeqID_19971
MASTRAMAKDWSREGLDEGDAGHGEEEEPCAPEAMASEQKGELQCTIEQGVEGLDKLDGVHGQSELEKPSKGELHGGVGGGQQWTAPCARREESMRYRAEDEMLGELGQERGREQRGASRDTHHHGGEGDDHGGREGKNATE

SEQ ID NO: 61751 - protein, 190 aa, Zea mays
  Coding DNA Sequence Number=SeqID_19972
MAGVGRSSRAGGGARQRRVIQPNHDGIAQPSELGSFTESQRGCRRKEFVNGSHVRRRRRVAHGGKARRSTPKPRLTPSRGEERNHDGQVALTRSGYDGDVGPLPLTPLAVLCVIGEGALWLRVEGWQERTTKDPTDPGILLPFNHQSDSRSRLRRRNPAKCPRRRKIFRHQGKGPAEHDSGHVVDAQRWA

SEQ ID NO: 61752 - protein, 55 aa, Zea mays
  Coding DNA Sequence Number=SeqID_19973
METPKSKTGEGKDQPRQGRREVNLNLQDALPPNKAFFLTVNFLTPGDYIEDPYMR

SEQ ID NO: 61753 - protein, 58 aa, Zea mays
  Coding DNA Sequence Number=SeqID_19974
MAAAWAGLASFLVAAQLASAAQITAPAFLWEPKNYGDDACQSKVLFTFDLPYVGIYDV

SEQ ID NO: 61754 - protein, 163 aa, Zea mays
  Coding DNA Sequence Number=SeqID_19975
MWACMKQFKDAVCGVMNEPGPIATKLLALKFVETWILCCTPQANSDQVQPTEGKNWRFDTSRSSQFHPSLDPAILEADAHRALLLLLDILRTAYAHRGSFLVGTINSFCFDFDPGLETAKGAHSASLRYAIFTTKDVAPCHGVAAKGMRPIGIGSGLGLVDKD

SEQ ID NO: 61755 - protein, 153 aa, Zea mays
  Coding DNA Sequence Number=SeqID_19976
  Gene Ontology: Mol. function=molecular_function; Cellular component =tight junction; Biological process=biological_process
  Homolog annotation: Hit_ID=Q69R94; Match level="QueryCoverage=80%, HitCoverage=12%, E-value=1e-38, Identity=54%"; Hit description =Putative symplekin
MGDGDANPITDRKIDKTQQQQIWYITGVLPIFPRLVDLPLERFQDVLARILQGTAHTGPALTPAEVLIAIHDINPEKDKVALKKVDRIPIPLLFMRTVIQALDAFPALVDFVMGILSRLIDKQIWKMPKLWVGFLKLSFQTQPRSFDVLLQFY

SEQ ID NO: 61756 - protein, 258 aa, Zea mays
  Coding DNA Sequence Number=SeqID_19977
MDYILSNDYILQEMLCMGIGNYRFDPIMPTVHGSLINYTGKLTTLRVKQSSGSYCSFSLAFQNDDQKSEGSMELLNSVKAISIHPLSNNKFLVLDSSGVLHVFIFSTTQMVSRGAIKQCSENIHTYRLHYPMKVQLSAVFSVTSIIETESPNGDNGDVTGERELAPIKLSAIEAIFTSERVEDIVSISKDSVLILGQGDARLWTDHAVMTLLLCMRTLHAKTGTILVDMTWKEQCCQIYSQSQLSWKVDHHEGHSAME

SEQ ID NO: 61757 - protein, 75 aa, Zea mays
  Coding DNA Sequence Number=SeqID_19978
MAGASEDEGRAKLMEAGQVAIMGEVGELIPGRCGLVEANGAGQPGITRGRPVYFISEVLFETKIPYPQIQKLLYA

SEQ ID NO: 61758 - protein, 166 aa, Zea mays
  Coding DNA Sequence Number=SeqID_19979
MANALHHVLLVITQIPYGKRKSISLTSAKAKTGGEKKKRPTSKIFNTYINKVDKKAATPYLIKKKKNRKVIAINANKQANKGKGAKYICVPKEIISNMKSTKKPPNSHALLSPPLASSTKRYTLIYGSKLESNLGSTVEAIAGVDSKVADGCVSGAGASVGTDTAT

SEQ ID NO: 61759 - protein, 74 aa, Zea mays
  Coding DNA Sequence Number=SeqID_19980
MRVVWDALGQASVMVPIFLLRDLGTGIVPQLFLEGGGYRFGAALGSSLIKDTDDLRYNGSIDGFGYDDDNDVPR

SEQ ID NO: 61760 - protein, 129 aa, Zea mays
  Coding DNA Sequence Number=SeqID_19981
MSVVGTRRRRGHERTVGPRATGRAQGGQGECGEPERGHNTGAEAPKGGGPWRDGSAAALPHFGEESRATKGGEGEIRGRGRLVTSREDSGSLNGSSGTTKARVDGDVVVVAQKKSGERGQREPKGDGAN

SEQ ID NO: 61761 - protein, 41 aa, Zea mays
  Coding DNA Sequence Number=SeqID_19982
MAGASEDEGRAKLMEAGQVAIMGEVGELIPGRCGLIEANGA

SEQ ID NO: 61762 - protein, 183 aa, Zea mays
  Coding DNA Sequence Number=SeqID_19983
  Subcellular localization annotation: CTP_CleavageSite=33; ConfidenceScore=5.53e-01
MGQATHPSNSCSSEGSMLWLKLPPSSSPSRSPPAAGVPYGCAGAPLARAQRRDASQTPPPAEVRGRVLLLTLLTLAFLLLAQTVVQSFQLSPASGAIGSSASPDPRARTQPRLRKTTNSASPDPRARTQPRLRKTMDSASPDPGARTQPRPRKTVSASLDPRAQAQPRRWTTDSASPDPRART

SEQ ID NO: 61763 - protein, 500 aa, Zea mays
  Coding DNA Sequence Number=SeqID_19984
  Gene Ontology: Mol. function=3-oxoacyl-[acyl-carrier-protein] synthase activity; Cellular component=mitochondrion; Biological process=fatty acid biosynthetic process
  Homolog annotation: Hit_ID=Q8L3X9; Match level="QueryCoverage=84%, HitCoverage=93%, E-value=1e-142, Identity=60%"; Hit description=3 -oxoacyl-[acyl-carrier-protein] synthase, mitochondrial precursor
  Pfam annotation: Domain name=Ketoacyl-synt_C; Domain location=339 -456; Score=188.3; E_value=1.8e-53; Accession=PF02801.12; Description= Beta-ketoacyl synthase, C-terminal do
  Pfam annotation: Domain name=ketoacyl-synt; Domain location=72-334; Score=77.4; E_value=4.5e-20; Accession=PF00109.16; Description=Beta -ketoacyl synthase, N-terminal domain
  Pfam module annotation: Pfam domain module=Ketoacyl-synt_C::ketoacyl -synt; Domain location=339-456::72-334
  Subcellular localization annotation: CTP_CleavageSite=56; ConfidenceScore=5.70e-01
SGCFGLRGLTRRLLLPASVSHSPQSHTATATPPSSSRLMSCLRRASRLTRGLSSSSAAEAETLPPPRPSAGRRVVVTGLGAVTPLARGVGATWDRLVAGRCAVRSLAAEDLRFPEEAAGRTLEQLPSRVVAAVPRGKGEDEFAEDTWTKDKSVSGFISYALCAADEALRDANWLPSEDDKKERTRLRRLSPYFIPKILINMASGHVSMRYGFQGPNHAAVTACATGAHSIGDATRMIQFGDADVMVAGGTESNIDALSIAGFSRMAARWTVDTGGGMERRRALHTGGRRLEHKPLQQPHDGAESRRSRGGAVARWRRGDGYCAAAVALDHAKERGAKIYAEVRGYGMSGDAHHITQPQSGGRGAILAMKRALDQSGLHVNEIGYVNAHATSTPLGDAVEANAIKSVFGDHAASGDLAISSTKGAIGHLLGAAGSVEAIFTVLAIHHGLAPPTLNLERPDPLFEGAFTPLAAPKKMSIRAAISNSFGFGGTNTSLLFSCPP

SEQ ID NO: 61764 - protein, 96 aa, Zea mays
  Coding DNA Sequence Number=SeqID_19985
MVALGRLWRVAGRSPELWASLGELGVVIKCTTTFILGPSQDQKWHSMYNNGMRLQCTLLSYEVHEQKESSFCDNWCSHGHSELIEYALTKRCCDPL

SEQ ID NO: 61765 - protein, 97 aa, Zea mays
  Coding DNA Sequence Number=SeqID_19986
MGDHVSGRVRRSIRGQVDSGLAFQSWGRQILDGRLWCWLLVYLLSNSLLRNEDWLNIGLCSLSYKFEVRMKLDKPWAKMTKVSVPKITESDLMVILL

SEQ ID NO: 61766 - protein, 136 aa, Zea mays
  Coding DNA Sequence Number=SeqID_19987
MGRGKNGKGWPRLADGKCKRPPSPPSKDFGDLEYSKEASSEYERSPVPASPVVSSEDSDDSMGLSTRAGLGRSGDSEEVSSEDVDSSDSSEEWSSGEDDGSSGEDDGKGGGGGDSEGDGDGEGDSGDNKGDGDGDG

SEQ ID NO: 61767 - protein, 715 aa, Zea mays
  Coding DNA Sequence Number=SeqID_19988
  Gene Ontology: Mol. function=RNA-directed DNA polymerase activity; Cellular component=intracellular; Biological process=RNA-dependent DNA replication
  Homolog annotation: Hit_ID=UPI00004C1731; Match level="QueryCoverage =98%, HitCoverage=52%, E-value=0.0, Identity=82%"; Hit description =UPI00004C1731 related cluster
  Pfam annotation: Domain name=RnaseH; Domain location=312-439; Score =7.5; E_value=1.2e-05; Accession=PF00075.14; Description=RNase H
  Pfam annotation: Domain name=rve; Domain location=465-616; Score =90.8; E_value=4.2e-24; Accession=PF00665.16; Description=Integrase core domain
  Pfam module annotation: Pfam domain module=RnaseH::rve; Domain location=312-439::465-616
MPFGLRNAGATYQRCMNHVFGEHIGRTVEANVDDIVVKTKKASDLLSDLEVTFRCLKAKGVKLNPEKCVFGVPRGMLLGFIVSERGIEANPEKIAAITSMGPIKDLKGVQRVMGCLAALSRFISRLGERALPLYRLLRKVECFTWTPEAEEALGNLKALLTNAPILVPPAAGEALLIYVAATTQVVSAAIVVERREEGHALPVQRLAYFISEVLSETKTRYPQVQKLLYAVILTWRKLRHYFESHPVTVVSSFPLGEIIQCREASGRIAKWAVEIMGETISFAPRKAIKSQVLADFVAEWVDTQLPIAPIQPELWTMFFDGSLMKTGAGAGLLFISPLGKHLRYVLRLHFPASNNVAEYEALVNGLRIAIELGVRRLDAHGDSQLVIDQVMKNSHCRDPKMEAYCDEVRCLEDKFYGLELNHIARRYNETADKLAKIASGLTTVPPDVFSRDLHQPSVKIDDTPEPEAPSAQPEKAPGGYTHLVVAIDKFSKWIEVRPLNSIRSEQAVAFFTNIIHRFGVPNSIITDNGTQFTGRKFLDFCEDHHIRVDWAAVAHPMTNGQVERANDMILQGLKSRIYNDLNKFGKRWMKELPSVVWILRTTPSRATGFTPFFLVYGAEAILPTDLEYGSQGRGPTPTKATKLVEKTRWTSWKRLGTRPYYTRRGTNSPCDATTPEGFSPETSRWATWCFGCDKTPEGGTSSCLPGKGRSSSPKF

SEQ ID NO: 61768 - protein, 639 aa, Zea mays
  Coding DNA Sequence Number=SeqID_19989
  Gene Ontology: Mol. function=oxidoreductase activity, acting on single donors with incorporation of molecular oxygen, incorporation of two atoms of oxygen; Cellular component=plastoglobule; Biological process=abscisic ...
  Gene Ontology: Biological process=acid biosynthetic process
  Homolog annotation: Hit_ID=Q6YVJ0; Match level="QueryCoverage=90%, HitCoverage=91%, E-value=0.0, Identity=77%"; Hit description =Putative 9-cis-epoxycarotenoid dioxygenase
  Pfam annotation: Domain name=RPE65; Domain location=133-631; Score =694.6; E_value=7e-206; Accession=PF03055.6; Description=Retinal pigment epithelial membrane protein
  Subcellular localization annotation: CTP_CleavageSite=52; ConfidenceScore=5.18e-01
MERTLITSNLSMSAHASRSSRRVHYISPAASAAAHNSSYRKKKKNAPSPPPSAAATDTVVISPPATDNVQSTAPKQAGRQELEELVAAKTNTSRIATARTSASSQSRAKLRRRPAPAITSLPMAFCSALEEAINTFVDPPVLRPSVDPRNVLSTNFAPVDELPPTPCPVVRGAIPRCLAGGAYIRNGPNPQHLPRGPHHLFDGDGMLHSLLLPTAESPSSDPVLCSRYVQTYKYLVERDAGAPVMPNVFSGFHGVAGLARGAVVAARVLTGQMNPAEGVGLANTSLVFFGGRLYALGESDLPYTVRVDPATGEVTTHGRCDFGGRLFMGMTAHPKKDPVTGEVFAFRYGPVPPFVTYFRFDRAGNKGPDVPIFSVRQPSFLHDFAVTERYAIFPEIQIVMQPMGMVTGGAPVGSDAGKVPRLGVLPKYATDESEMRWFEVPGFNIMHSLNAWEEADGEELVLVAPNVLSLEHALERMELVHSCVEKVRINLRTGAVSRTPLSAENLDFGVIHPGYLGRRNRYGYLGIGDPMPKIAGVAKLDLDRAGTGDCTVARRVFGPGCFAGEPFFVPDDVEGNSNEDDGYLVCYVHNERTGENQFVVMDARSAQLDIVAEVQLPARVPYGFHGIFITQAELQAQQQ

SEQ ID NO: 61769 - protein, 270 aa, Zea mays
  Coding DNA Sequence Number=SeqID_19990
  Gene Ontology: Mol. function=hydrolase activity; Cellular component =membrane; Biological process=auxin mediated signaling pathway
  Homolog annotation: Hit_ID=Q6YVJ1; Match level="QueryCoverage=95%, HitCoverage=73%, E-value=4e-91, Identity=63%"; Hit description =Nodulin-like protein
  Pfam annotation: Domain name=DUF6; Domain location=95-223; Score =60.5; E_value=5.4e-15; Accession=PF00892.11; Description=Integral membrane protein DUF6
VLGNQLLFLLGLSYTNPTYAAAIQPSIPAFTFILALIMGGPAVFGSSELELDVYSHGVIADMTQPEPAGPLISLFMAFGLENWHIGVLCLIGNCLCMATYLALQAPILVKYPSSLSLTAYSYFFGVVLMVISGVFATNDKHDWSLTQSEVAAVVYAGVMASALNYVLLTWSNKILGPAMVALYSPLQPVVSALLSMIFLGSPIYLGSIFGGLLIIFGLYLVTWARHREKLASIGVPYVTCVSESLDGPSHVAKTVPFISLSRLWDVPHES

SEQ ID NO: 61770 - protein, 269 aa, Zea mays
  Coding DNA Sequence Number=SeqID_19991
  Subcellular localization annotation: CTP_CleavageSite=62; ConfidenceScore=5.52e-01
MAAASTSRLAIQIRVPFVPWPFPFPPRLATLAVSTRTRLASYGLCLPTRPAGMPPLAEHELAAAAATSALGVAFGPRPRPPPSRTRRARTLGPAAARLPSLPSSKRLKAALAAASVLRLAAAAPAGLHAASPAGVAVLAVLKSSYKLSKNTSKVVEGFLGLQLHKGFRNGIDALGVVVKVAVIVSEVAVWVGARFWGYGRARCVMFLGFTRPTGLVLLGCSKSEPQVALFDPVIVGMDAQGCELEERGLSELFSLAVPVPQATTLMTMS

SEQ ID NO: 61771 - protein, 182 aa, Zea mays
  Coding DNA Sequence Number=SeqID_19992
MELDLAFDRSRYGVSGGFDLACAVIDTPLTLSAGTSYRDEADLLLLEEAEAEQLNQHWQQPAGGRGRVAGWLHRPRHRLEAGSSREHRHRSRQRSSTLQPAGERPSAPWQETEMGSTSTAGSGNGEQPSRAARRGGRYGAERPSALRLRACGCGRRRKRKTGRRVARKQEARFIDLAVFGPG

SEQ ID NO: 61772 - protein, 602 aa, Zea mays
  Coding DNA Sequence Number=SeqID_19993
  Gene Ontology: Mol. function=transporter activity; Cellular component= membrane; Biological process=oligopeptide transport
  Homolog annotation: Hit_ID=Q10S13; Match level="QueryCoverage=94%, HitCoverage=95%, E-value=0.0, Identity=62%"; Hit description=POT family protein, expressed
  Pfam annotation: Domain name=MFS_1; Domain location=56-529; Score= -16.9; E_value=0.0019; Accession=PF07690.6; Description=Major Facilitator Superfamily
  Pfam annotation: Domain name=PTR2; Domain location=118-513; Score =202.2; E_value=1.2e-57; Accession=PF00854.12; Description=POT family
  Pfam module annotation: Pfam domain module=MFS_1::PTR2; Domain location=56-529::118-513
MGAGATARDEEAATGRHHGRKPHGAAAEYAQDGSVDLRGNPVLRSQRGGWTACSFIVVYELFERMAYYGISSNLIIYLTDKLHQGTVEASNNVTNWSGTVFLTPLLGAYVADAYLGRYWTFVVGSAIYLLGMVLLVLSVSVPALKPPPCGAGGVCPQASALQLGAYFGGLYIVALGNGGTKPNISTIGADQFDEFDPRGADAQAVLLQLGGCSPSSWGILFSSTVLVYLQDNVSWSVGLRHPHAGASWSPSPSSSPAPGCTATGCRRAAPFHEHGAGSWPPRLWESGSRPRVPGPTPKELHELDVEEYARKRRFRMDSTDAMAFLNKAAAVAVPSGGPASTPAWSLCTVTQVEETKQILRLTNTLFVKQGTTMDRHMGPRFEIPAASLGAFVTLTMLVAVVVYDRVFVRAVRRYTKDPRGITILRRMGTGMLLQVATMAVASAIESRRLAYARSHGLDATGGQLGLTIFALLPQFVLMGLADAFLVVGKIEFFYDQAPESMKSLGTAMSLTAYGIGNFLSSFLLSTVTRVTRDRGHAWVTNNLNASNLDYYYAFLTALGAVNFVAFLALSARYRYKAQSTDRIDAAVGLGTEKAKLQAEPLG

SEQ ID NO: 61773 - protein, 352 aa, Zea mays; identical to SEQ ID NO: 43042
  Coding DNA Sequence Number=SeqID_19994
  Homolog annotation: Hit_ID=Q1KSC3; Match level="QueryCoverage=33%, HitCoverage=56%, E-value=3e-31, Identity=64%"; Hit description =Putative cyclin-dependent kinase inhibitor 3

SEQ ID NO: 61774 - protein, 179 aa, Zea mays
  Coding DNA Sequence Number=SeqID_19995
  Subcellular localization annotation: CTP_CleavageSite=24; ConfidenceScore=5.35e-01
MDRRILRTSSCNGSGKNPSPSSPAAVSRPASSGGIGSKDDAAAGERKALLPRQPPGGMARKGRKGSNRRVQWKDKHGSKLTDVREFQPSATRQSESDRQSGLAKGATANSAPPDPRARTRAKTRKTANSAPPDPRARTRAKTRKTANSAPPDPRARTRAKTRKTANSAPPDPRARTRAK

SEQ ID NO: 61775 - protein, 135 aa, Zea mays
  Coding DNA Sequence Number=SeqID_19996
  Homolog annotation: Hit_ID=Q10NP6; Match level="QueryCoverage=24%, HitCoverage=10%, E-value=5e-07, Identity=78%"; Hit description =Splicing factor 3A subunit 2, putative, expressed
  Subcellular localization annotation: CTP_CleavageSite=60; ConfidenceScore=5.04e-01
MYRGGLDRFEKAQALEPFSVKSKTGTKKAPAAAGTTKALALLTLPQNSNFLLGPQQPSIRETPRKKIQLSTETINNFSSRTAQSVHNVPDATQQRGELPGKQRQTNLAKRAASEAKDAPAQPLPNKLKIAPKSGA

SEQ ID NO: 61776 - protein, 128 aa, Zea mays
  Coding DNA Sequence Number=SeqID_19997
  Gene Ontology: Mol. function=iron-sulfur cluster binding; Biological process=electron transport
  Homolog annotation: Hit_ID=Q9LI04; Match level="QueryCoverage=50%, HitCoverage=16%, E-value=3e-14, Identity=56%"; Hit description =Selenium-binding protein-like
MVHVPFIILYLKKLVTFLSQKSAYATRIMDLFERARRHAAPIEEFQWLGLVAVLFIVVPFLGNPGSCMGWVTMQMSFGMIPLTLALGSRETGTSSFSHSGCTRACSTQMDSDPCPSCVPEIFALELFG

SEQ ID NO: 61777 - protein, 254 aa, Zea mays
  Coding DNA Sequence Number=SeqID_19998
  Gene Ontology: Mol. function=RNA-directed DNA polymerase activity; Cellular component=intracellular; Biological process=RNA-dependent DNA replication
  Homolog annotation: Hit_ID=UPI00004C1732; Match level="QueryCoverage =99%, HitCoverage=19%, E-value=1e-122, Identity=79%"; Hit description= UPI00004C1732 related cluster
MPGIPRDVVEHLLDIRAGARPVKQPLRRFNEEKHRAISEEIHKLMAAGFIKEVFHPEWLANPVLVKKKGATYQRCMNHVFGEHIGRTVEAYVDDIVVKTRKASDLLTDLETTFKCLKAKGVKLNPEKCVFGVPRGMLLGFIVSKRGIEANPEKITAITNMGPIKDLNGVQRVMGCLAALSRFISRLGERGLPLYRLLRKIERFTWTPEAEEALRNLKVLLTSAPILVPPAAGEALLIYVAATTQVVSATIVVER

SEQ ID NO: 61778 - protein, 269 aa, Zea mays
  Coding DNA Sequence Number=SeqID_19999
  Homolog annotation: Hit_ID=Q6QP54; Match level="QueryCoverage=34%, HitCoverage=36%, E-value=1e-15, Identity=62%"; Hit description =Putative kinase
MQLPHLYPPYPEWETLSHEQTMREIFCGRFGILLLNFLLGNSLLRNEHVLSVSEASRDVVDPTIVQTYVVGHKGPDPDHPEILCDENATQKLVSGTIIRGTPKTPKENSAACAAPTAVPPARVRLTAAKSSLRRHRKLRLARPRARPPPRPRKTVSASPNPRARTQPRPRKTVSASPDPRARTQPRPRRSHRLARPWARIDHVTGGHIITLPLASSGYGEQDRRPIWLAPQPLQPGTLLRFGSLEFMSLDSSYDMILLPPPRDNDSDAR

SEQ ID NO: 61779 - protein, 182 aa, Zea mays
  Coding DNA Sequence Number=SeqID_20000
MAYLHRLPSIDQRFLKQGSAAKPSPAGLIPGLGGPYLNSTTLLVALMKVNAGEGFASGITCASEQSTGRVGSAPDSHSGEEFTSIRDRSARFEGTNRILGYWCTHTATHPGRITGGQGISPVAQLHCAHDSRTAVASRKCGRLCYCFPLPLFPNSGYVCNVCVMGEALMGDLMMIQMTELVK

SEQ ID NO: 61780 - protein, 102 aa, Zea mays
  Coding DNA Sequence Number=SeqID_20001
MAPTGDLSLTALNKHPMKPARDIDGVAQLPKIAQKLFNLPNMIMMLYVVVAKHRLWKRDVCLPMFARLIGAPPGLESWFALVSEATFSFFLCRVQCFKFSIE

SEQ ID NO: 61781 - protein, 174 aa, Zea mays
  Coding DNA Sequence Number=SeqID_20002
MNQVMDTLGFDYPIYAKFEEQATGSGPKSPAPKKRKSSKPDLANVAPRKEAEDATTTKVQKQKDVTSKNVASKTKKIGETSMEEKTFDLRYLGDEEILGCNPDRAEAKVVNNLTKTIGFRKLETDLTEMSTEAVCVGNRFVTQIWAKGGKKVAHDEARALQNDADDDEVNEAAA

SEQ ID NO: 61782 - protein, 41 aa, Zea mays
  Coding DNA Sequence Number=SeqID_20003
MYAVAGEEAIMQGGSLCANVEVAELKGAFDMVEEVVLKIAE

SEQ ID NO: 61783 - protein, 303 aa, Zea mays
  Coding DNA Sequence Number=SeqID_20004
  Gene Ontology: Mol. function=exonuclease activity; Cellular component= intracellular; Biological process=tRNA processing
  Homolog annotation: Hit_ID=Q2QWN8; Match level="QueryCoverage=74%, HitCoverage=33%, E-value=3e-84, Identity=70%"; Hit description =Exonuclease family protein, putative, expressed
MVASRTGVVMVSHSLIALQVDGEDMISRMKNFCGRMAQQRLPSTVVDARDQKDSTHKGATLPPVEINLFLGDVQGLVTWVIGDGMLPSWVFVKNKPLIPKVVLLYVPGLDAALYMSQTRLLSSLKELCGNPKPVLASSYGKCIVSSYTDALLMQSYSSSCIPDDRHTIDALLTCRVKRKLDVKTSNQSSKPDRDGKLSSLDDLGDIPFPVTYYTLSEKDLEDNGYPFNLPGFVPTVSAPSGSLPHKVLALDCEMCITEAGFELTRVTLIDIKGSVVLDRLVKPANPIIDYNTRYMVLLPPLYG

SEQ ID NO: 61784 - protein, 756 aa, Zea mays
  Coding DNA Sequence Number=SeqID_20005
  Gene Ontology: Mol. function=RNA-directed DNA polymerase activity; Cellular component=nucleus; Biological process=RNA-dependent DNA replication
  Homolog annotation: Hit_ID=Q8S472; Match level="QueryCoverage=99%, HitCoverage=70%, E-value=0.0, Identity=79%"; Hit description =Putative gypsy-type retrotransposon RIRE2
  Pfam annotation: Domain name=Retrotrans_gag; Domain location=252-337; Score=47.5; E_value=4.4e-11; Accession=PF03732.7; Description =Retrotransposon gag protein
MTHSSSKSAGCRPGSTREQERLSRSAGTSGRHGRANLRPEKYVIYPRASSTASPTTSGSGRHPHPVGSARTWLQQQCSSARCRSHQPPRGVESRESSRISWKAPRSDGPRALPPECMGTPRNLMPRLPDSCGKPRFTPGATRNTAPAAPGRLGNEHHHRDRRAHLDERVRRGYHPRRGGRYDSGEDRSPSPEPPGPQAFSRAIRRAPFPTRFRPPTTITKYSGETRPELWLVDYRLACQLGGTDDDNLIIRNLLLFLSDTRAWLEHLPPGQISNWDDLVQAFAGNFQGTYVRPGNSWDLRSCRQQPGESLRDYIRRFSKQRTELPNITDSDVIGAFPASTTCRDLVSKLGRKTPTRASELMDIATKFASGQEAVEAIFRKDKQPQGCPSEDAPEASTQRGAKEKGKKKSQAKRDAADADLVAAAEYKNPRKPPGGANLFDKMLKESCPYHQGPVKHTLEECVMLRRHFHRAGLPAEGGRAQDDDKKEDHQAGEFPEVRDYFMIYGGQAANASARHRKQERREVCSVKVAAPVYLDWSDKPITFDQADHPDHVPSPGKYPLVVDPVIGDVRLTKVLMDEGSSLNIIYAETLGLLRVDLSSVRAGAAPFHGIIPGKRVQPLGQLDLPVCFGTPSNFRREILTFEVVGFRGTYHAVLGRPCYTKFMAVPNYTYLKLKMSGPNGVITVGPTYKHAFECDVECVEYAEALIVDLESLSKEVPDVKRHADNFEPAETVKSVPLDLSGDASKQIRIGSGLEPK

SEQ ID NO: 61785 - protein, 238 aa, Zea mays
  Coding DNA Sequence Number=SeqID_20006
  Gene Ontology: Mol. function=protein binding; Cellular component =nucleus; Biological process=multicellular organismal development
  Homolog annotation: Hit_ID=Q76BW4; Match level="QueryCoverage=61%, HitCoverage=85%, E-value=5e-51, Identity=65%"; Hit description =Flowering locus T
  Pfam annotation: Domain name=PBP; Domain location=81-225; Score =163.8; E_value=4.4e-46; Accession=PF01161.10; Description =Phosphatidylethanolamine-binding protein
MAHRLATQYPLPNPATQAFLLVALKLPVVYMLLLLQQTPAMLITKLLKHICNLKHHRDHDLAKKHNSAIWVTYDMTMDVLDPFTPTIPLRITYNNRLLLPSAELKPSAVVSKPRVDIGGSDMRAFYTLVLIDPDAPSPSHPSLREYLHWMVTDIPETTSVNFGQELIFYERPDPRSGIHRLVFVLFRQLGRGTVFAPEMRHNFNCRSFARQYHLSIATATYFNCQREGGSGGRRFREE

SEQ ID NO: 61786 - protein, 337 aa, Zea mays
  Coding DNA Sequence Number=SeqID_20007
  Gene Ontology: Mol. function=DNA binding; Cellular component=nucleus; Biological process=regulation of transcription
  Homolog annotation: Hit_ID=Q6Z7E6; Match level="QueryCoverage=62%, HitCoverage=52%, E-value=5e-53, Identity=58%"; Hit description =Putative 6b-interacting protein 1
MATGERGKRREEDWTGLTEARGWQEVAEVVSSRDSYSKAPKSDVQCKTRIDTLKKKYKVKKAKHDSDWRYFDRLDDLLAPVLLKPNSSSSSAAAATAAAAARSAGPMVPPRINFPQRTRTPLHSSAGAKWRMPSPLPQPSASSDSSDGFPPSAVANGKRQRVEEPAAAAADNGAESSVSRAQGLRELAQAIRRLGEVYERVESAKRDQELRMERERLDSARQLEEQRVQFSTSMPRSSRITRTAQAPPGAMTTAATRTRKLRRMRKTKRKRASDCSPLQQWNGFLSDLFTVRVRERDALSMAVRWAGWPAVPRRQWQGPWDRHLRARQAPLLPKGLG

SEQ ID NO: 61787 - protein, 969 aa, Zea mays
  Coding DNA Sequence Number=SeqID_20008
MAAAGTSFSIREYAVRARARAEGGGGGSWPFGGDAGALPPMEVRRFRWWRDEAAAVEEEEAEVERRLAAKRRKRSVAELFAAVPRVPRGGQGRGKGKAAKRKAEKDKGKLVLAASVKTNKKKKVPTGIDARPKEKNSGVKVNSVSISKSFQHPIKNREPKSSCKKKGKQEVSVLLDKKSKKGNRKSVLEIHKKDMANSVQTQSICKDQSKAGSSTAPNTTDMRCKLNSCCKSKHVTFSDGADIFGRTAHLPADNTKQPQSVQTFQQATQEGRDHRDRDDQQLVYQQAEAISRTVEITNSLSENVVLAGVCRTIPLTKPKDITILGNSVDLNHCIETCHGSNCLNSTSLASLSSKMPCQKFQGVNSHLNGNNVSSLDVQYLGEQNHMISQASFNPVSLAPKGVSGDMSPLSEPSSCCLYDRSSITFHEKADANYHLGKVSSEILRSGNVVRSISSSTGSNKPAQAIDCVSAAFRNMHSRRDDYVGLPINSRGEFVKVHPGGTPNSVDIFTRQCLGENSSCPSDYPTIFSSITRMDHVPNYHARQFYTIDQSAFHADPRFPPAGPMAYGMDVRQWPSSERAKVHYYTIPNKKYPCAKQQELSMDHNSQQKLLGLRSRCPSQNSGQGMQHNAETTLRLMGKTVTLGTSSSMHCRGLNNGTPACSSKQSQAEDRGTRTKVFPQLFHGGLALADPAAACRISDGERQPSGHPSRFSLAPAAVRAFLPGTSSFRTGGHNQQPELATASKNPYLSIHCRHAPESSFNARNSFRNFTEKGPAAPYQSSSYLTQQLSSNMAQRTAAAASSSASGYGVQRPPGLSLTTAQTKFTSLRPLPPSVVPSHAYGAPPHGPVTVFHPSAPPVPYPASNSGGPGSSDAVLEIESVRWSVVGSKPEGSERLRSCKRAAEMDADVSVALLKKPLTVAAAAAARQGLDMLLPVAETGSEFRGSTRPEPEAQPRPSGTSTTPICVDDEP

SEQ ID NO: 61788 - protein, 102 aa, Zea mays
  Coding DNA Sequence Number=SeqID_20009
MTEYLQVHEESKTQDERSLEEDRRRNGGTNYSIASYVFGEALNVFSEAPDKPSDMSGTVPKKVYCNRVHRACRCPIDVTLDRTLDMALKEDYSVFGEIHKVW

SEQ ID NO: 61789 - protein, 613 aa, Zea mays
  Coding DNA Sequence Number=SeqID_20010
  Gene Ontology: Mol. function=RNA-directed DNA polymerase activity; Cellular component=mitochondrion; Biological process=RNA-dependent DNA replication
  Homolog annotation: Hit_ID=Q8S463; Match level="QueryCoverage=99%, HitCoverage=33%, E-value=0.0, Identity=90%"; Hit description =Putative prpol
  Pfam annotation: Domain name=RnaseH; Domain location=312-439; Score =14.9; E_value=2.4e-06; Accession=PF00075.14; Description=RNase H
MSFGLRNAGATYQRCMNHVFGEHIGRTVEAYVDDIVVKTRKASDLLSDLETTFRCLKAKGVKLNPEKCVFGVPRGMLLGFIVSERGIEANPEKNVAITNMGPIKDLKGVQRVTGCLAALSRFISRLGERGLPLYRLLRKAECFTWTLEAEEALGNLKALLMNAPILVPPAVGEALLIYVAATTQVVSAAIVVERREEGHALPVQRPVYFISEVLSETKIRYPQIQKLLYAVILTRRKLRHYFESHPVTVVSSFPLGEIIQCREASGRIAKWAVEIMGETISFAPRKAIKSQVLADFVAEWVDTQLPTAPIQPELWTMFFDGSLMKTGAGAGLLFVSPLGKHLRYVLRLHFPASNNVAEYEALVNGLRIAIKLGARRLDARGDSQLVIDQVMKNSHCRDPKMEAYCDEVRRLEDKFYELELNHVARRYNETADELAKIASGRTTVPPDVFSRDLHQPSVKTDDAPKPEKASTQPEAPSAPEGEALRVEEERSGVTPNRNWQTPYLQYLHRGELPLDRAEARRLARRAKSFVLLGDGKELYHRSPSGILQRCISIAEGQELLQEIHSGACGHHAAPRALVGNAFRQGFYWPTVVADATRIVRTCEGCQFYARQTH

SEQ ID NO: 61790 - protein, 364 aa, Zea mays
  Coding DNA Sequence Number=SeqID_20011
MDVDGLDSAGGLSVVPVESCAGRLPSLDGTPNTIEKQISPRAQNSTSPDAGPALGRNLRIARRWVRPRAQPPPRPSSASATYSTTNPVGDHFANYGTRQGKLDHRLGKTSALPEHGFDLDIRSEGFPTSPSTGTLTYLAYGQPLGLGLGSQQKNNKLKSTTQRKVMSSTGRQDISPGNMMSPCSTTLEMMIMFGSLEFMSLDIEYDMVLLAPVPLERPSTRRRPSHRKRQRRNNRNHATHGTPCPSKTPRMADVIDSLSRDLANISIAPEAPPAAPALTLLLSFDTSSVTRLYAGLPFPSGCLDSEEEDEGYNTNREGYDPTRECLHIDPEIPNEENHLGMPREGDFVLWLRQDNRGRHKLTPP

SEQ ID NO: 61791 - protein, 417 aa, Zea mays
  Coding DNA Sequence Number=SeqID_20012
MGQSTLAFTMLLFRDVSCNTLGNLGLLVVYAKQSFIQRAWRMTREQYTKHMQQCEHMFNKRETRNSGTRKPDWGLISKNPRGYLTDLPGEGVRGVLGRPISYQRPKTDLAEERARGRALTGGPGQSVARGRGRADQSGPASGVQATGEWDPGAGGTREHVPSDMGRLIGDRRLRSNARGLTARRLTLLPSATVQSPETRLAQAPGVLRSPELPRTGEGNPTNSMAGFWSCESGAESGWTTEAGGGASGGSVVLQRAIPVARRGDRTDGCGTPRAKAQARGRAKSIGRRAGVADRRVATLASTNSPQREKNQGKKGTGMVAYLGTVPGEAWRDVWSSRCSARRARVTGELGRRRLCAREARSESNEARLRERVRVGLKRELGNVGHDMANFLGVHAWARSAAVTGRTELTGRVHGAAT

SEQ ID NO: 61792 - protein, 96 aa, Zea mays
  Coding DNA Sequence Number=SeqID_20013
MSPRRQRAPLPVHVGSPTPTTSGDDPYLALTVVPPQPHRPLLENPTADDCNLADGEYVLIPEQGVDQEESQEPALEPATEDIPAAPTPEGKPRFYT

SEQ ID NO: 61793 - protein, 506 aa, Zea mays
  Coding DNA Sequence Number=SeqID_20014
MEAAGATVACFGAMNAVARPTGGLVSDTVARLFYMRGRLWQQVPACHAPSSRHRRHVRPARDAHSPNLASTDTASILHGGETTVVSPLPRSRVTRALPPKIAAKFRPLPLIPSRSRPKCGVSGHSSYPVVALPLPLPALSVNCCRAFLAAVRSSRNFRRRFAALHPPSSPRLFFWPRRATKIPPSCPFAAAPTGATRPPSAGLDAFLTRVPHEDDVFPGWQIMECRGGCLLLLNWRTKQLAAYNPLTGALDLVPKLPDDICKGHRGKFISGDFFLVVPDDEAPDRRSFRVVSSCHDKYRVRVAVFSSATRKWQILPWSEPVPTQPASGKYWLLSGRQVSGFLCWSHHKNAYKVLLDTATLQFSVIDLPYGLSGQGHLYRTGDTKDGKLCIVAAIDFSLFVWFRTPDAGGIDRWVLRHVLQLEDEVLEATEGSRNELEQLKVFAILDGIVYMTTFETFRDATLPCWYLSFCLETRKLEKLFYVKANGHAHPYFMPWPTALVGNNLSP

SEQ ID NO: 61794 - protein, 144 aa, Zea mays
  Coding DNA Sequence Number=SeqID_20015
MTRHFRDSSTSSDPAAATPPLPPPLPDLGVALSAADLRVTAYELLVAASRATGAKPLTYIPQPTTAASKLKGAFGLGSSPPSKVGRAAVLELVRVRMGVTEQADATIRRLLLRVAAGQKCKASDFPDPLEYEAWQMRNFKLLEA

SEQ ID NO: 61795 - protein, 80 aa, Zea mays
  Coding DNA Sequence Number=SeqID_20016
MASATTQWHHRGLGCRNALLVEHKVRILCNKSSTGEHKGDTIVRVVREYPNPNPKFRVPEISGIAKPVVISGIDSQNPKF

SEQ ID NO: 61796 - protein, 158 aa, Zea mays
  Coding DNA Sequence Number=SeqID_20017
MGKIASLVWAGSPEQGCRGHGHATAAGWLGEGAATRATPWLGHGRRGLAMAGARPLGSAPLPRREDGIARRAAAGARGAQRLGARLLRRKENEGGCARLLTSRHSLAERARGCLLVRPESLSRAVLGRPDTIQENRPEAWPDTKYIGPCQHGTNTGLG

SEQ ID NO: 61797 - protein, 962 aa, Zea mays
  Coding DNA Sequence Number=SeqID_20018
  Gene Ontology: Mol. function=nucleoside-triphosphatase activity; Cellular component=membrane; Biological process=transport
  Homolog annotation: Hit_ID=Q6ZIW1; Match level="QueryCoverage=99%, HitCoverage=99%, E-value=0.0, Identity=83%"; Hit description =Putative ABC transporter
  Pfam annotation: Domain name=ABC_tran; Domain location=556-738; Score= 173.8; E_value=4.4e-49; Accession=PF00005.17; Description=ABC transporter
  Subcellular localization annotation: CTP_CleavageSite=56; ConfidenceScore=5.24e-01
MELLSGGALAWQQYRALLRKNATLTWRNRRSAALQLFSSLVFIFLIFCIDRAVRSRFSSTTAYRNVPDPEALVAPPIPPCEDKFFIKSPCYDFLWSDGGSARIRGLVDAIRRNNPGRPIAPEKVLGFRTPDDVDAWLFQNPMRCPGALHFQDINATQIKYGIQTNSTPVARRGTYEDPTFKFQIPLQVAAEREMARLLIGDPNFSWTVGFKEFAHPATETFSTIAQAGPTFFLAIAMFGFVFQISALVAEKELKLRQAMSTMGLYESAYWLSWFTWEAFLTTLSALFTVLFGMMFQFDFFLHNNFGILFLLFFLFQLNMLSFAFMISTFVAKAASATTVGFAIFIIGFLTQLVTTFGFPYSSDYKKLYRTLWSLFPPDLFAKALNILGKATATPEDKGFSWNQRGECPSFETDCVITIDDIYKWLISTFFLWFVLAIYFDNILPNVNGVRKSVFYFLMPSYWTGKGGKMEEGGLFSFFGSSRPADDATPTDEDVLAEQNLVKEQAANNAVDPNVAVQIHGLRKTYPGTFSIGCCCKCSKSKPFHSVKGLWVNLEKDQLFCLLGPNGAGKTTTISCLTGITPITGGDAFIYGHSVRSTVGMSNIRRMIGVCPQFDILWDALTAKEHMELFASIKGLHPAAITSVAEESLAKVKLSQVTNARAGSYSGGMKRRLSVAIALIGDPKLVFLDEPTTGMDPITRRHVWDIIEEAKKGRAIVLTTHSMEEADILGDRIAIMAKGKLRCIGTSIRLKSKFGTGYIANVNFSGNGHMQSPNINSNTEAPVNPNIEAVKWFFKERLDVNPKEESRTFLTFVIPHHKEPLLTRFFGELQDREGEFGISDIQLGLTTLEEVFLNIAKQAELETSTAEGTLVTLNLSSGTTIQIPKGARFVGIPGTETEEHPRGIMVEVYWDQDENGSLCISGHSDEMPVPVHAELRRPPSLSRRASMDRGRPVGYMIDLNQVP

SEQ ID NO: 61798 - protein, 194 aa, Zea mays
  Coding DNA Sequence Number=SeqID_20019
MSPSSSVARRRSRHPAVARLTGDTRPSAASPSCTPIDYARSYDPSKACGGYIPGVYAVVVTVPIESRPRDAAQSPTRNQGLTAHSLARSPVTSRSIFFDRTPDRMSRAGWRCGHTSHTAARFSHSGEVNFPHIPAMQRDGGLASSLWSKEVTGSSLIGRRVDTELDAMRTHKLPARTMSSVTGMRMAPAGMGPM

SEQ ID NO: 61799 - protein, 76 aa, Zea mays
  Coding DNA Sequence Number=SeqID_20020
MHDPETQGITHCLQVVLLLATSKRAKTQSNNCHALPPNECSCELYESASSPFVGFGDLDNNTLKGLTSLLSVQQES

SEQ ID NO: 61800 - protein, 42 aa, Zea mays
  Coding DNA Sequence Number=SeqID_20021
MAVGVSEVFYAKAVLWKDMVAGVTCSSILAAPMDCQVGPCLG

SEQ ID NO: 61801 - protein, 152 aa, Zea mays
  Coding DNA Sequence Number=SeqID_20022
MGTRLIGGEGVPELATAHGFPAIDLQRRREILDRSEAITARKGHEQISPPAAQMDLHLPPWITPPFQHTNGCDFTAETVSVAIVTPVASVRVVETNDLVTGPHLPGSRNEARGENDWFVAERAMSADRLVPQVSAEKGERRAARDGVAGMWD

SEQ ID NO: 61802 - protein, 156 aa, Zea mays
  Coding DNA Sequence Number=SeqID_20023
MAVAMPPLAVLATAGRVPSPLQATVVAVAEETREACRELFVDDYLVGDVGMFNAQTGLLPGGTEAGQLVVAPVKPAEGRAPVKTSAVTSLGPWAQFCAEADGGGEVAGASAVKGMAAAIARWLRYAAIFADQVASRRCECCDLSISFQKEEAKTNL

SEQ ID NO: 61803 - protein, 67 aa, Zea mays
  Coding DNA Sequence Number=SeqID_20024
MGWQISYSPYESSLVGFGGLNDNLIKVNWIEPRMEARYLRGTRTRDKVKVTEVPKAKVNKRLCKIQG

SEQ ID NO: 61804 - protein, 241 aa, Zea mays
  Coding DNA Sequence Number=SeqID_20025
  Gene Ontology: Mol. function=RNA binding; Cellular component=nucleus; Biological process=nicotianamine biosynthetic process
  Homolog annotation: Hit_ID=Q8H2M0; Match level="QueryCoverage=98%, HitCoverage=98%, E-value=1e-111, Identity=73%"; Hit description=KH domain-like protein
MSGLYNQGFSPARTLSPQIRSNPDADSQYLAELLAEHQKLGPFMQVLPICSRLLNQEIMRVSSMVHDHGFSDLDRRRFRSPSPMSSPIVRPNLHGNGFGPWNGMHQEFNFVGRILGPRGNSLKRVESSTGCRVFIRGKGSVKDTEKEDKLKGKPGYEHLNEPLHILIEAELPANIVDTRLRQAQEVMEELLKPVDESQDLYKRQQLRELAMLNSTLREDSPHPGSVSPFSNGGMKRAKPSQ

SEQ ID NO: 61805 - protein, 345 aa, Zea mays
  Coding DNA Sequence Number=SeqID_20026
  Homolog annotation: Hit_ID=Q6QP54; Match level="QueryCoverage=48%, HitCoverage=46%, E-value=2e-26, Identity=56%"; Hit description =Putative kinase
HAKRENMTGKKSAGSGRTLSSESGNKYKEKSSASIKSHRRGDKKKKKMKKVVYYETDSSSPSMSGIESSTTSKRHESKKYTQTPNVGDKEYDSDEAAQIRHFNSQATSIFLASLCREEYNKGEQGRFVLNKGEEPQAMYNRLKTMVNQSEANRKSGPTSGTIGSSASPDPGLGLGLSPGRRRTLLRPTQGSDLGSAPEDGELRSARPRARTWAQPRKTANSAPPDPGLGLGLSPGRRRTPLRPTQGSDLGSAPEDDELRFARPQGSDSALASADGLRLARPRDSDLTPATEDRLNLDLGGASTSPNLGRGPATSTGGAIITLPRADSGYGGQDRRPIWLAPPDRR

SEQ ID NO: 61806 - protein, 163 aa, Zea mays
  Coding DNA Sequence Number=SeqID_20027
  Subcellular localization annotation: CTP_CleavageSite=21; ConfidenceScore=5.69e-01
MAGPRLSASSPHCTSRMPTTRASCVQRWMCRCLTGPLPGSTPLSCRSLTRGTHLASPLVRVPRSFSPRKTRAWLVDPGARIRLLRVTSRADLANATLEPRRASRRPNRIPVARPSLLPHVRYPLKYGAARPTMTPFLSPGQPQNREEKCVVAGVQGTGMGPPP

SEQ ID NO: 61807 - protein, 149 aa, Zea mays
  Coding DNA Sequence Number=SeqID_20028
MSGGSAKREMETGEKATSHKMAPSRRDPLLASSRIEGGDKNKKMKEVVYYETDSSSPSTSGPDAASVTSKRHERKKLRAPRGGLYPVCEESPQFGASRPYNDDHKRNTEVREESNTHKTQIRSTTMHTSEDLISKDNIGSSQLEWSSNH

SEQ ID NO: 61808 - protein, 279 aa, Zea mays
  Coding DNA Sequence Number=SeqID_20029
  Gene Ontology: Mol. function=nucleic acid binding; Cellular component= intracellular; Biological process=chromatin modification
  Homolog annotation: Hit_ID=Q6YUB0; Match level="QueryCoverage=82%, HitCoverage=83%, E-value=2e-26, Identity=35%"; Hit description =Putative zinc finger protein
  Subcellular localization annotation: CTP_CleavageSite=78; ConfidenceScore=5.43e-01
MSEQDGQHVGGSPPDAAIESFSQLPFVRPKPPQPASSSSPSSIRLFGFEVPPDAATSSTATSDATAASATVAGQAAASGAAGAGAGASDGTGGGRKFECHYCCRNFPTSQALGGHQNAHKRERQHAKRAQYQSAMAMHHAHYPGHPHAYPAFTSYHQQQRFGMARYEPPPPGPPPHYPSWSPQAAPPVVPRYYGRACSLSQPINGSPIPAAALWRVPAVTAAAPLVRQERPTPLSLGGRDEEEAMTGARRGNVVAARQVGSRSSSSSSTASQHERRRAD

SEQ ID NO: 61809 - protein, 168 aa, Zea mays
  Coding DNA Sequence Number=SeqID_20030
  Homolog annotation: Hit_ID=Q6QP51; Match level="QueryCoverage=37%, HitCoverage=30%, E-value=3e-13, Identity=70%"; Hit description =Putative growth-regulating factor 1
MAVAGGREQRSRRQPSLRPIRGQRENPLSRREDDAPVFRSSNGPRTRNGRPANRTPRRINSAAGKVAPLAGEGPGKGDTPKRIFLHEGTRLRASLLIRGSKAGPSEGFNSRLRACGLHTHYWSEVRRPAPRKGSTTASGYSGSVPTTDQGFEGWPPKGSQPPQTQSEG

SEQ ID NO: 61810 - protein, 291 aa, Zea mays
  Coding DNA Sequence Number=SeqID_20031
  Homolog annotation: Hit_ID=Q67U57; Match level="QueryCoverage=31%, HitCoverage=45%, E-value=1e-31, Identity=74%"; Hit description=Major intrinsic protein-like
MGYSSSDSLEHHSNRYCTGLLHQHGHQCCDSMGLASTPKLSSISGAKTETSSMDASMRTSSSPEEVDRSGELTVSISNASDQEREWVEEDEPGENSAACLAPTAVPLDRVRLTTAKSSLGRHGKLRLARPRARTQPRPRKTNSASPDPRARTQPRPRKTVSASPDPGLGLSLDLGGASASPDPRAQTQPRPRKTNSASPDPRARTQPRPRKTVSASPDLGLGLSLNPGRRTPPRPTPGLGLSLSLGRRSPPRPTKGSGSASTSLDLGGASASPDLGLGPATSQGRPSLPYP

SEQ ID NO: 61811 - protein, 225 aa, Zea mays
  Coding DNA Sequence Number=SeqID_20032
MASCSPLLVHVHRLIWSLTLSFCRMRQWHASCRFSDQNCDNVIAVSWDGGEGRRRSLPTHASPTQPARPTAATGTSGYEWRWGEALLATGGDEVNAIREDITPPHNACEQQKADSKSNRARPVPLPRPCSVLYDARHGLTVVPVDLYARVPVAEGNTTRLESGNHFRAKNKYRDGDPCKHSCQSEAQILRRRGRRLNAQHSTAQAGTGPSHLQRRRTVMAAATLM

SEQ ID NO: 61812 - protein, 166 aa, Zea mays
  Coding DNA Sequence Number=SeqID_20033
MDPNLGAIIIGAEITHIDANSVGATMCYLGANDDGAEARAAQMTTLDLPHSVLAVVVPLAYLPNSKTLLYKGFTMWTMEGMAKQCFIEISIVIQKLLSHTEKKKNRRTNGMLNGTWEFSHFDRKLKHEPSFREIYKWRQARLAPEFNNPIVQSSRNTNELNIGVFV

SEQ ID NO: 61813 - protein, 129 aa, Zea mays
  Coding DNA Sequence Number=SeqID_20034
  Homolog annotation: Hit_ID=Q6YUB8; Match level="QueryCoverage=97%, HitCoverage=31%, E-value=7e-25, Identity=51%"; Hit description=Major intrinsic protein-like
MALKASGAYRHCKPCAGSSAAASRRHHPYHHRGGSAFGGSDAGSASDRFHYAYRRAGSSADATTSMSVRTDFPAGDGEDDEVASEAAGGCGGKDDDAKEWVAQVEPGVLITFVSLAQGGNDLKRIRFRL

SEQ ID NO: 61814 - protein, 66 aa, Zea mays
  Coding DNA Sequence Number=SeqID_20035
MVASTSQARFGQVKSIQVHAVWFTACVQAADAPTRISGVNKRGWKYIKESQKKLHDAPKVDVAIAG

SEQ ID NO: 61815 - protein, 330 aa, Zea mays
  Coding DNA Sequence Number=SeqID_20036
  Homolog annotation: Hit_ID=Q1RX01; Match level="QueryCoverage=32%, HitCoverage=59%, E-value=8e-35, Identity=65%"; Hit description =Thioredoxin domain 2
  Pfam annotation: Domain name=Thioredoxin; Domain location=217-322; Score=97.3; E_value=4.7e-26; Accession=PF00085.10; Description =Thioredoxin
  Subcellular localization annotation: CTP_CleavageSite=81; ConfidenceScore=5.18e-01
MAPPRSSGGDQTTEAGGASNLPPSAATGAASATLARTTAPRPPPARRPPAAAADAMPFPDDPRAPRLDRRVKRRCGPRRPQSASPWTRSPGTNPRRSSPCAGRVMLREKNKTKISPLAHKSRPRNRTGGVLSTGNTFEKIPLLSSPRAASAPLMSSAPSTTASTIAASIHTPFSSGPRGARLPAALRLSLAQLRSAGCRAAPGRLARPRARVRCGAAARFIGQGEFPAEVLESELPVLVDFVADWCGPCRLIAPVVDWASEEYAGRLKIVKIDHDANPQLIEEYKVYGLPTLILFKDGQEVPGSRREGAMIKDKFKEYLEPLLTTITTAA

SEQ ID NO: 61816 - protein, 598 aa, Zea mays
  Coding DNA Sequence Number=SeqID_20037
  Gene Ontology: Mol. function=binding; Cellular component =intracellular; Biological process=metabolic process
  Homolog annotation: Hit_ID=Q2QNV4; Match level="QueryCoverage=85%, HitCoverage=61%, E-value=1e-82, Identity=28%"; Hit description =Pentatricopeptide, putative, expressed
  Pfam annotation: Domain name=PPR; Domain location=108-142; Score =33.2; E_value=9.1e-07; Accession=PF01535.11; Description=PPR repeat
  Pfam annotation: Domain name=PPR; Domain location=179-213; Score=2.3; E_value=4; Accession=PF01535.11; Description=PPR repeat
  Pfam annotation: Domain name=PPR; Domain location=244-278; Score=1.9; E_value=4.5; Accession=PF01535.11; Description=PPR repeat
  Pfam annotation: Domain name=PPR; Domain location=310-344; Score =26.9; E_value=7e-05; Accession=PF01535.11; Description=PPR repeat
  Pfam annotation: Domain name=PPR; Domain location=411-445; Score =47.1; E_value=5.8e-11; Accession=PF01535.11; Description=PPR repeat
  Pfam annotation: Domain name=PPR; Domain location=446-480; Score=3.9; E_value=2.6; Accession=PF01535.11; Description=PPR repeat
  Pfam annotation: Domain name=PPR; Domain location=482-516; Score =11.5; E_value=0.32; Accession=PF01535.11; Description=PPR repeat
  Pfam module annotation: Pfam domain module=PPR::PPR::PPR::PPR::PPR::PP R::PPR; Domain location=108-142::179-213::244-278::310-344::411 -445::446-480::482-516
MPLRPRSPAAVRLPPLAASVEPRAFPAATTSQQQQQCLPPCPYAALLQRSAATADPCLAAALHAALLKPRLLASHVFLHNHLLIAYFKCRLPHLGLRVLDEMPRRNAVSWSAAIAGLTQGDRARDALALFRRMRLAGCPPNEFALASALGAISLAPVGTGHARQLYALSVRLGFGSSVFLTNAFLAAMARHLQLEDAVRLFDGASARDIVSWNTLLAAFARHWSVQGWILWRRMVREAVGADGFSFSTILSGLAVTASLAGGLQVHAQLVKSGFCDDVCVGNSLVEMYMKSKCLADGVMAFAEIRCKDVVSWTGLAAGCLHCGEPAKAIGILGQMMLDGVMPNNYTFATSANACASLTDLDEGRKVHGYVIKLGDDSDVGVNNALIDMYAKCGSVACAHKVFQSMQQRPVISWTAMIMAFAHNGRAREAVEVFDDMLLRGVAPNRVTLVCVLYACSQGGFVDEGWIYFNAMKDKFGIQPGEDHYACMVDLLGKAGQIEEAEELISGMPFRPGVLVWQALLGACHLHGNEAVGRRAAEHALALENDDPSTYMLLCNTLAGQHDWDGARSVRVLMGSQTLKLPGSSWFQSMSDRSQACIR

SEQ ID NO: 61817 - protein, 56 aa, Zea mays
  Coding DNA Sequence Number=SeqID_20038
  Subcellular localization annotation: CTP_CleavageSite=36; ConfidenceScore=5.35e-01
MAQQARPGFWPGFTGPGPGRAGRPVWPSLAWSVLCTAERRSSLVSFMLGVQITGSR

SEQ ID NO: 61818 - protein, 99 aa, Zea mays
  Coding DNA Sequence Number=SeqID_20039
MKIEEQNYTKFLDFWICAYLDWNRECLDSGREIWVGEVRNLELDSRVSGLEPRVYWSLEHIHCCRSINSSVIRPLHAQQRCHMRKSPAGSILENFGSKA

SEQ ID NO: 61819 - protein, 293 aa, Zea mays
  Coding DNA Sequence Number=SeqID_20040
  Gene Ontology: Mol. function=pepsin A activity; Cellular component =cellulose and pectin-containing cell wall; Biological process =proteolysis
  Homolog annotation: Hit_ID=Q9LHE3; Match level="QueryCoverage=95%, HitCoverage=57%, E-value=1e-72, Identity=54%"; Hit description =Nucleoid chloroplast DNA-binding protein-like
  Pfam annotation: Domain name=Asp; Domain location=1-290; Score= -152.9; E_value=0.00014; Accession=PF00026.14; Description=Eukaryotic aspartyl protease
MNSSSACGDGELGGCEYEVSYADGSYTKGALALETLTLGGTAVEGVVIGCGHRNRGLFVGAAGLMGLGWGPMSLVGQLGGEVGGAFSYCLASRGGYGSGAADDDAGWLVLGRSEAVPEGAVWVPLVRNPRAPSFYYYVGLSGIEVGDERLPLQAGLFQLTEDGAGDVVMDTGTTVTRLPQEAYAALRDAFVGALAGAVPRAQGVSSSVLDTCYDLSGYASVRVPTVSFCFDGDARLILAARNVLLEVDMGIYCLAFAPSSSGLSIMGNTQQAGIQITVDSANGYIGFGPANCG

SEQ ID NO: 61820 - protein, 291 aa, Zea mays
  Coding DNA Sequence Number=SeqID_20041
  Homolog annotation: Hit_ID=Q10RM9; Match level="QueryCoverage=93%, HitCoverage=36%, E-value=9e-71, Identity=50%"; Hit description =Expressed protein
MPYKKTTSTLEGLIADDSHHQPSSAHIEDGAANNGSRDISGDSSSVDLKSPVPLGTHADVMEDEGWITIPCSLRHFLKVGTTYQKWFSCRLWTVPSFFQVPILACLSASKQDVQVISPFRIAAVMSKNGTSMQNFTNKSSPVSANGHDNGAAGESGYQDVEPNGEASPSGHDILETQSLLQMEDHKQQIEHVLRRFRESNFFVRIAESVEPLWSKKSVTSTTMADERSDNQGNSKSSRSNVYNTISDKGVFDGNTSGGVARDVVKCYSLQNGDIVFNQAAGTYWKLTQICY

SEQ ID NO: 61821 - protein, 161 aa, Zea mays
  Coding DNA Sequence Number=SeqID_20042
  Subcellular localization annotation: CTP_CleavageSite=21; ConfidenceScore=5.04e-01
MAANAPGGVHGSLCLPASRVRASNCTEVRGRMGGFICAAHTHTSSFYATLAHTTRLDTWIPIRTCALVLCSALLPQAAVHAVVGTCLVAYMHATPQKGMGRILFAVRGRVPLPPLAAGRRPGRGEGPAEQKGVGNSRTAERGKKNGYPVGYEDLTDSKELC

SEQ ID NO: 61822 - protein, 43 aa, Zea mays
  Coding DNA Sequence Number=SeqID_20043
MATTSVVLGNTMVACYVRSGDMLFHDLMAVVTGAVWTFGVSGR

SEQ ID NO: 61823 - protein, 365 aa, Zea mays
  Coding DNA Sequence Number=SeqID_20044
  Homolog annotation: Hit_ID=Q10RM8; Match level="QueryCoverage=87%, HitCoverage=75%, E-value=1e-121, Identity=58%"; Hit description =Expressed protein
MMFSGGSMQVVLQVNVSVNKLEDPVLEVLQFEKSISNNSSSVQTPNNIRPPPISESQEFMPEKPAKTPDIINDGQLSFRGVPLEPERYSNIAPTHAKDIVVFIDAITIVFEEASKGGAPLSLPIASIEVGHGHSLPNLALRRGEEHSFILKPATMSSRERKTNSHAPLALSLPTMTGATLNTHTPKAGEPYADLSDQYAVLILTLEATNMTSENLTLTVLAPEASGSSSVVSLNSSPTTPNGSFDGVNESSKRSGLGKDGIGFRRLNSVLATPKEGDNGGNRMSNASGCTHLWLQSAVPLGCVPARSSTTVKLELLPLSDGIITLDTLQITAREKGLAYIPEHSLEIHATSVLEAESQIMARIER

SEQ ID NO: 61824 - protein, 123 aa, Zea mays
  Coding DNA Sequence Number=SeqID_20045
  Homolog annotation: Hit_ID=Q1S7T7; Match level="QueryCoverage=81%, HitCoverage=44%, E-value=4e-11, Identity=42%"; Hit description=Chain A, X-Ray Structure Of Gene Product From Arabidopsis Thaliana At3g22680
  Pfam annotation: Domain name=DUF1950; Domain location=1-121; Score =42.1; E_value=1.9e-09; Accession=PF09187.1; Description=Domain of unknown function(DUF1950)
MKCIPVPAYCDSVTPFTLWLGLAGSLKQYLTNVLLKTSTSLRGHLGPKSEEPSHYLTNVLLKCGTNKGLRLGSDVEHRHLNDIIHPSRAETLIWGPLKSHRGIITEENPKPRGRFRSLCPRQR

SEQ ID NO: 61825 - protein, 125 aa, Zea mays
  Coding DNA Sequence Number=SeqID_20046
MAQAEALQTTDMTSKVTPHNSTTLEEMDPKQENNKKVSFYTVETLGVVLEYMGSLESLLTYHKDVDEKLLYETFSVFGVIVTNPKDGFKNGSNMPIEMVMARMTKKINRIPIYFYVKDEILNNYF

SEQ ID NO: 61826 - protein, 482 aa, Zea mays
  Coding DNA Sequence Number=SeqID_20047
  Gene Ontology: Mol. function=catalytic activity; Cellular component =intracellular; Biological process=metabolic process
  Homolog annotation: Hit_ID=Q2L3D0; Match level="QueryCoverage=85%, HitCoverage=69%, E-value=7e-60, Identity=31%"; Hit description =Selenium binding protein
  Pfam annotation: Domain name=PPR; Domain location=185-219; Score =16.6; E_value=0.081; Accession=PF01535.11; Description=PPR repeat
  Pfam annotation: Domain name=PPR; Domain location=255-289; Score =37.5; E_value=4.7e-08; Accession=PF01535.11; Description=PPR repeat
  Pfam annotation: Domain name=PPR; Domain location=290-323; Score=5.2; E_value=1.8; Accession=PF01535.11; Description=PPR repeat
  Pfam annotation: Domain name=PPR; Domain location=72-106; Score=34.3; E_value=4.3e-07; Accession=PF01535.11; Description=PPR repeat
  Pfam module annotation: Pfam domain module=PPR::PPR::PPR::PPR; Domain location=185-219::255-289::290-323::72-106
  Subcellular localization annotation: CTP_CleavageSite=48; ConfidenceScore=5.02e-01
MRHDLVALLLRASSISVSGGARAAQTLHPLALKSGRASEARVATALAVAYARWGLVAHARRVFDEAPRRDLVLYNAMVSCYASHGLAREAWALFAAARRSGIAPDGFTFSALLRPPPRRGRHPTAGAVDDGLLLRMGALAHSLVLRLGLLADVVVATALLDMYAKCGRVDEARWVFDAMAVRILVSWNAIVVCYGRVGGGKDAVELFRWMLRDGAAARMSSRLPVANAVITAYGKTGFAREAGQMFAMICDPDVVTWSCMVSSLAYLGLCKDAVHVFERMLQQGVQPDSVAFLGVLSACSHAGLVEEGLHYFLMMARGYNIDPNSQHLACLVDLLGRAGRIQDAYNIVIKLSCENNADIVGAFLGACKLRGKIELAKWAADRLLCLEPSEAVNYLLMSNAFAAAGAWNELAEVRSVMRHRCGSKVPGCSWIEVGGTVQTFVSNDVVLHQSIEMQQMVQLTISEAQKECNEDTTCGDPILVQE

SEQ ID NO: 61827 - protein, 378 aa, Zea mays
  Coding DNA Sequence Number=SeqID_20048
MADRRGPCGHPAVSWVAAEDCESTSNSDLGGMGVTSRSRSPNSVRYKSEWFYVKNLAGSAPCFIGQEPVSTDDWNRGMEPGRKAFDGSPEGIDSLAPSLPPLPEGVAVQAARKRKSSDGETLGPLMRCLKVKKGKGVTHGRGSRSSSWLGGSIFHDFWWSRNCGVGGGPSRHGDAATSSNIPTDMSGSTVDPALVATPSINVATVITASGMAQAAACPVTPLDPAGCHVEATSRVMPQSFVPLPGALGKVTTGKRSSSTYVPHKSVRDIALAVRAVPSSPQAFGLQPLGGELLEVGIVAPGVPSPERQSALPPPLLALAPPPTVITGVCGSFEGDEAETREGRRLESALLRADAALETIGCMLSVGTCSPGQVDPTGE

SEQ ID NO: 61828 - protein, 378 aa, Zea mays
  Coding DNA Sequence Number=SeqID_20049
  Homolog annotation: Hit_ID=Q2QWL1; Match level="QueryCoverage=61%, HitCoverage=76%, E-value=5e-25, Identity=38%"; Hit description=SNARE domain containing protein, expressed
  Pfam annotation: Domain name=SNARE; Domain location=265-327; Score =53.8; E_value=5.7e-13; Accession=PF05739.9; Description=SNARE domain
MKRRRRPAVVALQGVVARRQRRGRRVARAVVQIGADDRPFEIETDHTKNPSRNQLRHRPAKIHLATSSAAPQLRHRLARMNDLMTDSFVAAAAKAQQGGAVAPAGGDDPELGAFLAEVDAAKTEMIALRDELSHLRSAHEASKNAVVGSGEGRAATQAALVRLLVSARRLRARLASMDRRAPAPAAQTRSGAPRPRARPHRGRAGPPAAGLRGAPERRGPPVPGPWPGDAPTEEQLDRLLASTDGSSDAAMRAALLSAAGAEQDEAAKEVAEVERGLLELQQLFLDMAALVEVQGAPLDDIEQQVGTAAGHVGAAEAELREARRLQGAARRRRVCLAGGITALLLVGVAVAVLVALMLARRGAGGKLVLQLAMDLPAR

SEQ ID NO: 61829 - protein, 63 aa, Zea mays
  Coding DNA Sequence Number=SeqID_20050
  Subcellular localization annotation: CTP_CleavageSite=32; ConfidenceScore=5.06e-01
MAADDVGGALDLHFLSLSRFLPPLETGSATTRAQKVASAAVKIAMAAAFVTGKMTELTGGAHV

SEQ ID NO: 61830 - protein, 56 aa, Zea mays
  Coding DNA Sequence Number=SeqID_20051
MADLRTARPSPVWWMDSHPPTRQHVAVRLLRKAGIGKGDISKGSFSAKETGPEPSY

SEQ ID NO: 61831 - protein, 215 aa, Zea mays
  Coding DNA Sequence Number=SeqID_20052
  Homolog annotation: Hit_ID=Q6I5Q4; Match level="QueryCoverage=30%, HitCoverage=12%, E-value=1e-08, Identity=49%"; Hit description =Putative cytochrome P450
MGKPPSTRGWGGNPDGEREKRRWVAKRMVGRGPRLEMNGGTSMGGREPLATSSKKSRGLYGHQSSEVSRVIGAFSYSFHYSNYGTIHITHFHDKNASFTGENVRKLVRSPRPSMHDENVRKLSDSSGWCFPDMLVALAVFCACSNLQLDDPSPFTEAAPERRMGDDVTHGILELGPHIYLPHTLGASRGHPLSHLRLSSLQHAAKAGNILCKTIN

SEQ ID NO: 61832 - protein, 630 aa, Zea mays
  Coding DNA Sequence Number=SeqID_20053
  Gene Ontology: Mol. function=structural constituent of ribosome; Cellular component=intracellular; Biological process=translation
  Pfam annotation: Domain name=DUF1666; Domain location=391-629; Score =472.8; E_value=4.3e-139; Accession=PF07891.2; Description=Protein of unknown function (DUF1666)
MPPLLFRSLASLNLLLLVGYLLLVLLAKLFARLHHRATAKDRTSNWYDGRCDHRTEALATDEAEYAAAAADIVQAQQADTLSWFDEAAFEDSTLVLGDEGKDHPYAATAATARCCLQVVESNFPMQESARISPRNQNRRVDVDVEAEPMQQQQHVLEEAKGIAVDVQQATVLEPERRRSAPAPVVVSPEDVSIQGSLLGNKQESNRPGEDTRRDAHAEHEDEEGQQGKSLAEGHHNVKLFVNNRALADARKLLLEGAVNGAQAQLQLQLQDDKDNKNGDSCRLDASTLTSGSSTSKSSVEWQSSTVTKDSETEYPFSCSSRRSSARWEPYTLFRKYDEDMVYFHRVGAQKLTETESFRSIKYQPRSVSERIVHKLTPSWPSTRIVGLRDPYPELERAYVAQVCLTWEALNWNYTSFRRHNGSDDGSVAARCCPARVAQEFQQFQVLLHRFVENEPYEHGRRPEVYARTKNSTPKLLLVPEFRDEDDEKDDLISAVQFLLILEESIRTFMAFLRADKRSHYEMFRETVKRRASAMDQTPVVTLKKANKKKKSRLKDLTRPRRCLRRTRLRQQEELSILLGLIDLKVVARVLRMPEITDQQLHWCEEKMNMVRIDLVGKMQRDSAPLFYPAH

SEQ ID NO: 61833 - protein, 299 aa, Zea mays
  Coding DNA Sequence Number=SeqID_20054
  Gene Ontology: Mol. function=nucleic acid binding; Cellular component= intracellular; Biological process=chromatin modification
  Homolog annotation: Hit_ID=Q9LG97; Match level="QueryCoverage=98%, HitCoverage=97%, E-value=4e-59, Identity=51%"; Hit description=C2H2 zinc-finger transcription factor-like
MACGLQEASREPIGPEQLAGGVRQASGRELHDHRHIKLPCRTGIKKKGDGGKDDAAKVYECRFCSLKFGKSQALGGHMNRHRQGKIIHHYSPSSLHNAYISLYFMGLLILISGLPLPERETETLNRARQLVFGNESLAAIGAQAQMTMTDVNMAGAAPPTVLGGNFRGGASATGGSSVGDPCLPFRPVHPGLSSQPSYHYLYTAPSTLHPMSYPPATYPGPPRQPAVGDYVIGHAVSAGGGDALMQSTHRSSFSCFGAPLTAPPAAAAAGAAAAAMNVQADKLNCNCSFGCGGHSRNNN

SEQ ID NO: 61834 - protein, 130 aa, Zea mays
  Coding DNA Sequence Number=SeqID_20055
MQGRHNRLRDSGSLAGDEEQGHGVYAAEKASAGLCGAPVLLLQTAPAPREPALQRDYTTVVPSDGGVPWRDSEIDDPRNAFDFDSPGVANRIVPRGTSGGAVLILATAVKCRANITIWYRLILLSYLFGP

SEQ ID NO: 61835 - protein, 195 aa, Zea mays
  Coding DNA Sequence Number=SeqID_20056
  Homolog annotation: Hit_ID=Q9LG92; Match level="QueryCoverage=77%, HitCoverage=51%, E-value=2e-53, Identity=69%"; Hit description =Putative seed specific protein Bn15D17A
  Pfam annotation: Domain name=DUF260; Domain location=49-127; Score =48.2; E_value=2.7e-11; Accession=PF03195.5; Description=Protein of unknown function DUF260
MTRTKPVSPSWLDMGQLGNLAGHHGPTLETSFPLPGKPEALAVRGSAAPTRRATPTVFLAKFYGRAGLINLITAGPEHVRPAIFRSLLYEACGRMLNPVYGSVGLLWSGNWQLCQAAVESVLRGIPIAQPPPTATGLPPLRSCDIRHVARREAGCGSVDAGLHRMANSLRGQFKRSGAQLRSAESVSIELVFYQP

SEQ ID NO: 61836 - protein, 106 aa, Zea mays
  Coding DNA Sequence Number=SeqID_20057
  Subcellular localization annotation: CTP_CleavageSite=83; ConfidenceScore=5.39e-01
MVAPGGRSMLTLVLVALSSVFLTYNVLISIHSSIQVTLPSSFPTNIASSRRFGATSPPSGGHSTSWGPLTPTLAMVGLVVPPVAATASAGPCATLAAPGVDVSRLM

SEQ ID NO: 61837 - protein, 45 aa, Zea mays
  Coding DNA Sequence Number=SeqID_20058
MDPGTHMAYLSVIIIYLYAHDFQQAQKSYNDCSDFNLNAENDRSK

SEQ ID NO: 61838 - protein, 63 aa, Zea mays
  Coding DNA Sequence Number=SeqID_20059
MEMMAILAKFTSAMLQWVPAVATHIQQQTEQVAPSMKIGVVIFSGSGRMYEYPSPTWRTCVAI

SEQ ID NO: 61839 - protein, 140 aa, Zea mays
  Coding DNA Sequence Number=SeqID_20060
  Subcellular localization annotation: CTP_CleavageSite=19; ConfidenceScore=5.18e-01
MRVAPLPRGGAAPPLPPIAARQRGPWRGPPVRPPGVAPERPRGLERFLECLSVRIGSLDDHPGKQCNHEGGDDEDNVGFYCDYDYASPLQPNGTIAEYVDVYSPLLYTPNPPGCPRCNHCSGEDEVIEEDFQEFQEYDEF

SEQ ID NO: 61840 - protein, 98 aa, Zea mays
  Coding DNA Sequence Number=SeqID_20061
MPLELLVTRRRGQLVSAVVEVAQGGEEGVLLDLCLLENPMNRMDTSAISSSLRLATYSSMIDSKEDRANKAGEGLEAKPPPKTKIMVGAPGFSILARV

SEQ ID NO: 61841 - protein, 77 aa, Zea mays
  Coding DNA Sequence Number=SeqID_20062
MALGDDAVGHDGQDIGDGSAYEVSHFADDLVVEVEELMAALASQDKFLRLSTRERKDFKIQKFDIQTLVELALGFEN

SEQ ID NO: 61842 - protein, 85 aa, Zea mays
  Coding DNA Sequence Number=SeqID_20063
  Subcellular localization annotation: CTP_CleavageSite=53; ConfidenceScore=5.03e-01
MSIARWSITTAVDLPYIECGSLYDIISGENSSQMFTFSTSLRSAFQSGVSFTKAMNSNCSRGSRGRDRSAAVPRLPKIKPRLSKK

SEQ ID NO: 61843 - protein, 178 aa, Zea mays
  Coding DNA Sequence Number=SeqID_20064
MNIALVVFTLTWHLFLRHACTFSFSQAEVFENKSPTAAAPHPLDKGKGAASSSSARGGAGMSEEERRRQLRRADESFVSDPSPSGTEGVDSQKRQRAACGAEETWLAGLGHAEARQPSATATIRSAATTTTATVGFAAATNTRGRSPSGPPAAATTTAAVAKAMAAPLPRPLEGPGPK

SEQ ID NO: 61844 - protein, 231 aa, Zea mays
  Coding DNA Sequence Number=SeqID_20065
MSIRGKPPPPPQPCYCGCSWRRLRVADEVLGPFIGGCVDVHLPKQLFRGGGSFLEDGLDKGQIVTPAIEIFDHGSLRDGRDAIPHGALLQRCISKGVWSDPGRWIRDSDRPQPSILDLRFRLGARRDIAIYSSWVVFNHRPGYPATPAPTAKPRWRAPRHSALASQFECRYVLCAEDRAKLMKTSLTEDGVAVRAAHGWVRIRNGGHSDEQLVADQGTPSPAKTTSSILEA

SEQ ID NO: 61845 - protein, 38 aa, Zea mays
  Coding DNA Sequence Number=SeqID_20066
MSSGAPMAGRNLSYISNNELVDNPCVKREVDAGGGLYG

SEQ ID NO: 61846 - protein, 123 aa, Zea mays
  Coding DNA Sequence Number=SeqID_20067
MQAACNCTTGMHPFDFDASSMEAQAHTSCNRRTGYYVRKTAPPLTPMSRLLDCETGATTRGNPVHGPTVPTKRIGHGAGDTFGKRSGRRFTSAMMTASKKGPGKGILRKGSFSAKEAGPEPSY

SEQ ID NO: 61847 - protein, 186 aa, Zea mays
  Coding DNA Sequence Number=SeqID_20068
MVGARFILIQAERLCIQSSAACATDTFVDQCSEEGLQAGQEGGRPAVASSKKEPPDDGKIERSTLDAAEAEAELLQAQLAEFDGLVCLMEPELSSPYRFANQATRLILVRGGGCDLRLLDVSARVYENVELRTHWGTVVALAIVLLHFGGNFCNVIDPPEGSPTVDLELLSVDFDDVANTVFEVVL

SEQ ID NO: 61848 - protein, 620 aa, Zea mays
  Coding DNA Sequence Number=SeqID_20069
  Gene Ontology: Mol. function=ligase activity; Cellular component =cytoplasm; Biological process=response to auxin stimulus
  Homolog annotation: Hit_ID=Q8LQM5; Match level="QueryCoverage=94%, HitCoverage=95%, E-value=0.0, Identity=87%"; Hit description =Probable indole-3-acetic acid-amido synthetase GH3.1
  Pfam annotation: Domain name=GH3; Domain location=23-570; Score =1089.3; E_value=0; Accession=PF03321.4; Description=GH3 auxin -responsive promoter
MPEAPTTKINPPAGGFAPGAHREALEFIEHVTANAGKVQRRVLAEILSQNAPAEYLRRYGVPGGSADAVEAFRRVVPLVTYEGLQPDILRIANGDASPILSGKPISEFLTSSGTSGGERKLMPTIADELDRRSLLYSLQMPVMSQSVPGLDKGKAMYLLFVKAESRTPGGLVARPVLTSYYRSRQFLERPHDPYTEYTSPNEAILCVDSYQSMYAQLLCGLVHRADVLRVGAVFASGFLRAIRFLEKHWPRLCRDIRTGTLDPEITDRAVRDAVARVLRGADPALADEIEAVCGGSSWESIIRRLWPRTRYVDVIVTGAMSQYIPTLEFYGGGLPLACTMYASSECYFGLNLNPMCKPGDVAYTLIPTMCYFEFLPLQCSNGKAEPSHRDLVGLVDVKLGHEYELVVTTYSGLYRYRVGDVLRVAGFKNEAPMFKFVRRQNVALSVDSDKTDETELHAAVSGAVQHLAPFGASLVEYTSYADAATIPGHYVLFWELRAGSTAVPASVFEDCCLSVEEELNSVYRQCRACDKSIGPLEIRVVSEGTFDKLMDYAISRGASIKPVQGAALRAPRPRRGAARREGAGQAGRLNSITGQRSTDTPRSDICVSNSLISAFLHMCP

SEQ ID NO: 61849 - protein, 109 aa, Zea mays
  Coding DNA Sequence Number=SeqID_20070
MALTPTRDTKGHCTRRGRPTMMRDSSGEQSREQQSSNDQIKGTDGLLTLRGSVGVTEQRCRHKDTTGRRRRGSGSARIALVSADRTKQRGEGHTEGCPDEAPQSLGTQM

SEQ ID NO: 61850 - protein, 310 aa, Zea mays
  Coding DNA Sequence Number=SeqID_20071
  Gene Ontology: Mol. function=peptidase activity; Cellular component =integral to membrane; Biological process=proteolysis
  Homolog annotation: Hit_ID=Q0WVZ7; Match level="QueryCoverage=82%, HitCoverage=30%, E-value=1e-76, Identity=53%"; Hit description=24 kDa vacuolar protein-like
  Pfam annotation: Domain name=Peptidase_M28; Domain location=156-304; Score=88.9; E_value=1.5e-23; Accession=PF04389.7; Description =Peptidase family M28
MDKLIQIIRMPRGQGSSVSTRENPKVDRATDSNDDSRKNRRGAYLLLGLLIVFLHGSWSVYQIQFGSLPLPLDAEQAGKRGFSEASALKHYVYAVAEKIKKTAHWEVDVQLELFHTDIGANRLSGGLFKGKTLLYSDLKHVLLRVTPKYLPEAEENLILVSSHIDTVSTTEGAGDCSSCVGVMLELARGVAQWAHGFKSGILFLFNTGEEEGLDGAHSFITQHHWRNSVIFAVDLEAMGISGKSTLFQGTDHWALESFAAVAKYPSAQIASQPQTNVFGAKNEHEEKGIFFVALVKVVPDLSVWCCTLLS

SEQ ID NO: 61851 - protein, 87 aa, Zea mays
  Coding DNA Sequence Number=SeqID_20072
MGADRRAKGAGRACAKRYPQSRSCDQDRMGEIRPGRDERLRAALLLSTEVRSPELRQARARVASGSQGLGREGEDAMRTTNQADSSA

SEQ ID NO: 61852 - protein, 336 aa, Zea mays
  Coding DNA Sequence Number=SeqID_20073
MVFAPAKPRRPLPMARHAARHGIRPWCGLGTATPAPAALHARARPWCGLGTATLALAALRTRAWPPVSWPRHRGTPPYDGHTAGAPQRAHSRRWLRAAPVRVRGSGPWWLGVPTLALRPGTAPRLALPATTHSGARAPASSSSMGSDHVTAQYGRNSPSQCPTSLRRSGPNNACERCCKPATATIAWSGAMHHYGGGLLSPASGHSVAAMRGPRSAFRCCRRLARRCHAVTCERKRHIPITGMHTEMGSGTTLVEQTCIFNLLDQKESPDYIHVKGCLSRDTRISSERMLRRSTKGKHFMPASPHVYRTRNKQALFNITQFIQNQTFHARQTRGYK

SEQ ID NO: 61853 - protein, 52 aa, Zea mays
  Coding DNA Sequence Number=SeqID_20074
MEEDGVEKDAEQQVEVVLGAIVQAVDGKHVEEQQVGCSPTCRCWRFCLLAFA

SEQ ID NO: 61854 - protein, 34 aa, Zea mays
  Coding DNA Sequence Number=SeqID_20075
MAHSGGDRMARADGATGWLGQTQGAKPSWTPLAD

SEQ ID NO: 61855 - protein, 133 aa, Zea mays
  Coding DNA Sequence Number=SeqID_20076
  Gene Ontology: Mol. function=DNA-directed DNA polymerase activity; Cellular component=intracellular; Biological process=DNA replication
  Homolog annotation: Hit_ID=Q8S9E2; Match level="QueryCoverage=67%, HitCoverage=17%, E-value=5e-18, Identity=34%"; Hit description=PolI -like DNA polymerase
MNMYQHIRETVKEEKVILEWHPQPDQEKPSVLLLKIFVKEEKDTPKLWYSNRRKGTAADVAICAMLEIDRNTRLKELGWTLLMQLFHHYIATISIMQISIYATIFMVSSLESTSHACRKKFSRTSSIIRHAPP

SEQ ID NO: 61856 - protein, 154 aa, Zea mays
  Coding DNA Sequence Number=SeqID_20077
MAVMGSTTEKMYLCQMVNTRKGGGIDLPPNRHTQRIFRQPQPQPVEMDPPPPPPPVGVDPIVAAKGVLLRVLPVPGKSKPLAPSAADGVLPSSQVPAGQQQNQGSRAPRHRAGAQGRKASPSVIRPLLLPVGGFPGGTGIGRRQVGQGHAQDAL

SEQ ID NO: 61857 - protein, 180 aa, Zea mays
  Coding DNA Sequence Number=SeqID_20078
  Subcellular localization annotation: CTP_CleavageSite=45; ConfidenceScore=5.11e-01
MPTVWALAPSFGLCGPLAFIALGMVRLIVLRPASALSLLRGDFFAAPMDSSKRLVEERSLVSRPLRQKMINLGQVVLMGQRKDFGMSICQGRIPTLSSQTASDLRGCLAATHVTLEVADGEVADLRSRLVEADRCVMGQYCPLLSWRSLLGYLDLSLSFLELELEVAGLREGADEVVTFV

SEQ ID NO: 61858 - protein, 152 aa, Zea mays
  Coding DNA Sequence Number=SeqID_20079
  Gene Ontology: Mol. function=binding; Cellular component=ubiquitin ligase complex; Biological process=intracellular signaling cascade
  Homolog annotation: Hit_ID=Q6ZIQ0; Match level="QueryCoverage=97%, HitCoverage=48%, E-value=2e-52, Identity=63%"; Hit description=Arm repeat-containing protein-like protein
  Pfam annotation: Domain name=Arm; Domain location=27-68; Score=33.6; E_value=7e-07; Accession=PF00514.13; Description=Armadillobeta -catenin-like repeat
  Pfam annotation: Domain name=Arm; Domain location=85-125; Score=10.1; E_value=0.66; Accession=PF00514.13; Description=Armadillobeta-catenin- like repeat
  Pfam module annotation: Pfam domain module=Arm::Arm; Domain location =27-68::85-125
SLVRLLSHADPLLQEHGVTTLLNLSICDDNKATIVEAGAIRPLVHALKSAASPTARENAVCALLWLSQLDGASAVALAPSRCCSARENRQHGVETGAVRPLLDLMADLKSGMMDKAAYILHSLVNSGEGRAAAIEEGDIPILVKVVEVGTSH

SEQ ID NO: 61859 - protein, 113 aa, Zea mays
  Coding DNA Sequence Number=SeqID_20080
MAGRRDGRVAAGVIALHRGGLTQSKRIFARRCSLPDHPDPGANRGVDGSSAIFVKDKVVFLNRIYSLYINLQPYYWIIGSTPNGFKDIVRLKWLHSTVTIPGFRFSFIHQEQV

SEQ ID NO: 61860 - protein, 52 aa, Zea mays
  Coding DNA Sequence Number=SeqID_20081
MAPPWTGYNAAVGKKSKDRWILEWDCGVMRYIIVLIIVHDKTIVLIGTWSLT

SEQ ID NO: 61861 - protein, 197 aa, Zea mays
  Coding DNA Sequence Number=SeqID_20082
MVGDADTILGTREPTLDGYKKGVARILILPLFSVNSQIVPTKPTPTIVVWAERRRTGQAFPFADLGELSGRGASRVRGESVRGLGRANQESVREELLIGVSPTTENRVVPWATSSSPPYLVSTSLGALCLYAQRVEGNRGSFGLGFGGSAIPGHGSAAEQGRATALRWKLSVFGIRRWIRNQRPRLGLEYLFGAVRS

SEQ ID NO: 61862 - protein, 112 aa, Zea mays
  Coding DNA Sequence Number=SeqID_20083
MSILDCFALQVVHLSTVVGLTTDYWCLLWCSLSRWGIDCCRSMHDLLLELALLDCSDWLLGQEDELSGCSDVGTNFLLAGCSDGTAAAEETASGTAVAGCDDDAGADVGDLA

SEQ ID NO: 61863 - protein, 244 aa, Zea mays
  Coding DNA Sequence Number=SeqID_20084
  Pfam annotation: Domain name=zf-CCCH; Domain location=126-152; Score =18.9; E_value=0.0042; Accession=PF00642.15; Description=Zinc finger C-x8-C-x5-C-x3-H type (and similar)
  Pfam annotation: Domain name=zf-CCCH; Domain location=63-88; Score =25.8; E_value=0.00015; Accession=PF00642.15; Description=Zinc finger C-x8-C-x5-C-x3-H type (and similar)
  Pfam module annotation: Pfam domain module=zf-CCCH::zf-CCCH; Domain location=126-152::63-88
MERERNAATAGAGRWEAPDGGRQKEHQYQQRKREMEREREQQDPGAREGVLGLDPQPPEKVYYKTRLCEKFEAGKCAYEGGCTFAHGSEELRPPLPLPLLTSLVRRKSPLPSSSPGAAASSPHGGYCVRVCFEFRDTGACHRGDRCAFVHASTTEMPFPGGPRSMEYALRNSSSYAKAYSPGSTAAAYRNSSSTSTSNYAPATTRAFQSVSADAAGEGGCKATRLELLGRKKMNDIYGDWPEQD

SEQ ID NO: 61864 - protein, 329 aa, Zea mays
  Coding DNA Sequence Number=SeqID_20085
  Homolog annotation: Hit_ID=Q651A3; Match level="QueryCoverage=46%, HitCoverage=54%, E-value=7e-33, Identity=54%"; Hit description =Putative ethylene response factor ERF1
  Pfam annotation: Domain name=AP2; Domain location=174-239; Score =121.8; E_value=1.9e-33; Accession=PF00847.10; Description=AP2 domain
MEPQFCSSYYYGHAGGAAYAHSDSSHYGLRRYDDDSVVVDSHCYSSSTMASSGFVQQAASSAYYYYDPTAYSSDHHQHQQQHPSSSSTAWASSPSGATTPSSSHHQQQLLRFGGGAVDEYYQEDGMGAVGMDQSSAHMVMGAASSTSSGASSTTNTPDYLLLQEEEAAAGGGGDAPLIGVRRRPWGKFAAEIRDSTRNGQRVWIGTFDTPEAAALAYDQAAYSMRSTAAVLNFPVEHVQASLRALGLSVDAGGSPVLALKRRHCIRKRLPKNKTAAGKEQQTKVVLAATASSRRGHGHAEQKQAASCGVLELEDLGADYLEELLALSDQ

SEQ ID NO: 61865 - protein, 104 aa, Zea mays
  Coding DNA Sequence Number=SeqID_20086
MAIGQRPPHHQLLAALRPGPVWTPRSSSCCAPYYCRQSTNHVVFDGHGGAGAYYVGFTQNALPPLLLALRCRRRRTGKAHVVALIRPADFAHNPKHLCIISHHM

SEQ ID NO: 61866 - protein, 154 aa, Zea mays
  Coding DNA Sequence Number=SeqID_20087
MAGLAEICVRACVGCSYPFGLRQRLPRQAQQRDVPADAAGAVAAFAFPLCLGTHWPIGPDKERVPGLDAAARTGQPEDEPSNTRVFGHDATASCRVEDGVKGYKRAWLGLRPSPLFAHVKTKRAAWRYGKPCLVAHDMHAVGISVNETQRVERN

SEQ ID NO: 61867 - protein, 313 aa, Zea mays
  Coding DNA Sequence Number=SeqID_20088
MALAGRLAQQQDPAAKPRPKACLPGRTANGEKARGPCTAHSDEAGTRESGGCACDLALRCPAPSFNLMKYLYEKIVMPSTEIITTDDKKEKNMPNLEAKATNLRFYLINTKKELMTMTQYFTKMKGFANELTAFSKILYLLVSRMHNLLVLIVGRRCFDNPTYGTCPLLTWLHKDEVKVEETKEDAHLEGTQAMDTVEAMVVASKTPVREEISIGVKSIISPIIELLSAATRMMRIINQKIDLLYGRGGALNRRRESWKDTLSWSLGGIAERNDCKDGVPVRTATGMQGEVGPRPPSEAREWMGREKGWAAQT

SEQ ID NO: 61868 - protein, 197 aa, Zea mays
  Coding DNA Sequence Number=SeqID_20089
  Gene Ontology: Cellular component=chloroplast thylakoid membrane
  Homolog annotation: Hit_ID=Q10R05; Match level="QueryCoverage=99%, HitCoverage=91%, E-value=6e-66, Identity=72%"; Hit description =Expressed protein
  Subcellular localization annotation: CTP_CleavageSite=32; ConfidenceScore=5.56e-01
MSSSPLPTTSGGAHIFPSPPRPRHRRCSQVIVAAAAPPRSYGVGRRAVSLAGVAAWLATTVGRADAASPFDKYVKRKKLEPLETYVPAVLLTIDQFVDLAVHERSFHIWFIAEKSLEFEKPRYDESRSLLRSGPASSLRVNIRAVAQYASSNGQGKAASDAVDECLRLLQTVPSAVLDKGKAIADAYRTPVDDYVEG

SEQ ID NO: 61869 - protein, 135 aa, Zea mays
  Coding DNA Sequence Number=SeqID_20090
MSNSRSLVNDWRQARVLWMGDYPTELAVHSIYNGLKRWPGIWTKTRGGRRNRRSLAQLIRGEYRGGLIGDDRMTNPTIEDLEPLAHRTVRCPHQTVGSATRHARVARSTVGAPDRWLNGQSGAPPDSPVHHRTVR

SEQ ID NO: 61870 - protein, 486 aa, Zea mays
  Coding DNA Sequence Number=SeqID_20091
  Gene Ontology: Mol. function=transcription factor activity; Cellular component=nucleus; Biological process=regulation of transcription, DNA-dependent
  Homolog annotation: Hit_ID=Q10R07; Match level="QueryCoverage=92%, HitCoverage=88%, E-value=1e-139, Identity=59%"; Hit description=AP2 domain containing protein, expressed
  Pfam annotation: Domain name=AP2; Domain location=232-302; Score =112.9; E_value=9.1e-31; Accession=PF00847.10; Description=AP2 domain
  Pfam annotation: Domain name=AP2; Domain location=321-379; Score =95.0; E_value=2.3e-25; Accession=PF00847.10; Description=AP2 domain
  Pfam module annotation: Pfam domain module=AP2::AP2; Domain location =232-302::321-379
MERALAPRLPRLPRLSLSWPCRSMTLCTIALLQDWRHGAAEAKGPKLEDFMSITCSNKSSGRSLYDSCGHHDDEQASKYHEVHGIHPLSCGSYYHGCISSGGGGGGGIGLGINMNAPPCTGGFPDHQHHQFVPSSHHGQYFLGAPAASAGPPAGAAMPMYNAGGGSVVGGSMSISGIKSWLREAMYVPPERPAAAALSLAVTDDVPPAEPPQLLPAPLPVHRKPAQTFGQRTSQFRGVTRHRWTGRYEAHLWDNTCRKEGQTRKGRQGGYDREEKAARAYDLAALKYWGPSTHINFPLSHYEKELEEMKHMSRQEFIAHLRRHHQHGRWQARIGRVAGNKDLYLGTFSTQEEAAEAYDIAAIKFRGLNAVTNFDISKYDVKRICASTHLIGGGDACRRSPTRPPDAAPALAGGADRSSDAPGDQAASDNSDTSDGHRGAHLLHGLQYGHPMKLEAGEGSSWMAAAAAARPVPGVHQLPMFALWNDC

SEQ ID NO: 61871 - protein, 501 aa, Zea mays
  Coding DNA Sequence Number=SeqID_20092
  Gene Ontology: Mol. function=RNA-directed DNA polymerase activity; Cellular component=mitochondrion; Biological process=RNA-dependent DNA replication
  Homolog annotation: Hit_ID=Q8S463; Match level="QueryCoverage=99%, HitCoverage=26%, E-value=0.0, Identity=90%"; Hit description =Putative prpol
  Pfam annotation: Domain name=RnaseH; Domain location=37-164; Score= -17.7; E_value=0.0026; Accession=PF00075.14; Description=RNase H
  Pfam annotation: Domain name=rve; Domain location=362-499; Score =82.7; E_value=1.1e-21; Accession=PF00665.16; Description=Integrase core domain
  Pfam module annotation: Pfam domain module=RnaseH::rve; Domain location=37-164::362-499
MGETISFAPRKAIKSQVLADFVAEWVDTELPTVPIQPELWTMFFDESLMKTGAGAGLLFISPLGKHLRYVLRLHFPAFNYVAEYEALVNRLQIAIELGVRRLDARGDSQLVIDQVMKNSHCHDPKMEAYCDEVRRLEDKFYGLKLNHIARRYNETADELAKIASGRTTVPPDVFPRDLHQPSVKIDDTPEPEAPSAQPEEPLAQSEAPSAYPRYPRPPRVRHCVSRRSEAGSRLIETGRPRTYNISTEESYPSTEPKLGGWRDAPSRSSCWGMGWSSTTAVPQASSSDASPSPKVRSSYERYTRGACGHHAAPRALVGNAFRQGFYWATAVADATRIVCTCEGCQFYAMQTHLPAQALQTIPITWPFAVWGLDLVGPLQKAPGGYTHLLVAIDKFSKWIEVRPLNSIRSEQAVAFFTNIIHRFGVPNSIITDNGTQFTGRKFLYFCEDHHIWVDWAAVAHPMTNGQVERANGMILQGLKPRIYNDLNKFGKRWMKELLSVV

SEQ ID NO: 61872 - protein, 424 aa, Zea mays
  Coding DNA Sequence Number=SeqID_20093
  Gene Ontology: Mol. function=N-acetyltransferase activity; Biological process=metabolic process
  Homolog annotation: Hit_ID=Q10N85; Match level="QueryCoverage=83%, HitCoverage=34%, E-value=6e-74, Identity=46%"; Hit description =Expressed protein
  Pfam annotation: Domain name=PHD; Domain location=290-349; Score= -0.0; E_value=0.058; Accession=PF00628.19; Description=PHD-finger
MMTEDEKEKARLFLPDLRRSPTSSSRGPAVEEMTSNESVSSNSISNFKWGATNRRSRTQFRGQGDTEISAPALIGSSDKGISGLSAGTSKEKKGTEETRSAQNTGGPLSLNIIDGVTSGSPVPSAVTPNYSKHDSTDLGLISSSSSPVTSAQRPLPSSSVGSNSRESKKRDTALHPLIFKEAGLPDNTLLTYKLKNGEVSPSEFEKHAGMGKRRQPYQNIYTSQGLTLHDVALQLHHLNLNSNGFSNASVSSFSDYPNLTSSGCGKEPSVSGPIVPLKRTLQERVVQTESCYFCGYGHTELGKIDPNMIVFCNQCERPCHVKCYNSRVVKKKVPLEILKDYLCFHFLCCQECQSLRVRLEGMEKCEEIAFLGRIRSNICWRLLSSADASRDVKLYLSQVIDIFKYLLGVNGARQSASLAVSVLI

SEQ ID NO: 61873 - protein, 80 aa, Zea mays
  Coding DNA Sequence Number=SeqID_20094
MARLGDRASGRSKFLAEPCRRHRSASYRRSLTPLDDSRAPWKPGDFLVGVLRRAMGAAAPSCVDVEWGAKASGYRFSNER

SEQ ID NO: 61874 - protein, 49 aa, Zea mays
  Coding DNA Sequence Number=SeqID_20095
MGAGLTARVHAMGVAVAEEGCGSDGQGPRASESGLSMMQHFMTHIVLQK

SEQ ID NO: 61875 - protein, 102 aa, Zea mays
  Coding DNA Sequence Number=SeqID_20096
MELLSKTYPTKEKTLKAMLVIRESRDFKEGNQIQGRKLGFPELVKEFKGQGISNVSLKKKKEKLKQYWAESSPSGPGCTEKRVRPSPRWQLCEKALNDSLFH

SEQ ID NO: 61876 - protein, 48 aa, Zea mays
  Coding DNA Sequence Number=SeqID_20097
MANLTAVTGVAPKTTRGFEVRAWNSVELRWVSGGGSTATAGVYLLNYG

SEQ ID NO: 61877 - protein, 616 aa, Zea mays
  Coding DNA Sequence Number=SeqID_20098
  Gene Ontology: Mol. function=RNA-directed DNA polymerase activity; Cellular component=mitochondrion; Biological process=RNA-dependent DNA replication
  Homolog annotation: Hit_ID=Q8S463; Match level="QueryCoverage=89%, HitCoverage=28%, E-value=0.0, Identity=83%"; Hit description =Putative prpol
  Pfam annotation: Domain name=RnaseH; Domain location=1-116; Score= -16.3; E_value=0.0019; Accession=PF00075.14; Description=RNase H
  Pfam annotation: Domain name=rve; Domain location=328-487; Score =120.3; E_value=5.6e-33; Accession=PF00665.16; Description=Integrase core domain
  Pfam module annotation: Pfam domain module=RnaseH::rve; Domain location=1-116::328-487
MKTGAGAGLFFISPLGKHLLYVLRFHFPASNNVAEYEALVNGLRIAIELGVRRLDARGDSQLVIDQVMKNSHCRDPKMEAYCDEVRRLEDKFYGLELNHVARRYNETADELAKIASGRTTVPPDVFSRDLHQPSIKIDDTPEPEAPSAQSEAPSAQSEAPSAQPEAPSARPEAPSGRPEVPSAPEGEALRIEEEWSRVTPNLNWQTPYLQYLHRGELPLDRAKARRLARRAKSFVLLGDGKELYHRSPSGILQRCISIAEGQELLQEIHSGACGHHAAPRALVGNAFRQGFYWPMAVADATRIVCTCEGCQFYARQTHLPAQALQTIPITWPFAMWGLDLVGPLQKAPGGYTHLLVAIDKFSKWIEVRPLNSIRSEQAVAFFTNIIHRFGVPNSIITDNGTQFTGRKFLDFCEDHHIWVDWAAVAHPMTNGQVERANGMILQGLKPRIYNDLNKFGKRWMKELPSVVWSLRTTPSRDTGFTPFFLVYGAKAILPTDLEYGSTRTRAYVDQSNQANREDSLDQLEEARDMALLHSARYQQSLRRYHARGVRSRDLQVGDLVLRLRQDARGRHKLTPPWEGLFVIAKVLKPGTYKLANSQGEVYSNVWNIQQLRRFYP

SEQ ID NO: 61878 - protein, 132 aa, Zea mays
  Coding DNA Sequence Number=SeqID_20099
MADAPPATARCCPLDPGVYRCPLVSALKPQRRSPCLAAGCDHNIIVIEDFLRFPESPSLLFLDAYFYQYKDDIKYEEVSATAILLGGSSVSNKDSFFDSSGLLREFTRKQALHLQVDTEEIGVQSFDLYLPR

SEQ ID NO: 61879 - protein, 85 aa, Zea mays
  Coding DNA Sequence Number=SeqID_20100
MVPECVAEDLPEQKPGGFGFEMKVFSYGKDIRCEDAARRMTNVEGPNTGSFVKKVQSVMMNSMMTIIMEHAHDKVEPDTEKYIGP

SEQ ID NO: 61880 - protein, 454 aa, Zea mays
  Coding DNA Sequence Number=SeqID_20101
  Gene Ontology: Mol. function=sugar porter activity; Cellular component=integral to membrane; Biological process=carbohydrate transport
  Homolog annotation: Hit_ID=Q2QPZ5; Match level="QueryCoverage=90%, HitCoverage=90%, E-value=1e-123, Identity=57%"; Hit description =Sugar transporter family protein, expressed
  Pfam annotation: Domain name=MFS_1; Domain location=35-454; Score =46.4; E_value=9.5e-11; Accession=PF07690.6; Description=Major Facilitator Superfamily
  Pfam annotation: Domain name=Sugar_tr; Domain location=31-441; Score =226.0; E_value=8.2e-65; Accession=PF00083.14; Description=Sugar (and other) transporter
  Pfam module annotation: Pfam domain module=MFS_1::Sugar_tr; Domain location=35-454::31-441
MKKDDDLESALLAAKEPAPAPAKGYAYALTCALLASLTSIIYGYNRGVMSGAQKFVQADLGVTDAQLEVLIGATSVYSLVGSLAAGWACDRAGRRRTIALSAALFLAGSAVTAAADGYAALMAGQFVAGVACGFGLVVAPVYIAEISPANARGFLSSIPEIAGNSGILLSYIADFALAGLPTPLNWRLMIGIGAVPPLFLAAAAALAMPETPRWLVLHGHRDEARRVLERTVGDADRRLQEILTSVQEATKQAGSGGGDAPSSASVRREILLRPTPAVRRVMLAILGLQVFQQACGVAAMVLYAPRVFSHVGITSERDVLGATVLLGAAKTVAIVVPLFLADSLGPPAHAAHQRGRHGRVASGPRPVHTRDVGRDGTGVGTAVNRVMSAIVGMTFIPMYEAVGMAGTFYIFAAMSAAAWVFVYACLPETKGRSLEEMEALFDAGAAPSPRAALS

SEQ ID NO: 61881 - protein, 49 aa, Zea mays
  Coding DNA Sequence Number=SeqID_20102
MELADDDGVAAKRTSPKASRSRWRSTRKAILAFCRVAHWTVWSANGQSL

SEQ ID NO: 61882 - protein, 145 aa, Zea mays
  Coding DNA Sequence Number=SeqID_20103
MATWIDGYHALCKCGLLLEYQAISERIGKTVESSRSTTTVEARTGVRLIDVEMYMAGHKGSDPQNGNVLCTQMTINHLALYGEQKIECHDQDCDWRSQPIESEATYVCTGEQSHALEASRSSIYIIIVANIGFSFSHLRIGCGHY

SEQ ID NO: 61883 - protein, 106 aa, Zea mays
  Coding DNA Sequence Number=SeqID_20104
MAAFNEDLRRLFTCVCFGFLRSILTDHRTKDLSAQEDYNRMAEMLEDVRLELLPDDFEVPHTLEVLKFFKLVKALKEKINEHMKATTLVFVTRLMAITSKFAFSNN

SEQ ID NO: 61884 - protein, 197 aa, Zea mays
  Coding DNA Sequence Number=SeqID_20105
MAELPQSQLRPTPMSGIGDPSWMFDHSTMDSQDGYFTSLLNHEGADGFGPDDCLEVGNALTELPMANEMNSQPIKRGRSKNFSEEEDLMLVSVYLNLADAKVEFREKQQGKTFFVFHVWMILRHEPKWKFRESKLKDHHEANNGNSDAPVNIERPPGRKSEKEKARVRKNGACDIDGDSLFDEVKKMREAREETERH

SEQ ID NO: 61885 - protein, 302 aa, Zea mays
  Coding DNA Sequence Number=SeqID_20106
  Homolog annotation: Hit_ID=Q10MT6; Match level="QueryCoverage=69%, HitCoverage=37%, E-value=2e-22, Identity=37%"; Hit description =Expressed protein
  Pfam annotation: Domain name=TFIIS; Domain location=44-120; Score =10.4; E_value=0.00082; Accession=PF08711.1; Description =Transcription factor S-II (TFIIS)
MEASGSCGCAGFTDGVIEACGYPRSEFRDVRGEIVVLLRGATDDSVAEQLCAALDDVMVESLKTLLVAPVPHDLLASTDLARTVGALGNHGSFRIRSLARDVVRGWRVAIEASRTTAVAVKKKLDSLCANKIPLPRAAVDEKKMLPAAAEVHNKNPHVPPAKTLPAAAAEVHSKRLQVPPAKMLPTAEEHKKQHYVPPTKTLPTAAILSNHRKNMSETKKSSVADNEKMVATKRKLREGYQKADGVKRRRSIQTIKEEEGKLLEQKQCKKHASHRMERGTVGCRTRTSSGVNRSRPPPSHVL

SEQ ID NO: 61886 - protein, 60 aa, Zea mays
  Coding DNA Sequence Number=SeqID_20107
MSMMMPFDQKGFSLFAPGPSVAVGVGGVFDTLVLFVALGAIVGAVRRFLNWNNDDYDYYY

SEQ ID NO: 61887 - protein, 310 aa, Zea mays
  Coding DNA Sequence Number=SeqID_20108
  Homolog annotation: Hit_ID=Q10MT6; Match level="QueryCoverage=82%, HitCoverage=53%, E-value=1e-30, Identity=35%"; Hit description =Expressed protein
  Pfam annotation: Domain name=TFIIS; Domain location=54-130; Score =10.2; E_value=0.00085; Accession=PF08711.1; Description =Transcription factor S-II (TFIIS)
MANEQSGLPLRRWKPFYSAFQAIDGAIEACGYPRAEYRDVRGEIVVLLRGATDDGVAEQLCAVLDDVMVESLKTLLVAPVPHDLLASTELARTVGALGSHGSSRIRSLARDVVRGWRVAVEASFATAVAVKKKLDNLSADQIPLPRAAVDKVHVPSAKMLPAAAEVHNKKPDIPPAKMISIATAVEVHNKKAHVPPATTLPTAEEHKKHHYVPPTKTLPPAAILSNQQKNISETKKPAVAESEKMEATKRKLRESYQEADGVKRRHSIHTIREEEGKLLEEEQWKMHASHRAIGCRTSSGVRCSRPPRVL

SEQ ID NO: 61888 - protein, 200 aa, Zea mays
  Coding DNA Sequence Number=SeqID_20109
  Pfam annotation: Domain name=DTW; Domain location=5-187; Score=16.3; E_value=7.3e-07; Accession=PF03942.6; Description=DTW domain
MFSFRVKAIYDVSNDPVVYFRLARMHGTASFDALIVYGKGKISVLYPNKTTTPKSVKDLEFDGFSLTTDLRENLQDGPFNFVLLDGTWSNSAALYRRLKERWTAVWGDEALPCIALSTLSASVMHKLRPQPAWDRTCTAAAAAGLLWELSSRPELISFGLEKQAEAVECSLDNLLDALTARRLRLGRSITRKQRHSRNCI

SEQ ID NO: 61889 - protein, 246 aa, Zea mays
  Coding DNA Sequence Number=SeqID_20110
  Gene Ontology: Mol. function=2 iron, 2 sulfur cluster binding; Cellular component=chloroplast; Biological process=metabolic process
  Homolog annotation: Hit_ID=Q5Z8I4; Match level="QueryCoverage=82%, HitCoverage=92%, E-value=3e-76, Identity=77%"; Hit description =Putative Nuclear-encoded plastid
  Pfam annotation: Domain name=NifU; Domain location=100-167; Score =120.6; E_value=4.4e-33; Accession=PF01106.8; Description=NifU-like domain
  Pfam annotation: Domain name=NifU; Domain location=181-245; Score =10.7; E_value=2.6e-05; Accession=PF01106.8; Description=NifU-like domain
  Pfam module annotation: Pfam domain module=NifU::NifU; Domain location=100-167::181-245
  Subcellular localization annotation: CTP_CleavageSite=6; ConfidenceScore=5.31e-01
MRLCLRQAAATSSPLAATLRGKVTSHLDRRQPPLSHPFFLLPASATDLPACLPAKTSTSTLAPHGRLSFSHTTSLQTAPGHRGLRAGWAVRVLPLTEENVEKVLDEVRPSLMADGGNVALHEIDGLVVVLKLQGACGSCPSSTMTLKMGIETRLRDKIPDILEVEQIVDTETGLDLTADNVDKVLDEIRPYLSGTGGGSLELLQIDGYVVKIRIGGPAAGVMTVRVAVTQKLREKIPSILAVQLTE

SEQ ID NO: 61890 - protein, 62 aa, Zea mays
  Coding DNA Sequence Number=SeqID_20111
MTGRYTIPGVCLRSQEVDASLVMEDEAAQHMTLNHATSLPYGTCQLPLRRRRARCRNPHTGK

SEQ ID NO: 61891 - protein, 164 aa, Zea mays
  Coding DNA Sequence Number=SeqID_20112
MSSSKAIEIIFFRLKGYTKDEWRTGLKALRADSISKLKKAFPELVQEVSRPSNFQDFYIYAFRYCLTEEVEMYRNTSCFRYCLTVSQTRSPAPFVADHGTTHARQPTTVLARGRRRAAVGSRVAAEICIAVWGCVAIELHAKRRAGATHAPSRDVAGCRGSVVS

SEQ ID NO: 61892 - protein, 168 aa, Zea mays
  Coding DNA Sequence Number=SeqID_20113
MTMLLVPQTLMLSNEKERLTKTSTSGFQRYVACLKQLHHSRTKEKHLHQELQYNTMKEMCFWTRAPPAMEARFWKLRIAFGNYPSSSRLLLELPPYCVGRMVCFTYAVQQRASPRGKLRTTTTIALGTIISDYFFLRLELVPVRHPTSQGFINFYQSAEDFSASLRYL

SEQ ID NO: 61893 - protein, 197 aa, Zea mays
  Coding DNA Sequence Number=SeqID_20114
  Homolog annotation: Hit_ID=Q5Z8I7; Match level="QueryCoverage=36%, HitCoverage=16%, E-value=8e-18, Identity=53%"; Hit description =Selenium-binding protein-like
  Subcellular localization annotation: CTP_CleavageSite=61; ConfidenceScore=5.64e-01
MARGGPDSAPPSRPRPPSRTSATSTASSLLHRLAALPLPPARAHAATPSPYSSLLAAALLRFAHLTQPRLETVRLFTCVRHGRCRSSDKHRFVENSLIGAYVACGDVGAAGKVFHEMTVKDVISCTSIVAAYSRSRDMGSAEEMEVAGMPIDEASLTGAICSARCVVYNVSEEEKERLSMGHSEKLALSFGFAQTRV

SEQ ID NO: 61894 - protein, 177 aa, Zea mays
  Coding DNA Sequence Number=SeqID_20115
MDEQCKQDSKDSIRRTIVEHDKVFRQQVHELHRLYHVQKTLMAECDSHRYQPRAEGTHEVVQGSRSNLKCSPSTSGTNQSALLGNAQYPAPQQVQEDLSLHECKPVNCLSLFGEENSAAKERFHGENHKSVEDESWSAAVESDLDLKLSIGPSSHSPETPRWLFSGSRERNPSGQHR

SEQ ID NO: 61895 - protein, 64 aa, Zea mays
  Coding DNA Sequence Number=SeqID_20116
MTADDIEHNDRGPVFDKTPSSHVASQDETLKCTKRFGTAPLLTELDCVRSLWDLLCSKDIDPSK

SEQ ID NO: 61896 - protein, 206 aa, Zea mays
  Coding DNA Sequence Number=SeqID_20117
  Gene Ontology: Biological process=protein targeting
  Homolog annotation: Hit_ID=Q5Z918; Match level="QueryCoverage=78%, HitCoverage=73%, E-value=4e-61, Identity=74%"; Hit description=EREBP- 4 like protein
  Pfam annotation: Domain name=DUF862; Domain location=17-152; Score =150.5; E_value=4.5e-42; Accession=PF05903.5; Description=Eukaryotic protein of unknown function (DUF862)
MESGEQPHSRPSPELCQNISNRQQHRLGIKGVHCVFICLQLSFGKVHGSEYSFGAHDHPSSGVFEVEPKSCPGFIYRCTVFIGHTTLNSLEFREFIQRMASEYHGDTYHLISKNCNHFTDDLSTRLTGKSIPGWVNRLARLVVVFLAPFAIAFYQKACGLSQLKQSILETVVSQMVPIPPATITLTKMNWKINTCFRLLLLVKTQL

SEQ ID NO: 61897 - protein, 148 aa, Zea mays
  Coding DNA Sequence Number=SeqID_20118
  Gene Ontology: Mol. function=binding
  Homolog annotation: Hit_ID=Q9AY55; Match level="QueryCoverage=56%, HitCoverage=10%, E-value=1e-19, Identity=67%"; Hit description =Putative arm repeat protein
LHSLICIGHVASNAHVSASLVLHCTWEHVDTRNVFHEMVVEGIEPDGVTLLLVLAACGNPDAMLPRPRQYGLNVPGLATAGLIILPVEHARPPRTLLRLGGGVWCRHLPPSVGACVGYACAVTRQQKPSWAFECAFSTRWWLKATAAT

SEQ ID NO: 61898 - protein, 95 aa, Zea mays
  Coding DNA Sequence Number=SeqID_20119
MTMLVDYTTGLLQQLGCPMVVEGTSLAEVQGKAASQTPPPAQARGKSPAAPAPAPGVGAPAPRAGDDVVSPGDWTDLAPCDVVDAPPGEKAKRGS

SEQ ID NO: 61899 - protein, 65 aa, Zea mays
  Coding DNA Sequence Number=SeqID_20120
MADLKCSTDGNLPNEEEIGAQAERYSCCTRKAQRPDVLQNTNSTRDQGHSTTVNVGGVRTGNKQT

SEQ ID NO: 61900 - protein, 254 aa, Zea mays
  Coding DNA Sequence Number=SeqID_20121
MTRAKWRAEDVACRRLVGETWHDGATPPSALTGEHAKVRKERGREKKEKGYRRQWREWSENTARLQAAVARMEREDSEAPGFTRVKGVRCGSSGGRWLCMHGRTALARQRRFWRGRVSKERQSGRHIRPGRGQRRASGGRNRRVGGSKGPTAGWLTASVRDIVAGAEVGWGRGMACGAVADLKRPCPADGWPPTGDLAGGVCGCRVTSSARGTLIQGVTRTEESAPTICRVLFDPRSQTVRASTESTVGTPHSD

SEQ ID NO: 61901 - protein, 214 aa, Zea mays
  Coding DNA Sequence Number=SeqID_20122
MVEDFICRIERSKQPKEGVEINSKVWLTPTRTRQAFQAWPNLGINPWYTHFCVCVSTNVIRGRAPINAFAILVVNTSSGGRWIPSQTLSVSPVPLPELYTHNVPSRQGLGVRIGCFSEASHPQPIGVFYRRSARRKAVDDASIDDVVCSSLWAFILVDILGVVLRFVPCLPNRAAAQERHNLPPPLPLLVLSRFSNGYLHLGLTWHRRGGDATL

SEQ ID NO: 61902 - protein, 45 aa, Zea mays
  Coding DNA Sequence Number=SeqID_20123
MGIDYERDMDQLRAEDYEHGSTASYNTDKVTMCLSFLCQMQAPGY

SEQ ID NO: 61903 - protein, 135 aa, Zea mays
  Coding DNA Sequence Number=SeqID_20124
  Gene Ontology: Mol. function=metal ion binding
  Homolog annotation: Hit_ID=Q69PX0; Match level="QueryCoverage=86%, HitCoverage=21%, E-value=1e-19, Identity=49%"; Hit description =Putative zinc finger (C3HC4-type RING finger) protein
MATVNCLYVAAASTAVSTAALQWWASSLLDGDAGAGGDGDWLGAVLRSRVTVALLANLAAHVFVVVILALKTIFFVQLTSVETRKVLEHIINYVLHKVALQCSALMSRGQSVVSNWSSGASYLQGSLLNAAGLVP

SEQ ID NO: 61904 - protein, 141 aa, Zea mays
  Coding DNA Sequence Number=SeqID_20125
MEVDDGSRATPPLDAVAAAFKSQVMELQDLVLARSMFPATALPDLANVDALVTAMESQVETISRRLQEELDAIPKAKLLAKIEEGNKETHPRMEVTQTAIGNMESTVKSVMGEQVEFQRWRPEVETRVTEIAEALQAIQPR

SEQ ID NO: 61905 - protein, 145 aa, Zea mays
  Coding DNA Sequence Number=SeqID_20126
  Subcellular localization annotation: CTP_CleavageSite=62; ConfidenceScore=5.20e-01
MSWQPSKKCPRGNPNSTSGAGAAHQADQACPGSCSKRGAQQHGAAARRATSDLGGSWHFWLRARPAQGAWSKKLVQRSLKEEEKLQHMLANLPSGMRKNDFANQHEQSSSRMLPHFNSSFTEANECELKIKDEPVAAPRKGHASR

SEQ ID NO: 61906 - protein, 96 aa, Zea mays
  Coding DNA Sequence Number=SeqID_20127
MGLLMGSNGNPMVSIGNPLGIRNLHVHGFGQKFIPRHGEHSATEGKPWEEKAAGKAACFGARYRETVTKGTNGQGKKHQIQRDSDEGNQLTDKAKS

SEQ ID NO: 61907 - protein, 151 aa, Zea mays
  Coding DNA Sequence Number=SeqID_20128
MAVVSFNAEKNATQVDIVVPNDTLSNAQLKKKEVRIRSSKETKIWVGRKAQGEEKRTKQKYIACTSTEAYGSHRTGERNKEKVGRIGSVGLLHTWCRARKKRCSKLHAQNELELHQLYGVRLPKNVEFECLTGSAQIRMKFGVGAMLDMSL

SEQ ID NO: 61908 - protein, 121 aa, Zea mays
  Coding DNA Sequence Number=SeqID_20129
  Subcellular localization annotation: CTP_CleavageSite=37; ConfidenceScore=5.02e-01
MTQAADDGSMERAPFRDSPGQPRSHSATSRWKGADAPAAALTPRSSPRARYPWMETAPFQDAPAPTPAILAPTLLSIDGRAWMPPQLPHPTVLARDSPVMLAPDALPSLERSAGAARDAGP

SEQ ID NO: 61909 - protein, 120 aa, Zea mays
  Coding DNA Sequence Number=SeqID_20130
MGWGAAVGGIHALPSMESRVRAKGGGGWRGGILEWRPFHPRIASAGRGSWGEGDCGGIRALPSMGRRVGARLAGAVAEWRPFHRRIAKMVAQTVGNSVSEFLSGFSDGKTDSAARVSLAN

SEQ ID NO: 61910 - protein, 72 aa, Zea mays
  Coding DNA Sequence Number=SeqID_20131
MTKILLNHVFEDLRRTKAPNSNNSKCIYTFIPLAERTTRPHFCVLVTTNSGDSCANVKRLEEETAAKIEQLT

SEQ ID NO: 61911 - protein, 63 aa, Zea mays
  Coding DNA Sequence Number=SeqID_20132
MDESGMKKEIGAAELLPPPEPYDPEADLALKAALETIRIAEEVVDEAVNKLLNEAAEKILKED

SEQ ID NO: 61912 - protein, 196 aa, Zea mays
  Coding DNA Sequence Number=SeqID_20133
  Subcellular localization annotation: CTP_CleavageSite=12; ConfidenceScore=5.08e-01
MTPPCPSSALVTYSTANPTGGHSTNYGTRQGRLDHRLGKTFALPKLGSDLDNRNKGITTSLDIGNMVHFVSRLLPMPKPYYNNYRVGDPSPGARAYDQPLGLTLGSQQEISKRKSTTHFHFSVELHPSLHVIIHYAHEVLGEQDSRTVICICDTYSGVQMVHKINQYASKSEINSKISLFVAKLGKEEIAIAQHFG

SEQ ID NO: 61913 - protein, 637 aa, Zea mays
  Coding DNA Sequence Number=SeqID_20134
  Homolog annotation: Hit_ID=O48768; Match level="QueryCoverage=77%, HitCoverage=92%, E-value=2e-72, Identity=44%"; Hit description =Expressed protein
MEPKCGFLQIGPKLRVSFANLQICEPYDLRDIQSYISRAFLYFAPLSKKVFILVDNQPWLTTKQSRSARLWQFMVTKYRMSPFANSRSLLHHHKQQAAAEEAAAAAAAAAAAARGEESSDTMRRWFAVAADLSRALHGFLVFEVSWRDVHGINYLNELLSDTSLALEARYMKKWEFYSAEQAAGCTHLWFLGRASEARALRGYLSALHTHSDPSEQLEECSSALRRTCSSSSLTAVSEDEDEDDDELDGRSADGILMSSPSPTRSRSSSSRWARAAAAAEVPFVAPAQYSDTLILFRFRDSQLPLKLRQIIMSDIRLLTLLESGLPSWVIFFQSYPVLCQLYRPWMRPLARSLYLLASLVTVLIGFYDLYKNVPLLKSAAARICGPLFGWIETWDMVTRIQYLGTILFLRNLRKCLQSLVALLRAARAVVRTVAAPVAEAAGPLVASCGEVWDLVGEGLLAPAWALAVDLAEVVWAPFDLVLDSVGGCLWPLLQVALLPVRGAAALAGCAGSLLSATYNFGKDIWETMSSIFELNHMSEAQQSAFDMSQIKTLWNDLFSQIFRAIRGILNGILVFFASCNRHRLSIYNHAQSRFRHMLRVARLHQAPPHSSSCRCKPQKPKRRASDDDAVAECDRCK

SEQ ID NO: 61914 - protein, 102 aa, Zea mays
  Coding DNA Sequence Number=SeqID_20135
MAMMGSTSEKMYLCQVRKQQTFAAFVQRWCPKKKTRSEASGGKDPPLKLLFHVYREGFLPPSNVSYCNCFRIFVPPMYCNVCVTGDTLLGKGCLRSVGQGQL

SEQ ID NO: 61915 - protein, 86 aa, Zea mays
  Coding DNA Sequence Number=SeqID_20136
MAWHEYWRLMDGAGRCAREMVDVGAGRGFMLRTSRKGSRREERWPEPYVELTTNTMEDKDSIRDLDDRRAPARVEPNQGLRHSEQR

SEQ ID NO: 61916 - protein, 100 aa, Zea mays
  Coding DNA Sequence Number=SeqID_20137
  Gene Ontology: Mol. function=hydrolase activity; Biological process =metabolic process
  Homolog annotation: Hit_ID=Q93VD4; Match level="QueryCoverage=87%, HitCoverage=26%, E-value=2e-12, Identity=46%"; Hit description =Putative PrMC3
MPAVLVPGCCPAATAANEVVEDVLGLVRVLGDGTVVRSAVGPVFSPATSFPENHPCVEWKEAVYDKPNNLLVRMYFSSPPAAGGKAPVLVHFQGGGFCIG

SEQ ID NO: 61917 - protein, 937 aa, Zea mays
  Coding DNA Sequence Number=SeqID_20138
  Gene Ontology: Mol. function=ubiquitin thiolesterase activity; Cellular component=nucleus; Biological process=ubiquitin-dependent protein catabolic process
  Homolog annotation: Hit_ID=Q7EZJ0; Match level="QueryCoverage=98%, HitCoverage=79%, E-value=0.0, Identity=80%"; Hit description =Putative ubiquitin-specific protease
  Pfam annotation: Domain name=UCH; Domain location=59-402; Score =139.2; E_value=1.1e-38; Accession=PF00443.19; Description=Ubiquitin carboxyl-terminal hydrolase
TQHQFSARESDWGFTSFMPLGELYNHSRGYLVNDTCIVEAEVAVCKVVDYWSYDSKKETGYVGLKNQGATCYMNSLLQTLYHIPYFRKMQLTTDISCQAVYHMPTTENDMPSGSIPLALQSLFYKLQYNDSSVSTKELTKSFGWDMHDSFMQHDVQELNRVLSEKLEDKMKGTVVEGTIQQLFEGHHMNYIECINVDFKSTRKESFYGNCNSNADLQLDVKGCQDVYASFDKYVEVEQLEGDNKYHADKHGLQDAKKGVLFIDFPPVLQLQLKRFEYDFMRDTMVKHVKVLTIHCEPQINDRYEFPLQLDLDRDDGKYLSPDADRNVRNLYTLHSSFVHFKYLLERKIPRFKFDDERVTKEDAKRALEEQYGGEEELPQTNPGLNNTPFKFTKYSNAYMLVYIRESDKDKIICNVDEKDIAEHLRIRLEKDREEKERRKKEKAEAHLYTIIKVARDDDLKTQIGKDIYFDLVDHDKVPSFRIQKQMAFAQFKEEVAKEFGIPTQFQRFWLWAKRQNHTYRPNRPLCPQDEAHTRVFSCKPKFATPLLGNFDHSSKDLKPLPLPDKTREDIFLLFKLYEPEKEQLRYVGRLFVKASGRPQDILPKLKMLAGFSQDDDIELYEEIKFEPNVMCEYIDNRLLFRSCQLEDGDIICFQKSSKADSADRYRFPDVPSFLTYIRNRQVVHFRSLEKPKEDDFFLEMSKIFTYDQVVEKVAEKLGVDDPSKIRLTSHNCYSQQPKPQPIKYRGVERLLDMLIHYNQTSDILYYEVLDIPLPELQALKTLKVTYHHATKDEVSVHSIRLPKNSTVGDVLNDIKTKVELSHPNAELRLLEVFYHKIYKVFAPNEKIENINDQYWTLRAEEVPDEEKNLGPFDRLIHVYHFTKDTQNQTQVQNFGEPFFMVIREDETLSSIKERIQRKLKVPDEDFSKVPDFQMFCS

SEQ ID NO: 61918 - protein, 298 aa, Zea mays
  Coding DNA Sequence Number=SeqID_20139
  Gene Ontology: Mol. function=hydrolase activity; Cellular component =nucleus; Biological process=metabolic process
  Homolog annotation: Hit_ID=Q8H3K4; Match level="QueryCoverage=96%, HitCoverage=97%, E-value=1e-123, Identity=69%"; Hit description =Putative cell death associated protein
  Pfam annotation: Domain name=Abhydrolase_3; Domain location=78-270; Score=186.9; E_value=5e-53; Accession=PF07859.3; Description =alphabeta hydrolase fold
MASEAAPRVVVDECRGVLFVYSDGTVVRRAQPGFATPVRDDGTVDWKDVTFDEARGLALRLYLPRDRGAGAGRRLPVFFYYHGGGFCIGSRAWPNCQNYCLRLASDLGALVGGGDPWVAEAADLGRVFVSGDSAGGTIAHHLAVRFGGSPADLAPVAVRGYVQLMPFFGGVARTRSEAECPADAFLDRPLNDRYWRLSLPEGATPDHPVANPFGPGAPPLDAVDFAPTLVVVGGRDLLHDRAVDYAARLRAAGKPVVVRDFHGQQHGFFTIDPWSDASAELMRVIKRFVDADGRFDFD

SEQ ID NO: 61919 - protein, 194 aa, Zea mays
  Coding DNA Sequence Number=SeqID_20140
  Subcellular localization annotation: CTP_CleavageSite=60; ConfidenceScore=5.38e-01
MAVALIKSAVLACLTAWWAQAVSHLLPKMSTGVRGGLCFLRGFNGSARMSRRMCPRKPVTDSELWDSVDCAPFPSRCGRSASDRNRSADSVSVHLLPQIRVELNRPRASFGTTPISPAYLYRVYLATSQALPLPHIESLELRPTTTRVQREWGGAESRPPCRRSSLTPNWGLARRQKASPKPLDRLGGDCGLGG

SEQ ID NO: 61920 - protein, 218 aa, Zea mays
  Coding DNA Sequence Number=SeqID_20141
  Gene Ontology: Mol. function=ligase activity, forming carbon-nitrogen bonds; Biological process=tRNA processing
  Homolog annotation: Hit_ID=Q9LV47; Match level="QueryCoverage=54%, HitCoverage=19%, E-value=2e-35, Identity=57%"; Hit description =Arabidopsis thaliana genomic DNA, chromosome 3, P1 clone: MOB24
  Pfam annotation: Domain name=ATP_bind_3; Domain location=35-197; Score=55.9; E_value=5e-14; Accession=PF01171.11; Description=PP-loop family
  Subcellular localization annotation: CTP_CleavageSite=68; ConfidenceScore=5.00e-01
MEDGDTEHHRTVSAHAGAPGVVPVTNATLAPYNQLTAPHQRVQASLGVVPVTNTTLAPFNPITVGALQCTHRTVGKRKITEIFLRYQKLLDICIKQQIGILLIAHHSDDQAELFVLRLSRQSGVLGLAGTAFVSQLFASNVKYDGERFRRYGILLVRPMLEFSKDDMYKICQGSNQPWVEDPTNTSMKYARNRIRASLRKLSTEGQAVLKTAMLALIL

SEQ ID NO: 61921 - protein, 89 aa, Zea mays
  Coding DNA Sequence Number=SeqID_20142
MERRLRLEGRGGGGGGWREGEPRALVARPLHNLCGLFRWEELLCSGLLSQSINFDSTIIQVYIKFHVQASLPTRTAASESSDKATTRHP

SEQ ID NO: 61922 - protein, 170 aa, Zea mays
  Coding DNA Sequence Number=SeqID_20143
MATNELLYIKRPNIFWTLCSTHTLNLMLERIGKIFSDPSISDIEDVMDGFIAAIGTFYDGDYEKHNQVLNHDLHKFKDQVGHFGKNVAKAGYTVKLTSQPILTVNHPPCLTLKCYSKVTLENTFITSHNEPSTKSHSEHFGNHSLHLTMNHPPSLMANHHWTSIPCVVTL

SEQ ID NO: 61923 - protein, 64 aa, Zea mays
  Coding DNA Sequence Number=SeqID_20144
  Homolog annotation: Hit_ID=UPI00005A316E; Match level="QueryCoverage =83%, HitCoverage=14%, E-value=0.0, Identity=38%"; Hit description =PREDICTED: similar to splicing factor 3b, subunit 4 (predicted)
MAAITYARPAAVRLFSIFPLWEEEDDDDDDSHPEFLLRVVRRGCGWTPCTCSGDRVVFACGRLK

SEQ ID NO: 61924 - protein, 149 aa, Zea mays
  Coding DNA Sequence Number=SeqID_20145
  Subcellular localization annotation: CTP_CleavageSite=46; ConfidenceScore=5.64e-01
MGWGKGRGTTAQQRTSSTGSISRAPSRGPRAPGASPGRPPVWGSSEASAAAQAVPVHAPTAGGGAAEDLEHQEHLQGALQSGVRLKRPPQHRLYQSTPPTAGGGAAEDLEHREHLQGALQPGVRLKRPQQQRHDFVSCNKRAGRGRISG

SEQ ID NO: 61925 - protein, 168 aa, Zea mays
  Coding DNA Sequence Number=SeqID_20146
MAWGRHRGRGTHARGRGRLKVSGSWTGEGGNPAGVRKNRPLTRFRGGSPPWSRFLGDQGGYQMKEGELTGVEEGCGGAELDSAQGRGGSGRGRCEEGWSSGGSFYRRSGREASKGQLAPVRDAMAVMGAHSAEDETSRASCEHSELRGAERVPNFTGAGVMARRWGGG

SEQ ID NO: 61926 - protein, 134 aa, Zea mays
  Coding DNA Sequence Number=SeqID_20147
MAWNDCSRTTRVICISFDQIERFRSGIRKKGTVSKEQIMVCRINQDFELINVPEWAIKRNGHTPNGLRQAAKQPGGQVVLPPHRIAGVPISGSRRCPRTRRFPLAADQLRTHTRPAGQVSSWSKSFGVWPFLMV

SEQ ID NO: 61927 - protein, 388 aa, Zea mays
  Coding DNA Sequence Number=SeqID_20148
  Gene Ontology: Mol. function=electron carrier activity; Cellular component=anchored to membrane; Biological process=electron transport
  Homolog annotation: Hit_ID=Q53RK6; Match level="QueryCoverage=94%, HitCoverage=100%, E-value=3e-43, Identity=62%"; Hit description =Plastocyanin-like domain, putative
  Pfam annotation: Domain name=Copper-bind; Domain location=29-125; Score=0.6; E_value=0.00095; Accession=PF00127.11; Description=Copper binding proteins, plastocyaninaz
  Pfam annotation: Domain name=Cu_bind_like; Domain location=303-381; Score=113.6; E_value=5.6e-31; Accession=PF02298.8; Description =Plastocyanin-like domain
  Pfam annotation: Domain name=Cu_bind_like; Domain location=40-118; Score=148.3; E_value=2.1e-41; Accession=PF02298.8; Description =Plastocyanin-like domain
  Pfam module annotation: Pfam domain module=Copper-bind::Cu_bind _like::Cu_bind_like; Domain location=29-125::303-381::40-118
MGGARGSSGAVVLALVLLCVLLHGEFAESAVYTVGDRGGWSFNTANWPKGKRFRAGDVLVFKYDPKAHNVVPVSAAGYSSCSAPRGVRALTTGNDRVTLKRGVNYFICSFPGHCQAGMKVAVTAAEKIQHQLDTRVNRSGLVGYQCLPSDAWDDRHRQICITGSQSRPLAYPPQPVPCSTKSSLLAHHVITDWRRASYTALKLHSIALVPRSLLVTSAALRGIDFLGHRAPRPRAPIQQPARSTAECTLSLHDECNGESTEMAEGRGSARAIGAMAFAVACCYCCVAIADAATTYYVGDSNGWSFSSPSWPNGKHFRAGDTLVFRYIPWIHNVVAVDEDGYNGCTTPPGSRTYTSGADSVTLARGDNFFICTRFGHCNLGMKLVVYAA

SEQ ID NO: 61928 - protein, 77 aa, Zea mays
  Coding DNA Sequence Number=SeqID_20149
MDPSGRQRLHDGCKSVKKYGSKGPDSAVATGKRSYYASGRDFRGVTLTKDNLAKRGSIQGNILTQILEIVAERTTST

SEQ ID NO: 61929 - protein, 233 aa, Zea mays
  Coding DNA Sequence Number=SeqID_20150
  Gene Ontology: Mol. function=unfolded protein binding; Cellular component=mitochondrion; Biological process=cellular protein metabolic process
  Homolog annotation: Hit_ID=P29185; Match level="QueryCoverage=40%, HitCoverage=24%, E-value=6e-34, Identity=71%"; Hit description =Chaperonin CPN60-1, mitochondrial precursor
MVDFPGFESHLVDLPDPAEMLTHANERKRLRGAEVRFHGEVQGPESVAFDPMATPFIMSLKLWREPEDPLILIHDKKVTNMHAVVKVLEMALKKQRPLLIVAKDVESEVLGTLIINKLRAGIKVIAEELGMNLENVEPHMLGSCKKQARNQCTNVFELHYRPSVKIPVSVMMPVAHVVEWTYQKFAKYGMEVPQLTPSRIRLLSCNRTFSCSRAKEQLGYEPLVSLKVLIYIL

SEQ ID NO: 61930 - protein, 92 aa, Zea mays
  Coding DNA Sequence Number=SeqID_20151
  Homolog annotation: Hit_ID=Q337E9; Match level="QueryCoverage=57%, HitCoverage=8%, E-value=2e-13, Identity=66%"; Hit description=NAD -dependent malic enzyme 59 kDa isoform, mitochondrial, putative, expressed
MTVGEGLCRMAHQTVRFRRLLSSAAPPAHAGAAVPGPCIVHKRGNDILHDPWYNKDTAFPMTERDRLGLRGLLPPRVMSFEQQYERFSESPF

SEQ ID NO: 61931 - protein, 544 aa, Zea mays
  Coding DNA Sequence Number=SeqID_20152
  Gene Ontology: Mol. function=oxidoreductase activity, acting on the CH-OH group of donors, NAD or NADP as acceptor; Cellular component =mitochondrion; Biological process=malate metabolic process
  Homolog annotation: Hit_ID=Q337E9; Match level="QueryCoverage=99%, HitCoverage=85%, E-value=0.0, Identity=75%"; Hit description=NAD -dependent malic enzyme 59 kDa isoform, mitochondrial, putative, expressed
  Pfam annotation: Domain name=Malic_M; Domain location=207-500; Score =351.9; E_value=1e-102; Accession=PF03949.5; Description=Malic enzyme, NAD binding domain
  Pfam annotation: Domain name=malic; Domain location=30-205; Score =308.2; E_value=1.5e-89; Accession=PF00390.9; Description=Malic enzyme, N-terminal domain
  Pfam module annotation: Pfam domain module=Malic_M::malic; Domain location=207-500::30-205
NSFRALEHNTRGEPDSIVALAKWRILNRLHDRNETLYYRVLIDNIKDFAPIIYTPTVGLVCENYSGLFRRPRGMYFSAKDKGEMMSMIYNWPAEKVDMIVVTDGSRILGLGDLGVQGIGIPIGKLDVYVAAAGINPQKVLPIMLDVGTNNEKLLEDKLCAGFPYYFRSKYCSLSEVIKSQFEDFQMKWAFETLQRYRNRFCMFNDDVQGTAGVALAGLLGAVRAQGRPLQDFTNQKIVVVGAGSLLYMECSLSKMWFVHSNSSLESSAGIGVLSMAKQAMLRMPGIHRTGEGHNQFWVLDKDGLITKARKDLDSAVARFARGFGPDEVPDLYEGASLVEVVKKVKPHVLLGLSGVGGIFNEEVLKAMKESDSPRPAVFAMSNPTTKAECTPDDVFKHVGDKAIFASGSPFSNVSLGNGKSGYANQANNMYLFPGYDNLSPSSALLSGARHVSDGMLQAAAECLASYITDDEIRKGILFPSVSSIRHITARVGAAVVRAAVAEDLAEGCCDVGPRELGSMSESEAVDYVARKMWYPIYSPLVSDK

SEQ ID NO: 61932 - protein, 151 aa, Zea mays
  Coding DNA Sequence Number=SeqID_20153
MEKSRGDMLAEEANLAREVFKAPGHQILTICKSLVVAAVVGGVGIDIVFTCTMCAFSLLAYVILKIKGVVTFVESQSSRSYIINVYAVIWNEAKSHLLMKKATVTKVEVGRLGDRVCLDLCSIMQPGGHLLVLEKSLLGFAFQIAFTTSEI

SEQ ID NO: 61933 - protein, 209 aa, Zea mays
  Coding DNA Sequence Number=SeqID_20154
MDELCRYAAVGALRPEPTVTSQAKSDCHFRFERDPRYGPRRASGGNRRLRLAESEAEGAKRDAAGLVSAPGGRRNQTVAVPTGWAPSRLPINPGRATCHTPPHFQTWQPQRLQEQSRAGSTRETERDNSGAMDVYIAEEYVAQRRAERRAARVAAAARCGEEKARADSEQKRRWTEDGKRPADGGDAGGGAAAAWLQAGEDAVLSYLSA

SEQ ID NO: 61934 - protein, 120 aa, Zea mays
  Coding DNA Sequence Number=SeqID_20155
MHQPRARYPPGYGSGGGGGAGRGGGGGNGGGGGNHNYYGRNPQQHHYHQQQQSQHSHRNSSYQQQWLRRDQAPAVAGAASGNAVAKTASQLDAVGSRSHAGCWSDFGCFIVYVTSTIISC

SEQ ID NO: 61935 - protein, 730 aa, Zea mays
  Coding DNA Sequence Number=SeqID_20156
  Gene Ontology: Mol. function=microtubule motor activity; Cellular component=microtubule associated complex; Biological process =microtubule-based movement
  Homolog annotation: Hit_ID=Q6WJ05; Match level="QueryCoverage=78%, HitCoverage=65%, E-value=0.0, Identity=60%"; Hit description=Central motor kinesin 1
  Pfam annotation: Domain name=Kinesin; Domain location=108-406; Score =253.9; E_value=3.4e-73; Accession=PF00225.13; Description=Kinesin motor domain
MSEPYTPTAQSFGGGNPVEGFYSPELRGELGAGLLDLHAIDDTELLSEDVASEPFEPSPFMPKDIDDDDEDVISGSQQAPLDNYGLVTSEKESTTRENNVAKIKVVVRKRPLNRKELSRKEEDIITVHDSSCLTVYEPKLKVYRETVEPIIPIIFQRTKATCFAYGQTVSVDLSNLRAGSGKTYTMQPLPLRAAQDMVRLLHQPVYRNQNFKLWLSYFEIYGGKLFDLLSDRRQLLMREDGKKQVCIVGLQEFEVSDVQIVKEYIERGNAARSTGSTGANEESSRSHAILQLAVKKHIIVKDTRRQRDRDANEAKNTKAVGKISFIDLAGSERGADTTDNDRQTRIEGAEINKSLLALKECIRALDNDQIHIPFRGSKLTEVLRDSFVGNSRTVTMLYPSDIRDLYVPKMLPVINLVDFWNRVKSLSKGGNTRKEQPTGPTTTSSRESSSAPSYSLPAEAEEIPNQIQEKRPVDTYRKGTENFTSNPSAEPDRNSFSMVPNYSNKGREDNGAASGNDRERYDLKSTQTAYTSKAQLVQNSTNTQEEKVTKVSPPRRKAYKEDKSDRQGNYVKKDNGPETGRTGYKIQQAKQLQQQQRPTSASASSRQSEKESSCDDVEIDAILERGEDVENSNVTSGDPLADKAQVDLHVFCALMLHEIGGEVDRADVVAIGEADVLEEASTTPLATVPYPASALERETTGCCLAAHETRLPPKNTTYPEVDRRVLGQPT

SEQ ID NO: 61936 - protein, 90 aa, Zea mays
  Coding DNA Sequence Number=SeqID_20157
MKGVEDFAYWLLLFSPGFRLPLVRLVAFLIETIMLAPRDNEDSLLEEVLTIASAEELDPQIINIAMKLAEKMFHKMKEDKAKKKAEEEED

SEQ ID NO: 61937 - protein, 190 aa, Zea mays
  Coding DNA Sequence Number=SeqID_20158
MQVEASTEVIVREIGRHTKACLGWEKKLKHFSCKSIGIGLEGGFERLERHRQARRSTTFTQPPSSSATTRKGARGLEETSVSLYETYDLLGPPSSLQRWALERPAGIVSGEEEEDPSARERREVVVEPGALVGLRLRGVWVPGRGGGLGGGRHVATSRHNLVFLMSYDVVRNWVNLARVNVVLYPRDKNV

SEQ ID NO: 61938 - protein, 127 aa, Zea mays
  Coding DNA Sequence Number=SeqID_20159
  Homolog annotation: Hit_ID=Q6QP51; Match level="QueryCoverage=69%, HitCoverage=48%, E-value=2e-13, Identity=60%"; Hit description =Putative growth-regulating factor 1
  Subcellular localization annotation: CTP_CleavageSite=58; ConfidenceScore=5.48e-01
MPEPTHENSAACPSPTVVPPARVKLTTAKFSLRRNRKLRLTRPWDSASGGGLRLARPQCSAPASASEGGLRLARPQGSAPRLGLGRWSPPRPTPGLGLNLGLERWSPPRPTLGLRLNLDLRRNRVLT

SEQ ID NO: 61939 - protein, 481 aa, Zea mays
  Coding DNA Sequence Number=SeqID_20160
  Pfam annotation: Domain name=IQ; Domain location=137-157; Score=22.3; E_value=0.0017; Accession=PF00612.17; Description=IQ calmodulin -binding motif
  Pfam annotation: Domain name=IQ; Domain location=159-179; Score=20.6; E_value=0.0055; Accession=PF00612.17; Description=IQ calmodulin -binding motif
  Pfam module annotation: Pfam domain module=IQ::IQ; Domain location =137-157::159-179
MGKAARWLRGLLGGGRKDQERRASPAPPTADRKRWSFARSSRDSAEAAAAATEGSVRGGGNAAIARAAEAAWLKSLYDDTGRQQSKHAIAVAAATAAAADAAVAAAQAAVEVVRLTSQGPVFGGGGPVPVLDPRGRAGAAVKIQTAFRRFLAKKALRALKALVKLQALVRGYLVRRQAAATLQSMQALVRAQAAVRAARYSRALPALPPLHHHPPVRARFSLQERYGDDTRSEHGVAAYSRRLSASIESASYGGGYDRSPKIVEMDTARPRSRASSLRTEDEWYAQSVSSPLLPPPPPPPCQHLHQYHHLPPRIAVPTSRHFPDYDWCAPEKPRPATAQCTPRCAPPTPARSVCGAGGNGGGYLAASPGCPGYMSSTRSSEAKSSSRSQSAPKQRPLEQQEQQQQPARKRVPLSEVVLEARASLGGAGVGMHKPCNTRAQAQDAFDFRTAVVSRFDRRASDAAAAAAERRDRELFFLQRRW

SEQ ID NO: 61940 - protein, 323 aa, Zea mays
  Coding DNA Sequence Number=SeqID_20161
  Gene Ontology: Mol. function=DNA binding; Biological process =regulation of transcription
  Homolog annotation: Hit_ID=Q9FJU6; Match level="QueryCoverage=73%, HitCoverage=59%, E-value=1e-80, Identity=62%"; Hit description =Arabidopsis thaliana genomic DNA, chromosome 5, P1 clone:MIK19
  Pfam annotation: Domain name=NAM; Domain location=70-213; Score =186.5; E_value=6.5e-53; Accession=PF02365.6; Description=No apical meristem (NAM) protein
MNRAHSSSSKLINEKLVEHRISTAKHCPHCGEKIDSKPLCTSSASMRPGGGATCFDGINCCNCKKDWVGLPAGVKFDPTDQELIEHLEAKVKDEGSRSHPLIDEFIPTIDGEDGICYTHPEKLPGVTRDGLSKHFFHRPSKAYTTGTRKRRKIQTECDVHKGETRWHKTGKTRPVMVNGRQKGCKKILVLYTNFGKHRKPEKTNWVMHQYHLGDLEEEKEGELVVCKIFYQTQPRQCSWSSDRGAAATALAATAAAAAAQEQHRRDSGSGSCSSRDHEVSATSFPAGYTVTTAVEMQQHMKQPADHFSFAPFRKTFDQELSVL

SEQ ID NO: 61941 - protein, 139 aa, Zea mays
  Coding DNA Sequence Number=SeqID_20162
  Subcellular localization annotation: CTP_CleavageSite=20; ConfidenceScore=5.31e-01
MAHGRGAPVVLSAQVPSTTRAGGRSGFRETAAQVFLRGTVGVQLLHPSIAALGSPALSGVLLSAETGQKTHTTVLQHTHGIRIRICCDLSISVCAPTKQMGWQIIARVATDPSVGQNRDSKCVLYVRTVLHTDDNERGH

SEQ ID NO: 61942 - protein, 125 aa, Zea mays
  Coding DNA Sequence Number=SeqID_20163
MEPNPREEQIKSPEPGDPIQQETKNQTKGWEFWSPKPKEKAKKERRRSGAASHLGPSLAVAVAVAAEWNGGSEDPLRLRNKVLAGFETSLSPSFKPRMNDIALSKLIRVKYSRWTYDVKDVSPHP

SEQ ID NO: 61943 - protein, 463 aa, Zea mays
  Coding DNA Sequence Number=SeqID_20164
  Gene Ontology: Mol. function=transferase activity; Cellular component= integral to membrane; Biological process=glycolysis
  Homolog annotation: Hit_ID=Q1WM15; Match level="QueryCoverage=99%, HitCoverage=98%, E-value=1e-171, Identity=66%"; Hit description =Hexokinase-8
  Pfam annotation: Domain name=Hexokinase_1; Domain location=3-208; Score=203.9; E_value=3.8e-58; Accession=PF00349.11; Description =Hexokinase
  Pfam annotation: Domain name=Hexokinase_2; Domain location=209-421; Score=174.9; E_value=2e-49; Accession=PF03727.6; Description =Hexokinase
  Pfam module annotation: Pfam domain module=Hexokinase_1::Hexokinase _2; Domain location=3-208::209-421
MAEQVVAELRVRCETPPSMLREVAVEMAREMGAGLEKDGGSRVKMLLSYVDKLPTGREEGLFYGLDLGGTNFRVLKVQLGGNAKHVVDRDSREVGIPPHLMSGSSSELFGFIASELAKFVDDDEKCANISNGKKREIGFTFSFPVKQRSVASGTLVKWTKAFSINDAVGEDVVAELQTAMEKQGLDMHVAALINDAVGTLAGARYYDKDVVAGVIFGTGTNAAYVEKANAIPKWEGELPHSGDMIYEKLTSGMYLGEIVRRVLLKISLQSAIFGDIDHTKLQTHFLLRTPHISAMHHDETSDLKIVAENFEENLEITGTSLEARKLVVEICDIVATRAARLAAAGLAGILMKIGRDHSVEDQRSVIAIDGGLFEHYTKFRRCLETTLGELLGDEASKAVAIKHADDGSGIGAALIAASQSQYKNDLVAVKHADDGSGVKYAEDKRADDGSEIGAALIAASQSQ

SEQ ID NO: 61944 - protein, 139 aa, Zea mays
  Coding DNA Sequence Number=SeqID_20165
  Subcellular localization annotation: CTP_CleavageSite=22; ConfidenceScore=5.09e-01
MSSCSVGWKGLVGRFFMLRCTVCMARNRSMTKLSTPTSSKALQGEEDKSDMEIVYGSTRAYPQFINEVRGIHMGGEVSRLEVPHAGLSKQMDEQLDLGVVLCKGRLEGKKGSKGHGYEANEDKIQLKETPLRHILPPTP

SEQ ID NO: 61945 - protein, 87 aa, Zea mays
  Coding DNA Sequence Number=SeqID_20166
MAATCFRRDPTDVDYLSVRNRKRKRLEESACVQPRLSTVWRIGLSGGAPDSVRCARMVSGKLATLGKSSAVYDYNSPDCPVVHRTVR

SEQ ID NO: 61946 - protein, 882 aa, Zea mays
  Coding DNA Sequence Number=SeqID_20167
  Gene Ontology: Mol. function=catalytic activity; Cellular component =intracellular; Biological process=metabolic process
  Homolog annotation: Hit_ID=Q5ZDP1; Match level="QueryCoverage=99%, HitCoverage=100%, E-value=0.0, Identity=77%"; Hit description =Pentatricopeptide (PPR) repeat-containing protein-like
  Pfam annotation: Domain name=PPR; Domain location=136-170; Score =15.8; E_value=0.099; Accession=PF01535.11; Description=PPR repeat
  Pfam annotation: Domain name=PPR; Domain location=171-205; Score =43.1; E_value=9.8e-10; Accession=PF01535.11; Description=PPR repeat
  Pfam annotation: Domain name=PPR; Domain location=206-240; Score=1.9; E_value=4.4; Accession=PF01535.11; Description=PPR repeat
  Pfam annotation: Domain name=PPR; Domain location=272-306; Score =38.8; E_value=1.9e-08; Accession=PF01535.11; Description=PPR repeat
  Pfam annotation: Domain name=PPR; Domain location=373-407; Score =40.7; E_value=4.9e-09; Accession=PF01535.11; Description=PPR repeat
  Pfam annotation: Domain name=PPR; Domain location=476-510; Score =34.5; E_value=3.8e-07; Accession=PF01535.11; Description=PPR repeat
  Pfam annotation: Domain name=PPR; Domain location=511-545; Score=0.3; E_value=6.8; Accession=PF01535.11; Description=PPR repeat
  Pfam annotation: Domain name=PPR; Domain location=577-611; Score =45.6; E_value=1.6e-10; Accession=PF01535.11; Description=PPR repeat
  Pfam annotation: Domain name=PPR; Domain location=612-645; Score =13.2; E_value=0.21; Accession=PF01535.11; Description=PPR repeat
  Pfam annotation: Domain name=PPR; Domain location=648-682; Score =10.7; E_value=0.41; Accession=PF01535.11; Description=PPR repeat
  Pfam annotation: Domain name=PPR; Domain location=69-103; Score=33.5; E_value=7.4e-07; Accession=PF01535.11; Description=PPR repeat
  Pfam annotation: Domain name=PPR; Domain location=714-748; Score=9.5; E_value=0.56; Accession=PF01535.11; Description=PPR repeat
  Pfam module annotation: Pfam domain module=PPR::PPR::PPR::PPR::PPR::PP R::PPR::PPR::PPR::PPR::PPR::PPR; Domain location=136-170::171 -205::206-240::272-306::373-407::476-510::511-545::577-611::612
MRTPETIGSALARFGTSRSLFAGAHLHSHLLKSGLLAGFSNHLLTLYSRCRLPSAARAVFDEIPDPCHVSWSSLVTAYSNNGMPRDALLAFRAMRGRGVPCNEFALPVVLKCAPDVRFGAQVHALAVATRLVHDVFVANALVAVYGGFGMVDEARRMFDEYVGVGGERNAVSWNTMISAYVKNDQSGDAIGVFREMVWSGERPNEFGFSCVVNACTGSRDLEAGRQVHGAVVRTGYEKDVFTANALVDMYSKLGDIEMAATVFEKMPAADVVSWNAFISGCVTHGHDHRALELLLQMKSSGLVPNVFTLSSVLKACAGAGAFNLGRQIHGFMVKAVADFDEFVAVGLVDMYAKHGFLDDARKVFDFMPRRDLILWNALISGCSHDGRHGEVLSLFHRMRKEGLDLDVNRTTLASVLKSTASSEAICHTRQVHALAEKIGLLSDSHVINGLIDSYWKCGQLDYAIKVFKESRSDDIISSTTMMTALSQCDHGEDAIKLFVQMLRKGLEPDSFVLSSLLNACTSLSAYEQGKQVHAHLIKRQFTSDVFAGNALVYAYAKCGSIEDADMAFSGLPERGIVSWSAMIGGLAQHGHGKRALDLFHRMLDEGVAPNHITLTSVLSACNHAGLVDDAKKYFESMKETFGIDRTEEHYACMIDILGRAGKLEDAMELVNNMPFQANAAVWGALLGASRVHRDPELGRMAAEKLFTLEPEKSGTHVLLANTYASAGMWDEMAKVRKLMKDSNVKKEPAMSWVEIKDKVHTFIVGDKSHPMTRDIYGKLAELGDLMNKAGYVPNVEVDLHDVDRSEKELLLSHHSERLAVAFALISTPSGAPIRVKKNLRICRDCHVAFKYISKIVSREIIIRDINRFHHFTNGTCSCGDYW

SEQ ID NO: 61947 - protein, 238 aa, Zea mays
  Coding DNA Sequence Number=SeqID_20168
MEGEGLFDRRATWLPTETIGLRAVIKGLMIFFALVTYESGFESLIHEGCDHVVRLTSDEFEARESLYVEVCEVAGTAADDMLERMWSPFRAEVARKRSIAELEQVPLWGLAQSDSRVVLIKEEGSLDNVLCVTPLACQSPSDSYSFGDCFDSQSSVDDGLRFFRGNGRVVRRGLRLFCHDGRRGLKGFQAAGALQLLRRAGCIELVLPPLSEGPLREWMVLVRRPEGEMGVDARNISI

SEQ ID NO: 61948 - protein, 44 aa, Zea mays
  Coding DNA Sequence Number=SeqID_20169
MTRSATSSLTTPVVVALSKFVWATATFGGGLSAEVVAKHYCLHL

SEQ ID NO: 61949 - protein, 37 aa, Zea mays
  Coding DNA Sequence Number=SeqID_20170
MGSPTRVRRTTGFTLLLVLLFLSPPVSADLISLGVKS

SEQ ID NO: 61950 - protein, 875 aa, Zea mays
  Coding DNA Sequence Number=SeqID_20171
  Gene Ontology: Mol. function=hydrogen-translocating pyrophosphatase activity; Cellular component=membrane; Biological process=proton transport
  Homolog annotation: Hit_ID=Q7XAC0; Match level="QueryCoverage=97%, HitCoverage=98%, E-value=0.0, Identity=67%"; Hit description=H+ -pyrophosphatase
  Pfam annotation: Domain name=H_PPase; Domain location=4-863; Score =1053.4; E_value=0; Accession=PF03030.7; Description=Inorganic H+ pyrophosphatase
  Pfam annotation: Domain name=Zip; Domain location=103-438; Score= -97.1; E_value=0.08; Accession=PF02535.12; Description=ZIP Zinc transporter
  Pfam module annotation: Pfam domain module=H_PPase::Zip; Domain location=4-863::103-438
MGSAAAADVVIPACAAVGIAFALWQWFLVSRVKMSAYAAPGNGGHHGGPVFRMEDDEEDVGMGGAGDRDEEEEETAGDGTVAVARCAEIQSAISVGANSFLFTQYKYLAAFTVVFAVVIFLFLGSVHRFSTDSRPCQYTSGRTCKPALANAVFSSVAFLLGAATSVVSGYLGMRIATYANGRTTLEARRGVGAAFATAFRSGAVMGFLLASLGLLVLYITIKVFGLYYGDDWESLYESITGYGLGGSSMALFGRVGGGIYTKAADVGADLVGKVERNIPEDDPRNPAVIADNVGDNVGDIAGMGSDLFGSYAESTCAALFVASISSFGADHNFAALIISTVLMTVAALVVSLAALPAKFTMFDFGEAKQVKNWHLFLCVAIGLWAGLAIGFTTEYFTSNAYRTGAATNVIFGLALGYKSVIVPVFAIAVSIYVGFTLASIYGIAVAALGMLSTVATGLAIDAYGPISDNAGGIAEMAGMSRRIRQRTDALDAAGNTTAAIGKGFAIGSAALVSLALFGAFVSRAGVEDVNVLNPKSVGSAALKMVEEVRRQFITIPGLMEGRAAPDYARCVRISTDASLKEMMPPGALVLLAPLVAGTFFGVSTLAGLLAGALVSGVQIAISASNSGGAWDNAKKYIEERRTGTLQADVSVHCAVDLRLLHRVWAKGCLRGASASLHGMTSRFPAVFIEIRAPAWSRRKSSRGTTTVRRSGRMRDSRVVGGRGRAQARRRICLRAKLVVGRGGEITRSLDPGSGEAEGLRPRAEPCFARGGEIAPEGQSALLVVLGVSSEGGRQRDNSDNPNYYPTLRLACASDHAKSLGPKGSDAHKAAVIGDTIGDPLKDTSGPSLNILIKLMAVESLVFAPFFAAHGGLIFK

SEQ ID NO: 61951 - protein, 228 aa, Zea mays
  Coding DNA Sequence Number=SeqID_20172
  Gene Ontology: Cellular component=nucleus
  Homolog annotation: Hit_ID=Q54I18; Match level="QueryCoverage=57%, HitCoverage=11%, E-value=6e-24, Identity=43%"; Hit description =Supressor of Mek1
MAEQERRDAEAGGDAAGAAVASHTSSMQRVKVYRLADGGKWDDQGTGHVSIDYIEGSKELGLTVLDEDDNETLLMHNITSDDIYRKQEETIISWRDREAATDLALSFQEAAGCSYIWEHICEIQRNLQFSNLGDDSFRSANGEFRELPPVELSNLPFILKCSPGCEAVKGVVGLFANRDSLGTRPLCLPIEGHCLYCWKPNPWSGLSVAYIRKKELHGVMGWAKAHNT

SEQ ID NO: 61952 - protein, 69 aa, Zea mays
  Coding DNA Sequence Number=SeqID_20173
MESGVWPEVSTEQGTSEIAALLQDELVYPRAEHGEDECCCFPGPGAMAYPEASGKMGRYETSAGTGVAQ

SEQ ID NO: 61953 - protein, 140 aa, Zea mays
  Coding DNA Sequence Number=SeqID_20174
GQWWSSGSWLHSAQRRTAPWLRWPATKETPAMKGTTASLWVAHSKREGREGLEVWAGLQGAASDFIERGGEEGHPAEEETGGNGALDGHYGGGFLIDGEEDVGEKRGDREENGRRLNAPLPSGAKGARGRRGGVGGQAAR

SEQ ID NO: 61954 - protein, 220 aa, Zea mays
  Coding DNA Sequence Number=SeqID_20175
MEKTNTEKITNEMLAGLSEDSSDSDSFDVESENEDAKDRSWRLSHVVFGKSTMRVWLPRVVQASPRPAVVYAAVPHIISSLLPFTAASAPCLSNAKENRPPLHHGPPHCLVFKPLAVQPHSSPRDALTAMLRVATPGASCARDSPSSSSSQGEKSRDAASRTVPPAKPRLEFPWTRPSFIHGELAPFLSPYPSSSPLDVLGMTHTRRGQSPTEMAHGRAR

SEQ ID NO: 61955 - protein, 78 aa, Zea mays
  Coding DNA Sequence Number=SeqID_20176
  Subcellular localization annotation: CTP_CleavageSite=44; ConfidenceScore=5.65e-01
MDLSLRRGPNPHQRPSSNLNPFGPASPALSLTGRRVLRVIRLTSGATVPETHTPAVRNSVGLAARRGPPPWAHHEHHG

SEQ ID NO: 61956 - protein, 161 aa, Zea mays
  Coding DNA Sequence Number=SeqID_20177
INSGLKKIPGSLNLVAGDLRTTIRACLGDLRCDSMDNAGGLKRSRHGGELKPYHRTIHYATCRAIGRDALTGVRLSSQSCHVLKGVTTSQEVALDSPFTALSPYPAERHASEVKPMHSTPPEHVTAGENPRLRPTSLLYFTIVVSQSYPSGDSFGVYSYPL

SEQ ID NO: 61957 - protein, 247 aa, Zea mays
  Coding DNA Sequence Number=SeqID_20178
  Gene Ontology: Mol. function=microtubule motor activity; Cellular component=microtubule associated complex; Biological process =microtubule-based movement
  Homolog annotation: Hit_ID=Q5VQ09; Match level="QueryCoverage=93%, HitCoverage=26%, E-value=1e-119, Identity=95%"; Hit description =Putative kinesin
  Pfam annotation: Domain name=Kinesin; Domain location=1-245; Score =149.2; E_value=1.1e-41; Accession=PF00225.13; Description=Kinesin motor domain
MAYGQTGTGKTFTLGRLGEEDTAARGIMVRAMEDILADITPGTDSVSVSYLQLYMEMIQDLLDPVNDNIAIVEDPRTGDVSLPGATVVEVRDQKSFVDLLRVGEAHRVAANTKLNTESSRSHAILMVNVRRSVKGRTEMDVSISGENGLSSSLVGSLRPPIVRKSKLVVVDLAGSERIDKSGSEGHTLEEAKSINLSLSALGKCINALAESSPHVPVRDSKLTRLLKDSFGGQHSAPYNTTCLIVIL

SEQ ID NO: 61958 - protein, 281 aa, Zea mays
  Coding DNA Sequence Number=SeqID_20179
MTPSCSRGVKKTDPTGWSQDAVTPRARRPEELRAHAPGGLGGKRAAQRMASGCDRAMGPSAESASARSVERNGLRTDGLSWWAKSGHFQHLHNEDSTEKPRSETLAIHLGIVLTVMSGLDPHMIIELEDEIKHGAEDPPPPRLRESIVRDSHRNSSSSGWLLRWPLLLLDAVLLSLSLNRARAPSGVEVDQALALVEFAMNPEYKLEFKRIIVKKLPMVKMLMVKSKMKIMMVNLMDASLAMLGVSFSVEGPQNEGNMLFITFVQEPLSLKEDNTSKDEDP

SEQ ID NO: 61959 - protein, 355 aa, Zea mays
  Coding DNA Sequence Number=SeqID_20180
  Gene Ontology: Mol. function=GDP-mannose 4,6-dehydratase activity; Cellular component=intracellular; Biological process=GDP-mannose metabolic process
  Homolog annotation: Hit_ID=Q9M7I6; Match level="QueryCoverage=99%, HitCoverage=100%, E-value=1e-156, Identity=88%"; Hit description =Root cap-specific protein
  Pfam annotation: Domain name=Epimerase; Domain location=36-262; Score= 206.1; E_value=8e-59; Accession=PF01370.11; Description=NAD dependent epimerasedehydratase family
  Pfam annotation: Domain name=RmlD_sub_bind; Domain location=37-295; Score=-181.0; E_value=0.021; Accession=PF04321.7; Description=RmlD substrate binding domain
  Pfam module annotation: Pfam domain module=Epimerase::RmlD_sub_bind; Domain location=36-262::37-295
MAHSNGAAATATAGGGDMDDETAPVPRALAPARKVALITGITGQDGSYLTELLLSKGYEVHGLIRRSSNFNTQRLDHIYHDPHAVPSAPRPPMRLHYADLSDSSSLRRALDAISPDEVYNLAAQSHVAVSFEIPDYTADVTAHGGRSASSRPSASRGHALPPALALRRRQRSPRTGTPSTTREAYGVFACNGVLFNHESPRRGENFVTRKITRAVGRIKVGLQTRVFLGNLSAARDWGFAGDYVEAMWLMLQQEQPGDYVVATEESHTVEEFLQAAFGYAGLSWKDHVVIDKKYFRPAEVDSLKGDATKARKVLKWKPKVGFQELVEMMVDHDIELAKKEKVLVDAGYRDPKQQP

SEQ ID NO: 61960 - protein, 331 aa, Zea mays
  Coding DNA Sequence Number=SeqID_20181
  Gene Ontology: Mol. function=microtubule motor activity; Cellular component=microtubule associated complex; Biological process =microtubule-based movement
  Homolog annotation: Hit_ID=Q5VQ09; Match level="QueryCoverage=51%, HitCoverage=19%, E-value=6e-88, Identity=95%"; Hit description =Putative kinesin
  Pfam annotation: Domain name=Kinesin; Domain location=155-331; Score=- 1.9; E_value=5.1e-14; Accession=PF00225.13; Description=Kinesin motor domain
  Subcellular localization annotation: CTP_CleavageSite=54; ConfidenceScore=5.48e-01
MASSGVRNGVGPRMSAKPDRQGAGATPKTAAGKHRVSSAGGAGAYRRTSSGPLPAAAGGRAASDGAVEDNEEPQLVNVSSCWFCMHLVFEASNEVRLDVYFSFVQFQTSKECIVKGVEPPTSRTASTQLVAVGRPLRIYSSLVPAVSSRVRVAVRLRPRNAEELAADADFGDCVELQPELKRLRLRKNNWESETYEFDEVLTDFSSQKRVYEVVAKPVVESVMEGYNGTVMAYGQTGTGKTFTLERLGEEDTAARGIMVRAMEDILADITPGTDSVSVSYLQLYMEMIQDLLDPVNDNIAIVEDPRTGDVSLPGATVVEVRDQKSFVDLLR

SEQ ID NO: 61961 - protein, 132 aa, Zea mays
  Coding DNA Sequence Number=SeqID_20182
MVEGSIWSEDARDGQSTARWRAPTVVRSPVRPTGVIGEGKESKRERKGELTGDEDDGGAGSIKLGEGERGGRGWGEEGWSSGGPFYRRPERRKGRWRAPVMLATAAMMALSGGFGMARADRVTRWLGQTNQA

SEQ ID NO: 61962 - protein, 87 aa, Zea mays
  Coding DNA Sequence Number=SeqID_20183
MAKEEEESENPGPPVSGTKGEKADRVNLMRRSHQSLKVSGSVGVRIGVRARLDEPGRGGCLVGPHGSSLELNARALLEMTSNCLIPF

SEQ ID NO: 61963 - protein, 251 aa, Zea mays
  Coding DNA Sequence Number=SeqID_20184
MEKSWGGRWLEGAEGSAQPLGVSSAKARPPRTMASRKERAQWILALVSAGADYRCWARPQRGRVGRQLETCQAGRSRGKGTRCSWHSHGRAGRSALGEGAEKGGAMGRGSTNEHGREKRAFGEKWRPGGGIVAMGGKAPAGSGCSRGTRPRRLLLRVPMGGGARAWGAGHGEKGRRRHGRSGATEESRGVADSGRPRGVAGPREEQGRGGAREVAMGVPLLLRGTGEEEEDARRTLLRAEEEFPCLACVPG

SEQ ID NO: 61964 - protein, 251 aa, Zea mays
  Coding DNA Sequence Number=SeqID_20185
  Gene Ontology: Mol. function=protein serine/threonine kinase activity; Cellular component=anchored to membrane; Biological process=protein amino acid phosphorylation
  Homolog annotation: Hit_ID=Q94HS1; Match level="QueryCoverage=88%, HitCoverage=69%, E-value=6e-86, Identity=64%"; Hit description =Putative thaumatin-like protein
  Pfam annotation: Domain name=Thaumatin; Domain location=30-247; Score= 246.4; E_value=6e-71; Accession=PF00314.8; Description=Thaumatin family
MARHSLALVLLVVIAISVTGVQSKMFTITNNCVHTVWPGISTGASPAPPLDTTGFELAPGESRALPVPSGWSGRVWGRTLCSTAAGTGKFTCVTGDCGSGLQECASGNAAPPVTLAQFSMDGSGGMDLYDVSLVDGYNLPMVVVRQGAAAEGNCVPAGCVVDLSGACPAELRVPGVVACKSACQAFGSPRYCCTGEYGNPDTCKPSAYSEFFKKACPRAYSYAYDGNTSTFGCSASDTGVYIITFCPSTSR

SEQ ID NO: 61965 - protein, 47 aa, Zea mays
  Coding DNA Sequence Number=SeqID_20186
MEIGIGRTLSVFRVRPRTQGYPPSRLIFTQFRCTGLLRGKVGSLPIT

SEQ ID NO: 61966 - protein, 97 aa, Zea mays
  Coding DNA Sequence Number=SeqID_20187
MPPTVSLDNNDDLMSGHWMGLVSSSDEDDENDDGSNDYDISDEDNDNSGDDDGDDDGGASQSDEMPPSKRHQLQHDNLLWSLQAQQERGSPQVPRDD

SEQ ID NO: 61967 - protein, 64 aa, Zea mays
  Coding DNA Sequence Number=SeqID_20188
  Subcellular localization annotation: CTP_CleavageSite=26; ConfidenceScore=5.38e-01
MPCIRSPFLRALSFTSLSLQSTFKLSCAKKLKQLKNKCSTFPLKENIMMLPMEENKCPRSRVSE

SEQ ID NO: 61968 - protein, 77 aa, Zea mays
  Coding DNA Sequence Number=SeqID_20189
MANSTVGTTLERAALEGAEHGGTQGRLSDGGDTGKPQVYGGGLRLHGESPSPLAICVPGFTPITVIRAWHALIFAGR

SEQ ID NO: 61969 - protein, 640 aa, Zea mays
  Coding DNA Sequence Number=SeqID_20190
  Gene Ontology: Mol. function=transporter activity; Cellular component= membrane; Biological process=oligopeptide transport
  Homolog annotation: Hit_ID=Q6ZGW7; Match level="QueryCoverage=87%, HitCoverage=94%, E-value=1e-127, Identity=43%"; Hit description =Peptide transporter-like
  Pfam annotation: Domain name=MFS_1; Domain location=76-569; Score =11.3; E_value=9.6e-05; Accession=PF07690.6; Description=Major Facilitator Superfamily
  Pfam annotation: Domain name=PTR2; Domain location=138-553; Score =251.7; E_value=1.5e-72; Accession=PF00854.12; Description=POT family
  Pfam module annotation: Pfam domain module=MFS_1::PTR2; Domain location=76-569::138-553
MAEGSWTPTAELPLRQDPAVDDDLPQVVVQEKQHGGGAAARTAMATATATRDGSVGWSGKPCRRDRSGGWFAGFLMLANQALVTFAVNCVGTNLVTFMSVVMRLDNADAANKANNWAGTTYVFSIVGALVSDSYWGRYKACTIFQLIFLAGLVELAVACHVFLDKSCHFGGGGGGRQEHCRPPTTAQSLVFYVSIYQIALGNGAYQPAVTTFGADQFDETDARERRSKAAFFGYFFVANNLGGVLAVTALAYMEDEGQWVLAFWIATAAALLGFLLFAVGTIRYRHFLPSGNAVVSVCQVVVAAVRNRRVRATVRAQDMYDPDTDGDRGKKGVRKMVHTPEYRCLDKAAVIKDPASAFRAPAGQPQGHSSSKPNPWRLCTLTQVEELKCILRLVPIWLCSILYSTSYSQMSSVFIEQAQTMDDSLSKLTIPPAGMDVFEILGVTAFVFIYRFCIVRVMAKISHEPTELQRMGTGLVISAAAMVASGVVEQQRLARATAGVDASSSLSILWQIPQYLLIGASEVFMYVTMTEFFNDQLPEGLRSLGSAMSVASMSAGSFASSLLVTLVMAITCRGGRPGWIPQDLNKGHVDWFFYLIAALNAVDLLAFVVFAKRYRPAPVIIHGEDETGGVEKAQDAEECI

SEQ ID NO: 61970 - protein, 130 aa, Zea mays
  Coding DNA Sequence Number=SeqID_20191
MVPLPHRYHELATGCTIHFFALIGLLIRAWPFSKFISNLPVQDDSLDHRVCSSLEDIEAFIATYRNLPEEERPTHLQMQMTADEAETNVVLSMLVGESSESARTKSASAAAGRALSKDEGACSSGGAHRK

SEQ ID NO: 61971 - protein, 147 aa, Zea mays
  Coding DNA Sequence Number=SeqID_20192
MGKSKKGGGSSHHSGDKRKREPTPPSEDFSDSEYSEENPPPNDSQGIAAEVWTYIQAVERAGLEGSDESEYSSDEENSSDSSEEGSGGDDDDDGGDGDGGGDSDSGKGGDDNDKGGSGDGGGGSKGSSKGSNKASGYTPLVLDVSVD

SEQ ID NO: 61972 - protein, 45 aa, Zea mays
  Coding DNA Sequence Number=SeqID_20193
  Subcellular localization annotation: CTP_CleavageSite=6; ConfidenceScore=5.00e-01
MGDFVVSARRSSTTATTQRPMQERGLSSLKPLRTKAPRQAKECSR

SEQ ID NO: 61973 - protein, 42 aa, Zea mays
  Coding DNA Sequence Number=SeqID_20194
MRFIHTPEDDVVLYSQRETLYNLLSLFEEMRWCLMLIKGSKK

SEQ ID NO: 61974 - protein, 76 aa, Zea mays
  Coding DNA Sequence Number=SeqID_20195
MGKSKKGRSSSHHSGDKRKREPSPPSEDLGDSEYSEEEFSSESEGSLRFRGSCQVMLGNVGALEVAAELCWATSAL

SEQ ID NO: 61975 - protein, 154 aa, Zea mays
  Coding DNA Sequence Number=SeqID_20196
MRRGSGAAAAGLLRRYVEHAEGATQKRSTWLRELASRLLREVRQGVLDATRPKHRVSSAAGKSDMWGGCSAGAGCARRARSPRNESWCWGGDGAELRREEGGAPLGIARGSSLLRMASSSCEPRGRARPWEDGHRALLLWGGEAAREGHVHGRE

SEQ ID NO: 61976 - protein, 372 aa, Zea mays
  Coding DNA Sequence Number=SeqID_20197
MSTSPLSQKPGRNVGAASSALGIRMDKEFLAIQGHLKKAKNYALAPQRRRSPSGARGVSSTPRRTTSRAKASTEAAYQTRITAPEANSKQQQHPYPIPPAVPDNKLRPVEASTSSSQKRGRDVDAAWSSALQLRMDEELPVLQGLLKKVKPLPRSTFLAADEKKNYAPSPAGRSSTSGAPVVSRGHDVDAASSSALQLRMDEELPVLQGLLKKVKPLPRSTSPAADEKKNYAPSPAGRSSTSGAPVVSRGHDVDAASSSALQLRMDEELPVLHDILKKVKPLPPSTSPAADEKKNYAPSPAGRSSTSVPPVLSSTANTTTSQPNAETEFVYQKEREEFRQMLMEMEKSALRDETIYPEDLQELGLSHHWYMS

SEQ ID NO: 61977 - protein, 62 aa, Zea mays
  Coding DNA Sequence Number=SeqID_20198
MGQSILKEKDLKKMKEPGYFGNKGKEWFYAEVNYEHHIDFKDMLMSPLEISFGLKRPKCDMN

SEQ ID NO: 61978 - protein, 183 aa, Zea mays
  Coding DNA Sequence Number=SeqID_20199
MKQAKSIEEEAKDTEIDNEEESPTDKETPLKKRAKKTIAQAQGSTSTTSLGYTLILEVMTRPLPLSTLSPLGLELTSLLLNAKGTCKGGQASTLVETEEPPSEVESPRIESLMEAIFRASSLEEDEDEGQNVEGECVPKAGEGRIVRNIAQCIEFLMIETSLSQHKNGNFHKAWIALASRASC

SEQ ID NO: 61979 - protein, 110 aa, Zea mays
  Coding DNA Sequence Number=SeqID_20200
MRKSSFFWDEPKSGLESADAEFVVFRGEAESESEPGVGEAEFVVFRAEAEFRALGSGKAELPMVPEARTWLLSASLCRVAQQSEQHRRRCPLVRPSVERRSDCGHFGSVD

SEQ ID NO: 61980 - protein, 80 aa, Zea mays
  Coding DNA Sequence Number=SeqID_20201
METRRGSWKATRASMREGNHRSMGNLSLESFLRRGSVTHRGLGLSLHNYGVRSLMLESLCLRHREELSGCGSRLRSQSDT

SEQ ID NO: 61981 - protein, 196 aa, Zea mays
  Coding DNA Sequence Number=SeqID_20202
MARFRHTARKSVIPFLPSRLAERPLHRPVNSQSSHLERLHHRLHEEQERRRQELEQQGSSSSPQQEVKSVRSCSPVPWLEAPPTPPLGVSATGVAVGGDPDDGAQSRGLPGPLGGDLFSAPSREQSPGCGVLGGVVDGLNMRYYPRRLSSSTRDVVVSLVGEDNPRLSSTVNLAVVLNTELDHDLDELSRARAEIA

SEQ ID NO: 61982 - protein, 268 aa, Zea mays
  Coding DNA Sequence Number=SeqID_20203
MVVASPVLAYFPSAAPLSEASAFSTVAALSDDALIAAVATFSTYVPTAGAPPMAHSLTEAPPTPITGGPTHPMAPDVLDPAFALTAGATTFLALLSSVGNAMRILLHDNPACPGHFRGLRLGMNLISRDCVELPPQAGQPHAWTAAFPRVVIASLVIETPLSPSPPSGYVGSTSPDSLFAPRAFTTSPSPTDSVVDSGASFHTTPTTSSLSHYLLPHPSHPSSIVVGNSFTLPVTLVGASVLSGPFYLNNVLVAPHYSSSSLGSSLHK

SEQ ID NO: 61983 - protein, 297 aa, Zea mays
  Coding DNA Sequence Number=SeqID_20204
  Gene Ontology: Mol. function=DNA binding
  Homolog annotation: Hit_ID=Q6H7J8; Match level="QueryCoverage=94%, HitCoverage=14%, E-value=2e-78, Identity=54%"; Hit description =Transcription factor-like
MSKKNVDLHAERHIMPLFSNCLSSYRHLLSESQLENSYSGWPWDAMTNYAEELSPVSEHQNELFTLSPELFRNAFLVIHQAGGQGVTLRELSQALHPLGKPALQFLFLQICAAMQLVLIIVDTLKRFQLAVKVNAYDGVQIVDSLHSSKYHIATLAECDSCCCTDPPTSQFVDNENTKNLLKEKHTKPINFPGPIKMLGDGHTVTVINVQSKLSPPYMHSKDPGDAERLSTPGENNKESSFYHNCERHCYQPILNGDGSTNSTLYEGLSRRVIGYVMHYPGLSVVYLLLLFVPALSK

SEQ ID NO: 61984 - protein, 136 aa, Zea mays
  Coding DNA Sequence Number=SeqID_20205
  Subcellular localization annotation: CTP_CleavageSite=9; ConfidenceScore=5.18e-01
MAPRIWNSRCSVDVQARDTRRREQREQKKQRRMRSRAAACSPRRLLPPHRRSTSITRVPGTSPPRPGMEEEEEIRGEEESRGERGLTARGALSRSAPGVRRSPASGVKEPDLRMRRAREGLCPREDAIVRPIQRDE

SEQ ID NO: 61985 - protein, 71 aa, Zea mays
  Coding DNA Sequence Number=SeqID_20206
  Homolog annotation: Hit_ID=Q6H7J8; Match level="QueryCoverage=63%, HitCoverage=2%, E-value=4e-11, Identity=69%"; Hit description =Transcription factor-like
MVLREKEDVIRRMDVLNPQTCRTLLEKLTLDGNLHVRVFEEPVPMAPTTLQGEGAHSHARDTINGRFLLRK

SEQ ID NO: 61986 - protein, 687 aa, Zea mays
  Coding DNA Sequence Number=SeqID_20207
  Gene Ontology: Mol. function=sequence-specific DNA binding; Cellular component=nucleus; Biological process=regulation of transcription, DNA-dependent
  Homolog annotation: Hit_ID=Q6H7J8; Match level="QueryCoverage=99%, HitCoverage=35%, E-value=0.0, Identity=69%"; Hit description =Transcription factor-like
MTSQQRIEITKPELLGSNEEANVDAFRVDGAFDVNSKNDISIHDYLPAMKAICDKLEEASGKVDCSHIFPIKAMLALVVSDIKVDLDYRMAYGHRAWRNVVIRELIPFLILSKVLHRLIDARLVEIFDVEDDDKVVRCLRLLKNFDPNEFQPKSIASNFKFVKKGQATDQILELPLENCIYDMISSQGTKGITLVEIGKHLGLNNSKKLHKRVSSMLKKFNLTWEAEVPDKTSQYRIWTSKNFSLYKAGTALQNFEALSEDCDDCSDLWSLVSSKDLESPSSQGKLLLLEEENHDKPIGHHIQNNRDASAAVSQLVEEGCNQIAIKLNKQVRFFLGVGFRPKKKFVLKVELHKWLERLEKKDGKIMDRKTLTRTLNKLQQEGSCKCIKVSAPLVTNYARSRLFDVILHSSVGDVSPELVEQFRTRQRNFDTKSRAGAAAKVKQNQHMTAIPGLRISRRVKVYKPLLLEAMYANGFIGAKMIRAKLFHKFLWAYVNSLPNWCNAFGCTKAGQYDKSLNQSCLLFSMEAAMKEMPLELFLQIVGSAKKIDNMITLCRLGKTLSEIPTEEYNQILDTHANGRLSRLVNILDKLKLVQLAKEFLEDAGVSSNAMYTHSMELRPYIEEPMPRILPSSQLNNHRKIRHDFVLSKKEFVDSYWETLECCYLTAGLADPLSAFPGSSVPEDYRIR

SEQ ID NO: 61987 - protein, 491 aa, Zea mays
  Coding DNA Sequence Number=SeqID_20208
  Gene Ontology: Mol. function=DNA binding; Cellular component=nucleus; Biological process=regulation of transcription, DNA-dependent
  Homolog annotation: Hit_ID=Q6H7J8; Match level="QueryCoverage=91%, HitCoverage=24%, E-value=1e-149, Identity=60%"; Hit description =Transcription factor-like
  Subcellular localization annotation: CTP_CleavageSite=59; ConfidenceScore=5.42e-01
MAADDVRVLSISNTLQFADIFTKGLPSRVTGSGGKPYTLSSQFLTNACCSPFPFGSGKKASIFSNWLIAQQKNTTDSGVYLYPDIQCGEIVHLFSLVLSGNLLISPFLPSEGVGEADEPNSSGPLVVDTSGLADNSHKRKADTVKLKSSKAKKPKPLPKIESDFCYRREKGFPAIQIGLNLHRIQTSNFLQEFHGKESSIFTSSWAMSKKNVDLHAERHIMPLFSNCLSSYRHLLSESQLENSYSGWPWDAMTNYAEELSPVSEHQNELFTLSPELFRNAFLVIHQAGGQGVTLRELSQALHPLGKLVLIIVDTLKRFQLAVKVNAYDGVQIVDSLHSSKYHIATLAECDSCCCTDPPTSQFVDNENTKNLLKEKHTKPINFPGPIKMLGDGHTVTVINVQSKLSPPYMHSKDPGDAERLSTPGENNKESSFYHNCERHCYQPILPWINGDGSTNSTLYEGLSRRVIGYVMHYPGLSEVYLLLLFVPALSK

SEQ ID NO: 61988 - protein, 88 aa, Zea mays
  Coding DNA Sequence Number=SeqID_20209
MKRGDHRQKLSTVHGDRECTTVTVRGKHAPHAGAPVRRYFGDLVPAAARWLPALLCAEVTHLGVIGYGAEVRAALTQPGRRDAEVKVA

SEQ ID NO: 61989 - protein, 221 aa, Zea mays
  Coding DNA Sequence Number=SeqID_20210
  Gene Ontology: Mol. function=RNA binding
  Pfam annotation: Domain name=KH_1; Domain location=132-194; Score =32.4; E_value=1.6e-06; Accession=PF00013.19; Description=KH domain
  Pfam annotation: Domain name=KH_2; Domain location=132-180; Score =3.8; E_value=0.042; Accession=PF07650.7; Description=KH domain
  Pfam module annotation: Pfam domain module=KH_1::KH_2; Domain location=132-194::132-180
MPPYPPVGNIPVHQSRQEQPPPHLHPSGGMPPYPMHPFRPDAPMGHFEMGDHRPPPVHSMEYMGADRMPYLYGVEQGGPRPFLEQPSPRTCPPEAPRTNSEVPRNMSDAVPATDFRKGPVAIENQVATPTGTTEVIIPCNYIGFVCGNNGSEIEEIEKMSGASITVHDPKAGDANSKVVICGDPRRNKEGTEPDSCLHILWSVSNIIDDLITVQYHRRLCS

SEQ ID NO: 61990 - protein, 273 aa, Zea mays
  Coding DNA Sequence Number=SeqID_20211
MASRFPATLIEVGAPLERCWTSHHLTCATVGRSGRLWHLRRSWWLRPSSGEVENSPEGRTRCRARRRSCARRLVSSSGEAEKLRPKAGRCFGQGREVAPEGWSLLQARRRWHAKASLCFGRGGEVAHEVWSLLRAGRRWRPWAGLCFGRGGEVAPEGWSLLWARQRSRPWAGLCFGRGGDGTCGMVFASGEVEKLHSKAGRCFGRGGDRVRGLVSASGEVEKLRLKAGAASGEAEIARVDCLCFGRGGYGARGLVSALGEAEKLHPKGGRCFG

SEQ ID NO: 61991 - protein, 125 aa, Zea mays
  Coding DNA Sequence Number=SeqID_20212
  Gene Ontology: Mol. function=protein serine/threonine kinase activity; Cellular component=integral to membrane; Biological process=protein amino acid phosphorylation
  Homolog annotation: Hit_ID=Q5VQL9; Match level="QueryCoverage=58%, HitCoverage=11%, E-value=1e-22, Identity=64%"; Hit description =Putative brassinosteroid insensitive 1-associated receptor kinase 1
MTKWQYYRCHYSVYLPTQITILACNGPKLISLHGCISEALRNLEKMHQEKQLDKLVDKGLGSKYDRIELEEMMQVALLYTQFLPGHRTKMSKVVRIQEGDGLAERWEASQHIESHKFKVPEFSFS

SEQ ID NO: 61992 - protein, 139 aa, Zea mays
  Coding DNA Sequence Number=SeqID_20213
  Homolog annotation: Hit_ID=Q2QLM4; Match level="QueryCoverage=35%, HitCoverage=15%, E-value=2e-15, Identity=72%"; Hit description =Hydrolase, alpha/beta fold family protein, expressed
MDVGEVQHWNADVNNVSFHVAEQGLEDGPAVLLLHNFLELWLSWRHKIAELAVRGRGPGAGEHVGNAGEGGEVERRQGRDIRTGGTTWGNLVDTGDGNHGPWPRTCMRHDDQHFPVPAKRTHCTDLFPLLGPGRGPRLG

SEQ ID NO: 61993 - protein, 197 aa, Zea mays
  Coding DNA Sequence Number=SeqID_20214
  Pfam annotation: Domain name=DUF584; Domain location=37-132; Score= -31.1; E_value=0.00083; Accession=PF04520.4; Description=Protein of unknown function, DUF584
MARTTRSAATERAYLHFAPAPHGGGVVVVPTSPLAGTGEDFDESDIWGAFAPSAAAAPAAEAPPPRARPFVLAAAGKATTKPAAPAHGSLPVKIPDWSKILGDEYRPAGYHPRLGLGAQSAAAVTSIIGDLILVVGSPGWQLQEDGGGGICCFSLSSLPAPTVCEETIGSALGSAQKVSPITALAYQGNIALAGVSS

SEQ ID NO: 61994 - protein, 202 aa, Zea mays
  Coding DNA Sequence Number=SeqID_20215
  Gene Ontology: Mol. function=DNA binding; Cellular component=nucleus
  Homolog annotation: Hit_ID=Q9SM14; Match level="QueryCoverage=50%, HitCoverage=27%, E-value=1e-27, Identity=86%"; Hit description=SBP -domain protein 6
MAWRPDEGRQCCYKDQFIALVVEWLKVPPPEPPWSMRGRCGGPPLPAGRARARRRSGPPRSLGGPGAEHSRDAARSWRCRQQGLLSPSRRSTPRRCSPCVTDTMEDAAEKPINKEKEQLHVSGSTEVIGALVNEEQATTEDGAEKRIKRPNTRFSGQCNMEKGKEGKSRKGWNTELVLGIVSPVQFWCQVILRLAFLSIRAK

SEQ ID NO: 61995 - protein, 86 aa, Zea mays
  Coding DNA Sequence Number=SeqID_20216
  Gene Ontology: Mol. function=protein serine/threonine kinase activity; Biological process=protein amino acid phosphorylation
  Homolog annotation: Hit_ID=Q8LLI3; Match level="QueryCoverage=88%, HitCoverage=8%, E-value=3e-22, Identity=67%"; Hit description=S -locus receptor-like kinase RLK13
MSPEYAMEGSFSIKSDTYNFGILLLEIVICLKIGSPHLIMDHPNLITYNIVSLVQAWSLWEDGNVRELVHSSVLESCPSLSAVNES

SEQ ID NO: 61996 - protein, 498 aa, Zea mays
  Coding DNA Sequence Number=SeqID_20217
  Homolog annotation: Hit_ID=Q2R211; Match level="QueryCoverage=74%, HitCoverage=77%, E-value=1e-107, Identity=51%"; Hit description=F -box domain containing protein, expressed
  Pfam annotation: Domain name=DUF295; Domain location=403-463; Score =34.7; E_value=3.2e-07; Accession=PF03478.8; Description=Protein of unknown function (DUF295)
MPGKACGARRRTEAPGSSGRTKAGGRGGEGRGRAGRSWRPPSNQLIDVVRSWRHKIHGEHRVRVAIHRWAPLWAKGSLVENLFERSWLPGIRNVDLLWSLLLSRILPKLLGLPGILLKKFRKEGSVCSSWHATYKCLLDLRQYKQPQTPCLFYTCESTGSNVGFLYSLKENRSYKLTLSEPPIRSRLLVGSSNGWLITADERSELHLVNPITGEQVALPSVITIEHVKPIFDASGTIHMYELSYETPPDLFDLGDLRDELYFKAFVFPDPSTTGSYIVVLIHEPHSQLSFARPGDDKWAWVGQGREYKDCTYVDGLLYTVNYFGKIDAFDFTASPVKMTIIMDELKYPVCENMYIIQAPWGDLLHVWRTIDVPPNAPSWVPGKCLSETLKIQVYKMDLEAKQRVEINRLQCDSVLFLGHNDSLCLSAQVHPGLKSNHAYFTDDFKELTVLLKNCMRDMGVMDLENSVKKEIVSQIWSNWPCPTWITPNLMKLNQAFNI

SEQ ID NO: 61997 - protein, 111 aa, Zea mays
  Coding DNA Sequence Number=SeqID_20218
  Subcellular localization annotation: CTP_CleavageSite=40; ConfidenceScore=5.44e-01
MEGRVRICPLQPSVATGYPAPTTCPTPPLPSPPSCLRPARAARRLCPPPGSTGLARHGVGLVETTRFVPPRPQFLGNKVTSVPLLPFLTAGDEDDPIRCLLCERLLLGPCN

SEQ ID NO: 61998 - protein, 116 aa, Zea mays
  Coding DNA Sequence Number=SeqID_20219
MGADRQARGAGRACAKRYPRFGPCRSRSDRGDQIGGSEQLRAALLISAAVRSQELTQARARVAPGVAGIGQRGRECHGELSGREKATNPRTEGEERRGESLGRTGGTPVRDSDRGD

SEQ ID NO: 61999 - protein, 68 aa, Zea mays
  Coding DNA Sequence Number=SeqID_20220
MAVPKVVGDAGERVMLLLAGLREGKKEGTGEDGFAAVVGARGMPLMMEGGMRPETGSPRTGGLSPMGN

SEQ ID NO: 62000 - protein, 82 aa, Zea mays
  Coding DNA Sequence Number=SeqID_20221
MTKVSTCQRWSKEFTGGGRQCWRLALKCYELRTRKTETILNYKCTFGLIEGKKYKRDAKANICQREQYGGTVHLFIGTGHSL

SEQ ID NO: 62001 - protein, 199 aa, Zea mays
  Coding DNA Sequence Number=SeqID_20222
  Gene Ontology: Biological process=response to biotic stimulus
  Homolog annotation: Hit_ID=Q25BJ6; Match level="QueryCoverage=80%, HitCoverage=60%, E-value=2e-47, Identity=60%"; Hit description =Streptomyces cyclase/dehydrase family protein
  Pfam annotation: Domain name=Polyketide_cyc; Domain location=51-175; Score=8.0; E_value=0.061; Accession=PF03364.10; Description =Streptomyces cyclasedehydrase
MDQQGAGGDAEVPAGLGLTAAEYEQLRSTVDAHHRYAVGEGQCSSLLAQRIHAPPEAVWAVVRRFDCPQTPKPATPSAPGRLREVSVISGLPASTSTERLDLLDDAARVFGFSITGGEHRLRNYRSVTTVSELADPAICTVVLESYVVDVPDGNTEDDTRLFADTVIRLNLQKLKSVAEANAAEAAATTNSVLLPRPAE

SEQ ID NO: 62002 - protein, 59 aa, Zea mays
  Coding DNA Sequence Number=SeqID_20223
MGSWSANHGNRVLGLSTVQIGPHRTEPVRSPWCLNKVRRKMSKKRLVWGSNHGGTASKA

SEQ ID NO: 62003 - protein, 126 aa, Zea mays
  Coding DNA Sequence Number=SeqID_20224
MDRSGSAASPPCPREIPGDSDPQTPNPTPIITGEMHSVKMQEIIPGIRMQGYPATTYDGFEDSGSTVWVEGAYDVQGPDFIADAMPRSRRTADFPRPIRAGVFRGIRKVVLGFRGIRKVVLGWETI

SEQ ID NO: 62004 - protein, 137 aa, Zea mays
  Coding DNA Sequence Number=SeqID_20225
MRCQAILALNAPAIWSVGVAIWPRLLLGEGWASGEPKLCADGGYQLRLGALGVPLIMVPDNYQATSTERDITGPCSDCGSSTEGLSQIQRRICIPVDTWDRTTLAVEISTSGLYNDPYTGWDGAICHARHASTHDER

SEQ ID NO: 62005 - protein, 74 aa, Zea mays
  Coding DNA Sequence Number=SeqID_20226
MSYNAFKHGLKYTTNAVPNMDALRARKSRGHGRYADVGEDLNVILMLTGEKCVYMDRVTKPAVIGYPYFHNNTV

SEQ ID NO: 62006 - protein, 622 aa, Zea mays
  Coding DNA Sequence Number=SeqID_20227
  Gene Ontology: Mol. function=RNA-directed DNA polymerase activity; Cellular component=nucleus; Biological process=RNA-dependent DNA replication
  Homolog annotation: Hit_ID=Q8S472; Match level="QueryCoverage=99%, HitCoverage=58%, E-value=0.0, Identity=80%"; Hit description =Putative gypsy-type retrotransposon RIRE2
  Pfam annotation: Domain name=Retrotrans_gag; Domain location=121-201; Score=8.8; E_value=0.024; Accession=PF03732.7; Description =Retrotransposon gag protein
MREASVHTGRTRNTAPTAPSRLGNEHHHRDRRAHLDERVHRGYHPRRGGRYDNGEDRSPSPEPPGPQAFSRAIRRAPFPTWFRTPTTITKYSGETRPELWLADYRLACQLGGTDDDNLIIRNLPLFLSDTARAWLEHLPPGQISNWDDLVQAFAGNFPGTYLPAATGRVSPGLHPAILEAAHRAAHITDSDVIGAFLAGTTCRDLVSKLGRKTPTKASELMDIATKFASGQEAVEAIFRKDKQPQGRPPEDAPEASTQRGAKKKGKKKSQAKRDAADTDLVAAAEYKNPREPPGGANLFDKMLKEPCPYHQGSVKHTLEECAMLRCHFHRAGPPAEGGRARDDDKKEDHQAGEFPEVRDCFMIYGGQAANASARHRKQERREVCSVKVAAPVYLDCSDKPITFDQADHPDHVPSPGKYPLVVDPIIGDVRLTKVLTDGGSSLNIIYAETLGLLRVDLSSVRAGAAPFHGIIPGKRVQPLGQLDLPVCFGTPSNFRRETLMFEVVRFQGTYHVVLGRPCYAKFMAVPNYTYLKLKMPGPNGVITVGPTYKHAFECDVECVEYAEALAESEVLVADLESLSKEVPDVKRHAGNFEPAETVKSVPLDPSSDASKQIRIGSELDPK

SEQ ID NO: 62007 - protein, 138 aa, Zea mays
  Coding DNA Sequence Number=SeqID_20228
MATPRPVRRHFADVTRVRLPNHATRTPVDGLWLRVWNLDSGGIAMLAMALQSLGMFVLWDKGIPGKQGPAVRVELGDTSMGDSEQKETLATRPTRRPPKRVRRSKSLGKRTPVSGSCEDTVADRTREVEPLSKRGRGC

SEQ ID NO: 62008 - protein, 84 aa, Zea mays
  Coding DNA Sequence Number=SeqID_20229
MADNAKGKGKVTNKETLNNEPKGEKPADLRFGKKDGKKKKHIKKIVYYDNDTSSTSPKDNDGSSSKQKTENLLTLMGGLFLVEP

SEQ ID NO: 62009 - protein, 119 aa, Zea mays
  Coding DNA Sequence Number=SeqID_20230
MNALSVTDSPTLEFGPSTLCLNTSNDAPTPMEEDDLVGEDLVDYGATPENSDCTNFSHGEPVVAQFDFGPKEAAFTKPKESVNHLKLLCNDVCYKLKPSNSKAIFENQKSLERYMADRD

SEQ ID NO: 62010 - protein, 141 aa, Zea mays
  Coding DNA Sequence Number=SeqID_20231
  Subcellular localization annotation: CTP_CleavageSite=32; ConfidenceScore=5.41e-01
MSASTIDSAISAQSTSDAWPEPTVTRPHRTVRCAKGTAGATVGLPNKERNRALFMSGGAPDCPVRQRTEGKNCLPNGAPKASSYLEAIKGTPRRMEQYTKPLLNIALDYPMPGRWIICLGPTILNGHSDLVVSDIAIKSVL

SEQ ID NO: 62011 - protein, 418 aa, Zea mays
  Coding DNA Sequence Number=SeqID_20232
  Gene Ontology: Mol. function=ATP binding; Cellular component =membrane; Biological process=defense response
  Homolog annotation: Hit_ID=Q8LJ96; Match level="QueryCoverage=93%, HitCoverage=96%, E-value=1e-127, Identity=61%"; Hit description =Blight resistance protein RGA3-like
  Pfam annotation: Domain name=NB-ARC; Domain location=124-415; Score= -20.1; E_value=5.3e-09; Accession=PF00931.13; Description=NB-ARC domain
MAVEVVQFLVKKFVDSFTEEAADAEAELPFRAQFHDMRTDLEKAAVSPANADELRECLYELNDLLAECRRLANRPNQQRWCFAQSDAWRFPKTKKRVTAVRRRVLECVENDSGGNAAASQEDAAAGLDRWTTSWLEGSRIHGFDQQLAELESMAFRDCGAGKLNGVGIVGMGGIGKTVLAQLLFSSPRAKGRFFPRIWMCMSRTASAGADRRKEVLQGMLMALGHEEDAILSMNGSDSLTELTIAVHEQLEGKRFLIVFDDVWHIDSWYSDVVGVGPQNAMRRADDLSVLSERLAFALPKGRGGLVIVTSRLEQAAEAMVRKSCLYRVRPLVDSASWAIFMDVVLSQPQEKKAVDLVTVNHMKQEILETCGGFPSAAKTMGDIFASSSVSPTCIDIYQRGTRARVTISSLLGNSGSLK

SEQ ID NO: 62012 - protein, 75 aa, Zea mays
  Coding DNA Sequence Number=SeqID_20233
MGSGRSKKKEKAVTTWRPCGGVKRTAGEVRFFCGPPGTRAWRNPAHGVQLQQGRLMPGRPESPSVHLRRRFPPGS

SEQ ID NO: 62013 - protein, 71 aa, Zea mays
  Coding DNA Sequence Number=SeqID_20234
MAPMWRSQEDCWGGALLLRAAGNPGVAESGARGAAAAGEIDAGTAGIAVGAPAPPQCHQGRDRCPLLHESR

SEQ ID NO: 62014 - protein, 111 aa, Zea mays
  Coding DNA Sequence Number=SeqID_20235
MGKDFSCLGTGFLPSDSEFARWLVLIRDLTPQGQLVMTPLFRHPDSLPRVAVSREGSAPEPSLSLAPLLREIQALLGTTVPTIHSSMAAREPASKGVVDVGLPNSGKPSLH

SEQ ID NO: 62015 - protein, 139 aa, Zea mays
  Coding DNA Sequence Number=SeqID_20236
MDDLEFMEITGGGGDLIFDALCTDLDLDLGTLYGNGASGQRNQRPPWLYLGESIDGTNSSPSSQRERKDLTGKLVETVNTYASKATRNLKSERPQSEPRTMGPTNAFRSLELAIQTGVLSAKDSKALLGTRELLQHHRW

SEQ ID NO: 62016 - protein, 744 aa, Zea mays
  Coding DNA Sequence Number=SeqID_20237
  Gene Ontology: Mol. function=ATP binding; Cellular component=nucleus; Biological process=apoptosis
  Homolog annotation: Hit_ID=Q8LJ95; Match level="QueryCoverage=83%, HitCoverage=100%, E-value=0.0, Identity=70%"; Hit description=NBS -LRR resistance protein RGH1-like
  Pfam annotation: Domain name=LRR_1; Domain location=474-496; Score =3.0; E_value=77; Accession=PF00560.23; Description=Leucine Rich Repeat
  Pfam annotation: Domain name=LRR_1; Domain location=498-520; Score =10.7; E_value=2.9; Accession=PF00560.23; Description=Leucine Rich Repeat
  Pfam annotation: Domain name=LRR_1; Domain location=522-544; Score =7.0; E_value=14; Accession=PF00560.23; Description=Leucine Rich Repeat
  Pfam annotation: Domain name=LRR_1; Domain location=711-734; Score =2.7; E_value=88; Accession=PF00560.23; Description=Leucine Rich Repeat
  Pfam annotation: Domain name=NB-ARC; Domain location=107-328; Score= -123.8; E_value=0.022; Accession=PF00931.13; Description=NB-ARC domain
  Pfam module annotation: Pfam domain module=LRR_1::LRR_1::LRR_1::LRR _1::NB-ARC; Domain location=474-496::498-520::522-544::711-734::107 -328
MTSLGRSRKAEVKPAFYLGASACASWRLLPSAKQINRVSGYSTGIPCGRITTPHQPLQHRALLSSSCISITNELSSAFRGPWSCGHEAQREERPLGSCGRSCRPGGWRRGGGYSLPVIAKTSMSQERTLDEVVFPFLMQLERARVVPLGPDEDSSHSDILLLFENIKKEACEVKDILLRVSKWENEIINDFGGIARHLDEIIEEGNQLNSIHSTLQIVNTEMSKLKDRMQLPLHVPMIKPIAPTTLPSSVPSKWVHAKVSEQWKRLEIERKILESSTISNLQVSYDNLDLQLKLCLLCFSVFPENSIISKRAMIHWWIGEGLVAATRSQTAEDVGKACFEKLIALEMIEPVYQKCRYGVNQCKLHPWIRRMLIKVAKQARFFEFDSDGNATWDCSATHRACLVEEHQQEIDVASLRNLLTIFNINEQYLQFEKSWFLDLRKIAVLQLGRWHNLCRHHIEVDSTEFLEGLQSSNQLKYLCLRGISRIIELPASIGGLSNLRILDLHACHNLERLSTSITYLQMLTHLDVSECYLLEGMPRGIGLLTELQVLKGFVIGGSTGNYNCRVAELARLDKLKKLTIYIGSKVAVTENELNELENIKGLCVLKITWAVSLSKKERVHQTSDSTPLITSLSLPLNLEKLDLCCFPGEKVPDWLSPSKLLRLKRLYFTGGMLKTFGNKNMLEVWSVEVLRLKFLNDLSVQWTQVHEIFPKLTFLEVFRCRKLESFPCDKDGVWMNHDTKDSRK

SEQ ID NO: 62017 - protein, 176 aa, Zea mays
  Coding DNA Sequence Number=SeqID_20238
  Subcellular localization annotation: CTP_CleavageSite=64; ConfidenceScore=5.17e-01
MEWNYLFDHTSLSAQSSDPADPARRLAHRAPGGGRIPCGRRAFTTRWRVDGRRSPARHGPLQLRVRQRQGRAGQAAAGGPDPGVWHWQARVVRATCDAASDSGPLLLGAGAGASGTFRQGPPGPDPAACRPRNIIRPEWQPWGGVVWWPHHCLSSSHGACTMDREMTDWPGRTDWP

SEQ ID NO: 62018 - protein, 309 aa, Zea mays
  Coding DNA Sequence Number=SeqID_20239
  Homolog annotation: Hit_ID=Q69U97; Match level="QueryCoverage=47%, HitCoverage=41%, E-value=3e-31, Identity=51%"; Hit description =Putative anthocyanin-related membrane protein 1
  Pfam annotation: Domain name=DUF914; Domain location=1-233; Score= -23.1; E_value=1e-11; Accession=PF06027.3; Description=Eukaryotic protein of unknown function (DUF914)
MEFKRDVWSLLLVLLLGQLVAFSMAASSFASSLIANLVVKAYQYSYITSVTLLDCWTVVWVVMLTWYALGTRYSLWQFVGAGTCVAGLALVLLSDAKSQDEQDPKKIPLLGDALVIAGTVGFAFSNVGEEYCVKKKDRVEVVAMLGLFGLLISTAQIQILARQDDEAPNPTKPNAGPYAPTSGRGRAHMAPTGRGEPTSTVPRSTAGDVAAPSGQRPLTVHGSPDGVLADAAGERPGEASLSLDPVCIASPLSRSLFLERLGARKRPAREESCAARGAQTVLGDGQMACEGCTASARYPNHHPRTRGVG

SEQ ID NO: 62019 - protein, 383 aa, Zea mays
  Coding DNA Sequence Number=SeqID_20240
  Gene Ontology: Mol. function=nucleic acid binding; Cellular component= intracellular; Biological process=chromatin modification
  Homolog annotation: Hit_ID=Q6F2N5; Match level="QueryCoverage=89%, HitCoverage=86%, E-value=2e-99, Identity=54%"; Hit description =Putative zinc finger protein
  Pfam annotation: Domain name=zf-C2H2; Domain location=204-226; Score =20.5; E_value=0.0061; Accession=PF00096.16; Description=Zinc finger, C2H2 type
  Pfam annotation: Domain name=zf-C2H2; Domain location=290-312; Score =15.8; E_value=0.16; Accession=PF00096.16; Description=Zinc finger, C2H2 type
  Pfam annotation: Domain name=zf-C2H2; Domain location=316-341; Score =5.2; E_value=2.9; Accession=PF00096.16; Description=Zinc finger, C2H2 type
  Pfam module annotation: Pfam domain module=zf-C2H2::zf-C2H2::zf-C2H2; Domain location=204-226::290-312::316-341
MEGAFSVPYYEWLKPRSSPSTSCWTTMTLSTPSSMDRLLAAVAGGHDDDEERDATMCLPLLGRLEGRARTPEYHSPVKEELSNNNTTTTTTGARGEESRTGAGVHLTIGLPATGGGAGGGYSMSSEEAPMDDEDDEQDEDYFELEEEDQKASEHDNKCKMEAAGEAEQRRPGGEEEGIKSFVGSRGRRYWIPTPAQILVGPVQFMCHVCSKTFNRYNNMQMHMWGHGREYRKGPESLRGTQAATLALLKLPCYCCAPGCRNGVAHPRARPLKDFRTLQTHYRRKHGDKRFACRRCAKPFAVKGDWRTHEKNCGKRWFCACGSDFKHKRSLNDHVRSFGGGHCSVTPDHHQQQQAPVPVPLINKQPLDRMIIRFDQGAPWTSHA

SEQ ID NO: 62020 - protein, 147 aa, Zea mays
  Coding DNA Sequence Number=SeqID_20241
RRQQGFDRSNGCPSARLRRTSDSHDIMPARCQDLSGCHIGMAFLEKVGRAGPGTGQALSWGRSLPSPAWTLVTPLLQAHLTWARDEHEGRGTSTSLTLDSGHLASPPFALAHALDPSGLGHAAHSLVGLGTPLSRNADSYILTFLSL

SEQ ID NO: 62021 - protein, 1076 aa, Zea mays
  Coding DNA Sequence Number=SeqID_20242
  Gene Ontology: Mol. function=transferase activity, transferring glycosyl groups; Cellular component=integral to membrane; Biological process=response to oxidative stress
  Homolog annotation: Hit_ID=Q8H2Q5; Match level="QueryCoverage=92%, HitCoverage=97%, E-value=0.0, Identity=83%"; Hit description =Putative anthranilate phosphoribosyltransferase
  Pfam annotation: Domain name=C2; Domain location=278-358; Score =104.7; E_value=2.8e-28; Accession=PF00168.20; Description=C2 domain
  Pfam annotation: Domain name=C2; Domain location=439-520; Score=65.1; E_value=2.2e-16; Accession=PF00168.20; Description=C2 domain
  Pfam annotation: Domain name=C2; Domain location=6-90; Score=85.1; E _value=2.2e-22; Accession=PF00168.20; Description=C2 domain
  Pfam annotation: Domain name=C2; Domain location=600-694; Score=77.2; E_value=5.1e-20; Accession=PF00168.20; Description=C2 domain
  Pfam annotation: Domain name=PRT_C; Domain location=857-1003; Score =337.2; E_value=2.9e-98; Accession=PF08372.1; Description=Plant phosphoribosyltransferase C-ter
  Pfam module annotation: Pfam domain module=C2::C2::C2::C2::PRT_C; Domain location=278-358::439-520::6-90::600-694::857-1003
MSNLKLGVEVTSAHDLLPKEQDTANPFVEVDFDGQKFRTAVKDRDLNPVWNEQFYFNISDPSRLPELHLEAYVYHADRASNSKSCLGKVRISGTSFVSQPDAMPLHYPLEKRTILSRARGELGLRVFLTDDPSVRVSAAPAQQEFDMLSTPTTAQEQQAAANSISNPFQETRANPVRQFQHLPREQQRPAQPQPYYAEGSYGDQQQQQRSFSAVANKAAAPQPQVQVSRMYAPGPQQPVDFQLKETSPTLGGGRVIGGRVYPGQKAGAYDLVEKMQYLFVRVVKARDLPNMDITGSLDPYVEVHLGNYKMKTKHFEKNQRPEWDEVFAFPKEVMQSTMLQVVVKDKDVLRDDYVGRVSIDLNEVPLRVPPDSPLAPEWYRLMGKDGVRDRGELMLAVWYGTQADECFPSAIHAGSTPVDSHLHSYIRGKVYPAPRMWYVRVNVIEGQDIYPMENRIPDVLVKVRLGHQLLRTRQVRSPTRNFMWNEELMFVAAEPFEDDLLISVVDRVAQDKDEVIGEAIIPLARLPRRADHKPVLPAWFDLRRPGIIDVNQLKEDKFYAKVSLRVCLEGGYHVLDESTQYCSDLRPTMKQLWKPPIGMLEVGILSANGLNPTKTRNSRGSCDAYCVAKYGSKWVRTRTIVDSLSPRFNEQYTWEVFDHGTVLTIGLFDNCHISGDDNKDGSSGHMDKPIGKVRIRLSTLDTARVYTHSYPLLFLSPSGVKKMGELHLAIRFTVTSLINVLFTYSRPLLPKMHYAQPLSIVQQEMLRHQAVLLVAQRLGRMEPPVRREVVEFMSDARSHLWSMRRSKANFFRLMQVFSGFIAAGKWFADVCQWKNPVTTVLVHVLFIMLVLYPDLILPTIFLYMFLIGLWNYRFRPRFPPHMNTRISYADVALPDELDEEFDTFPTSKSPDLIRMRYDRLRHVAGRIQTVVGDIATQGERLQSLLSWRDPRATAMFLIFCLITAIILYVTPFQVVALCLGFFGMRHPRFRHKGLNNSGSRTTLSCDTVCSSSYMYAVALHACWLPTSGIGATFIVTNASANWPVLTRTNYDEWVLVMKVMLWARKLWRAINIGTEE

SEQ ID NO: 62022 - protein, 43 aa, Zea mays
  Coding DNA Sequence Number=SeqID_20243
MEAVERDAAAIAESYASLFASLRVALSNHLKHLRKEISTSIRA

SEQ ID NO: 62023 - protein, 258 aa, Zea mays
  Coding DNA Sequence Number=SeqID_20244
  Gene Ontology: Mol. function=metal ion binding; Cellular component =integral to endoplasmic reticulum membrane; Biological process =ubiquitin cycle
  Homolog annotation: Hit_ID=Q69PX0; Match level="QueryCoverage=80%, HitCoverage=34%, E-value=7e-91, Identity=80%"; Hit description =Putative zinc finger (C3HC4-type RING finger) protein
  Pfam annotation: Domain name=PHD; Domain location=104-149; Score=8.5; E_value=0.0081; Accession=PF00628.19; Description=PHD-finger
  Pfam annotation: Domain name=zf-C3HC4; Domain location=105-146; Score= 42.6; E_value=1.4e-09; Accession=PF00097.15; Description=Zinc finger, C3HC4 type (RING finger)
  Pfam module annotation: Pfam domain module=PHD::zf-C3HC4; Domain location=104-149::105-146
SFSEWRGKLTRNFGFAIDLISLLMSLGHYSMIFWLRGMAFHLVDAVLLLNSRCVDTIHLKHFQALIVSFLKRIKAHIKLRKALSSLDGALPDATYDEICAYDDECAICRGPMGRAKKLSCNHLFHLACLRSWLDQGLMEGYSCPTCRRPLLLSSEGQRRSTTAEVANVQRIAEQLTMGMNQQRVPGNEHPVEQQNPSDAVWRSLFLQTLERLGGYSPYFTFRTVALNHNGFSIHQKCIDVLRILAYSSVADSIDSISK

SEQ ID NO: 62024 - protein, 98 aa, Zea mays
  Coding DNA Sequence Number=SeqID_20245
MAAVNCLYVAAASTAASAAALQWWASSLFDGDAGAGEDGAWLGAVLRSKVTVALLANLAVHVFLVIILALKLYLSLLLRLVICCFDGSILTGDLFDLA

SEQ ID NO: 62025 - protein, 98 aa, Zea mays
  Coding DNA Sequence Number=SeqID_20246
MARLSLDRNARNRGKGSGDQIIAAATARGHTIVFLYQFSYAGDLRKYDTSERYGASVIRPRRDAEMGLGKWVPRLSGYRKGISCIVKCEQMCQIVRVS

SEQ ID NO: 62026 - protein, 593 aa, Zea mays
  Coding DNA Sequence Number=SeqID_20247
  Gene Ontology: Mol. function=hydrolase activity; Cellular component =chloroplast; Biological process=RNA processing
  Homolog annotation: Hit_ID=Q2QN73; Match level="QueryCoverage=94%, HitCoverage=96%, E-value=0.0, Identity=80%"; Hit description =Diphosphonucleotide phosphatase 1, putative, expressed
  Pfam annotation: Domain name=Metallophos; Domain location=292-508; Score=59.2; E_value=1.3e-14; Accession=PF00149.18; Description =Calcineurin-like phosphoesterase
MKGRLLLLLWAWAAATWVSVSAVTRLGRGVAGEQPLSRIAVERVVLAVNDAAYVKASPLVLGHKGENSEWADVEFFHPNPSDDDWIGVFSPANFSDAICEAENTGTPVLCTAPIKYQFANFENDGYNKTGKGYLKLQLINQREDFSFALFSGGLSKPKLISVSNKVAFANPKAPVYPRLAQGKSWNEMTVTWTSGYDITEAVPFVEWGEKGGRRLLAPAGTLTFDRNSMCGSPARTVGWRHPGYIHTSFLKDLWPDSPYTYRLGHRLMNGTRVWSKSYSFKASPYPGQDSLQRVVVFGDMGKAEADGSNEFSDFQPGSLNTTYQIIRDLEDIDMVVHIGDICYADGYLSQWDQFTAQIEPIASRVPYMIGLGNHERDWPGTGSFYGNLDSGGECGVPAQTVFYTPAENRAKFWYATDYGMFRFCIANTEEDWRPGTEQYKFIEQCLSSVDRQKQPWLIFLAHRVLGYSSCTYYESEGTFEEPMGREALQELWQKYKVDIAFYGHVHSYERTCPVYQEPAFSILSSPPRRSSGATSPTSTTGFVKLTALNHSSLLFEYKKSRDGNVYDHFTISRDYRDILACSIDNCPRSTLAS

SEQ ID NO: 62027 - protein, 184 aa, Zea mays
  Coding DNA Sequence Number=SeqID_20248
  Pfam annotation: Domain name=F-box; Domain location=41-89; Score =20.1; E_value=0.008; Accession=PF00646.23; Description=F-box domain
MRLRSGRRLVSPPVAAPRGAARSVGPPRRHTADSGDGVGEDRLSSLPLDLQLEVLARLRCARGAARTSVLSRAWRGLWTQLRELAFDGSVGPDSLAGALCRLAGERTQVRPKLKRLCIHLPGNLKLGDARISSLLHAAYKLAPLELEFVVVHADAIAPEEAGPRRSQRLRKPNPKYFGDKWAQA

SEQ ID NO: 62028 - protein, 360 aa, Zea mays
  Coding DNA Sequence Number=SeqID_20249
  Homolog annotation: Hit_ID=Q5QMR4; Match level="QueryCoverage=90%, HitCoverage=89%, E-value=5e-56, Identity=65%"; Hit description =Integral membrane protein-like
  Pfam annotation: Domain name=DUF92; Domain location=12-360; Score= -12.6; E_value=1.2e-07; Accession=PF01940.7; Description=Integral membrane protein DUF92
  Subcellular localization annotation: CTP_CleavageSite=28; ConfidenceScore=5.16e-01
MAIPNAFDSPLAARSAVGAALAAVIAVRAVRRRSLDASGGVAGFVVMAVHISCGYRYGALLLAFFFSSSKVTKIGEDHKRRIEENFKEGGQRNWIQVLANSTIATVLVVIFALMTGGQDQCMDSNGSKLITGIIGGIIGHYCCCNGDTWSSEIGVLSNEQPRLITSLKILPHFIPNSCQKYRRFGSGRGVTISPRSRSVVRVRMLRREGRMSLPGTVPVAEVFICELITVLLYKPVRKGTNGAVTLQGLLAATGGGLIIGLTFVVVGLLTAECSSDMAIRQLLVLPISAAAGLLGSLIDSLLGATLEFSGYCSVRKKVVSKRGPTVTKISGMTILDNDAVNAVSILLTTVLTAYVCICIF

SEQ ID NO: 62029 - protein, 78 aa, Zea mays
  Coding DNA Sequence Number=SeqID_20250
MLLLPRHPGDCADQGSAASTDGEWSSTCTVNDVTVPIVEGRHVLVYFHGRIDKDYSVWARMGCVCVDILALEPIYVGI

SEQ ID NO: 62030 - protein, 113 aa, Zea mays
  Coding DNA Sequence Number=SeqID_20251
MTSSVAATCNSTPQGSRDIGWCREWLDWGWSTNQQLDKGIYACDGICLGGPKLKLKPTTNAHNWVATDAAGQAYRSHNQTDDIILWPDIILSWIPVTSISKKDMKYGHPGIDG

SEQ ID NO: 62031 - protein, 65 aa, Zea mays
  Coding DNA Sequence Number=SeqID_20252
MASSHGCPCTQLCPLLEFLLAAPPISPGRFEKRTLINRVMRKMAQVDPKRGPIRRMMLMDEPEDG

SEQ ID NO: 62032 - protein, 606 aa, Zea mays
  Coding DNA Sequence Number=SeqID_20253
  Gene Ontology: Mol. function=hydrogen ion transporting ATP synthase activity, rotational mechanism; Cellular component=peripheral to membrane of membrane fraction; Biological process=ATP synthesis coupled proton transport
  Homolog annotation: Hit_ID=Q84T90; Match level="QueryCoverage=62%, HitCoverage=100%, E-value=1e-131, Identity=70%"; Hit description =Putative vacuolar ATPase subunit H protein
  Pfam annotation: Domain name=Arm; Domain location=350-394; Score =10.0; E_value=0.69; Accession=PF00514.13; Description=Armadillobeta -catenin-like repeat
  Pfam annotation: Domain name=Arm; Domain location=395-436; Score=7.8; E_value=1.3; Accession=PF00514.13; Description=Armadillobeta-catenin -like repeat
  Pfam annotation: Domain name=Arm; Domain location=556-596; Score =14.4; E_value=0.19; Accession=PF00514.13; Description=Armadillobeta -catenin-like repeat
  Pfam annotation: Domain name=HLH; Domain location=48-97; Score=38.7; E_value=2e-08; Accession=PF00010.16; Description=Helix-loop-helix DNA-binding domain
  Pfam annotation: Domain name=V-ATPase_H; Domain location=226-561; Score=17.1; E_value=9.7e-17; Accession=PF03224.5; Description=V -ATPase subunit H
  Pfam module annotation: Pfam domain module=Arm::Arm::Arm::HLH::V -ATPase_H; Domain location=350-394::395-436::556-596::48-97::226-561
MPRRRRTRSSEELKAEDFVDSVLNFGGEEDGEEEKQEAGGDGQPAAEFKSKNLEAERKRRGKLNRNILALRAVVPNITKMSKESTLSDAIDLIKRLQNQVLELQRQLADPPGEAWEKQGSASCSESFTATENMPYQGQIELVPLGPCKYHLRIFCKKAGVFTKVLEALCSYNAQVTSLNTITFYGYAESVFTIEVKGEQDVVMVELRSLLSNIVEGRHADGAWTALVMDRAELTTEQVLKRDIPWEHYMSTKLISGTCLQLLRRYDHKPESQRAPLLEEVLLYFDYSARPKLRNGTLPNGDASNSKSKLTSTHDVLRGLVNWLCSQLRNPTHPSCSIPTSIHCLSTSLREPYVRTLFVQADGIKLLIPLISPAATQQSIQLLYETCLCIWLLSFYDAAVDYLSTTRVMPRLVEVVKGSTKEKVVRVAVLSFCNLLAKGAFAAQMIDLGLPQIVQNLKAQAWTDEDLLDALNQLEVGLKENLKKLSSFDKYKQQVLLGHLDWSPMHKDPSFWRENINNFEENDFQILRVLMTIIDTSSDTTALAVACYDLSQFLQYHPSGRIVVADLKAKDRVMKLMNHENTEVQKNALLCVQRLFLGAKYASFLRA

SEQ ID NO: 62033 - protein, 151 aa, Zea mays
  Coding DNA Sequence Number=SeqID_20254
MFEGAGRRKVGRFLEIARNLRTVRQGVACRQGGTPVFLCTRGKVEMRTEASSGVKVDCMDDMVEGEKDEWEEETFLGLDVSPFDVFFEEVIPENMLSQLPEVHVVDAEGEGNMGSGDAKLPIVSLPAGLVVDPLLDDQFVQGEMPTEEMPT

SEQ ID NO: 62034 - protein, 101 aa, Zea mays
  Coding DNA Sequence Number=SeqID_20255
  Subcellular localization annotation: CTP_CleavageSite=93; ConfidenceScore=5.41e-01
MALYSIAALCSGGPLLNRVAVAEASARASALHVVGVTSYVFNFSSTSLQPLDSRVSCNNSNFLFTLARLSSTSTTSFERSIHEGIFDSMPLVTSSITKAKR

SEQ ID NO: 62035 - protein, 43 aa, Zea mays
  Coding DNA Sequence Number=SeqID_20256
IAPHVNVILVKTKFYGNHILKLFMQLILLASGMQCTMFTGYQE

SEQ ID NO: 62036 - protein, 124 aa, Zea mays
  Coding DNA Sequence Number=SeqID_20257
  Subcellular localization annotation: CTP_CleavageSite=100; ConfidenceScore=5.60e-01
MRTPKKTSPLFAVVSSLFRGRRRVLTEFVASVSFASASATWDTPQFAPPLCFSLPTLTRLPSAQPQHRRRRPESSLRPCHRSRSQETHRDNEQFVVPECVARDFPEQQPGEGKCSLTRYVLLTL

SEQ ID NO: 62037 - protein, 429 aa, Zea mays
  Coding DNA Sequence Number=SeqID_20258
  Homolog annotation: Hit_ID=Q338I4; Match level="QueryCoverage=93%, HitCoverage=63%, E-value=1e-135, Identity=57%"; Hit description =Colon cancer-associated protein Mic1-like containing protein, expressed
  Pfam annotation: Domain name=Mic1; Domain location=296-429; Score =187.6; E_value=3e-53; Accession=PF07035.3; Description=Colon cancer -associated protein Mic1-like
MTVALQRRALDQGTHLSYGRIYCLQLDRVSMSLNLYRFYRDAVVQQGLPINSRQVSQTADSQSSAYGGTIYGEGWNFLIPDLICDAENGLLWKLHLDLAAIAASSSDAPSILEFLQRRKSDPSMVKTLCLAIVRTIILERRSVPTVAKAMDVVLDSYTRLMKMGGAFPGVRRIHEQNQQSGSQPIDGSHVVSQESSPGTTVSPAVNPDHGSEAVDIYVQSNPGVEHTIDRGLLNINISSDSVDNTSDAVDKRQQAVGEASRPLSSGTMTQHGQHAGTVAISPIEMFQSVFTLVEDEMMGDPAYLIAVIIEFLRSVSKAGLKAPHNLYVMTATLLARSNRYAEIALFVSNKILEPCKELAMQLMELGLQHPPTRKLGMDMLRERGLHHDYVTAMLQDGYYLEALRYARKYKVLGFALIRSSPFHLAYADD

SEQ ID NO: 62038 - protein, 139 aa, Zea mays
  Coding DNA Sequence Number=SeqID_20259
MGSSASSPTACRPTEATTARPKHGHRGLARLPTDHVARAVSEPYEADVRTEEGGSDWGATVGIPEEMRKQQLATRFKPHAARCSALSSPDHSYTTRLYGSGNWKDILDNNPDVVLSAEHLFVFGYYSELVLVANQEFDL

SEQ ID NO: 62039 - protein, 128 aa, Zea mays
  Coding DNA Sequence Number=SeqID_20260
MSGDVVERETEQLRERVAGLTCIRVAAERVIGEGVYAPKEDTMSAKRFFYKDLDGMVRAIQTSGKLFIRDINWHVDKSASFEVNACRDKTNQDCENKVVKTKKGRHHRSSRKWSSKRALGSKMTQTNM

SEQ ID NO: 62040 - protein, 130 aa, Zea mays
  Coding DNA Sequence Number=SeqID_20261
MAQQQTQLTTGSGILDAVPLFVVILLAAHVLALVRFPLAFLIFRSSRLHGVLDVQAGFREATTPEEDTVTAPIYAIGDPSLASLSVEVQLLLLMAVTVVQSCLLNQSQKTTEKNVKGTLAVLCTDHQCNL

SEQ ID NO: 62041 - protein, 228 aa, Zea mays
  Coding DNA Sequence Number=SeqID_20262
MALWLNEKLVFVSTRDKIVTESPEIPHSLIERYPCMRGDLPTLGLALLDLVSAGKRHHRSSRKVQLAATDTSSSAAIFRDPLAIWVCRSLPPSWRRSLPPSGRCLPRLGGHSSPSSDRHNMSRLARHNAPPPLCAAVPPEDLTSSPNACLEEELQATSRPTASAKPVLSKDRDRDTSQRRKSMRSPKLSSHAEDLFEIEDVQLAIGSCKIDPESASGSEKPGHPFLRR

SEQ ID NO: 62042 - protein, 227 aa, Zea mays
  Coding DNA Sequence Number=SeqID_20263
  Gene Ontology: Mol. function=RNA-directed DNA polymerase activity; Cellular component=mitochondrion; Biological process=RNA-dependent DNA replication
  Homolog annotation: Hit_ID=UPI00004C1731; Match level="QueryCoverage =99%, HitCoverage=20%, E-value=2e-88, Identity=59%"; Hit description =UPI00004C1731 related cluster
  Pfam annotation: Domain name=rve; Domain location=41-199; Score=81.2; E_value=3.3e-21; Accession=PF00665.16; Description=Integrase core domain
MEAYCDEVRRLEDKFFGLELNHIARRYNETADELAKIASGRTMVPPDVFSRDLHQPSVKTDNTPEPEKKVPEGYTHLLVAIDKFSKWIEAVAFFTNIIHRYGVPNSIITDNGTQFTGRKFLDFCEDHHIRVDWAAVAHPMTNGQVERANGMILQGLKPRLYNDLNKFGRRWMKELPLVVWSLRTTPSRATGFTPFFLIYGAEAVLPTDLEYGSPRMRAYDDRSNRTN

SEQ ID NO: 62043 - protein, 80 aa, Zea mays
  Coding DNA Sequence Number=SeqID_20264
MTKVMLAEGVQSSRNGNRDLFLCFEESKIKSWRSSDLGAQAIFPEYLSVAFGAIYAQVNKKEKDVEADLQEFQDFDEFKD

SEQ ID NO: 62044 - protein, 45 aa, Zea mays
  Coding DNA Sequence Number=SeqID_20265
MANRWWKMEVEPSSTIVDWSRATDEGRAAWACDEPVECASPLKIA

SEQ ID NO: 62045 - protein, 127 aa, Zea mays
  Coding DNA Sequence Number=SeqID_20266
MGVPKGCLPRERRLELLIEFLRLFGVRAPLVASFEDSDDSMELFTAARVYWRSIERVELGGSDDLEETSLEEVDDSSDSEEWSGGEGDGGEDDGSNGEGDGDGDSKGDDDDKGDGGDGKADDIMLLA

SEQ ID NO: 62046 - protein, 132 aa, Zea mays
  Coding DNA Sequence Number=SeqID_20267
MRIRERRASDYKSAIDSSFSRIVPFMSCTPSSQSRRFLWQYIILGKHVSRVFEDLRKTKAPNKMSKEKVSEVTKVAEDKKIVDPFIAGFYESMAKTNAEKITKEIMADLSEDSDDSDDFDVESGDEDSKDRP

SEQ ID NO: 62047 - protein, 78 aa, Zea mays
  Coding DNA Sequence Number=SeqID_20268
MVSWFGSSGCRAVAPVAESFFGGMTKKNRNDIKLQMYLRLERRYLFMYYTPETLLNHVFEDLRKTKAPNNDFALHLRG

SEQ ID NO: 62048 - protein, 41 aa, Zea mays
  Coding DNA Sequence Number=SeqID_20269
MTNGEEATHSGELVAGGDNAEGGRRRAYGQLSRFQGYERSK

SEQ ID NO: 62049 - protein, 73 aa, Zea mays
  Coding DNA Sequence Number=SeqID_20270
MAPPRPYVAPPRPYVAPPSGQPGIGELIAARRSNDRWLRLEVGNVSEEPVTEDPGEQQVEVAEQELIEGKLCP

SEQ ID NO: 62050 - protein, 34 aa, Zea mays
  Coding DNA Sequence Number=SeqID_20271
MGYAEISIRPSGSGKLWAFELLQAGVMSLWCFYD

SEQ ID NO: 62051 - protein, 151 aa, Zea mays
  Coding DNA Sequence Number=SeqID_20272
  Homolog annotation: Hit_ID=Q3LRV2; Match level="QueryCoverage=41%, HitCoverage=47%, E-value=3e-11, Identity=47%"; Hit description=Gag
MKKVIYYETDSSKPSTSDAEPTSSKRQERKPPYFDGEDYSMWSDKMRHHKWAMRTTTPMRPPKCSRSLHKYKRNHHPPYKSLLQHKLKSKPKMMVIKFKAMSKLKIVAWIKGGLKKKSKKRRMNMRFRLKDHLPKSPSSNSKRPPCQLHSQ

SEQ ID NO: 62052 - protein, 455 aa, Zea mays
  Coding DNA Sequence Number=SeqID_20273
MEFDTSRIYSGHQFVQRFYVQVHQLMPNSVVALVKFMWAATTYGDEPLVEVFTKNYCLHWKKKVAGGKIMQFGSCTFILRTRKTSGEVVELVPCATNKWGNWWDFWFYVTLKDVEGRRCKNCREIFDEDGDAKELKHTRFEYQAKLYLQAERSLVWPVPEEGSADAGDIDDHKRRGVATRGGVVEGCSKGQVMAMAVRKKRRVDAEKKGLAKTSRVAGASDRFVEELANTCAKPGEKALLWLVDPRREVKALCTGTKGAATIMVMPPPVVPVVTAGGMPSPGKASQDGVVRSAEMGGAVAMVRQLFVDDYLLEGLSVFDAHTGLVADGSGSGQFCAVVDRGRGVTEVSTFGGFAATAVRQLCYEELESLSSIVTGLFSYALPRYLRRRSLYDRGGHMVALLLGKGAEEIEDLVSLEGSLATLDDGVAEMGAEEQLFRVGAGPYLSQCGGDFTPFC

SEQ ID NO: 62053 - protein, 64 aa, Zea mays
  Coding DNA Sequence Number=SeqID_20274
MARIVRGGFGPPATWAVARAQPKNPHVYSDAAASIQSSIALHAFRLYESGKGTRQQPPRRPDGL

SEQ ID NO: 62054 - protein, 434 aa, Zea mays
  Coding DNA Sequence Number=SeqID_20275
  Gene Ontology: Mol. function=nucleic acid binding; Biological process= metabolic process
  Homolog annotation: Hit_ID=Q2QXN6; Match level="QueryCoverage=98%, HitCoverage=96%, E-value=1e-168, Identity=66%"; Hit description =Calmodulin-binding family protein, putative, expressed
  Pfam annotation: Domain name=IQ; Domain location=23-43; Score=18.6; E_ value=0.023; Accession=PF00612.17; Description=IQ calmodulin-binding motif
MEVEAAGPDKLAPPSPVEGPGENGAATKVQKVYRSYRTRRKLADSAVVVEELWWQALDYARLEHSTVSFFDEPKPETAASRWNRVSLNASKVGQGLSRDGKALKLAFQHWIEAIDPRHRYGHNLHFYYDEWCKSQAGQPFFYWLDIGEGKDLDLPECPRALLKQQCIRYLGPQEREHYEYIISEGKKQRGVFQHSSFLAGGATIAAGRFTAESGVIKSIWAYSGHYKPSAENLHNFMNFLEENGVDLKEVEVRSSTKEDYNEDPVPVPVLNDTRSSTSATMEEADLPQAAVPVPALNSTEGDEGDSPPEDEGRGRARYQRTLSGGLQSPRATQVPQRAILERMKSKGELSKSYQLGHRLSLKWSTGAGPRIGCVKDYPMELRMQALEMVDLSPRGLSSTPSPSRRLPPPCFSPTKVASPTSPLAPVQASLPQPS

SEQ ID NO: 62055 - protein, 609 aa, Zea mays
  Coding DNA Sequence Number=SeqID_20276
  Gene Ontology: Mol. function=protein serine/threonine kinase activity; Cellular component=cytoplasm; Biological process=protein amino acid phosphorylation
  Homolog annotation: Hit_ID=Q53PY9; Match level="QueryCoverage=65%, HitCoverage=82%, E-value=1e-145, Identity=68%"; Hit description =Second messenger-dependent protein kinase, putative
  Pfam annotation: Domain name=Pkinase; Domain location=93-457; Score =207.2; E_value=3.9e-59; Accession=PF00069.15; Description=Protein kinase domain
  Pfam annotation: Domain name=Pkinase_Tyr; Domain location=93-451; Score=-27.8; E_value=9.2e-11; Accession=PF07714.7; Description =Protein tyrosine kinase
  Pfam module annotation: Pfam domain module=Pkinase::Pkinase_Tyr; Domain location=93-457::93-451
  Subcellular localization annotation: CTP_CleavageSite=84; ConfidenceScore=5.35e-01
MPPDREDAAGAGADVAADELQSVSFGSSSDRSRSRSASTASTATASCSTSSSGPLHQHLSLPAPRRNPSPSPAPTPTLPTQIPRLGAVSLSDIRFLRRLGAGDIGSVYLAEVRRPTPTAGAAGKEKHTSTLAAAAVVVAAKVMDRKELEGRNKEGRARTEREILEAVDHPFLPRLYGVAEGDRWSCLLTEFCPGGDLHVLRQRQPHRRFSEAAVRFYAAEVVAALEYIHMMDIVYRDLKPENVLVRGDGHIMLTDFDLSLKCDPTAPTPAHVISDPLSLAGRSGGAASSTSSCAISSSCIVPAASCFQLFPGRGRGRRRRRPRWLRAGKKPSPNNNGGLELELVAEPVELRSTSFVGTHEYLAPEIVAGEGHGSAVDWWTLGVFVFELLYGATPFKGHDNEMTLANIVARALEFPRDRDPPASPAARDLVTALLAKDPARRLGATVGAAAIKRHPFFAGVNWALLRCAPPPYVPPPFSIAKAAAAAGGGGGKDDDDDDELSEVNILCSKQDLTSQNWCRRAPDAFWAAAGARGRGRRDAEAMMIGGALAKWGVVARRFRCAALVRVVAVAVTLKHSDAAAHRPVTETPLPKKWLKMLLLALLHTATNQG

SEQ ID NO: 62056 - protein, 72 aa, Zea mays
  Coding DNA Sequence Number=SeqID_20277
MTMAMPFWVRAPVLGLAGLVAVDRANVGVRLEGLEAQRRATPWKAICGRIGTLLIHRPLPVLSHPALWDLCK

SEQ ID NO: 62057 - protein, 105 aa, Zea mays
  Coding DNA Sequence Number=SeqID_20278
  Gene Ontology: Mol. function=metal ion binding
  Homolog annotation: Hit_ID=Q6ZHB2; Match level="QueryCoverage=78%, HitCoverage=28%, E-value=7e-15, Identity=67%"; Hit description=S -ribonuclease binding protein SBP1-like
  Subcellular localization annotation: CTP_CleavageSite=59; ConfidenceScore=5.34e-01
MAEKLPVLLRYQSLHVHTYFKNSRPRRSPSRLPRSACARSWSVEELAATAGDAGLAESSASAFVDPRCVGPPPDHACLGCRLRPAIVVLLPCRHLSLCNGAMPCP

SEQ ID NO: 62058 - protein, 222 aa, Zea mays
  Coding DNA Sequence Number=SeqID_20279
  Gene Ontology: Mol. function=hydrolase activity, hydrolyzing O -glycosyl compounds; Biological process=carbohydrate metabolic process
  Homolog annotation: Hit_ID=Q84UE5; Match level="QueryCoverage=66%, HitCoverage=21%, E-value=3e-87, Identity=99%"; Hit description =Isoamylase-type starch debranching enzyme ISO3
MEVSGGVEEARVEASRPHVGLCPVAGWERSLEEKAANHISGGVNHAFGPTVLGRGVGHERRNWTPLVNNRKPYHSVNFVIAHDGFTLCDLVSYNSKHNDANGEGGRDGCNDNYSWNCGIEGGTNDLNVLSLRSRQMKNFHVALMISQGTPMMLMGDEYGHTRYGNNNSYGHDTHINNFQWGQLEERKDGHFRFFSEMIKFRHNHPILRRDRFLNKESCVSLN

SEQ ID NO: 62059 - protein, 237 aa, Zea mays
  Coding DNA Sequence Number=SeqID_20280
MDDDDNGRYPRTINGKLVELWQLPDDVDDLGDVVVVLFGIGSSVVPVDLEGAPVSDVVGSNELDSLAFSSTTGYLGADIDPTDPSNKTYNDVHERCAYHITNLIVKCGLKRLNDYLDMYRTVIIFVRGKLQPGGEIHLPNQPDFYVPPLSSSRTSCFRASRIGYGGYCSSPTTACATSCQVSEEEGEAGSVKKSDADAEAEGVSKAMESLLELKSLFGLKLLAREDGILLLKGCSVN

SEQ ID NO: 62060 - protein, 79 aa, Zea mays
  Coding DNA Sequence Number=SeqID_20281
MGEEFVLPFSDFPTSDSGTLMLTPLSLYLTNTGFEVASPGHRDVVGFSAIANAHAGRCKIFDAAASPNNEMLMTHDGRG

SEQ ID NO: 62061 - protein, 758 aa, Zea mays
  Coding DNA Sequence Number=SeqID_20282
  Gene Ontology: Mol. function=calcium ion binding
  Homolog annotation: Hit_ID=Q5Z904; Match level="QueryCoverage=49%, HitCoverage=83%, E-value=1e-89, Identity=72%"; Hit description =ATP/GTP-binding protein-like
  Pfam annotation: Domain name=DUF1777; Domain location=450-581; Score=- 66.5; E_value=0.0011; Accession=PF08648.2; Description=Protein of unknown function (DUF1777)
MRRSSLSSGAEPESEPWGRARRSSSSSGAEPESEPWGRARRSFLWHPRPDLAAVSLTLSSGAAVGVTQAALSSCQAGVCSCAWIVLSVSGARARAPKLPSSTGFAAPTAAGGTDGGRFGGRGGQGAAAQYGGPYASVYGTQQVGISISEAVSYLHVVPTFFLANISTEYPRSFQQVGGLGGKGPASSSLPSLPNRPTSLTESSKFTSAPVGSGLARPNDDYMAVRGYAQKQDQYGTDYPLERRMYGEHSANLGRRDGLSDLDRRYTDQIAAGHQSSSMRHQQLLKGQLQPGSDTRQADYFAGRSAPVHQASQEIGVYGRVDADNHNMSILGTTPYGRQQAASLLEGAPRTNIDSLYGQRSSSAGFGAGLPPGRDYASGKGLLHPSSDPDYRDSILPHVHPGVSMIDDRRIDRIGSRRELDLRDEERRRDLILEREKELEWERERELRDFRDRERERERERERDLERLLREREREREREHERERERERLRERREKERERERKRGADPRREHTPSRGPGDRRHSSLRSEKPVRRISPRRDAGHRHRSPVKEIKREYICKVFPFRFVDDERDYLSLTKRYPRLAITPEFSKIVLNWAKENLNLPLDTPVSLEHDIHDSDDGADEGAIISTEKTSSFNTPATIWNAKVVVLMVLLMSGMSKGAFANITSLRSTEERVVHLNNILKFAVFKKDRSLFAIGGPWNADIDGGDPSADCSCLIRTAIRCVKETVHVDLSSCTHWNRFVEFNKIPLFSKRNTHDAAL

SEQ ID NO: 62062 - protein, 161 aa, Zea mays
  Coding DNA Sequence Number=SeqID_20283
NGQRSFSPPNDAQAVVPCSNDGASPEHGMHHTDYEVVVGSVHDRQRQQWHLDSDEGFVMAQLIFGSLDSAPRITSDPVMSHSPTPTTDWQHGWNTPTAATLSLPQICMAKLGDCSLAPQVRLTRWGTRSPTFIVRMEGNDQASRYMWPGIPVVLLHQMRRE

SEQ ID NO: 62063 - protein, 217 aa, Zea mays
  Coding DNA Sequence Number=SeqID_20284
  Subcellular localization annotation: CTP_CleavageSite=83; ConfidenceScore=5.28e-01
MANMKKVKNTGNRARRQVVHALGRLGGVISTPARNSPRRWDVSGLNPPQTRSTAPGKLPRPPGNTGMIAQRRVSGGDGVVTVRRALESYRRRWTRLGGARSSHGTERSHLYWSTPNGPSESHAGHGGEVRPRRATIAEETTVTRRLVKRPHRSVCWEESGRRAREDLAGRAHSLAAESRVHTRWMADQWPPSVGAEDKSGLRGGEGGDGPEWVQSAQ

SEQ ID NO: 62064 - protein, 121 aa, Zea mays
  Coding DNA Sequence Number=SeqID_20285
  Subcellular localization annotation: CTP_CleavageSite=61; ConfidenceScore=5.15e-01
MDILALGKGPNSVSLTGAVNQTRCSDCSMDQSLTRFSVSLDSACEPAKYMCMGATLSCSCSAAVLVCPRIHVHQVVVEFHIPAVDTFLGRQSLNTNQRRCSVHRGGRSVARGQTVRGLARG

SEQ ID NO: 62065 - protein, 108 aa, Zea mays
  Coding DNA Sequence Number=SeqID_20286
MDPPTQPLGVFPSLLVPPPHGPMLSGVTFYLDSELNWASRSSPRAVARGTDTANHGGKPGIVATVETFPVYKYRCLPWPMKASVVPRDPSPAVESIGPPRANYVVVGA

SEQ ID NO: 62066 - protein, 478 aa, Zea mays
  Coding DNA Sequence Number=SeqID_20287
  Gene Ontology: Mol. function=carbohydrate binding
  Homolog annotation: Hit_ID=Q2QN32; Match level="QueryCoverage=98%, HitCoverage=98%, E-value=0.0, Identity=73%"; Hit description=Lipase, putative, expressed
  Pfam annotation: Domain name=DUF620; Domain location=176-428; Score =586.5; E_value=2.6e-173; Accession=PF04788.3; Description=Protein of unknown function (DUF620)
MDAKRQGFFSALREEVARGLSPGRARRRSASNAAEVAAALRRLGGGGEALAPLMEGPDPEAGPGATCGGSARKEGGWGRWVRGQLQLTRAPALEAGAGAGSGAAAAAAAAGRRNDLRLLLGVMGAPLAPVHVCAAEPLPHLSIKDTPIETSSAQYILQQYLAASGGQRLLSSIRNSYAMGKVRMVATEFEAGGRVVRNRMAAQRAEPGRFVLWQMAPEMWYMELAVGGSKVHAGCNGKLVWRHTPWLGAHSAKGPVRPLRRALQGLDPLTAASMFAGARCIGERKVNGEDCFILKLSADPETLRARSEGLAEIIRHVLFGYFSHKSGLLVHLEDSHLTRIQSATGGDAVYWETTISSSVEDYRAVDGVVVAHAGRSAVTLFRFGEAAVGLGHTKTRMEEAWTIEEVAFDVPGLSADCFIPPTDVGPGSVSEAAELPRGERSKAAAGLVLPCHRARVAALEKADDGGVAWSGALQLGCK

SEQ ID NO: 62067 - protein, 183 aa, Zea mays
  Coding DNA Sequence Number=SeqID_20288
MWKKVSELEASSAEKDKHIASHEVELKRAKEEYETEIYKIRQASAKTTIDISATQVKIGDLNDEVNHVGCNNVRTCTDPDFKVSIDHVRRSTVEASEWSKKLLSDIWKKGGKEISIEESIKTGRSLSSNFCWEVSTSQVIIEVKHTNAEAKDVAIEAEVVAGRATKKAADEVIFKICEQIYDE

SEQ ID NO: 62068 - protein, 103 aa, Zea mays
  Coding DNA Sequence Number=SeqID_20289
  Subcellular localization annotation: CTP_CleavageSite=51; ConfidenceScore=5.43e-01
MPALTPPPHFTQSHPRSRSAQVARPRGRPAPASPTIYFAGDRAKPLRAPPRDNEQSEVPECVVGHLPEQQPGGSGLFPEYLSCSGGDAGNMEDFEEFQDYDEF

SEQ ID NO: 62069 - protein, 67 aa, Zea mays
  Coding DNA Sequence Number=SeqID_20290
MAGGRKREWLRNRMATIAGTPGARRQQQSPRSTGQPWLVAQRLSAFFALKRMYHDTPVPSSVVQSKL

SEQ ID NO: 62070 - protein, 735 aa, Zea mays
  Coding DNA Sequence Number=SeqID_20291
  Homolog annotation: Hit_ID=Q5SN38; Match level="QueryCoverage=88%, HitCoverage=80%, E-value=9e-76, Identity=31%"; Hit description=TA9 protein-like
MKGRPSAVVTAIFAESPGHGFEAASPYLQGKGLPRFIPSLGPTHVGASGTGSAPLCFTTIMLEKGMAYYVCSNVAQADAKNTFQPPSQVKHGWGGVPGRPSMAEIVKMGRPQAKVGSRSVASSIVMPAIGDSAIPNTPNLAPNEYNQTVFASEVGHGAADKLPNVADEVHSVSKDASSLDMLPSAEGTDVEAPSMSANMQGSSTPDANEDDVEKDTNLEEGNTESLTTPGQVSASGKDLNGDVSTTTTQFDHLTLLDGPKLSDENPAVIIPGHLQVSNADCAHLTFGSFVYGTLDASLTTKPLESHGDIVTIPDDDYDQSEGRHVPSFSFILCTLFLSCISYKPFIFRIHDDESKVTLAPAANEYVTSTSNSNVENLDITSVQQSEVTRSNFLDVTSNTEYNLSSPPDYATSSAALQDSTSQSYLQENRQFQSISPLPSFMQIQNGLMSPAIPPLREFDPAFSLLLTNPPIMHGTTSSSMSSATVSTQPQENANPVGLPNPQLTQSQPSTSIAPGPPLPQHLLHPYAQTTLPLGYASMIGYPSLPPSYAYLPPAAFQQPYMNSGMFLHQAAAAVPNSSVKYPLPQYKSNIALASLPQPGSLLSSYVGGFGTANNMPGNFPLNQSTTSATATLGFDGTVPSHLEDGNQFVCLQQNENPAMWMHGAGSRGMPPLAASTMYGYQGQSHQTGLRQGQLPSQYGSALGQSQPGLGPEHRNPSDSNLSGAAQANQMWPNSY

SEQ ID NO: 62071 - protein, 123 aa, Zea mays
  Coding DNA Sequence Number=SeqID_20292
MIMRKGVNMHMVRVRGMTKEKGAHNQGHTNRGPGRGAATIVDESMTEGRYVHDHGEDTFGYRRGPWLSEKEVVQWIEGPFGKAPAPASLAPDPDPSEELILLILLENQNHFSKRLASKLILVC

SEQ ID NO: 62072 - protein, 264 aa, Zea mays
  Coding DNA Sequence Number=SeqID_20293
  Gene Ontology: Mol. function=identical protein binding; Cellular component=cellulose and pectin-containing cell wall; Biological process=negative regulation of enzyme activity
  Homolog annotation: Hit_ID=Q5N955; Match level="QueryCoverage=97%, HitCoverage=33%, E-value=2e-80, Identity=67%"; Hit description =Putative subtilase
  Pfam annotation: Domain name=Subtilisin_N; Domain location=36-119; Score=73.9; E_value=5e-19; Accession=PF05922.7; Description =Subtilisin N-terminal Region
MAQAAWHPRPSLRLLLLLINACAVLNSPVAARAERTGYIVHMDKSAMPRHHSDHRDWYAATVASVTDASAGVRTKPQLLYTYDEALHGFAATLSASELRALRGQPGFVSVYPDRRATTLHDTTHSMEFLNLNSASGLWPASKFGEGVIIGMIDTGLWPESASFNDAGMPPVPSRWRGTCEPGVQFTPSMCNRKLVGARYFNRGLVAANPGVKISMNSTRDTGGARHAHVVDRGRQPRAVRVLLRVREGHGAAALPPRAHRPHVT

SEQ ID NO: 62073 - protein, 176 aa, Zea mays
  Coding DNA Sequence Number=SeqID_20294
  Gene Ontology: Mol. function=protein binding; Cellular component =integral to membrane
  Homolog annotation: Hit_ID=Q5N967; Match level="QueryCoverage=63%, HitCoverage=41%, E-value=2e-38, Identity=74%"; Hit description =Putative terbinafine resistance locus protein
  Pfam annotation: Domain name=Yip1; Domain location=28-157; Score =46.6; E_value=8.2e-11; Accession=PF04893.7; Description=Yip1 domain
MNGDITFQLDDSFDDTNRRFVCRIQEPEVKEALKKMKEVSHTRRDLVCNDDIHDRLRVAPIEEKLSEVFAVAFAVLAAGAIILTLNVLLLGGHIIFFQSLSLLGYCLFPLDVGALLCMLKDNVILKIVVVTITLAWSSWAAYPFMSAAVNPRRKALALYPVFLMYISVGFLIIAID

SEQ ID NO: 62074 - protein, 78 aa, Zea mays
  Coding DNA Sequence Number=SeqID_20295
  Gene Ontology: Mol. function=amino acid transporter activity; Cellular component=membrane; Biological process=amino acid transport
  Homolog annotation: Hit_ID=Q84ST3; Match level="QueryCoverage=60%, HitCoverage=7%, E-value=2e-16, Identity=87%"; Hit description =Putative cationic amino acid transporter
  Subcellular localization annotation: CTP_CleavageSite=31; ConfidenceScore=5.07e-01
MARDGLLPSFFSDVNKQTQVPVKSTIVIGICAAALAFTMDVSQLAGMVRNQLSVPVCVGGEDTGLLQLKVEIRLQLLK

SEQ ID NO: 62075 - protein, 220 aa, Zea mays
  Coding DNA Sequence Number=SeqID_20296
  Gene Ontology: Mol. function=metal ion binding
  Homolog annotation: Hit_ID=Q5N9E0; Match level="QueryCoverage=71%, HitCoverage=74%, E-value=2e-24, Identity=42%"; Hit description=RING -H2 zinc finger protein-like
  Pfam annotation: Domain name=zf-C3HC4; Domain location=150-191; Score= 33.9; E_value=5.5e-07; Accession=PF00097.15; Description=Zinc finger, C3HC4 type (RING finger)
MSVIEQLHARRLLSHAAAAATAPSSAAEPEPAAVAMPQAQAVSAAHSHAAAAPFSSLNATVITALSLLLCGLVAVLAVHAIVRCAFRVTHRVCYGQDEDEDEPRRRCVGGLLPGPVPPGGSAGPRAGLPPWILYSREVELAGCGAGAAECAICLAEFVQGDRVRALPRCNHGFHVRCIDRWLAARQTCPTCRRAPFAAKPSLTEPDSAGAPEAVQLQVHA

SEQ ID NO: 62076 - protein, 218 aa, Zea mays
  Coding DNA Sequence Number=SeqID_20297
  Homolog annotation: Hit_ID=Q5N955; Match level="QueryCoverage=42%, HitCoverage=12%, E-value=2e-21, Identity=54%"; Hit description =Putative subtilase
  Subcellular localization annotation: CTP_CleavageSite=91; ConfidenceScore=5.90e-01
MAITRSSASAYNCSSASSDVNYPSFVAAFGFNASSGAMQFRRTVTNVGVGASVYRASWVSPSNANVSVSPGTLEFSALGQTATFQVGIELTAPTGGEPTFGDIVWADASGNRREERLRRARHLDFVTLLSWAKNAALGATQPRTAIHDITNGTRRTPSYGEALLRGQVKALLHKVEEEQGCAAAGLALHNITNDSHIPSSGSRWATSMPLTPPHLHHR

SEQ ID NO: 62077 - protein, 234 aa, Zea mays
  Coding DNA Sequence Number=SeqID_20298
MDAQLAVDLLDEARNMVVVRSAKYQQDLRRYHDHQPTVAATGPVAHQTVRCDLVTVGEVHVSSADRAADRWSGRGCHTGQSVHLVFRIKKAEHVDQTATSRSGARRGAPQDTSLPSVISGKTSSWRTAGLVGARGGDTISRPANAGGVEDDSFALDIPLRCPVGMVVGAVGAATAPSLRRRALELASTSSGREGTPTDEGFPAPAEAVEVRSSVSVDGVMLSPDLTRARQAFFL

SEQ ID NO: 62078 - protein, 495 aa, Zea mays
  Coding DNA Sequence Number=SeqID_20299
  Homolog annotation: Hit_ID=P93426; Match level="QueryCoverage=30%, HitCoverage=73%, E-value=6e-25, Identity=48%"; Hit description =Leucine zipper protein
  Pfam annotation: Domain name=bZIP_1; Domain location=173-230; Score =42.8; E_value=1.2e-09; Accession=PF00170.11; Description=bZIP transcription factor
  Pfam annotation: Domain name=bZIP_2; Domain location=173-227; Score =32.6; E_value=1.3e-06; Accession=PF07716.5; Description=Basic region leucine zipper
  Pfam module annotation: Pfam domain module=bZIP_1::bZIP_2; Domain location=173-230::173-227
GDTVVLAVAHGPRISRRLAQAASRPGGGGSGPGSMNVEELLRGIYSDMPTPAPPASEPGRPMPPAPAPVSATRKTAEEVWKEITGGGGSGEAVAPVAAQAVAPDGGAGTGGPEVTLEDFLARESAVKEDEVKISVPPAPVMGLPGGAEGVSVPGGGGGRERKRQLVSTVDRARSAIQREKRMIKNRESAARSRERKQAYIAELEYMVTRLAEEKAELLRQQVILDSDIFMGALHKVRAYDSSSLGGGGGSLGSGSVLGQRRELQTCSPLGTAVVCAGGLVLVRWQLLVLVHRQLCGTGGRLTGCAPVRRRPSRLAEQVCEAGRTTKSPAKQACETEWTTKSPAEQVCEAGRTTRHSPSTRECGTQNKPINPFLANAPKSPAEQAYEAEQTTKSPTEQVCEAERTTKSPAEQVCEAGRRPNPPSSKSARRSRRPSPLPSKHAGGVDDQVPCRACLWRRGDDQASASEPKQYATAASIRQTTAGHRSHEPRQWSGTE

SEQ ID NO: 62079 - protein, 715 aa, Zea mays
  Coding DNA Sequence Number=SeqID_20300
  Gene Ontology: Mol. function=protein-tyrosine kinase activity; Cellular component=integral to membrane; Biological process=protein amino acid phosphorylation
  Homolog annotation: Hit_ID=Q9AUC2; Match level="QueryCoverage=96%, HitCoverage=96%, E-value=0.0, Identity=80%"; Hit description =Receptor-like protein kinase 1
  Pfam annotation: Domain name=LRRNT_2; Domain location=36-80; Score =43.2; E_value=8.7e-10; Accession=PF08263.3; Description=Leucine rich repeat N-terminal domain
  Pfam annotation: Domain name=LRR_1; Domain location=110-131; Score =6.7; E_value=16; Accession=PF00560.23; Description=Leucine Rich Repeat
  Pfam annotation: Domain name=LRR_1; Domain location=133-156; Score =10.7; E_value=2.8; Accession=PF00560.23; Description=Leucine Rich Repeat
  Pfam annotation: Domain name=LRR_1; Domain location=158-180; Score =12.1; E_value=1.6; Accession=PF00560.23; Description=Leucine Rich Repeat
  Pfam annotation: Domain name=LRR_1; Domain location=182-203; Score =9.4; E_value=4.9; Accession=PF00560.23; Description=Leucine Rich Repeat
  Pfam annotation: Domain name=LRR_1; Domain location=204-226; Score =14.7; E_value=0.33; Accession=PF00560.23; Description=Leucine Rich Repeat
  Pfam annotation: Domain name=LRR_1; Domain location=83-106; Score =1.3; E_value=1.6e+02; Accession=PF00560.23; Description=Leucine Rich Repeat
  Pfam annotation: Domain name=Pkinase; Domain location=397-685; Score=- 4.3; E_value=2.6e-08; Accession=PF00069.15; Description=Protein kinase domain
  Pfam annotation: Domain name=Pkinase_Tyr; Domain location=396-688; Score=-49.3; E_value=1.9e-09; Accession=PF07714.7; Description =Protein tyrosine kinase
  Pfam module annotation: Pfam domain module=LRRNT_2::LRR_1::LRR_1::LRR_ 1::LRR_1::LRR_1::LRR_1::Pkinase::Pkinase_Tyr; Domain location=36 -80::110-131::133-156::158-180::182-203::204-226::83-106::397
MAGAPSSLARLLLLLLLAAGCLLPLVADAARLTLSLAPAADALLRLKAGIKDDGGALGSWSPDTSPCADGGPSWKGVLCNKDGVHGLQLEGMGLSGTLDLRALTSLPGPGLRTLSFMNNEFAGPLPNVKELSGLRAVFLSENKFSGVIPADAFAGMGSLKKVVLSNNDFTGPIPASLADAPRLLELRLNDNKFQGKIPDLKQEELTEVNLANNELEGEIPASLKSMTSDMFAGNKKLCGPPLGAKCEAPPTPSPKAHPQASVKEGTTPSQAAADTVASTGASSADDPKQDEGQEPVEGSISFGVSAALLGTLLIAGVAFIALRRRRGYKTKNFGPTASSSRPSGPPRVEPHPPAAKAPAAAGGVAHGGGAARKAEQGRLTFVRDDRGRFFELQDLLKATAEVLGAANLGVCYRATLTTGQSVVVKRFKEMNRVGREDFEEHMRRLGRLSHPNLLPLVAYYYRKEEKLLIHDYVPNRSLANLLHGGGESGGMKKAAVHWAARLKIVKGVARALSYLYDELCMLTVPHGHLKSSNILLDAHHGPLLTDYALVPVMNQSHAAQLMVAFKSPERKQFGRSSKKSDVWCLGLLILEILTGRPPTYDPPKAAAPSGELSSSQQKPGPAAGNTDLVTVVGSTPEGEWLNTVVDRDLRGEEEEDKEEMVKLIRVGMACCESNVDNRWELKTAIERIEELKAKERPDEEQATVIDEDYSDVALN

SEQ ID NO: 62080 - protein, 337 aa, Zea mays
  Coding DNA Sequence Number=SeqID_20301
  Homolog annotation: Hit_ID=Q4RF55; Match level="QueryCoverage=52%, HitCoverage=55%, E-value=6e-08, Identity=29%"; Hit description =Chromosome 14 SCAF15120, whole genome shotgun sequence
  Pfam annotation: Domain name=EXTL2; Domain location=52-321; Score =181.1; E_value=2.7e-51; Accession=PF09258.1; Description=EXTL2, alpha-1,4-N-acetylhexosaminyltra
MPPRSYQLLLFLVILELTSVAVAASGEDEDEEQAACAAANRTDAARLRADRLTVILTGYSERRLPLLRAIAGAYAAHPLVLAVVVLWCNPSTPDRLLLGGAGFPPRAAVRRAASASLNSRFLPRPSDVRTAAVAVADDDVLPDAAALSFAFFAWQQHQRPVPGPGPLVGFFARSHHLDLTRGRWAYTAPQPGRYSMVLTKLMVLGTDLLRAYSCSPELAAARAVVDRERNCEDILMNFVAAEASGAGPVLVEAGGVRDWGDPRNDAAGEGPRGGARDVGLSATGGLGHWETRGRCITEFHRLLGRMPLRYSYGKLVQATGGDQGLCSKGGRLVHCDQ

SEQ ID NO: 62081 - protein, 105 aa, Zea mays
  Coding DNA Sequence Number=SeqID_20302
  Homolog annotation: Hit_ID=Q18PR7; Match level="QueryCoverage=49%, HitCoverage=45%, E-value=3e-08, Identity=50%"; Hit description=Beta subunit 3 of SnRK1
MSPYQPCGEAPARSQHTLWWHIGKQHAVAIWDQQGMDDHEAVHVVRFEVPSSPDSGYNNPIPGNKAKFGSPRVSISPSIEHVLPVVAQEWLNDELDDGPKEQAND

SEQ ID NO: 62082 - protein, 179 aa, Zea mays
  Coding DNA Sequence Number=SeqID_20303
MDGYYIIRRTNTPGSNPGRPLFDQEPPKLGHRFPPTTAVVGTRHGGAMANPLWNSILSAKLDSLMMQNQIEYGPGYTRRTQASLRSHPTTVELTMDGGGDYTTTISPKGEALASAPINSRRPVGEDSPDDRVQHGSGCVNMRNGYSEAGCGLDLPVCVGVARGRAGAKIYGGGPREEVW

SEQ ID NO: 62083 - protein, 84 aa, Zea mays
  Coding DNA Sequence Number=SeqID_20304
MDTARKRIVCVCVGGGGGGETISYFWAQSVSYFWVQSGSWVNFWQVEKQVTQGAERVKVIALYFHKKDLETQDWINARSFLNAD

SEQ ID NO: 62084 - protein, 114 aa, Zea mays
  Coding DNA Sequence Number=SeqID_20305
  Subcellular localization annotation: CTP_CleavageSite=91; ConfidenceScore=5.53e-01
MRSCPSRRPAPLSAVVPPLRLALPRSHVLPGGLVPTAARPSPAAVPSPPAQPVPSPTSVPHAPRPQAVPRRRLAPRVPWRAPAMALLPAPPAAPRPSPAAPKRAPGARSAFPRA

SEQ ID NO: 62085 - protein, 135 aa, Zea mays
  Coding DNA Sequence Number=SeqID_20306
DPLPDRHRSKINQGPPYTDHSPTALAPFGYQLALQMTRVHTAKRSNTDKHAADRVGALSSESLEKELMEANAHRDGALRESTDVMSSLGELATKLVSVEAYCSEHKKALRQATNSHLFFHCARPRFMVLTRDEDS

SEQ ID NO: 62086 - protein, 140 aa, Zea mays
  Coding DNA Sequence Number=SeqID_20307
MGKNNKRKREPTPPSEEFGDSEYSEEEFSSESEGSPAPIPLRESSDDSDDSQGLAAEVWTYIRAVERSGLEGSDESEFSSDEEDSDGGEDEDDDDDGGDGDGDGGNGGGDSSSKGGTKGGSSVGSTGGGGGKGSGGRASG

SEQ ID NO: 62087 - protein, 101 aa, Zea mays
  Coding DNA Sequence Number=SeqID_20308
MAMMDSTSEKMYLCQVPNFGFEMIKLRPGENLGVVSLSESIKDLVDVGLLTEDPLTGHMPRHGALSHVVLVDEVATFVVSVPKWCLKKKIKTEAAGESVLL

SEQ ID NO: 62088 - protein, 195 aa, Zea mays
  Coding DNA Sequence Number=SeqID_20309
MDKDSVNASSIVDKNETDVVGHQEPPEVGEPVAELDGDATMDMMRKAVDGHRDLLTEPIVAQVQHLQEREVPEGRDSAPRRRLHLGSGEQHWCRVCPSEPGGEGTGEGRVGLRRLAALAYTLAPGGIVELQALKTTKMAMAHPTHASRGALPQGVCRCWYQGKSVLPQARPYGKGGDDTVGMAADADVDLPEPVV

SEQ ID NO: 62089 - protein, 78 aa, Zea mays
  Coding DNA Sequence Number=SeqID_20310
MSSSSPWIQRRCFGSSSPWLLSSGSSGDYVPRQQQRQLVGLEWDGSANLGRGKGCEGGSEDAINARLRSWTGSGGGGC

SEQ ID NO: 62090 - protein, 264 aa, Zea mays
  Coding DNA Sequence Number=SeqID_20311
  Gene Ontology: Mol. function=sequence-specific DNA binding; Cellular component=intracellular; Biological process=regulation of transcription, DNA-dependent
  Homolog annotation: Hit_ID=Q94EJ7; Match level="QueryCoverage=71%, HitCoverage=71%, E-value=3e-77, Identity=79%"; Hit description=Leafy cotyledon1
  Pfam annotation: Domain name=CBFD_NFYB_HMF; Domain location=36-101; Score=121.0; E_value=3.3e-33; Accession=PF00808.13; Description =Histone-like transcription factor (CBFNF-Y) and archaeal histone
  Pfam annotation: Domain name=Histone; Domain location=33-104; Score =17.1; E_value=0.0028; Accession=PF00125.14; Description=Core histone H2AH2BH3H4
  Pfam module annotation: Pfam domain module=CBFD_NFYB_HMF::Histone; Domain location=36-101::33-104
MDSSFLPAGADNGSAGGANNGGGAAQQAPPIREQDRLMPIANVIRIMRRVLPAHAKISDDAKETIQECVSEYISFITGEANERCQREQRKTITAEDVLWAMSRLGFDDYVEPLSVYLHRYREFEGEARGVGLAPAPPRGDHHHHHHSVPPSMLNKSRGPGSGAVMLPHHHHHDMHASMYGGAVPPPPHHGFLMPHPQGGHYLPYPYEPTSYGGEHALASGYYGGAAYAPGNNGGSGDGSGGSASHAPPGGSGGGFDHPHTFAYK

SEQ ID NO: 62091 - protein, 546 aa, Zea mays
  Coding DNA Sequence Number=SeqID_20312
  Gene Ontology: Mol. function=RNA-directed DNA polymerase activity; Cellular component=intracellular; Biological process=RNA-dependent DNA replication
  Homolog annotation: Hit_ID=Q8S461; Match level="QueryCoverage=93%, HitCoverage=27%, E-value=0.0, Identity=94%"; Hit description =Putative prpol
  Pfam annotation: Domain name=RnaseH; Domain location=356-483; Score =4.6; E_value=2.2e-05; Accession=PF00075.14; Description=RNase H
MADVCRLHWSEQGMSEGYHQIRMKESDQLATSFITPFGMYCYVTMPFGLRNAGATYQRCMNHVFGEHIGRTVEAYVDDIVVKTRKASDLLSDLEVTFRCLKAKGVKLNPEKCVFGVPRGMLLGFIVSEQGIEANPEKIAAITSMGPIQDLKGVQRVMGCLAALSRFISRLGERGLPLYRLLRKAERFTWTPEAEEALGNLKALLTKAPILVPPAAGEALLVYVAATTQVVSVAIVVERQEEGHALPVQRPVYFISEVLSETKIRYPQIQKLLYAVILTRRKLRHYFESHPVTVVSSFPLGEIIHCREASSRITKWAVEIMGETISFAPRKAIKSQVLADFVAKWVDTQLPTAPIQPELWTMFFDGSLMKTGADAGLLFISPLGKHLRNVLRLHFPASNNVAEYEALVNGLRIAIELGVRRLDTHGDSQLVIDQVMKNSHCRDPKMEAYCDEVRRLEDKFYGLELNHIARRYNETADELAKIASGRTTVPPDAFSRDLHQPSVKIDDTPEPEAPSASPRYPRHSPRHPRLGRGTLRFGPRYPRLPEG

SEQ ID NO: 62092 - protein, 83 aa, Zea mays
  Coding DNA Sequence Number=SeqID_20313
  Subcellular localization annotation: CTP_CleavageSite=44; ConfidenceScore=5.27e-01
MRFRGCARALARNQPRPAAGFASPSARTASPRPWEVPQPGNATRSARGKAFPDPRDAILTALTAKVDIALVRAAYTPMKKRGG

SEQ ID NO: 62093 - protein, 443 aa, Zea mays
  Coding DNA Sequence Number=SeqID_20314
  Gene Ontology: Mol. function=arginyltransferase activity; Cellular component=cytoplasm; Biological process=regulation of protein catabolic process
  Homolog annotation: Hit_ID=Q9C776; Match level="QueryCoverage=90%, HitCoverage=66%, E-value=1e-107, Identity=50%"; Hit description =Arginine-tRNA-protein transferase, putative; 58258-55831
  Pfam annotation: Domain name=ATE_C; Domain location=291-443; Score =294.7; E_value=1.8e-85; Accession=PF04377.6; Description=Arginine -tRNA-protein transferase, C terminus
  Pfam annotation: Domain name=ATE_N; Domain location=16-89; Score =45.0; E_value=2.5e-10; Accession=PF04376.4; Description=Arginine -tRNA-protein transferase, N terminus
  Pfam module annotation: Pfam domain module=ATE_C::ATE_N; Domain location=291-443::16-89
MEAWSRGGAVGAEGAQSEQRAAGAEGTQPRAGEGTTTTVRLLWYRRSGCFLYKPEMERTCCPSYTIRLKANDFICSKEQARVLKKIQRFLDGELDPQIGSPQCKASPTKRSLGEPLNSPTSKVSKATATCFRGGVFGSVQLPKAVVKTVKPQVKRKVGEAVQEKKVGEAVQALVYTCNISFQIVAAVRRALPKENGATQTEVPADLSPNSVAEKLSVAMERLGELAGFEVKACNGHLNFYLASNQAMQNHTSVVVPVQASDKSSGSKPSSVNQTNAKYPLKRKNLEIRLSTSHFDPEEFALYRRYQTKVHKEKAVTESSYKRFLVDTPILFVPPKTGDNTVPPCGFGSFHQQYRIDGKLVAVGVVDILPKCLSSKYLFWDPDLPFLSLGKYTALKEIDWVKTTQEHCPSLQYYYLGYYIHSCNKMRYKAAYRPSELLCPLRYE

SEQ ID NO: 62094 - protein, 56 aa, Zea mays
  Coding DNA Sequence Number=SeqID_20315
MTIDDDEQSKISKQADDYERSEVIWWGSYGGLAFELQSLAKRIVSLCCSTSGYERN

SEQ ID NO: 62095 - protein, 204 aa, Zea mays
  Coding DNA Sequence Number=SeqID_20316
MSLPEHATADLDTFRTMDIVVLAASLAAVGLATPCAPSRTSASLSDSWLPPKCQPSLASFIPHGPHSELVVGGASYIAGLRPLPDAPPTTIPATTLRLLVALSLAAPTWTDIVMSSMTPTTDSSLVAAIATIQAVVAASQERQHATSLALEHEHAMGVALTAQMATAQHLILGHPPIDHEVPPLTREAPLGSGLDADHIPALHA

SEQ ID NO: 62096 - protein, 69 aa, Zea mays
  Coding DNA Sequence Number=SeqID_20317
MKVRKGHNPLDGSLQVVVARAEATQRFSTKLNGDGVVELREDCPSGTMMETTGRRGCRGRGRRELTTEA

SEQ ID NO: 62097 - protein, 127 aa, Zea mays
  Coding DNA Sequence Number=SeqID_20318
MVRRLWGGGKPLTLHQPGCCLPSSCRPRDPSSLPQGQPRGWRLHPGWSLQPRWQPGMVVILQPLDRDHLHVAGPVPECLPSSGAGPTDSTSLWRACAALIRRAIDGFGSTLAPAPEDPHLDYVVPAG

SEQ ID NO: 62098 - protein, 157 aa, Zea mays
  Coding DNA Sequence Number=SeqID_20319
MSKDKKGQGLPCRSSDKRKREPSPPLEDFGDSEYSEEFSSKSEGSPKYASPLASSDDLDDSQGIAAEVWTYIRSIERAGLKGSDESEVSSNEGNSSDSSEKGSSGNGDDEGDGSGGHSNGGGGGDDGNDDGGEGSNGDGDGGGKGSGGKVSGKAPLA

SEQ ID NO: 62099 - protein, 48 aa, Zea mays
  Coding DNA Sequence Number=SeqID_20320
MVADEEEYNCKDEFEPKDALTPNGATGGGENIEAVYDPDECEDLVQDR

SEQ ID NO: 62100 - protein, 88 aa, Zea mays
  Coding DNA Sequence Number=SeqID_20321
MAQQARPGFWPGFTGPGPGRAGRPVWPSLVVGEATDPSHPLQCPGHVRDHVPGRLRLPGPCLLRPDSFGRSVACRMLDACHATMHMNE

SEQ ID NO: 62101 - protein, 448 aa, Zea mays
  Coding DNA Sequence Number=SeqID_20322
  Gene Ontology: Mol. function=protein serine/threonine kinase activity; Cellular component=cytoplasm; Biological process=protein amino acid phosphorylation
  Homolog annotation: Hit_ID=Q9LGV5; Match level="QueryCoverage=98%, HitCoverage=95%, E-value=1e-164, Identity=64%"; Hit description =Putative CBL-interacting protein kinase 1
  Pfam annotation: Domain name=NAF; Domain location=301-361; Score =86.4; E_value=8.9e-23; Accession=PF03822.5; Description=NAF domain
  Pfam annotation: Domain name=Pkinase; Domain location=6-264; Score =319.8; E_value=4.8e-93; Accession=PF00069.15; Description=Protein kinase domain
  Pfam annotation: Domain name=Pkinase_Tyr; Domain location=6-264; Score=78.6; E_value=2e-20; Accession=PF07714.7; Description=Protein tyrosine kinase
  Pfam module annotation: Pfam domain module=NAF::Pkinase::Pkinase_Tyr; Domain location=301-361::6-264::6-264
MRMGKYEMGRTLGEGHFGKVRLARHADTGRPFAIKILDRQRILAMKIHDQIKREIATLKLLKHPNVVRLYEVSASKTKIYMVLEYVNGGELFDKIYMQALKGKLTEKEGRKLFQQLIDAVGYCHEKGVYHRDLKPENVLVDAKGNIKVSDFGLSALPQNQQKDGLLHTTCGSPNYIAPEVLLNKGYDGSISDVWSCGVILYVMLTGNLPFDDQNVVVLYQKILKGNAHIPKWLSQGAQDILRKILDPNPVTRIDVDGIRAHDWFKQGYAPAMPFSDDEEDISMDEDSLNITEHNDIQDKIAINQINAFQLIGMSSCLDLSGFFEKEDVSERKIRFASNYSPAYLFEKIESIVRKMGFQVHKSNGKLKVIQDCKGLANSRGQESLLISAEVFEINEYLYVVELKKSSGDCSLYRKLCETLSEDLGTCKSQQFLKQDSIRQDIGRYNSSF

SEQ ID NO: 62102 - protein, 112 aa, Zea mays
  Coding DNA Sequence Number=SeqID_20323
  Gene Ontology: Cellular component=integral to membrane; Biological process=transport
  Homolog annotation: Hit_ID=Q7XI54; Match level="QueryCoverage=54%, HitCoverage=26%, E-value=1e-17, Identity=69%"; Hit description =Putative transmembrane protein
MTCDEGYFLNFPLKEKGIGENKTYPLADFLGLETGILVAMMELELKKLEETIKNIHEEMLYLREREEEMQDVNRRTNSRMAWLGFLSLGVCLSVAGLQLWHLKTFFERKKLL

SEQ ID NO: 62103 - protein, 59 aa, Zea mays
  Coding DNA Sequence Number=SeqID_20324
  Gene Ontology: Cellular component=integral to membrane; Biological process=response to abscisic acid stimulus
  Homolog annotation: Hit_ID=Q5MJ27; Match level="QueryCoverage=91%, HitCoverage=98%, E-value=1e-24, Identity=90%"; Hit description=Low temperature and salt responsive protein
  Pfam annotation: Domain name=UPF0057; Domain location=6-56; Score =87.7; E_value=3.5e-23; Accession=PF01679.8; Description =Uncharacterized protein family UPF0057
MSDGTATCVDIILAIILPPLGVFFKFGCGAEFWICLILTFFGYLPGIIYAVWVITMFFF

SEQ ID NO: 62104 - protein, 99 aa, Zea mays
  Coding DNA Sequence Number=SeqID_20325
  Subcellular localization annotation: CTP_CleavageSite=49; ConfidenceScore=5.30e-01
GKAAAGASATTTTTASGKRLRPLRLVRLLLLLPARRVAALVAELVRRLAAAEAAADCPAIVFSSQWGLPVLSHSASCRSSRLRALYLDRNLSAGTGSPC

SEQ ID NO: 62105 - protein, 48 aa, Zea mays
  Coding DNA Sequence Number=SeqID_20326
MVADEEEYSCKDEFEPKDALTPNGATGGGENIEAVNDPDECEVLVQER

SEQ ID NO: 62106 - protein, 107 aa, Zea mays
  Coding DNA Sequence Number=SeqID_20327
MGSSSLRAEMESRLVGGNEIDGFGIDSGNVHYNQTGHEYVEVYSPLLYTPNRPQVVRIATTAQEKMKPWKEISRSSKITTSSRRGLAANPQSAACEGRVYLRFVFAL

SEQ ID NO: 62107 - protein, 128 aa, Zea mays
  Coding DNA Sequence Number=SeqID_20328
MAARSLAVCGRGPPGEVKKSLPKAPSKSLGHGPKDEEVTDAWCCYDGFVGLWGGYASVADVLAWFVLVLQMQHLRESRDGNTLTCDWTVTLKWFCSRVPSDRGSPLLNLSQREVEGEGSHAARQEMGS

SEQ ID NO: 62108 - protein, 404 aa, Zea mays
  Coding DNA Sequence Number=SeqID_20329
  Gene Ontology: Mol. function=O-methyltransferase activity; Cellular component=intracellular; Biological process=lignin biosynthetic process
  Homolog annotation: Hit_ID=Q2QS38; Match level="QueryCoverage=81%, HitCoverage=93%, E-value=1e-116, Identity=64%"; Hit description=O -methyltransferase ZRP4, putative, expressed
  Pfam annotation: Domain name=Dimerisation; Domain location=34-82; Score=72.2; E_value=1.7e-18; Accession=PF08100.2; Description =Dimerisation domain
  Pfam annotation: Domain name=Methyltransf_11; Domain location=200 -292; Score=3.0; E_value=0.027; Accession=PF08241.2; Description =Methyltransferase domain
  Pfam annotation: Domain name=Methyltransf_2; Domain location=94-335; Score=292.9; E_value=6.2e-85; Accession=PF00891.8; Description=O -methyltransferase
  Pfam module annotation: Pfam domain module=Dimerisation::Methyltransf_ 11::Methyltransf_2; Domain location=34-82::200-292::94-335
MTLSKKQGAGTDQQALLDAQLQLWHHTIAFVKSMALKAAVDLRIADAIHLHGGSATLSQIVTKVTLHPSKIPCLRRLMRVLTLTGVFSVNSGAVVDEPVYGLTPASRLLVGPGLNQTPFLTLMLSTFFVSSFLGLDEWFQHETGPSPFELANGRDIWTLSGHDASFGKLFDDGMVADSGFIMDVVVKECGDVFRGVGSLVDVAGGLGGATQTIAKAFPDVACSVLDLSHVVANAPTDTTVKYIAGDMFESIPSANVVFLKWILHDWGDAECVKILKNCKKAIASQEEGKVVILDMVVGAGSSDEKHVETQIVFDLFMMFINGTERDETEWKKIIFEAGFSRYKIIPVLGVRSIIEPHSPRQHPIPEITLTRLVWTINAATTPFLHLPRLDEHPSMISLSDDEST

SEQ ID NO: 62109 - protein, 107 aa, Zea mays
  Coding DNA Sequence Number=SeqID_20330
MAAGMHTCVLWRWRVKNATVPDPIARRTWGGAGVPRYTVGRLLRDLLQLFGIEVWASGALATGVAAVRTVWRRRIHGRGVRRRDDGGAPLDGDRAAQFRSTRNPSRD

SEQ ID NO: 62110 - protein, 244 aa, Zea mays
  Coding DNA Sequence Number=SeqID_20331
  Homolog annotation: Hit_ID=Q6QP51; Match level="QueryCoverage=31%, HitCoverage=26%, E-value=2e-07, Identity=48%"; Hit description =Putative growth-regulating factor 1
MRHLWQAKQAMLHLRHNDRVKKRKGDIPKGILLREGSGPRAPLLIRGSKAGPSEGFNSRLRALGHCAHYWLAPEGFDSRLRRRVRDDPGYVRYITKARATLPRKLRLARPQGSAPISASDDKLRLARPRARTRPRLRKMANSASPDLGLGLGLSSGRRRTPPRPTPGLGLSLGSGRRRTPPRPTPGLGLSPWPQTMVSASPDPGLGLDLDLGRQTRPRPRRSHRLARPRARTDHVTLGPSLPYP

SEQ ID NO: 62111 - protein, 232 aa, Zea mays
  Coding DNA Sequence Number=SeqID_20332
  Homolog annotation: Hit_ID=Q6PP42; Match level="QueryCoverage=21%, HitCoverage=10%, E-value=1e-12, Identity=76%"; Hit description=MobA -like protein
MADDVRSYGTGERGAERARHGIEPPGAEFERSAAPVVERLNAGELPTRREVSSVLLMPPPPGGRRIFSPVYMRWHVMIIICYRWSTVVLRWVRELCILYSSWFCVHIPRRSGVRGQTVCDWAERFPRCSMKASKDGSGVLTTGSAVLFAEAWMVRNRGLDGLGTGWCSVQRKQTRFPATVINFHYKPETTRANPRVHDSWAEVRVHMALLQLCLFGQSGLRIKAHAVDEQGS

SEQ ID NO: 62112 - protein, 356 aa, Zea mays
  Coding DNA Sequence Number=SeqID_20333
  Gene Ontology: Mol. function=protein serine/threonine kinase activity; Cellular component=membrane; Biological process=regulation of transcription, DNA-dependent
  Homolog annotation: Hit_ID=Q9AXB2; Match level="QueryCoverage=64%, HitCoverage=46%, E-value=1e-34, Identity=38%"; Hit description =Disease resistance protein-like
MGHDHMSRIKMHMAEGSFGDRNRCQQPGCNEVVDGRVVYCKTHSGELSCQQFSHLQSGLESSGLSQYHALSKSYMSSTKGMIEACFARTIAAASKHMRTQSTVSCIAVLARAAWSEAVQRGAHGGTPLCIGHGGGKRCVIPGCPNAACGQGLSDRCVRHGGGRRCRFEGCAKGAQGNTDYCIRHGGGRRCKFEGCTKSAQGRTDFCIKHGGGSRCKFQGCGTSAKWGTDFCSIHRKALLGGDNAAVPEALPAASEKRRRAKKPKKAAKLSEASQENATAAAAIAGNSTQHMGGLLIAIPVANRDMLTKAVAATGQAAIASAQIVAPLSMKSPTPSGAAAATLTGREAGASREMLGL

SEQ ID NO: 62113 - protein, 756 aa, Zea mays
  Coding DNA Sequence Number=SeqID_20334
  Gene Ontology: Mol. function=protein serine/threonine kinase activity; Biological process=protein amino acid phosphorylation
  Homolog annotation: Hit_ID=Q6ZC64; Match level="QueryCoverage=60%, HitCoverage=57%, E-value=1e-137, Identity=53%"; Hit description =Putative cytokinin-regulated kinase 1
GNSGANNIGNHDTCSSQEQPSQTYVYKEASEANDSEIQMEDVGKLSVDQTSSLVLLDYEDEGSRQYLVEKGQTEYRDMNSNEEHTPTGIQPNEYSDVEHHQQKGQTETTSQEIEMEDYPIQQENPLFLQLRASLFPSNWSSTFRGRHSLFRPRRRAPVKAEPSACSHGGNNEAVGIFGEPGFSVKVKLPDLSPTSVRRFLETSSALYYDGMNGGMHVPHSEEEICGIAILEGAAGPGQATATSRAHVVSSLRMPMSSHAHAGHRRLFLLTSTSTSLAFVAAVLLLIVDACAASRQFSTVAISHAPNATLVCALVTSADDAGAGPPGSSKLRCTSLPDGQQFVYPSADIPYNAIAAGTDFLCGLMAPLGGHAAMRWWSFSEEFAANRSRPVGRRLYWGPSLRSLSAGGSHACGLSDDHGPSCWEWPRLALPKGLDFSRIALGHDFLCGIDKLDNTSMSCFGAMTAPSLAPAPAAFATIAAGHRHACAVDAEGGFGCWGDDDGDVPNVPAHELPADMLAMALGNGSTCILSGIGRVQCWGAVQVPDQYRNADFLAIEADGGAVCGILRSNYSVACWGRTDRFGTGGSLVYNSTMPGACTHKKSCPCDIISGSGALCGSGGSEGGEELAVCQACAVRLNASRLLITNAWAAPGAAVLAAAAVALYLVSYRKRDNKKTLTLRLGESSSRRLCRDVEATAMPAPPVPPLGCEEFTLRDLSRVTDGFSEEKKIGSGSFGSVYRARLPDGREVAIKRAERSGS

SEQ ID NO: 62114 - protein, 79 aa, Zea mays
  Coding DNA Sequence Number=SeqID_20335
MPVSDFRPEGVAERRRAQTGNLNLNGPAAQQWIWVEVDMVHDPWVEVQMALLQLCLFGQPARIRPKLANRERAENTCAS

SEQ ID NO: 62115 - protein, 195 aa, Zea mays
  Coding DNA Sequence Number=SeqID_20336
  Gene Ontology: Mol. function=translation initiation factor activity; Cellular component=cytoplasm; Biological process=multicellular organismal development
  Homolog annotation: Hit_ID=Q7XBH5; Match level="QueryCoverage=82%, HitCoverage=44%, E-value=8e-76, Identity=87%"; Hit description =Zwille pinhead-like protein
  Pfam annotation: Domain name=Piwi; Domain location=5-191; Score=59.2; E_value=1.3e-14; Accession=PF02171.8; Description=Piwi domain
  Subcellular localization annotation: CTP_CleavageSite=39; ConfidenceScore=5.19e-01
MAGSIVVVAFPTGSVGRGHPDRRRRVVGSRCWPLISRYRASVRTQSPKVEMIDSLFKPLDDGKDDGIMRELLLDFYQTSQQRKPKQIIIFRDGVSESQFSQVLNVELNQIIKAYQSMGQGDLPKFTVIIAQKNHHTKLFQADSPENVPPGTVVDSGIVHPRQYDFYMCAHAGPIIDDPRVLVAPASGDSDAPHNP

SEQ ID NO: 62116 - protein, 217 aa, Zea mays
  Coding DNA Sequence Number=SeqID_20337
MQGLAMAGSIHGGSEPRERRGSEVAGGAGKSASGEGMSCRGRGSAPAPRRTRAGRGDQMWRVDAARERRPVALVAGGRGGSRRHGGPCPTVPYQGHACAGAEAALGWPSPRWRSRRQGRIMEPALEVAWRTRLTRGGEGEEQHDTTATWIRLGRRARGSAAQEREVAGCHASQPPLPPPAAQGRTVTAVPAPRAREQWRGLSSCTVEAETKGDSPGS

SEQ ID NO: 62117 - protein, 58 aa, Zea mays
  Coding DNA Sequence Number=SeqID_20338
MGSSQPPHASGTQTHFPRHTELVLSLTSSAAAHNDAHPATFSVDADLWLALAEDDGKV

SEQ ID NO: 62118 - protein, 54 aa, Zea mays
  Coding DNA Sequence Number=SeqID_20339
MENSDITKSNMLADKVKVNLNVLGRDRNWCVEHAFQGSDVIAQGPSKRIPGEEH

SEQ ID NO: 62119 - protein, 185 aa, Zea mays
  Coding DNA Sequence Number=SeqID_20340
MEGEMRSPNGGVADGRGDMSGEGPTMPRPRRMPREVWWRRRESVDQIENGTLSRWRPRSRMAASAPIPGEAMKGIVAGRRWRSTNGRGDVEPKWGRGGWKGRYERRGPDCASPAEDATRAAHEEQRGTQRGGGAVGCVEEDLPSPSSSRMKPATASVGEEQRIERHRTTPNPIPITIGCVGRSGR

SEQ ID NO: 62120 - protein, 182 aa, Zea mays
  Coding DNA Sequence Number=SeqID_20341
MEIKKGMYFQHNENKMMRNLKSTEPNSILVTEFCSEVEHIVVVVEDEACYGEVPNALASHLGNGMQKSDVAVAVAQGSDAEQCRGGGGRNSGLGVRGAPTSIQATTGTIANLRSRRAEQRGGGGDAATVMGSFVVLCSLVCCLVFGFGSNMRRTVIVQGPPGEFTFAQLEAATKGFALEAKI

SEQ ID NO: 62121 - protein, 57 aa, Zea mays
  Coding DNA Sequence Number=SeqID_20342
MELLLSSLLPPHAREQPLCSAPCSHGRFTRRQWASALQSSVAGQYAPMNYAAVELCS

SEQ ID NO: 62122 - protein, 48 aa, Zea mays
  Coding DNA Sequence Number=SeqID_20343
MARSQTINDMFCQCDLFLVEDTRIHDVFHVGLLKPSTVILRWGLHLCR

SEQ ID NO: 62123 - protein, 44 aa, Zea mays
  Coding DNA Sequence Number=SeqID_20344
MTICGVGGSDPILAKGVTSMELTIKNKTLFVSFFVMEVKGHHIS

SEQ ID NO: 62124 - protein, 465 aa, Zea mays
  Coding DNA Sequence Number=SeqID_20345
  Gene Ontology: Mol. function=transferase activity, transferring acyl groups; Cellular component=endoplasmic reticulum membrane; Biological process=GPI anchor biosynthetic process
  Homolog annotation: Hit_ID=Q10KM5; Match level="QueryCoverage=98%, HitCoverage=99%, E-value=0.0, Identity=71%"; Hit description=GWT1 family protein, expressed
  Pfam annotation: Domain name=GWT1; Domain location=288-424; Score =64.8; E_value=2.7e-16; Accession=PF06423.2; Description=GWT1
MEGRLFDKPLNPNKLLKEQFVSNLTGSSLLEIAALSTVVPIILGRSQQKKNDDQVHTVRKDWMQYFSTLGVDYLTVVLPIILVFTVLSEWVFMCAISLVILISIYIMFKRSQFHLKDGFSQLPLLRADISSYRVSVVLVTCLCILAVDFKIFPRRYAKAETYGSGIMDLGVGSFVVANALVSRQARNIASMSFKAVLCSISPLLSLGFARIISTWGVDYQVHVGEYGVHWNFFFTLAAVSILTSVVRIHPKHCGLVGLLILAGYQIWLSSGLNEYLISHKRSADIITQNKEGIYSILGYWGMFLIGVSLGFYLFVDTSSKGKNRNTQVMQIWVLAASFWILAIIFDSYIERVSRRMCNFAYVMLVFGQNFQLFGLLFLFTLQVLSILTLAGFASYKKNLVLEDAFNENMLGSFLLANILTGLVNLSVNTLSASSFTAFMILSVYAFTLCMVTGLTHFCGVRMKFW

SEQ ID NO: 62125 - protein, 59 aa, Zea mays
  Coding DNA Sequence Number=SeqID_20346
MGAGASGHGGPEVVARCELRCSGGQRRRYALRSNDDFGSNIYNIFSTQLSSDEDHMISE

SEQ ID NO: 62126 - protein, 555 aa, Zea mays
  Coding DNA Sequence Number=SeqID_20347
  Gene Ontology: Mol. function=transporter activity; Cellular component= membrane; Biological process=oligopeptide transport
  Homolog annotation: Hit_ID=Q2R726; Match level="QueryCoverage=98%, HitCoverage=95%, E-value=1e-173, Identity=54%"; Hit description=POT family protein, expressed
  Pfam annotation: Domain name=MFS_1; Domain location=25-496; Score =7.0; E_value=0.00015; Accession=PF07690.6; Description=Major Facilitator Superfamily
  Pfam annotation: Domain name=PTR2; Domain location=90-484; Score =275.9; E_value=8.1e-80; Accession=PF00854.12; Description=POT family
  Pfam module annotation: Pfam domain module=MFS_1::PTR2; Domain location=25-496::90-484
MALQCLVDWKGQPVNPKRHGGVKATMFIYFLVVMTNIGNIPMLLNVVSYLHGKMHMDIADASTTATNFFGAVCVFTFLGAFVSDSYITRFYTILIFAPIEILGYMLLACQAHLPSLHPAPCDVTNSSPSECTTVSGRNLSLLTLGLYLIPVGEGAVRVCAAALGGDQFDREDPRELRGAASFFNWYTFCISLGGFAGLLFVVWVQDNEGWDLAFALSALVALLGTLVLVAGMPFYRHQKPTGSPLTRILQVFVAAFRKRNLSVPEDFVGTHEMTTGETGTIVEVLERTSGFKFLDKAAVNDGDARRWSLCTVTQVEEAKIILRMLPVFVSSVLGYLPIPLLLTFTVQQGGTMDTRLGATNVPPASLFVVPIVFQMLILVVYDRAVVPWLRRATGYAGGVTHLQRIGVGFASNVVALAVAAAVEGRRRAEGGAAAAEMSVFWLTPQFFLLGVMDVTSFVGLLEFFYSEASAGMKSIGGAVCFCILGIASWLGSFLIRVVNRATAHHGTSRGTGWLEGANLSAGRLDLFYWLLAIFELVAVLLYLLCAWRYTYRTNL

SEQ ID NO: 62127 - protein, 135 aa, Zea mays
  Coding DNA Sequence Number=SeqID_20348
MERLTGVGRVLAKGEGSPTRCSGFSGEAITSAQSSVEGYGHVGGQGQGMGLLIGEDSSTGAGWSARPSRQGSWRARRSQSALSSGKTRGGLLLPVFKRLFSCPSVPISARISCRISSVRQDLAFPCESRAVIHYG

SEQ ID NO: 62128 - protein, 143 aa, Zea mays
  Coding DNA Sequence Number=SeqID_20349
MATNKGGKGKHGQGEGKQKRPPTPPSEDFAVSEFLDEHFSQGDDSPLPTPLSLSSDYSNARWGCRWRRGPTSDPSSDQGEDIYEGGDGSGYEGGDEGGNIGNGGSAGGGGADDGGDSGYDDDDESGGDSDNVGGRAPPALILV

SEQ ID NO: 62129 - protein, 172 aa, Zea mays
  Coding DNA Sequence Number=SeqID_20350
MAANKGSKGKHGQGEGKRKRPPTPPSEDFGDSEFLDEHFSQGDDSPLPTPLSLSSDYSNARWSCRWRRGPTSDPSSEQREDSSEDFKGVDSEEDSKEDSKEEDISGGDGSSYEGGDVSGYEGGNEGGNIGNGGSAGGGGADDGGDSGYDNDDESGGDSDNVGGRAPPALILV

SEQ ID NO: 62130 - protein, 76 aa, Zea mays
  Coding DNA Sequence Number=SeqID_20351
MAMMGSTSEKMYLCPVPNFGIVNDKDETGFASGIPIPERPTGNESGEMERVACSLYGKRLDGGVSVLSVGMNPVWS

SEQ ID NO: 62131 - protein, 118 aa, Zea mays
  Coding DNA Sequence Number=SeqID_20352
MARACWGPKAPRRGSGWLGDCVEHERGHGINTEASEGSSARRGGSAAARTHSSEQSRATESEKEKNRGWGGWLPRGKAPRPWTAAEARRGLGSNTAALWLRGGGTMCPGRENRRGREE

SEQ ID NO: 62132 - protein, 227 aa, Zea mays
  Coding DNA Sequence Number=SeqID_20353
MVRSPELRQARARVAPGSPELGREEEDATTNAMAGKRPRIHGQRGDNGGRSSGRLGAVSGELDGREHDSGSPAVAGDVCRARERVKLRKMRREMVHTLQTTRVNTTRVPPPQQDPSYPVVTEEVPVELHYLTVRNGVILEDSSEEILATPTPYPAPHAFPAEASSSALPMLVTQASTFGGDDPDDSGDDGGDDDDEEDNNDNNGDANNEHDQDDDFVGMWLLWSTTL

SEQ ID NO: 62133 - protein, 482 aa, Zea mays
  Coding DNA Sequence Number=SeqID_20354
  Gene Ontology: Mol. function=nucleic acid binding; Cellular component= chromatin; Biological process=DNA integration
  Homolog annotation: Hit_ID=Q10I04; Match level="QueryCoverage=86%, HitCoverage=24%, E-value=0.0, Identity=73%"; Hit description =Retrotransposon protein, putative, unclassified
  Pfam annotation: Domain name=RVT_2; Domain location=16-271; Score =533.7; E_value=2e-157; Accession=PF07727.4; Description=Reverse transcriptase (RNA-dependent
PFRVEEALLDPDWVLAMQEELNNFKRNEVWTLVPRPKQNVVGTKWVFRNKQDEHGVVTRNKARLVAKGYAQVAGLDFEETFAPVARLESIRILLAYAAHHSFRLYQMDVKSAFLNGPIKEEVYVEQPPGFEDERYPDHVCKLSKALYGLKQAPRAWYECLRDFLIVNAFKVGKADPTLFTKTCDGDLFVCQIYVDDIVFGSTNKKSCEEFSRVMTQKFEMSMMGELNYFLGFQVKQLKDGTFISQTKYTQDLLKQFGMKDAKPAKTPMGTDGHTDLNKGDSDYAGCKVDRKSTSGTCQFLGRSLVSWKSKKQTSVALSTAEAEYVAAGQCCAQLLWMRQTLRDFGYNLSKVPLLCDNESAIRMAENPVEHSRTKHIDIRHHFLRDHQQKGDIEVFHVSTENQLADIFTKPLDEKTFCRLRRELKGKKVDLDHERLPLHSDERPKGCFGLGHRTVRWCTGQCPVRQAASGEEAALGNLPTAYG

SEQ ID NO: 62134 - protein, 156 aa, Zea mays
  Coding DNA Sequence Number=SeqID_20355
  Subcellular localization annotation: CTP_CleavageSite=17; ConfidenceScore=5.48e-01
PPPPLALFSLSPLFPTLAAASQAPPPDPTPRPKPRARTPADRPAPRPTPDGTQAEQPLSASSLPELAPYSLSLSSPFEPPPPSPEFATPLPEPMELAGATPPTVPSLRLDTRPSTVCRSSRVDYELDEPNTFEDDQQDTFEQGKWILPLHILFVPN

SEQ ID NO: 62135 - protein, 518 aa, Zea mays
  Coding DNA Sequence Number=SeqID_20356
  Gene Ontology: Mol. function=heat shock protein binding; Cellular component=integral to membrane; Biological process=protein folding
  Homolog annotation: Hit_ID=Q2QMA0; Match level="QueryCoverage=99%, HitCoverage=100%, E-value=0.0, Identity=75%"; Hit description=DNAJ heat shock N-terminal domain-containing protein, putative, expressed
  Pfam annotation: Domain name=DnaJ; Domain location=288-362; Score= -7.4; E_value=0.023; Accession=PF00226.21; Description=DnaJ domain
MEDLGLWNQAWMWVLSQKHILAWAHTAACGSRERLAFLVDRHWPAVSRGCATSSRLTLAALRQWRGCMARGVLAVASLGPAAVFVILWSFFVCMTSPACALYALLSLGAAAAVVHYMGYTPGLLIVGLFGILIMWMYGYFWITGMLLVAGGCMCSLKHARYVTPVLTSYAIYCVAVRVGWLGVFLTFNLSFLTNDLLNKLAQGYEGSTEESQFEDMKDSDPVMDEFYRSCEFPSVPDSEPETVSSAKPYCSAPIQDVLHVQKEEPPSKIVKSDSSSSDEIKRIMDGSNHYEVLGVPRNRSIDQKALKKEYHRMVLSDFTKKNSYDQQLRKEESQKMTPRSRAVSQQSGVEFLSEESRRIQCTKCGNFHIWICTKRSKTKARFCQGCDQFHQAKDGDGWVETRFSSSIKMEIPRAFVCAESKIFDVSEWATCQGMECKPNTHGPTFMVNMVGADRMPQRSYSSRYPFSLDAEMIPDDEFEMWLQQALASGVFADSPKRRKSWSPFKLPQKGIKSWRRSS

SEQ ID NO: 62136 - protein, 59 aa, Zea mays
  Coding DNA Sequence Number=SeqID_20357
MPTHERLPRAPATLLDRKPETGRKCSSVSTVGGKSAAAQTATLSFGGTAWGERGYSTRY

SEQ ID NO: 62137 - protein, 65 aa, Zea mays
  Coding DNA Sequence Number=SeqID_20358
MSTASFPGVNTVFSELWCGSIQLVDNGCLSMTGTTTGGVIMEHPGPNRITQKIIDVIPRAMTSGN

SEQ ID NO: 62138 - protein, 133 aa, Zea mays
  Coding DNA Sequence Number=SeqID_20359
  Gene Ontology: Mol. function=nucleic acid binding
  Homolog annotation: Hit_ID=Q3LRV2; Match level="QueryCoverage=51%, HitCoverage=29%, E-value=4e-25, Identity=76%"; Hit description=Gag
MGLGRTLSRESGYKYKEESSSSIKSHRKGDKKKKMKKVVYYETDSSSPSTSGVESTTSKRHERKPPYFDGEDYCMWSVKMRHHLTSLHESIWDIVEFGAQAPQVGNEDYDSDEAAQIRHFNSQGTSILLASLC

SEQ ID NO: 62139 - protein, 69 aa, Zea mays
  Coding DNA Sequence Number=SeqID_20360
MSLHSSGCVHLQRRGRKRSGTATAANQLGWRTTQELKDKDQWGDSTVGTTLATPLRSPPLPRSMMGSCS

SEQ ID NO: 62140 - protein, 492 aa, Zea mays
  Coding DNA Sequence Number=SeqID_20361
  Gene Ontology: Mol. function=protein binding; Cellular component =membrane; Biological process=defense response
  Homolog annotation: Hit_ID=Q84KC6; Match level="QueryCoverage=95%, HitCoverage=37%, E-value=1e-49, Identity=34%"; Hit description=NBS -LRR disease resistance protein homologue
  Pfam annotation: Domain name=NB-ARC; Domain location=152-450; Score =83.4; E_value=7.1e-22; Accession=PF00931.13; Description=NB-ARC domain
MVHVGEMLASAVIKEVVRRLPALLQAPVKGPAKMIRSFREDLDEMKMTLESIKATMAEAEQRSINDETARLWLKRLKRAAYDISDMFDEFEHGSPPGKKLQGPSWFEIMFSRDMAKKMKKMNKRLKEIAEQWKNYGGIGRVSCEPKNDAAEEQETTSSSSSAVVVGRRAEKQAVINILLSSNNTYPQETISHCTVIHGLGGVGKSELATSVFNDERIKEAFPQRAWVWLGQNFREKDIGRAIISIVECGSCNLEILESIYQHLRKVLLGRCLIVLDNLWDSVHLAKLQGELGSNVSILVTSRREIQLNMPRSTLFRLDPLSERFSLDLVKEVASSYFPAGDIPETAMEEIVKMCGGVPLALKSVASQLRPERSVKELLSLIRAISPPKSDYGTTDIQDRVLASLKLTYHLMSPSLKLCFAYCAIFAKGDEIDREGLCHQWIALGLTEKMYAEDRVRDLLTMSFLRDPEPPAAIRFVTEKSLMKNDSFNISVT

SEQ ID NO: 62141 - protein, 110 aa, Zea mays
  Coding DNA Sequence Number=SeqID_20362
MAGMALTPIEMARTGGEAFAELGYVKHIVDVGHGFRGTRAIIHRTVRCTPDSVRCSKEERPPELASLGKTQRLLRYNSPDMSGVRHAHAGTLDSEQFMSGAPPDIKAGPE

SEQ ID NO: 62142 - protein, 525 aa, Zea mays
  Coding DNA Sequence Number=SeqID_20363
  Gene Ontology: Mol. function=alpha-amylase activity; Cellular component=cellular_component; Biological process=carbohydrate metabolic process
  Homolog annotation: Hit_ID=Q41770; Match level="QueryCoverage=81%, HitCoverage=97%, E-value=0.0, Identity=96%"; Hit description=Alpha -amylase
  Pfam annotation: Domain name=Alpha-amyl_C2; Domain location=368-428; Score=149.3; E_value=1e-41; Accession=PF07821.3; Description=Alpha -amylase C-terminal beta-sheet do
  Pfam annotation: Domain name=Alpha-amylase; Domain location=29-367; Score=333.5; E_value=3.5e-97; Accession=PF00128.14; Description =Alpha amylase, catalytic domain
  Pfam module annotation: Pfam domain module=Alpha-amyl_C2::Alpha -amylase; Domain location=368-428::29-367
MAKHLAAMCRCSLLVLVLLCLGSQLAQSQVLFQGFNWESWKKQGGWYNYLLGRVDDIAATGATHVWLPPPSHSVAPQGYMPGRLYDLDASKYGTHAELKSLTAAFHAKGVQCVADVVINHRCADYKDGRGIYCVFEGGTPDSRLDWGPDMICSDDTQYSNGRGHRDTGADFAAAPDIDHLNPRVQQELSDWLNWLKSDLGFDGWRLDFAKGYSAAVAKVYVDSTAPTFVVAEIWSSLHYDGNGEPSSNQDADRQELVNWAQAVGGPAAAFDFTTKGVLQAAVQGELWRMKDGNGKAPGMIGWLPEKAVTFVDNHDTGSTQNSWPFPSDKVMQGYAYILTHPGTPCIFYDHVFDWNLKQEISALSAVRSRNGIHPGSELNILAADGDLYVAKIDDKVIVKIGSRYDVGNLIPSDFHAVAHGNNYCVWEKHEYNEGVHRGSCPRSPPPRPRPRPSASIPFVFPPQISALVRATQRLLPPLPPPPPPSSRCPRPSRHSRVRVAPHPRRTRVGAIPPQCPAPYPHAIIA

SEQ ID NO: 62143 - protein, 48 aa, Zea mays
  Coding DNA Sequence Number=SeqID_20364
MEDRRRRMGLTVAVRVFPLPPAGRPGRGAGHMYLQLEGNESTSVTTQK

SEQ ID NO: 62144 - protein, 822 aa, Zea mays
  Coding DNA Sequence Number=SeqID_20365
  Gene Ontology: Mol. function=monooxygenase activity; Cellular component=membrane; Biological process=electron transport
  Homolog annotation: Hit_ID=Q285R4; Match level="QueryCoverage=59%, HitCoverage=96%, E-value=0.0, Identity=77%"; Hit description=ABA 8' -hydroxylase 2
  Pfam annotation: Domain name=p450; Domain location=364-797; Score =186.6; E_value=5.9e-53; Accession=PF00067.12; Description=Cytochrome P450
MADDRPLGDGASGLGRQHDTRGRASGLGRCDAVWSLVLSRSFMYYQLLAVTAGADDDWLQPQLLAGRSRHYGAGCVNGRAGRQPCSAVESLRTLWKLARPTWLAPTTTSTHTTTPGRAWRRPHASAAGTLGSLHLADPISRRYERAGDGPASGAFLLVLMIGGPRLRLVESRSRRPHDSPSWRPAGTAAEVARMHARLRPRPSWRRGQGSANGGKGPGVSLDKNLSSRGSMQVLTDLPAWRSFYKYQARRCLDLHHSEDPSIKDFSSRSLSLVRPSHQHITKQAGRLIQYAQSGNRAKNSAGQSAATATGLLVSRISWMALFFILACTLIFVAIASYAQYARWQKGKGRLGGHEKASSSSSKLPPGSMGWPYLGDTLQLYSQDPNVFFASKQKRYGEIFKTHLLGCPCVMLASPEAARFVLVTQAHLFKPTYPRSKERMIGPSALFFHQGDYHLRLRKLVQGALGPDALRALVPEVESAVRSTLAAWDGQVRSTFDAMKTLSFDVGILAIFGGGGLDERRKAELRKNYSIVEKGYNSFPNSIPGTLYYKAMQARRRLHGVLIDVMRERRERGAPGTDLLGCLMRSQGDDDGARRPLLTDDQVADNIIGVLFAAQDTTASALTWAVKYLHDHPKLLEAVRAEQAAVREATGGGRRPLTWAHTRSMALTHRVILESLRMASIISFTFREAVADVEYKGFLIPKGWKVMPLFRNIHHSPDYFQDPHKFDPSRFQVAPRPNTFLPFGSGVHACPGNELAKLEMLVLIHHLVTAYRWETVGSSDEVEYRPFPVPKQGLPVRLWRESSAAVDRNGRHETDDDVEDIIV

SEQ ID NO: 62145 - protein, 401 aa, Zea mays
  Coding DNA Sequence Number=SeqID_20366
  Gene Ontology: Mol. function=binding; Cellular component=cytosolic ribosome (sensu Eukaryota); Biological process=regulation of translation
  Homolog annotation: Hit_ID=Q2U9E2; Match level="QueryCoverage=29%, HitCoverage=56%, E-value=4e-18, Identity=41%"; Hit description =Armadillo/beta-catenin-like repeat-containing protein
MAKGRAHPSKRPTHQLLAAVLSVFVLLPLLVPAAATVAVAVAVAEGGGKQLAVGKDEGNWSRRGMLVEAGNSDPEKLKEGAADVQKLSADELLERRQEIKELMEKLKMPSDADLMKIAIDDLNNSSISLEDRQRALQELLVLVEPIDNANDLEKLGGLLPVIQELNNANEEIRTTSAWVLGTASQNNELVQNQILGYGALVRLVKMGYSTSTEEAAKALYAISSLIRNNVNGQEAFHSENGSAMLQHILVSNNIDVRLQKKAVFLVTDLADFQLNSGIAQLPFLSDRLFLKSIVDMLSRFDLDLHEKVVIIFSFINLCLRHSFISEAQIGKVLLAIKSLLKLSSTDVEDFEFYDLDSVLLRLGVQLEDLTPEDQKEFAVEVDALRREVQTLFQQKLKQAHS

SEQ ID NO: 62146 - protein, 65 aa, Zea mays
  Coding DNA Sequence Number=SeqID_20367
MALVDGNNGWCDLNRSPELRLGAAPPRTVYRGIAVENRDEQATVESEVQQVEIAEQELIEGKLCP

SEQ ID NO: 62147 - protein, 65 aa, Zea mays
  Coding DNA Sequence Number=SeqID_20368
MALVDGNNGWCDLNRSPELRLGAAPPRTVYRGIAVENRDEQTTVESEVQQVEIAEQELIEGKLCP

SEQ ID NO: 62148 - protein, 245 aa, Zea mays
  Coding DNA Sequence Number=SeqID_20369
MKLLLSNPYGFSSSDDDGETDVFSSDGEDDDRAAGRGSKRPGESAAETFFSSSRSFSSDSSEFYTNKKQHKKKTTTKAKAKGMTRSSNNKESKTLKLWCLAVRLLKEMWKKRKWLQHFNWGRSYCRQRRGRRLADLVALVEMAEAVECKEEWDLFADANDDVGIAGSEVTDDKVHLPHHAQLQQPTRWSSMVISLFTTEFSLPRSCRSSRLFLDGFLWFYSTIYIYVLSIKRSGSIELAAVRWPS

SEQ ID NO: 62149 - protein, 231 aa, Zea mays
  Coding DNA Sequence Number=SeqID_20370
  Subcellular localization annotation: CTP_CleavageSite=94; ConfidenceScore=5.66e-01
MRPPPPLSLSHLDLPRNNLSSPSSTSLSPWCPRIWRRRSPDFGPRGELPSPPLPFSSLSSSPSSSSPRARPPFSPCPRPTPSLPGAAIPPPPVPAPARRGDTVPGLPPLDPIPVPSPGLAAISPAPPPAAAISPAPARPRRRSLAPARPAALPAPPPRAVAIPPTNSAAMAGSAAPAPCPVPARLGRPHARPARPPLAGGYEIDDSGYDYGAGEDEAVEGDFQEFQDYDEF

SEQ ID NO: 62150 - protein, 255 aa, Zea mays
  Coding DNA Sequence Number=SeqID_20371
  Gene Ontology: Mol. function=N-acetyltransferase activity; Biological process=metabolic process
  Subcellular localization annotation: CTP_CleavageSite=38; ConfidenceScore=5.34e-01
MAASPALVSLTPAVSRHPHLLFCSPCPPPRHIRLAPPTATPASDGNGLGPGPGPGVFLSPRALSQLDELAAFRYEHAFPHGLLTVRALSRGPDDDAVAEALVRLLASSFSETVRWAPAQRYAQLLTFVIRRYLHDRRGLAPHAAVLVGFYRPADADAGADNANAAPEDDEGEGGDEGEMACTAEVSFDAVGAPGAPPTPTSAAQLPLLLQNDCEDPPEKTDSILVWLSLQKRKYLMSKELPQASVVSETSTKNFE

SEQ ID NO: 62151 - protein, 154 aa, Zea mays
  Coding DNA Sequence Number=SeqID_20372
MWPRATIAARAATVGVEEAARGCPEAEGGTKWWRGGGTTSARLRLGRDSRRWREGVGEVLRLPMQEGRRGACGRRQSAGMVKEVEVVEMEAAVVELTERLGVRTEVAEEDCCGRWSMGRPKRMGRTKNSAQNACTAVLLRLAKKLVPYWLVKET

SEQ ID NO: 62152 - protein, 80 aa, Zea mays
  Coding DNA Sequence Number=SeqID_20373
MAPEAGLGGCQPHPGGWHSSRSRADGAVFLSDFDRYRCIFRTKLSFPMFPKYRYRFRFRSYGFDFVSDRNYENVVVFQKL

SEQ ID NO: 62153 - protein, 259 aa, Zea mays
  Coding DNA Sequence Number=SeqID_20374
  Homolog annotation: Hit_ID=Q5YLM3; Match level="QueryCoverage=71%, HitCoverage=18%, E-value=1e-46, Identity=55%"; Hit description =Roothairless 1
MARSSADDMELKRGCEAGILAKGDRDKVVMCMRVAKSRGGGGGWAKGKLTSRHNMAKPRVLAVTAKAKGHRTKTFLRVLKLLQWRGPRGDLPAVSLLSLLPAKVYKIKHLHKIEVSQNDPSGCTFVLGFDNLRSQSVAPPQWTMRNKDDRNRLLMCILNMCKEHLGSIPKVVGMDVVEMAIWAKELIDLKVQQVVVLSQLTTEGSHQTTSSTGTTPQGFPYGMLGINLSSFVLVLGINYLCTLGFILWEFEGLHVLLMR

SEQ ID NO: 62154 - protein, 357 aa, Zea mays
  Coding DNA Sequence Number=SeqID_20375
  Homolog annotation: Hit_ID=Q9FYP9; Match level="QueryCoverage=34%, HitCoverage=23%, E-value=2e-34, Identity=60%"; Hit description =Importin alpha-2 subunit
  Pfam annotation: Domain name=Arm; Domain location=124-164; Score =23.0; E_value=0.0011; Accession=PF00514.13; Description =Armadillobeta-catenin-like repeat
  Pfam annotation: Domain name=Arm; Domain location=82-122; Score=11.4; E_value=0.46; Accession=PF00514.13; Description=Armadillobeta-catenin- like repeat
  Pfam module annotation: Pfam domain module=Arm::Arm; Domain location =124-164::82-122
MTKVYACRRCSKVKSGSEFTGVLLSLLFGIVSHSHPLSFLEKCLDSGRSGTFILASENLQLVIPVLQSLGNPVIGDGYMVDSILIIGNSVTYQALSSLIKRLKSDNRVLKKEVSWAMSNIATSSFEHKKRICASEATLLLMHLLRTTNFDIHREATYTLGNMCVVPARSSNPLSIIMPPNEVVQLATKYREQGSQTLNLKVGKNFNSDIEEYTYCSFSFIGLDTNTLYEMVCPYCDSGFVAELDDANALMSHFDGMDPDFHRDPRFGIMEAISVVMQHDMAGMNKEVNVTGRPNSFSDLEIEFVIKSRDNPPMSLEALLETISCLPVHSFLSWFGIPVELVPCIGLRASRFLRRGEC

SEQ ID NO: 62155 - protein, 157 aa, Zea mays
  Coding DNA Sequence Number=SeqID_20376
MIRFGSLDFSFDREREVVGAKEARPPPSRNLGATARASGGPRIDYALRMIVRFGSLEFVINQEGDLVRAALARPPPSESPDTTSETLSTLRPCPTRPAIGHGAFPPRLRHALTKIAALVVCGHFPTSDDLEFMGMADSGGDLILDALCTDFVTPSFG

SEQ ID NO: 62156 - protein, 64 aa, Zea mays
  Coding DNA Sequence Number=SeqID_20377
MWLEKGGEAEAEEWRRLESAPLRANMALETIERMLSGFGDAVSIARASGMGDFHRMQEVLGLRN

SEQ ID NO: 62157 - protein, 235 aa, Zea mays
  Coding DNA Sequence Number=SeqID_20378
  Gene Ontology: Mol. function=carboxyl- and carbamoyltransferase activity; Cellular component=ornithine carbamoyltransferase complex; Biological process=amino acid metabolic process
  Homolog annotation: Hit_ID=Q8SA97; Match level="QueryCoverage=53%, HitCoverage=25%, E-value=7e-23, Identity=48%"; Hit description =Ornithine carbamoyltransferase
MAPPVDVAGLRPRLGDVEAPPKPRSSLSSVAEIESEPLGRARRRPSAEARAESEPWGRAKRSSSSSGAEPESEPWVGRSGVRRLPGLSPSPSPRPLQLYADGGYQLRIRSLEGTPNYDSRQALISVEGRINQRRMYMFESGRVTLGHNDQLYVTSVNFQLCSGRKAGYLKIPLPTSVRYEGEWFYVKNLDGSVTFFTGREPVSTDDWNHGAEPGLKGEVEPLLVALKTLKDQVPA

SEQ ID NO: 62158 - protein, 80 aa, Zea mays
  Coding DNA Sequence Number=SeqID_20379
  Homolog annotation: Hit_ID=Q5YLM3; Match level="QueryCoverage=61%, HitCoverage=5%, E-value=3e-13, Identity=74%"; Hit description =Roothairless 1
MNHMLSLRRTWFLRGEEEDIEALLGNYVMAIGEAEAFSERMKRELVALESANVYALLETESVVEERGIPLTAPCRVKLAD

SEQ ID NO: 62159 - protein, 707 aa, Zea mays
  Coding DNA Sequence Number=SeqID_20380
  Gene Ontology: Mol. function=oxidoreductase activity; Cellular component=intracellular; Biological process=lignin catabolic process
  Homolog annotation: Hit_ID=Q2QUK8; Match level="QueryCoverage=77%, HitCoverage=82%, E-value=0.0, Identity=62%"; Hit description=Laccase family protein, putative
  Pfam annotation: Domain name=Cu-oxidase; Domain location=167-327; Score=152.4; E_value=1.2e-42; Accession=PF00394.12; Description =Multicopper oxidase
  Pfam annotation: Domain name=Cu-oxidase_2; Domain location=436-571; Score=174.8; E_value=2.1e-49; Accession=PF07731.4; Description =Multicopper oxidase
  Pfam annotation: Domain name=Cu-oxidase_3; Domain location=41-155; Score=215.8; E_value=9.9e-62; Accession=PF07732.5; Description =Multicopper oxidase
  Pfam module annotation: Pfam domain module=Cu-oxidase::Cu-oxidase _2::Cu-oxidase_3; Domain location=167-327::436-571::41-155
MDMDMASCRRRWPLLLALAQLLVVCGGLGATVEHTFDVRNDLSISQLCQPARAITAVNGRLPGPTIHVREGDTVVVHVINNSPYNITIHWHGLFQRGTQWADGPEMVTQCPIRPSSRYTYRYNATGQEGTLWWHAHSSMLRATVHGAIVIKPRNGALGYPFPKPDQERIVMLGEWWNGNVFDLERNAFLTGNLVPQADAYTINGKPGDLHRCSGGSNRRPRTFKLKVRSGSTYLLRIINAAVNTPMFFKVAGHSFTVVGADAGYTAPYETDVVVVAPGQTVDALMATAAAPPSRRRYYMMASPYNSARPSLPFRNSTATAVVEYVDVGHQQNKQGPRRRRPVLAPIMPPPNDTATAHRFFTSLAALVRPGARAPAVPLAVDTRMLVTIGLGLAACRPGADAVFAGSMNNASFVLPAAMSLLEAHFRNATAGVYTRDFPDAPPLEFDYTRPPRGMSLATAKSTRVRTLPYNATVEVVLQDTALVARESHPMHLHGHNFFVLAQGFGNFRRETAEKQYNLVNPLQRNTLAVPTGGWAVIRFVANNPGMWIMHCHFDAHLPIGLAMAFEARPQPTATRPPYAHTLTLADAAAAKPATPTADATAQARSRPAGQPPTRGVEQAPAASCQVPAAFGRARPLGRRGRSCQVTAALTLRRLPRSTGPARRQSRSRLDSQAPSPGSLPARLHGTLVLVAPKTLVVTLVLVAPKQP

SEQ ID NO: 62160 - protein, 130 aa, Zea mays
  Coding DNA Sequence Number=SeqID_20381
  Homolog annotation: Hit_ID=Q6QP51; Match level="QueryCoverage=37%, HitCoverage=22%, E-value=9e-15, Identity=79%"; Hit description =Putative growth-regulating factor 1
  Subcellular localization annotation: CTP_CleavageSite=28; ConfidenceScore=5.11e-01
MQAARNCTTGMHPFNFDASSMESQVHTSCNRRTGCYVRKTAPPLAPIPRFLDCGTGTRKGDTSKGILLREGSGPPSPPTDQGFEGWPLGRVRQPPQSTRASGSLLIRGSKAGPSEGFDSRLRPLGLRAHY

SEQ ID NO: 62161 - protein, 89 aa, Zea mays
  Coding DNA Sequence Number=SeqID_20382
  Homolog annotation: Hit_ID=Q5YLM3; Match level="QueryCoverage=90%, HitCoverage=9%, E-value=1e-21, Identity=60%"; Hit description =Roothairless 1
MIEWRNNRLELQSDSNVALINEVDKLLELLQIPPEYEESLTGGSFDEGNMVKNIEACDWLTSAIKNLKESNIDPIYVKLRAVGSLSSYK

SEQ ID NO: 62162 - protein, 131 aa, Zea mays
  Coding DNA Sequence Number=SeqID_20383
  Subcellular localization annotation: CTP_CleavageSite=74; ConfidenceScore=5.21e-01
MGLGPDTSIKNTSPNPVRVRVSYSNLVPELAAGVLPSAIVLPPPHPCRRCPLPGRARARLGLCRPCSPSASPVRAKSAPPRAVRSCSWSARPPRISCRATTPVPAPARRDAYGGQVRRVGQGEEGLANAHN

SEQ ID NO: 62163 - protein, 53 aa, Zea mays
  Coding DNA Sequence Number=SeqID_20384
MNHREHVVLWVVRAVTEDRARTQNPTPCSLNFTVDSRNPKFSEFREEKLYSRP

SEQ ID NO: 62164 - protein, 139 aa, Zea mays
  Coding DNA Sequence Number=SeqID_20385
  Homolog annotation: Hit_ID=Q6QP54; Match level="QueryCoverage=44%, HitCoverage=28%, E-value=2e-10, Identity=63%"; Hit description =Putative kinase
MMYPLQRGRSEPKVGRGGDSSEVEVEAEPWGRARRRPSSEVEAEAEPWGRARRRLFSEVEVEAEPWVGRGGDRLPRSRRGPSPGVGRGGDRLPRSRRGAEPLGSGEAEAVFRGRGGGRAPGSGKAELPMAPEAGLGCCQ

SEQ ID NO: 62165 - protein, 176 aa, Zea mays
  Coding DNA Sequence Number=SeqID_20386
  Gene Ontology: Mol. function=2 iron, 2 sulfur cluster binding; Cellular component=chloroplast; Biological process=electron transport
  Homolog annotation: Hit_ID=P27789; Match level="QueryCoverage=53%, HitCoverage=70%, E-value=1e-38, Identity=75%"; Hit description =Ferredoxin-5, chloroplast precursor
  Pfam annotation: Domain name=Fer2; Domain location=64-139; Score =95.0; E_value=2.2e-25; Accession=PF00111.17; Description=2Fe-2S iron- sulfur cluster binding do
  Subcellular localization annotation: CTP_CleavageSite=25; ConfidenceScore=5.72e-01
MAAAAAALVSSNSLRAPAAFSVVVRAASRPAPVVAVVTPLPAAKAAAARGARLRAQATHNVKLITPDGEVQLKMPGDVYILDHAEERGLDLPYSCRAGACSSCVGKIVSGSVNQFDQSFLDDDQVAEGFVLTCIAYPTSDLVIQTHKEDALVESYYITTCRLNTEVDEREEETKRS

SEQ ID NO: 62166 - protein, 134 aa, Zea mays
  Coding DNA Sequence Number=SeqID_20387
  Homolog annotation: Hit_ID=Q3E0G9; Match level="QueryCoverage=78%, HitCoverage=18%, E-value=4e-09, Identity=33%"; Hit description=Ig -like, group 1
MMKRGLSEPKVGRGGDSSEVEAESEPWGQARRRPSSEVEAESEPWGRARQSPSSEVEVESEPWGRARRRPSSEVEAESEPWGRARQSPSSEVEVESEPWGRARRRPSSEVEVESEPWGRPRRRPSSGVEVESEP

SEQ ID NO: 62167 - protein, 130 aa, Zea mays
  Coding DNA Sequence Number=SeqID_20388
MENKQRKCCLKCFLQLKNCKEQQQCEKESPDAFKLWIHCSMRRVRWKCGMQSQKRITRATATVLKVSPRRRLGVQAEVQRLGVQAVVQQLVSRYRFKNHGHNTVILCNYFIIRSSKQVTNANKATRRSEA

SEQ ID NO: 62168 - protein, 394 aa, Zea mays
  Coding DNA Sequence Number=SeqID_20389
  Gene Ontology: Mol. function=transporter activity; Cellular component= integral to membrane; Biological process=transport
  Homolog annotation: Hit_ID=Q6SZ87; Match level="QueryCoverage=98%, HitCoverage=60%, E-value=1e-125, Identity=52%"; Hit description =Nucleobase-ascorbate transporter 11
  Pfam annotation: Domain name=Xan_ur_permease; Domain location=1-291; Score=-65.0; E_value=1.1e-05; Accession=PF00860.11; Description =Permease family
MRELQGAILVGSVFQIILGYTGLMSLFLRLINPVVVAPTIAAVGLAFFSYGFPQAGSCVEISMPLILLVLLCTLYMRKISLFGNHIFLVYAVPLSVAIVWAYAFFLTAGGAYNFKGCSSNIPSSNILLDSCRRHLETMRRCRTDVSTAWKTAAWVRVPYPFQWGPPTFHFKTVIIMIIVSLVASVDSLSSYHAASLLVNLSPPTRGVVSRAIGLEGVSTFIAGVWGTGKIGALLASIPLALAASVLCFTWALIVALGLSTLRYTQAASSRNMIIVGFTLFISLSIPAYFQQYEPSSNLILPSYLLPYAAASSGPVHTASSGLNYAVNALLSINVVVALLVALILDNTVPGSKQERGVYIWTDPKSLEVDPATLEPYRLPEKVSCWFRWAKCVGI

SEQ ID NO: 62169 - protein, 94 aa, Zea mays
  Coding DNA Sequence Number=SeqID_20390
MMSNVIWRNIYAEEGSEAMDVAAAPAVQRFYVLWKLQIHNPGAGNSQPQPKEAWAMNCRDYSAQHFLEHHDFHAEVIEEHEHQELGVAIGRQAS

SEQ ID NO: 62170 - protein, 308 aa, Zea mays
  Coding DNA Sequence Number=SeqID_20391
MAAASTLIGDCPLERAARRRCPSSRRTTGRGGAGGGSAGAGDAGGGDGDRVPPFMGNNRDHNPRELRSWARRTGFHPSAFFSGESNSSFASSAAPQAPPPPPPPPVSSRRPPPAREREPEPDTEDDLVPAPPLELERGGPAPVRGRGGRPRRRIDLRGELVIPPGFGREEAEPDAGKGRARGDARRRNFGVEMDQTPANAGRNGNGALADAESRKKSEEAEADAKRKAEEAEARRKKEEEERDAELAAYYQEQWANEDEGAADAAAAETAPLYEASGLRCGVTDNPGWGEFAALNLVLLHIPYSIQMY

SEQ ID NO: 62171 - protein, 125 aa, Zea mays
  Coding DNA Sequence Number=SeqID_20392
MALLVRVHRQQPPLHLPDSARTSPWCIKAEAPRPPSLHPPIRGCTESLGAPPGMEEHLSAADSSPSLLRRRASAPRRGQCSPLLDLSSDQFDFGALGWPIGVSPARYHRVGAGRRRALVLVRGLR

SEQ ID NO: 62172 - protein, 142 aa, Zea mays
  Coding DNA Sequence Number=SeqID_20393
MAGGKELARAKEGRLAGDGLQVLLTGSRDREGRNLVCLTAAHREITALRETLDDTGVSQALAPASASTAVLEAVSSAARVLPAQPTRRKLISEAEQPDTSPSCSSNHPEQQDSASGRKRPMMFLLWEQGHWASHCPKKVAQQ

SEQ ID NO: 62173 - protein, 91 aa, Zea mays
  Coding DNA Sequence Number=SeqID_20394
MEIKEREMKDVNKCCPKNFVFCPLKYIKAIPNPHVILKENLNPKDCNLADGEYILVPEQGAAQEVAPDPAPEPAPEDLPATALEGKPRFYA

SEQ ID NO: 62174 - protein, 42 aa, Zea mays
  Coding DNA Sequence Number=SeqID_20395
MGVPDFCARWRAFNASAAEQPLQIPEAAKFQSRVLLEHRTVR

SEQ ID NO: 62175 - protein, 146 aa, Zea mays
  Coding DNA Sequence Number=SeqID_20396
  Homolog annotation: Hit_ID=Q6QP51; Match level="QueryCoverage=60%, HitCoverage=37%, E-value=3e-13, Identity=47%"; Hit description =Putative growth-regulating factor 1
  Subcellular localization annotation: CTP_CleavageSite=10; ConfidenceScore=5.33e-01
MCVGGCRCPRAKLTTVKFSLKRNRNLRLARPPGLGLNLGLGGWSPPRPTLGLGLRRRSPPRPTPGLSPRLGLRRWSAPRLTLGLDLNLDLGRNRVLARPQGSPSTSTLEGIVSSPDPGVGLRRSLRLARPWARTDRAIEDASLPYP

SEQ ID NO: 62176 - protein, 143 aa, Zea mays
  Coding DNA Sequence Number=SeqID_20397
  Gene Ontology: Mol. function=sequence-specific DNA binding; Cellular component=nucleus; Biological process=regulation of transcription, DNA-dependent
  Homolog annotation: Hit_ID=Q850Z5; Match level="QueryCoverage=48%, HitCoverage=51%, E-value=2e-15, Identity=52%"; Hit description =Putative zinc finger protein
  Pfam annotation: Domain name=GATA; Domain location=29-64; Score=69.2; E_value=1.4e-17; Accession=PF00320.17; Description=GATA zinc finger
MMMDSAEHQKVMGIAPAAAPAAEAGRPCCVECRTTATPMWRGGPTGPRSLCNACGIRYRKKRRQELGLDSAKKPQQNQRPPPPQQQQQQEDHCPATSAVAVRDNTKSSRLQVVKKRRVLMGVEEAAVLLMALSSSSRSTLLHG

SEQ ID NO: 62177 - protein, 64 aa, Zea mays
  Coding DNA Sequence Number=SeqID_20398
MVAAPGGGGVARGWWWLRGSSYKEMKGMATCDTSTLYAPCVPRSLSLGEKLRHLSSSALAIPVL

SEQ ID NO: 62178 - protein, 535 aa, Zea mays
  Coding DNA Sequence Number=SeqID_20399
  Gene Ontology: Mol. function=transferase activity, transferring phosphorus-containing groups; Cellular component=membrane; Biological process=peptidyl-histidine phosphorylation
  Homolog annotation: Hit_ID=Q6L654; Match level="QueryCoverage=95%, HitCoverage=80%, E-value=0.0, Identity=74%"; Hit description =Ethylene receptor
  Pfam annotation: Domain name=GAF; Domain location=157-306; Score =78.2; E_value=2.7e-20; Accession=PF01590.16; Description=GAF domain
  Pfam annotation: Domain name=HisKA; Domain location=342-407; Score =77.1; E_value=5.5e-20; Accession=PF00512.15; Description=His Kinase A (phosphoacceptor) domain
  Pfam module annotation: Pfam domain module=GAF::HisKA; Domain location=157-306::342-407
MDAIVLSHFGRPDDLLMKYQYISDFFIALAYFSIPLELIYFVQKSAFFPYRWVLIQFGAFIVLCGATHLINMWTFTTHTKTIAVVLTVAKVATAVVSCITALMLVHIIPDLLSVKLRERFLKAKAEELDREMGIIRTQEETGRHVHMLTHEIRSTLDRHTILRTTLVEMRRTLGLAECAVWMPSRSGTTLQLSHALHTNAPLGSVVPINLPIVATIFNSNRAERIPHTSPLASVKAQKSKYVPPEVVAVRVPLLQLTNFQINGWPELSAKAFAVLVLMLPPDSARKWRPHELELVEVVADQVAVALSHAAILEESMQARDLLLEQNIALDAARREAEMAICARNDFLAVMNHEMRTPMRAIISLSSLLLETKLTAEQRVMIETILKSSDLLETLSNDVLDISKLGDGSLELEIAPFNLHATFTDVVDLIKPVAALKRLSVMVHLAPELPTCAIGDRKRLMQIILNVAGNSVKFTKEGHISVSASIARPDSLRDPYALDLHPVLSDGSFLLGCAANLMPNNAAEPSRSRQAGVTVL

SEQ ID NO: 62179 - protein, 189 aa, Zea mays
  Coding DNA Sequence Number=SeqID_20400
  Gene Ontology: Mol. function=protein dimerization activity
  Homolog annotation: Hit_ID=Q7XD60; Match level="QueryCoverage=78%, HitCoverage=19%, E-value=4e-48, Identity=63%"; Hit description=HAT family dimerisation domain containing protein
  Pfam annotation: Domain name=hATC; Domain location=110-186; Score =8.9; E_value=0.0037; Accession=PF05699.5; Description=hAT family dimerisation domain
MSSDMVEKFDKYWKEIQGPMGLATILDPRFKTDFLLGFIETLTGESSQACIEKLDKVKESLYELMKEYETEEDEDNTESSTPALFNSGVLSTISARVASRRPTTMRFKSELERYLEDELVPIGTENFKILDWWKVAGTHYPTLRKVAMKILQAFGVVFKKLKMILRVLHWFELKTGCMWASISSLADMT

SEQ ID NO: 62180 - protein, 76 aa, Zea mays
  Coding DNA Sequence Number=SeqID_20401
MATWRVGPSSVGKARINPSSPNFFFRCFPADSEALIWILHMDSGKDMGSKYSQIEESAMSPNDAVASGVILGFLGA

SEQ ID NO: 62181 - protein, 118 aa, Zea mays
  Coding DNA Sequence Number=SeqID_20402
MESPAAARSALFLVRGEVPAVLFKGQTASVFGEREGEWLAGEGRFPGASIYPPTRLNGSGAQGFRGGGELTQFVTAQRKRGEDRLTDGSRGVSETIPSPRSIGQLTGGSRKSVILRHA

SEQ ID NO: 62182 - protein, 171 aa, Zea mays
  Coding DNA Sequence Number=SeqID_20403
MDRHTWSIEYRCVVYQHSRGLYPDRWEVTFLVHLWEDDLRSGMTDGLNLKCYPCRSTGSTGSVIVSPVGEGNPRLNSVVNLVIVLNTELDHTLDEVSRARGEIAELKAEHAKCLHKDYNSPAPAKTQHPYLAKPTRAAAAPSTSLLSLSMMHGTHTPAVFLAGASLRVADR

SEQ ID NO: 62183 - protein, 222 aa, Zea mays
  Coding DNA Sequence Number=SeqID_20404
  Homolog annotation: Hit_ID=Q7XZH2; Match level="QueryCoverage=43%, HitCoverage=11%, E-value=2e-21, Identity=59%"; Hit description =Putative phospholipase
  Subcellular localization annotation: CTP_CleavageSite=50; ConfidenceScore=5.51e-01
MPHAPRQPSPPGIPPPSPRPLPSPTRPPPPAARAPAALPPRHALPTEHARAGSRGSYRILPTPEQAGRDLAHAGSGRRGSRPRCAPDAWLLAPTVSRLRGHGSRQHAGGSLPSPVVPQALVRESGEASVGSFRIGSSMLLGRGVMLCVLLFSSLWRLRARAYATISCVRSAALPVAASWLRLRNTHVLLLMVVLFALFLRKLSGARSWATLMRRCRQYEKLT

SEQ ID NO: 62184 - protein, 47 aa, Zea mays
  Coding DNA Sequence Number=SeqID_20405
MEAAKKLQSYFISLQREDQPTAEEMLRKFILVTFVDGHLGRFYGWLL

SEQ ID NO: 62185 - protein, 132 aa, Zea mays
  Coding DNA Sequence Number=SeqID_20406
MVPATVTVHGGSTEGEKKSGVSDGEEAGSVKKGTLREKGAVENREGEGNIPRRRRRLGMEANVVAAARVEMGLGMAPGIRLSMSAITFKTVSSLAIMLVTMECLDSGKNYTLALTFDEAPFIYSIDYIEESH

SEQ ID NO: 62186 - protein, 107 aa, Zea mays
  Coding DNA Sequence Number=SeqID_20407
  Subcellular localization annotation: CTP_CleavageSite=58; ConfidenceScore=5.40e-01
MAPRGEGRGPSRIDCRLGNALVFTPTYTRTTSRSATTIIVARSALQRCSWSLSLGSVRVSAFCPDCAWSSGHPTLRKGTHNKTKRWDKSPQDEVHDTRPPSAWERGA

SEQ ID NO: 62187 - protein, 820 aa, Zea mays
  Coding DNA Sequence Number=SeqID_20408
  Homolog annotation: Hit_ID=Q10G93; Match level="QueryCoverage=48%, HitCoverage=32%, E-value=1e-145, Identity=65%"; Hit description=DIRP family protein, expressed
  Pfam annotation: Domain name=DIRP; Domain location=212-313; Score =206.1; E_value=8e-59; Accession=PF06584.3; Description=DIRP
MPPHDNFVAHKHPRLLQSLCWFKAIVKHQKFPRAAVVPVKLHLLQKVPDVQFSRAWATVLDDLALVPTFATTAGARSLILDPSNHLSVQNRVLDPSPTKILKDEKKMPKDVEKTEVSPEEEKTSSNKTMDIAETTTQVATTLHADLMAKGKSRRKLGIQKSLTQECKPAEGAGDSGSDKLSYSLSNIIDLKDKLSHCLSSRLLRRWCMFEWFYSAIDYPWFAKSEFVEYLNHVKLGHVPRLTHVEWGVIRSSLGKPRRLSKQFLHEEREKLAQYRDSVRQHYTELLSGVREGLPTDLARPLAVGQRVIACHPRTRELHDGNVLTVDHNQCRVQFDRPELGVELVKDIDCMPLHPLENFPESLRHQSAINGYYSHLSEAKYEDQMKELASGGAARSTSNLNGTDATFYTPSGHPMSTLMKQAKANTAVNEVAVATQQSMYNQPCTLSQIQEREADIRALAKLSKNAADYFIILPLILLLLLNLEIHHAYLALQLREPKAPKWLGEDIHELSDGLDELEDKSFIDTLTKKVILDVDVLAPIVEDSVLCKGNGGLIVHHRSRSTSFFLSLPSSRHNLTHWHTSMGVVMYSVSHVDSATICFCDYHVTGDDLRKTSTPKVLFCPSMLPTMSTLLRPFIHNSAPLVLDGGHDDKLRLVLGNGATLVVLHLEDPLMPNWPPPEQWIDELPRFVVFDRLHLLERSPPPVLIALSVNEGGCSLTLMSSKLIVGHFICHARVADSQQCRSDPPWCGNTSLLWWWVPTWACTCGGVVNCTGLDRGIPCSADIGDGGGVLLTSHWGRACRPSWASVASGLVAPAVGTSWPA

SEQ ID NO: 62188 - protein, 193 aa, Zea mays
  Coding DNA Sequence Number=SeqID_20409
  Gene Ontology: Mol. function=nucleic acid binding; Cellular component= intracellular; Biological process=DNA integration
  Homolog annotation: Hit_ID=Q8S467; Match level="QueryCoverage=99%, HitCoverage=43%, E-value=1e-61, Identity=66%"; Hit description =Putative gag protein
  Pfam annotation: Domain name=zf-CCHC; Domain location=143-160; Score =26.9; E_value=3.6e-05; Accession=PF00098.13; Description=Zinc knuckle
MYNRLKTLVNQVCNLGSSKWDDHEMVKVILRSLVFLNPTQVQLIRGDPRYKLMSLEEVIGKFVSFELMIKGSKKIIEQGATSTPEVQPVAFKATEEKKEESTSSRLPIDASKLDNEEMALIIKSFCQILKQRRGKYYKSRSKKVCYRCGKLGHFIAKCPLSSDSDRGNDKRGKKKEKKRYYKKKGGDVHVCRE

SEQ ID NO: 62189 - protein, 99 aa, Zea mays
  Coding DNA Sequence Number=SeqID_20410
MTAIAAKSSQGPPYTDHSPTAFAPFRGDVDRVDDCDTEVSRLLQFLEKGAWRGRWSSCDLMLSAQAEFDARLEHGTFVRGPAARSGNDDGLVQGRACRR

SEQ ID NO: 62190 - protein, 174 aa, Zea mays
  Coding DNA Sequence Number=SeqID_20411
MAQPTVADLGAVGAPDMSGAHRTVRFTFKHLCWHSITKILRNGPRAHFPFTHAARGLGCVQRPESHGGCHGWPALLTCSGHAGEVEFRVASPRRSSTTLRRGDVDRVDDCDTEASRLLQFLEKGAWRGRWSSCDLMLSAQAEFDARLEHGTFVRGPAARSGNDDGLVQGQACRR

SEQ ID NO: 62191 - protein, 109 aa, Zea mays
  Coding DNA Sequence Number=SeqID_20412
MAEDEAGPRPSRVLLLQHVLLLLVSRGLGGERPSRRDWLTRQDKAAMRRLGLGKECWRRHCWTGAQALELRHSQRNKTAECATLRTWTSETIRIIAHCGLRSAAANPFQ

SEQ ID NO: 62192 - protein, 353 aa, Zea mays
  Coding DNA Sequence Number=SeqID_20413
  Gene Ontology: Mol. function=transcription regulator activity; Cellular component=nucleus; Biological process=regulation of transcription, DNA-dependent
  Homolog annotation: Hit_ID=Q7XI96; Match level="QueryCoverage=79%, HitCoverage=99%, E-value=2e-41, Identity=40%"; Hit description =Putative mature anther-specific protein LAT61
  Pfam annotation: Domain name=DUF822; Domain location=9-155; Score =278.2; E_value=1.6e-80; Accession=PF05687.4; Description=Plant protein of unknown function (DUF822)
MTSGAAAVGGLGRTPTWKERENNKRRERRRRAIAAKIFTGLRALGNYKLPKHCDNNEVLKALCREAGWVVEDDGTTYRKGCKPPPGMMSPCSSSQLLSAPSSSFPSPVPSYHASPASSSFPSPTRLDHGSGSNSHTPGPAAAAAAAAAAASSLLPFLRGLPPLRVSSSAPVTPPLSSPTAGVAAARQGPQARLGRRRRRRPVPPPLLRGIGAATTAPASPAYNLVNPAGGGGGASASDSMELDGVAGAEFEFDKGRVTPWEGERIHEVAAEELELTLGVGANIFVLETRPGRPDYLGSFYASRLQTPRLQGERRAAEGDSAALGSTGRPLDNPARAPCRDATGGWSTVVQALD

SEQ ID NO: 62193 - protein, 117 aa, Zea mays
  Coding DNA Sequence Number=SeqID_20414
MPAAEGEGARGRGGGRNGRWERARRGAGAGGGGAPSAWPRYVPVCYDGSKKFVSNIDTDESLMTMPQNKRFSITSLPKHVSVLSAFRDRRVPGPTSEMSPRAPAQMGRREAEREGGK

SEQ ID NO: 62194 - protein, 107 aa, Zea mays
  Coding DNA Sequence Number=SeqID_20415
  Subcellular localization annotation: CTP_CleavageSite=48; ConfidenceScore=5.07e-01
MDPCTPAHVTTVLGASLGSRASPSQMNGSLCHVEQSTERSGQKAGTGRAAAAKDETGSWLDQPATTPGDCRFNGPVACGLTINHSRLRGIEAKLCSSAGRDLEAIRS

SEQ ID NO: 62195 - protein, 240 aa, Zea mays
  Coding DNA Sequence Number=SeqID_20416
  Gene Ontology: Mol. function=catalytic activity; Cellular component =integral to membrane; Biological process=response to nematode
  Homolog annotation: Hit_ID=Q69V70; Match level="QueryCoverage=93%, HitCoverage=65%, E-value=1e-111, Identity=90%"; Hit description =Transporter-related-like
  Pfam annotation: Domain name=UAA; Domain location=20-236; Score= -174.2; E_value=0.1; Accession=PF08449.2; Description=UAA transporter family
  Subcellular localization annotation: CTP_CleavageSite=62; ConfidenceScore=5.29e-01
MEAEKKPPAVSDVGAWAMNVVSSVSLIMANKQLMSSSGYAFAFATTLTGFHFTVTALVGWISNATGYSVSKHVPLWELVWFSLVANTSITGMNLSLMLNSVGFYQISKLSMIPVVCLMEWVLNSKHYTTKVISAVIVVAAGVGICTVTDVEVNAKGFICACVAVFCTSLQQITIGSFQKKYNIGSFELLSKTAPIQALSLIILGPFVDYYLNGRSLLNYPFSGGATVMFGSKGNEEDCRG

SEQ ID NO: 62196 - protein, 98 aa, Zea mays
  Coding DNA Sequence Number=SeqID_20417
MQRYWLMLQNTAREQESSMKNCRMIKSQDSNAEKLKAVATSKSTVVGGRAGGSAGTTTVHYGWLGWRARWEVDGELYASVKMPSEAEKIPIKMARSGR

SEQ ID NO: 62197 - protein, 79 aa, Zea mays
  Coding DNA Sequence Number=SeqID_20418
MGEVAMGKKEELPAQPKQRREGSGVWEKGEGGLPFIEPSSGHARLHQQMAALEVIRALVREIKTHENWFVSGLENSGNS

SEQ ID NO: 62198 - protein, 86 aa, Zea mays
  Coding DNA Sequence Number=SeqID_20419
MELHHTSMQVLANCKSESPRLNTDLDSATLDLSRVHEELEDAHAQIVALEAQLEGRNPPEAQVFTIDVSPPCKRIRFLFECNDLIE

SEQ ID NO: 62199 - protein, 80 aa, Zea mays
  Coding DNA Sequence Number=SeqID_20420
MRASADLAGVRGAAPTVARDASLERASNGEPSRALDSVEVFTVVAKKERKPQFNCPEASSTAKKAQLQLKKLNSAEVQLS

SEQ ID NO: 62200 - protein, 112 aa, Zea mays
  Coding DNA Sequence Number=SeqID_20421
  Gene Ontology: Mol. function=transporter activity; Cellular component= intracellular; Biological process=transport
  Homolog annotation: Hit_ID=Q6K407; Match level="QueryCoverage=99%, HitCoverage=31%, E-value=8e-21, Identity=54%"; Hit description =Putative polyphosphoinositide binding protein Ssh1p
MAATSEEAIKQFSALMEQRESSSLVLLLFFAKNQEKIRLFSSSWPLNCSNFFLAVEEPLKSTFQLMDCLNWRVQNEIDIVLAKPILPSDIYRVIRDTLLVGLTGYSKQGQSV

SEQ ID NO: 62201 - protein, 160 aa, Zea mays
  Coding DNA Sequence Number=SeqID_20422
MESYAYEHGRQSYMCLVCSVRNSNLCVDSYQAAAGTLYSGVIDGCWGIDYRVEDLALAVVTAVPQIIQKRTVAEALHDDHWISDVHEGLSMVGMYEYLQLRDVLRIFGSEFWNNWDYRHVYRVVLNQLSQSSGKEHHLCSFAALRECEECEVSNLYVKVL

SEQ ID NO: 62202 - protein, 184 aa, Zea mays
  Coding DNA Sequence Number=SeqID_20423
  Gene Ontology: Mol. function=DNA binding; Cellular component =mitochondrion; Biological process=DNA integration
  Homolog annotation: Hit_ID=UPI00004C1731; Match level="QueryCoverage =92%, HitCoverage=11%, E-value=6e-91, Identity=92%"; Hit description =UPI00004C1731 related cluster
  Pfam annotation: Domain name=rve; Domain location=2-156; Score=96.6; E_value=7.4e-26; Accession=PF00665.16; Description=Integrase core domain
MQHLEPSWETPSDKKAPGGFSHLLVAIDKFSKWIEVRPLTSIRSEQAVAFFTNIIHRFGVPNSIITDNGTQFTGKKFLDFCEDHHIRVDWAAVAHPMTNGQVERANGMILQGLKPRIYNDLNKFGKRWMKELPSMVWSLRTTPSRATGFSSFFLVYGAEAILPTDLEYGSPRTKAYDDQSDQTS

SEQ ID NO: 62203 - protein, 87 aa, Zea mays
  Coding DNA Sequence Number=SeqID_20424
MPEETVVCIFRKGLQNTELSQELIQKSPTTMFVHFQVIDKYSLSEEGNAPPIEDYNNKYKSIMEGRCIYRPQSNHKTQDSLHIRDFA

SEQ ID NO: 62204 - protein, 112 aa, Zea mays
  Coding DNA Sequence Number=SeqID_20425
MVDLDSPPKGGVPLGADGSTTIASIPPASTDAVVSNESEKGAIASASVTDGLNKELRGPEEEEPGEVYLPPLLERGMGLSYREGGLASGGIEDVEDGSSCCRRRSGRSNNRS

SEQ ID NO: 62205 - protein, 302 aa, Zea mays
  Coding DNA Sequence Number=SeqID_20426
  Gene Ontology: Mol. function=nucleic acid binding; Cellular component= intracellular; Biological process=chromatin modification
  Homolog annotation: Hit_ID=Q53KY2; Match level="QueryCoverage=63%, HitCoverage=49%, E-value=6e-13, Identity=30%"; Hit description=Zinc finger, C2H2 type, putative
  Pfam annotation: Domain name=zf-C2H2; Domain location=158-180; Score =17.0; E_value=0.069; Accession=PF00096.16; Description=Zinc finger, C2H2 type
  Pfam annotation: Domain name=zf-C2H2; Domain location=200-222; Score =16.7; E_value=0.085; Accession=PF00096.16; Description=Zinc finger, C2H2 type
  Pfam module annotation: Pfam domain module=zf-C2H2::zf-C2H2; Domain location=158-180::200-222
MAGSSEDGRRRSVADLRDAAIARRWGGCKQAASSSSSAQSVQSMAIVVANPEIVLQPTPLPTIVTPNPSSPVHMEPATPSPSSVPIASTMTNVSNESSSGFAKPMHNDATETDNPPTEAVTHLDAVPALPSPPPAEVHAATSSVPPPPLPGPQNPNGYTCKLCSACFPTHQGLGGHMAAHKTRELAAVPCLRDAKPVKEHRCGTCGAVFLTGYKLGGHMRKHYTGPKIVPKKKPRLDDVVTLQLLSPRTVEPASRSPVPGRVLLFGVDIGAEAWMPAAVQGEEEGSSTTAGQAPSEPTDGEQ

SEQ ID NO: 62206 - protein, 297 aa, Zea mays
  Coding DNA Sequence Number=SeqID_20427
  Homolog annotation: Hit_ID=Q53KY2; Match level="QueryCoverage=46%, HitCoverage=33%, E-value=1e-13, Identity=34%"; Hit description=Zinc finger, C2H2 type, putative
  Pfam annotation: Domain name=zf-C2H2; Domain location=158-180; Score =20.2; E_value=0.0076; Accession=PF00096.16; Description=Zinc finger, C2H2 type
  Pfam annotation: Domain name=zf-C2H2; Domain location=200-222; Score =12.5; E_value=0.47; Accession=PF00096.16; Description=Zinc finger, C2H2 type
  Pfam module annotation: Pfam domain module=zf-C2H2::zf-C2H2; Domain location=158-180::200-222
  Subcellular localization annotation: CTP_CleavageSite=52; ConfidenceScore=5.07e-01
MAGSSEDGRRRSLADLCDAAILGRWGVTGRRRRSGCWSKQAASSSSSAQSVQSMAVVVANPEIVLQPTPLPTIVTPNPSSPVHMEPATPSPSSVPIASTMTNVSNESSSSFAKPSPPTEAVTHLDVAPALPSPPPAEVHATSSVPPPPLPGPQNPNGYTCKLCGASFPTHQGLGGHMAAHKTRELAAVPCLRDAKPVKEHGCRTCGAVFLTGYKLGGHMRKHYTGPKIVPKKKPRLDDVVTVQLLPARTVEPAPRPVLLFGVDIGAGAQMPAAAQGEGSSATATQAPSEEPPAGEQQ

SEQ ID NO: 62207 - protein, 517 aa, Zea mays
  Coding DNA Sequence Number=SeqID_20428
  Gene Ontology: Mol. function=protein serine/threonine phosphatase activity; Cellular component=protein serine/threonine phosphatase complex; Biological process=protein amino acid dephosphorylation
  Homolog annotation: Hit_ID=Q5SN75; Match level="QueryCoverage=81%, HitCoverage=87%, E-value=8e-75, Identity=42%"; Hit description =Protein phosphatase 2C-like
  Pfam annotation: Domain name=PP2C; Domain location=110-466; Score =205.0; E_value=1.7e-58; Accession=PF00481.12; Description=Protein phosphatase 2C
MSSSEASTQDHGVPALEAQDSTDDHGVPALEAPTPEATDKVLAAMARLARRRRLELRRLGRTAPVGAEGEVAMRVRPVSGTSADTSRESAKVAPEPHEGASAVAGWPKPVSHGAVSVIGRRREMEDAVAVAVPFLVAAAGEEGDGGGEKEAEMEFFAVYDGHGGSRVADACRERLHVVLAEEVARLHLVKGGDGARWREVMEACFARVDGEVAVVEGEVNNAGHTVGSTAVVAVVGPRHIVVANCGDSRAVLSRGGVPVPLSSDHKVLTSVQHPHYRALPPKTNSLLDLQSRGRRQADSSPSVARRPQKAGPQGLGAGTAPTNPLALACGRVEAAALVSTVPQPDRPDELERVESAGGRVINWKGYRVLGVLATSRSIGDYYMKPFISAEPEVTVTERTHKDEFIILGSDGLWDVMSNEVACKVARNCLCGRAASKYPETVHGSSASDAAAVLVEFAMARGSTDNISVVVVELKRLKWKGGRQNGKLIESKRPLTRRQLKTQDYAALLYTVYKTALM

SEQ ID NO: 62208 - protein, 507 aa, Zea mays
  Coding DNA Sequence Number=SeqID_20429
  Gene Ontology: Mol. function=triacylglycerol lipase activity; Cellular component=membrane; Biological process=lipid catabolic process
  Homolog annotation: Hit_ID=P04635; Match level="QueryCoverage=62%, HitCoverage=44%, E-value=2e-24, Identity=28%"; Hit description =Lipase precursor (EC 3.1.1.3) (Triacylglycerol lipase) [Contains: Lipase 86 kDa form; Lipase 46 kDa form]
MRSWARAALGVAELLVSAAIHLGYAFYIFGTAVAADVSASLVKGLMAGGGVAKDVAVDGEDEAAAVLDDGAVPPIVLVHGIFGFGKGRLGGLSYFAGAEKKDDRVLVPDLGSLTSVHDRARELFYYLKGGQVDYGEEHSREYGHSRFGRTYARGHYPAWDEEHPVHLVGHSAGAQVIRLLQQMLHDREFEGHGDTSERWVLSVTSLSGALNGTTRAYIDGMRAEKEGGGRWLRPVCLLQICRVGSVLYHWLDLPWLKRYYDFGFDHFGMSRRVVGVAGLAEILLDAGSGGGRRGPFATGDWILPDLTIQGAARINARVRTFPATFYFSYASRRTARSPPGSAGATVPSGVTRIHPLLFIRVLQMCRWRYPAGADPPYQGYRDEDWEDNDGALNTFSMTHPRIPVEHPSVQVEKDEDCRPLRPGIWYISCSFRRRPSQKLTAFRFQRQLDQMHGARRYYKIVEADHMTFVINRRRGGVQFDLVYDSIFDNCRKHVFRTAPPPTLPVQS

SEQ ID NO: 62209 - protein, 107 aa, Zea mays
  Coding DNA Sequence Number=SeqID_20430
MEDSHPHDGHQAERLYLDEEEVGGDRVEGWRCNHLGKKERDWGSCKSGRERGGAAKGKNWVSQVEAGWAVEELRQGMNFMGKAPRDLHRMRRELDQYNEDATPQKKT

SEQ ID NO: 62210 - protein, 721 aa, Zea mays
  Coding DNA Sequence Number=SeqID_20431
  Gene Ontology: Mol. function=protein disulfide oxidoreductase activity; Biological process=cell redox homeostasis
  Homolog annotation: Hit_ID=Q2QMD5; Match level="QueryCoverage=43%, HitCoverage=46%, E-value=1e-132, Identity=72%"; Hit description =Protein kinase domain containing protein, expressed
  Pfam annotation: Domain name=Glutaredoxin; Domain location=564-632; Score=39.2; E_value=1.4e-08; Accession=PF00462.14; Description =Glutaredoxin
  Pfam annotation: Domain name=Pkinase; Domain location=26-296; Score =174.6; E_value=2.4e-49; Accession=PF00069.15; Description=Protein kinase domain
  Pfam annotation: Domain name=Pkinase_Tyr; Domain location=26-296; Score=107.9; E_value=3e-29; Accession=PF07714.7; Description=Protein tyrosine kinase
  Pfam module annotation: Pfam domain module=Glutaredoxin::Pkinase::Pkin ase_Tyr; Domain location=564-632::26-296::26-296
MDEEFEKGSGPKRFEYGQLSVATKGFSEEEKLGEGGFGAVYRGFLKELDLHVAIKRVSRGSEQGRKEYSSEVRIISRLRHRNLVQLIGWCHQGKELLLVYELMPNGSLDTHLYNPTVLLTWPVRFKIVLGLGSALLYLHQEWEQCVVHRDVKPSNIMLDASFAAKLGDFGLARLVDHGRGSHTTNLAGTMGYMDPECLVAGRAGPESDVYSFGVVLLEIACGRPPVVPEQEDQGRTRLVEWVWGLYGRRAVLEAADERMGGDFDRGEMERVMVVGLACAHPDCSLRPSIRQAVSMLQCEVTLPTLPAKMPTPNAPPTRLHTDIELLCLSAAGPGSLSVGRGGCPMGCTGSRHALRGGVRGGSRSPRARSRSGGVHHTVALKSSTLGSLSLDRDRDDDGALAGAAKTLMRRQKQQVRGSPAKAPAREPEVINVWELMDGLDDDGKDDEEGGDADADAEGRREKSATGSPAEFDFDPDVIAAFRKALDENPPPPPSDVPGNEGCVDKKPDGPGGEVGVKVKQREREIQRFPGIVRARVSAFQQRIDAKLLAKLAPPPPPDSARKVVLYLTSLRGVRKTYEDCWSTRSVLRSYGVRVDERDLSMHSGFKDELHAALGSSPNAGRLPQAFADGRHLGGAEEVRRMHEAGELARALEACDVVVAPPPSSGGKGVVLDACSGCGGVRFVPCEDCSGSCKVFVEEVGTFRRCPECNENGLVRCPLCSS

SEQ ID NO: 62211 - protein, 36 aa, Zea mays
  Coding DNA Sequence Number=SeqID_20432
MTHQATDIAAPGVSAVWEGGLAGLAMRVRWVETDFC

SEQ ID NO: 62212 - protein, 89 aa, Zea mays
  Coding DNA Sequence Number=SeqID_20433
MAVGSVLSHGAPDSPSTVACEVAIAPLAHRTVQCAPDSPVNYSGAPSNFPEGSEFSFECPGAPDTVRWHTGQSGAPYQGAFRLSLALFV

SEQ ID NO: 62213 - protein, 74 aa, Zea mays
  Coding DNA Sequence Number=SeqID_20434
MAADPSAALGTKLRGRSGHERWSGGSQGSSDGGHGCLGRSDHYVNWNMERPPGKTVLPQGFMDAVEDSFSNAMN

SEQ ID NO: 62214 - protein, 859 aa, Zea mays
  Coding DNA Sequence Number=SeqID_20435
  Gene Ontology: Mol. function=GPI anchor binding; Cellular component =membrane; Biological process=root hair cell differentiation
  Homolog annotation: Hit_ID=Q5YLM2; Match level="QueryCoverage=71%, HitCoverage=92%, E-value=0.0, Identity=91%"; Hit description =Roothairless 3
  Pfam annotation: Domain name=Phytochel_synth; Domain location=336 -518; Score=353.3; E_value=3.9e-103; Accession=PF04833.5; Description= Phytochelatin synthetase-like conserv
MKYTQVILKKFGMKDAKLIKTPMGTNGHLNLDKGENDSISLPTPRAPKRVPGNIALPLCTMLCTRFPIASSTSPPRFRPAPVTSPPRPRPRSSDMAGSVAPHAVVLGLLLLAGLAAAQRATTPAAAAPAPDPGCNGIQLTYNFVDRTKIRPFVSDKNKQPYAFRANVTVLNSGTRPLKSWAALVTFRLRRDPRRRRRRRAHGAAATCRTTPRRTPATATSFSGYPHTDLLTPIATAGDLSQIQASVGIVGTLFAGPGPFVPLPTALSLDDPAYACPAATNVTARVLSTCCVLTPEAEANATAIDANTTDPTKDFLPRGTGDLVITYDVLQAYPSSYLALVTLENNAKLGRLDNWRLSWEWRRGEFIYSMKGAHPSEVDTSGCICGAPGQYYQSLDFSQVLNCDRKPVILDLPLSRYNDTQIGKIDNCCRNGTILPKSMDEAQSKSAFQMQVFKMPPDLNRTKLFPPANFKIVGASSLNPDYACGQPVPVSPTAFPDPSGLDSTTLAVATWQVVCNITTTKGAKPKCCVTFSAYYNDSVIPCSTCACGCPANRRGPTCSTTAQSMLLPPEALLVPFDNRSQKALAWAELKHYNVPRPMPCGDFCGVSINWHVSTDYNKGWSARVTLFNWEDVDMANWFAAIVMDKAYDGFEKAYSFNGTAVGKNTIFMQGLEGLNYLVKQTNMSGSDYLVPGKQQSVLSFTKKLTPGLNVVAGDGFPTKVFFNGDECAMPQRIPISTGFSTRLSSGLALGRRAQYGPEIKVKKSPSVFASRSRTQTDQPQPVAHLPAPAASVIHSTSPLGHCRAAPARLPHRPNHPTALKLRRCGLSSSAAVAPCLVHFGPDRLSTVARTAPRRFGPARP

SEQ ID NO: 62215 - protein, 57 aa, Zea mays
  Coding DNA Sequence Number=SeqID_20436
MNGSSVTGSISGLHCTRPPLEQFFSKRAEARAEGSVMYPSLSDGETVQVIVVGAVVI

SEQ ID NO: 62216 - protein, 234 aa, Zea mays
  Coding DNA Sequence Number=SeqID_20437
  Gene Ontology: Mol. function=DNA binding
  Homolog annotation: Hit_ID=Q6K1W0; Match level="QueryCoverage=55%, HitCoverage=47%, E-value=6e-16, Identity=36%"; Hit description=NAM -like protein
MANQATQDLGAVQCEMEGDRSYYTNLINGGFDTFEDIPETPIELQHTPSIELQQTPPVVRDLNMSSKQNHKAKGKKFSEDEDRLLVSAWLNVSTNPTQGTNQTRGTFWKRIYVLYEENRRNDEKTRNYAERSEGSLLHRWSSIQDAVDQAEKLFKSQDAHNRTNFGQILYLLAIAIRWRRMSAFCVQTGEARRSYGQVRGTARRWPDEQIGAFLLLARVLMTGLNCNVGPPRFK

SEQ ID NO: 62217 - protein, 408 aa, Zea mays
  Coding DNA Sequence Number=SeqID_20438
  Gene Ontology: Mol. function=UDP-glucose 4-epimerase activity; Cellular component=integral to membrane; Biological process =galactose metabolic process
  Homolog annotation: Hit_ID=Q2LC81; Match level="QueryCoverage=99%, HitCoverage=96%, E-value=0.0, Identity=82%"; Hit description=UDP-D -xylose epimerase 3
  Pfam annotation: Domain name=3Beta_HSD; Domain location=53-322; Score= -119.0; E_value=0.00033; Accession=PF01073.9; Description=3-beta hydroxysteroid dehydrogenaseisomerase family
  Pfam annotation: Domain name=Epimerase; Domain location=52-330; Score= 158.5; E_value=1.8e-44; Accession=PF01370.11; Description=NAD dependent epimerasedehydratase family
  Pfam annotation: Domain name=NAD_binding_4; Domain location=54-312; Score=-105.1; E_value=0.08; Accession=PF07993.2; Description=Male sterility protein
  Pfam module annotation: Pfam domain module=3Beta_HSD::Epimerase::NAD _binding_4; Domain location=53-322::52-330::54-312
MDYFDARRKPHNVGKIIAALVLTTLCIFVLKQSPGFGGNSVFSRHEHGVTHVLVTGGAGYIGSHAALRLLKDNYRVTIVDNLSRGNMGAVKVLQGLFPQPGRLQFIFADLGNQKSVSSFMLLKLLCLCLFCLWRVTSKVFFSLNWLPAVAYVGESTLEPLRYYHNITSNTLLILEAMASHGVQTLIYSSTCATYGEPDKMPITEATPQFPINPYGKAKKMAEDIIIDFSNSKGADMAVMILRYFNVIGSDPEGRLGEAPRPELREHGRISGACFDAALGVIPGLKVKGTDYPTADGTCIRDYIDVTDLVDAHVKALNKAEPRKVGIYNVGTGRGRSVNEFVDACKKATGVNIKIEYLNRRPGDYAEVYSDPTKINKELNWTAHYTDLKESLSVAWRWQKSHPRGYGPN

SEQ ID NO: 62218 - protein, 423 aa, Zea mays
  Coding DNA Sequence Number=SeqID_20439
  Gene Ontology: Mol. function=catalytic activity; Cellular component =intracellular; Biological process=metabolic process
  Homolog annotation: Hit_ID=Q6K1V9; Match level="QueryCoverage=91%, HitCoverage=42%, E-value=1e-173, Identity=73%"; Hit description =Ribosomal protein-like
  Pfam annotation: Domain name=Plant_tran; Domain location=256-366; Score=254.2; E_value=2.8e-73; Accession=PF04827.5; Description=Plant transposon protein
MNIRQSLLQLNESSSDDDDEISFTEYHIFHQPSHSKRKHGGSILGHLVKFRDRQAGHARMYQDYLADNSTFSLTDFRRRYRMSRDLFKRIMATVEDHDDYFKFKFNAAGTPGLSCFQKVTAVFRMITYGVVADATDEYARIGESTVIESLKKFVKAIIKVFGDEYLRAPNEMDTSRLLAIGQERGFPGMLGSIDCMHWRWKNCPSSWHDMYSGHLHEPTIILEAVASQNLWIWHVFFGLPGSHNDINVLHRSPLFSKLAEGQAPQVYYNINGHDYTMGYYLADGIYPSWATFVKTIPEPQGNKRKYFAKAQEAVRKDVERAFGVLQSRFAIVRGPARFWDQETLGDIMKACVIMHNMIIEDEGEVDPDERFQDGGVNVQPSHDQHPDFDEFIETHRKIRDKETHHQLQQDLVEHLWQHHSDQY

SEQ ID NO: 62219 - protein, 37 aa, Zea mays
  Coding DNA Sequence Number=SeqID_20440
MRSSKDHPYPAASSVGVRDGWEANDVAVARRVIEDRQ

SEQ ID NO: 62220 - protein, 190 aa, Zea mays
  Coding DNA Sequence Number=SeqID_20441
MTSGQAWGGNKENSQTPCPCRHPRLLCVPPQLDRAALSWQVADRRVEWRRREQDSMRGKWGWAGEQSSRMRRRHPPTHRGRQAGDFPLSSVPSRLRGGVTVAPAVMRLAACCSCGLLYLPLWLCLILHGDSGPKILGLACGFDFHFGDGRFEEIGALPSAYALEISIMSFGVKDSLGAPEVHPIGVAPEL

SEQ ID NO: 62221 - protein, 373 aa, Zea mays
  Coding DNA Sequence Number=SeqID_20442
  Gene Ontology: Mol. function=transferase activity, transferring hexosyl groups; Cellular component=integral to membrane; Biological process=carbohydrate biosynthetic process
  Homolog annotation: Hit_ID=Q10MP3; Match level="QueryCoverage=99%, HitCoverage=100%, E-value=1e-172, Identity=79%"; Hit description =Glycosyl transferase family 8 protein, putative, expressed
  Pfam annotation: Domain name=Glyco_transf_8; Domain location=88-345; Score=299.4; E_value=6.7e-87; Accession=PF01501.10; Description =Glycosyl transferase family 8
  Subcellular localization annotation: CTP_CleavageSite=12; ConfidenceScore=5.46e-01
MLWVARLSGFLSAAMVMVVLSPSLQSFPPAEAIRSSQFDGSVRFPGQIAGGARGVAFRRAPSFRNAADCGAGAGNGTAANVCDPSLVHTAITLDEEYLRGSVAAVHSVVQHARCPESVFFHFLVSDPSLGDLVRAVFPQLRFKVYYFDPGRVRGLISTSVRQALEQPLNYARNYLADLLEPCVRRVIYLDSDLVLVDDVAKLWRTDLGGRTVGAPEYCHANFTKYFTSRFWSDQRFAGTFVGRRPCYFNTGVMVLDLERWRRAGYTQRIERWMEIQKSPPGRIYELGSLPPFLLVFAGHVAPIEHRWNQHGLGGDNVLGSCRDLHPGPVSLLHWSGSGKPWARLGAGRPCPLDALWAPFDLYGPAGAGGEESR

SEQ ID NO: 62222 - protein, 68 aa, Zea mays
  Coding DNA Sequence Number=SeqID_20443
MVRGWIGEASRKQTTGGGRGHGRLGWLCAWMDALDSTTALQSPLLALESGMSTTSWSYARRGPGFSLC

SEQ ID NO: 62223 - protein, 468 aa, Zea mays
  Coding DNA Sequence Number=SeqID_20444
  Gene Ontology: Mol. function=calmodulin binding
  Homolog annotation: Hit_ID=Q10MN7; Match level="QueryCoverage=92%, HitCoverage=84%, E-value=1e-169, Identity=70%"; Hit description =Calmodulin-binding protein, putative, expressed
  Pfam annotation: Domain name=Calmodulin_bind; Domain location=44-360; Score=426.5; E_value=3.6e-125; Accession=PF07887.2; Description =Calmodulin binding protein-like
MDLKRALDVEEEVVDGDEEELAGCCPDAKRRRTSVKLPLQLKTSSKRYRLQFQGNLPQTLFTGNRVEAENRHPLRLVLTDAATSQTVSSGPLSSAKVELLVLDGDFNADERLEHTEREFGESVVFEREGKRPLLSGEVVVVLDRGTASVRDISFTDNSSWIRSRRFRLGARMSRASSIEERVQEAVSNPFLVKDHRGEDTYETSVLINPVYKKHHPPALADDVWRLEKIGKDGVFHKKLADFGIHTVQDFLRNLVMDQYGLRSLLGSGMSNKMWESTVEHARECVLDDRLYSYCSGHGIVLLFNCVYEVVGVVVGSHCFTLAALTPTQKALVAKLQQDAYKFPDRIAEFKVQSQSSTEQQAPAAVIQAPPAPAPVPATQMLGLPHGVVQPCAAGSHDSLLLSPQLLQHQQQPLSEAQLEDVLQSASAAEPWFPPFGAAGGFDARDPFDVQFSGSQPCGLLLSSTGARL

SEQ ID NO: 62224 - protein, 331 aa, Zea mays
  Coding DNA Sequence Number=SeqID_20445
  Gene Ontology: Mol. function=nucleic acid binding
  Homolog annotation: Hit_ID=Q10MN8; Match level="QueryCoverage=86%, HitCoverage=73%, E-value=3e-32, Identity=35%"; Hit description=Zinc finger C-x8-C-x5-C-x3-H type family protein
MEGELPFLSPPRPSRVSFDGRYGFGSPTWVSQLGTLRDSPSLCVSDGCDGGNGRSCFGSPTWGSPLETLFNAPSSLVSDSRGAGNGPILSTPTSPLETLLNSTSSCVSDSRGSGSVFGTPKMALPLETLLDSPSSPISDIRGGGNGSGLSTTKQASPLDSEMEQKRDTRLRAITERYDDCFHPVCDTLQPNSRTSASSAPASAPRTCTSPSSSKSSMPLNRVSRRRAVALTPLPNPAQAEAASTPKSISIRSKDFLSKKQPQGVATPHRLRVRPSPAMEVSPQFLPFITFSFTPHILLPDCLFTWKEIYTEERTDSLKLVLTGKLYATIRW

SEQ ID NO: 62225 - protein, 111 aa, Zea mays
  Coding DNA Sequence Number=SeqID_20446
  Subcellular localization annotation: CTP_CleavageSite=58; ConfidenceScore=5.33e-01
MWQPKALWSGSTGLSGVHRTVSGAPPDSVRCARGLQLELATFGNFQRRLRYNSPDSVRCAKGGQPQELASFGKLQRLVRYNFTGLSGVHRDCPVRLRSNGLLRANGSLPRI

SEQ ID NO: 62226 - protein, 85 aa, Zea mays
  Coding DNA Sequence Number=SeqID_20447
MAYRLVVATRAGGENNSDEGGMASPGADLCEFGQDRRVRFVPLTELYRLRMEPSNFGSRAESCRLVNVSLSQGRVPRLSSALKLI

SEQ ID NO: 62227 - protein, 110 aa, Zea mays
  Coding DNA Sequence Number=SeqID_20448
  Gene Ontology: Biological process=protein modification process
MMRSDVRGGDAEEEVDRKPVIKPGVHVTLKVQDTAGPTQELQALMDAYYASVPDVAYGTGRFLYDGGRLTGAHTPAELGMEEQDEIDFFTELLGGGGRRAAAEPGRPVVA

SEQ ID NO: 62228 - protein, 126 aa, Zea mays
  Coding DNA Sequence Number=SeqID_20449
MTVCYRDPLDPPILATCRGAHDALPRGFPAPARCHALNRPHRIRSGMAGLRMKFVAVAAMAAALVAYKILYLRDCGQRRLSSVQYEGFVISHCTAVISALKEFLMERYFFFGPTGQSSFGPISAVT

SEQ ID NO: 62229 - protein, 611 aa, Zea mays
  Coding DNA Sequence Number=SeqID_20450
  Gene Ontology: Mol. function=protein-tyrosine kinase activity; Cellular component=integral to membrane; Biological process=protein amino acid phosphorylation
  Homolog annotation: Hit_ID=Q6ZL12; Match level="QueryCoverage=99%, HitCoverage=100%, E-value=0.0, Identity=63%"; Hit description =Putative receptor-like kinase RHG1
  Pfam annotation: Domain name=LRRNT_2; Domain location=33-72; Score =26.4; E_value=0.0001; Accession=PF08263.3; Description=Leucine rich repeat N-terminal domain
  Pfam annotation: Domain name=LRR_1; Domain location=124-146; Score =6.6; E_value=17; Accession=PF00560.23; Description=Leucine Rich Repeat
  Pfam annotation: Domain name=LRR_1; Domain location=167-189; Score =9.0; E_value=6; Accession=PF00560.23; Description=Leucine Rich Repeat
  Pfam annotation: Domain name=LRR_1; Domain location=98-119; Score =10.4; E_value=3.2; Accession=PF00560.23; Description=Leucine Rich Repeat
  Pfam annotation: Domain name=Pkinase; Domain location=330-607; Score =15.1; E_value=1.8e-09; Accession=PF00069.15; Description=Protein kinase domain
  Pfam annotation: Domain name=Pkinase_Tyr; Domain location=329-607; Score=0.2; E_value=1.8e-12; Accession=PF07714.7; Description=Protein tyrosine kinase
  Pfam module annotation: Pfam domain module=LRRNT_2::LRR_1::LRR_1::LRR_ 1::Pkinase::Pkinase_Tyr; Domain location=33-72::124-146::167-189::98 -119::330-607::329-607
MPHLHHYSPVLLLLAVFVYLSTRYVHGDHADGGHQDLPALLSFKAYNPNATALASWVGPSPCTGTWFGVRCYRGRVAGVFLDSASLAGTVAPLLGLGRIRVLAVRNNSLSGTLPPLDNSTASPWLRHLLVSHNKLSGSLSISLAALRTLRAEHNGFRGGLEALRVPMLRSFNVSGNRLAGEISGDLSRFPSSAFGDNLALCGPPLPQCVHAYDALGRSSGNSSTSATAAESPDASVGVSSSNGGFSKISLTALMATGIGNAVLVTVSLAITVAMFVYMRRKLRSASDAPDAGLCFEEEDKRAQGEDRCHKTGGLVCFEGGDELRLDSLLKASAEVLGKGVSGSTYKAVLEDGVLVAVKRLSALQFPAGRSKAFDRHMRLVGRLRHRHVVSLRAYCNSNGERLLVYDFLPNGSLQSLLQANGALWKYYPICMQLLQERGGARNLDWTARKSILFGAAQGLNYIHTFPARPALVHANVKPSNILLGERGGACVSECGLMRYATNIQQSIAPQATRTRCPPELFLERDTGTTTSAPASSGWHGYAAPELASGAAARATQESDVYSFGMVLLEVVAGEGSDETMGMVKIGMLCTAEAPEERPTMAQVLAMMSEFV

SEQ ID NO: 62230 - protein, 429 aa, Zea mays
  Coding DNA Sequence Number=SeqID_20451
  Gene Ontology: Mol. function=ubiquitin thiolesterase activity; Cellular component=intracellular; Biological process=ubiquitin -dependent protein catabolic process
  Homolog annotation: Hit_ID=Q6ZL19; Match level="QueryCoverage=86%, HitCoverage=86%, E-value=0.0, Identity=80%"; Hit description =Putative carboxyl-terminal proteinase
  Pfam annotation: Domain name=DUF239; Domain location=201-387; Score =375.2; E_value=1e-109; Accession=PF03080.5; Description=Arabidopsis proteins of unknown function
  Subcellular localization annotation: CTP_CleavageSite=47; ConfidenceScore=5.17e-01
MAAARACIVALALVAALFVAGSAAAAAGNAGGRPQLSLRQRRRQLLRQRQVRSHLKRLNKAPLATIESPDGDIIDCVHISNQPALDHPFLKNHTVQQQLFYPSLWQQHSNMHAPPAPLQMRPAYHPEGLYDDESKVASQRNAQTITQMWHQNGRCPEGTIPIRRTKEEDVLRASSVRRYGKKKRRSAPNPMSVDPDMLNESGHQPKIEQANEFSLSQLWILGGSFGQDLNSIEAGWQVSPDLYGDNNTRLFTYWTSDAYQATGCYNLLCSGFIQINNQIAMGASIFPISNYGGSQYDINILVWKDPKEGNWWLQFGNDYVLGYWPSFLFSYLADSASMIEWGGEVVNSEPDGSHTSTQMGSGHFPEEGFGKASYFRNVQVVDSTNNLKPPRGVGTFTEQSSCYDVQDGSNADWGTYFYYGGPGKNSNCP

SEQ ID NO: 62231 - protein, 180 aa, Zea mays
  Coding DNA Sequence Number=SeqID_20452
  Homolog annotation: Hit_ID=Q9ZRQ2; Match level="QueryCoverage=21%, HitCoverage=3%, E-value=4e-12, Identity=82%"; Hit description=2 -oxoglutarate dehydrogenase, E1 subunit
  Subcellular localization annotation: CTP_CleavageSite=45; ConfidenceScore=5.12e-01
MGAPALPCLRLRHRAPAPASVITQALLSMSPDCPILSAPPPFAPRSGSRPSSVPPPPPPRDPYPAAPPSNSPVSFFPVSPSKHAPPTSSAPASNVGAYASRSPTLIRLAPALARADLLATIGLPHVSDVVVDIVCYQRFGHNEIDESSFTQPMVYKVIRNHPSALANNVVRVWKDLKGRY

SEQ ID NO: 62232 - protein, 107 aa, Zea mays
  Coding DNA Sequence Number=SeqID_20453
MPRSLRLGSHQQHPPALKLSSSQETTAIAAAMNTGRPTARMDVEVNEYQQSGPNNRHDPPILGHFLVQRIYALATCLEVSDFQTRRTTQGLRESGSQDVAPSREREG

SEQ ID NO: 62233 - protein, 103 aa, Zea mays
  Coding DNA Sequence Number=SeqID_20454
MAESTGLISSRPRGSRCAGAPIHELHAHVISAVIPPGAVFVGGEIAANSGPTSQSTSASYAEEGAFTYTRVPPHSGISTRERAPARVREMGQLTQRSHMSVPD

SEQ ID NO: 62234 - protein, 84 aa, Zea mays
  Coding DNA Sequence Number=SeqID_20455
MAPPDSPGAHPDSPVLQPESAYLRPLCADRPVVPPDSPVHTGQGYGGWGAPEGQEGRIILSWFGQGGGFVPFGITVKRRISMIG

SEQ ID NO: 62235 - protein, 371 aa, Zea mays
  Coding DNA Sequence Number=SeqID_20456
  Gene Ontology: Cellular component=nucleus; Biological process =regulation of progression through cell cycle
  Homolog annotation: Hit_ID=Q6T2Z6; Match level="QueryCoverage=56%, HitCoverage=56%, E-value=2e-19, Identity=31%"; Hit description =Cyclin d3
  Pfam annotation: Domain name=Cyclin_N; Domain location=47-183; Score =47.4; E_value=4.8e-11; Accession=PF00134.13; Description=Cyclin, N -terminal domain
MAAFAALFDPLYCPEEHLDLYRDEPGEGADEQWPGQHGQQEPAVLDDELPALFEAHRAKEGVVLAEDGGYGGAAGREAAVGWVSRAAARLGFSALTAALAAAYLDRCFLPGGALRLGDQPWMARLAAVTCFALAAKVEETRVPPLLDLQLYAAADAADPYVFEAKTVRRMELLVLSALGWRMHPVTPFSYLQPVLADAATRLRSCEGVLLAVMAAAAGDGGDGDGDTELLALINAPEDKTAECAKIISEVTGMSFLACDVGVSAGNKRKHAAAQLYSPPPSPSGVIGALSCFSCESSTSATAMAAAVGPWAPSASVSVSSSPEPPGRAPKRAAAASASASASAGVAPPVQVPHQLPPDEESRDAWPSTCAA

SEQ ID NO: 62236 - protein, 106 aa, Zea mays
  Coding DNA Sequence Number=SeqID_20457
MAYCPFICHTGRTPGMVYLLCIIRYTGHCRSSDAENPHDQGRLDSRGSGGAPRTPFRLADLLDGDLVDPVRLTDLLGGDLVGRSASQTCSMGTWSVAPDSRIEGGE

SEQ ID NO: 62237 - protein, 111 aa, Zea mays
  Coding DNA Sequence Number=SeqID_20458
MAHVTQVYFMFELLHGRRDLPRFREFYGRRLLLCHHGSNSEGKRRERERGGRWSRMSLPRPTRRDPEEDGASVPLVSWAAPCGSGNCFAMAEELHRAAATALCTAARELRV

SEQ ID NO: 62238 - protein, 113 aa, Zea mays
  Coding DNA Sequence Number=SeqID_20459
MGVDQTVGGSEIKAGAALAVGEIGDRAVGDPPVPTTMEPNTDPRCHCSIATRRGRGSQPPAFGPSLALGARGAERGGEVRPSGDEQVGQAGALWLESNSNTDPIHINKLKYRA

SEQ ID NO: 62239 - protein, 183 aa, Zea mays
  Coding DNA Sequence Number=SeqID_20460
MAVPSQPLDLHDDAVRCEVGDGLVRPSAENWARPGQPGPSSSCFVSNGFGSFSKSTMKQLMSINMYETIERGKAVRNRPVVTAAMAWEDASSVTDDTPATAQEQEQEQAVARRGHPLRIWALQLMLSGATVVIGAAAAPVPVPPPQLFLALMAWLVELVVHVCYVSLRYSLIKPVLPFSRSKC

SEQ ID NO: 62240 - protein, 275 aa, Zea mays
  Coding DNA Sequence Number=SeqID_20461
MAAAQVDAGGTARLDAISPCATAYDTAARFPVDRRLAPSSVDVEASAVARRASWNPGCPILGTSSVEVVVVRDQVPAMEHRYDPTSINHDLVLMGQTPDDVDDVHDGLEDLFGSTAPTPNPTPNPTINLGDDNVVAEGEALQMLLPPLRQALRTSNATPGEGKSKYAWDLVFGADGIGSSSSMALGAGLCAFGASSSSGMVPELSRRTSASALLHAASTPGISGSKLAAYLDSDTVQKNGGDAFLLKDWEAADARMQHTTEDEILEESFRDLFID

SEQ ID NO: 62241 - protein, 48 aa, Zea mays
  Coding DNA Sequence Number=SeqID_20462
MTGGSPLQADKISALEKPDADVDVAAEVVLRHSRVPVMLVLEGDEDVL

SEQ ID NO: 62242 - protein, 1022 aa, Zea mays
  Coding DNA Sequence Number=SeqID_20463
  Gene Ontology: Mol. function=oxidoreductase activity, acting on other nitrogenous compounds as donors, with NAD or NADP as acceptor; Biological process=nitrate assimilation
  Homolog annotation: Hit_ID=Q6ZHH7; Match level="QueryCoverage=80%, HitCoverage=92%, E-value=0.0, Identity=80%"; Hit description =Putative nitrate reductase [NAD(P)H]
  Pfam annotation: Domain name=Cyt-b5; Domain location=657-723; Score =18.2; E_value=0.0061; Accession=PF00173.18; Description=Cytochrome b5-like HemeSteroid binding doma
  Pfam annotation: Domain name=FAD_binding_6; Domain location=766-873; Score=216.4; E_value=6.3e-62; Accession=PF00970.14; Description =Oxidoreductase FAD-binding domain
  Pfam annotation: Domain name=Mo-co_dimer; Domain location=460-588; Score=230.6; E_value=3.4e-66; Accession=PF03404.6; Description=Mo-co oxidoreductase dimerisation domain
  Pfam annotation: Domain name=NAD_binding_1; Domain location=892-1005; Score=168.6; E_value=1.6e-47; Accession=PF00175.11; Description =Oxidoreductase NAD-binding domain
  Pfam annotation: Domain name=Oxidored_molyb; Domain location=253-435; Score=285.9; E_value=7.8e-83; Accession=PF00174.9; Description =Oxidoreductase molybdopterin binding
  Pfam annotation: Domain name=WD40; Domain location=109-147; Score =12.4; E_value=1.3; Accession=PF00400.22; Description=WD domain, G -beta repeat
  Pfam annotation: Domain name=WD40; Domain location=164-201; Score =1.0; E_value=28; Accession=PF00400.22; Description=WD domain, G-beta repeat
  Pfam annotation: Domain name=WD40; Domain location=68-105; Score =35.7; E_value=1.6e-07; Accession=PF00400.22; Description=WD domain, G-beta repeat
  Pfam annotation: Domain name=zf-C3HC4; Domain location=1-34; Score =14.1; E_value=0.0054; Accession=PF00097.15; Description=Zinc finger, C3HC4 type (RING finger)
  Pfam module annotation: Pfam domain module=Cyt-b5::FAD_binding_6::Mo -co_dimer::NAD_binding_1::Oxidored_molyb::WD40::WD40::WD40::zf-C3 C4; Domain
MAVIKDAFLTACGHSFCYMCVVTHLSNKSDCPCCGHYLTKAQLYPNFLLDKVGSADHHIHYFDLRNPSAPVHVFGGHKKAVSYVKFLSNNELASASTDSTLRLWDVKDNLPVRTFRGHKNEKNFVGLSVNNEYIACGSETNEVFVYHKAISKPAASHRFVSSNLDDADDDPGSYFISAVCWKSDSPTMLAANSQGTIKVHPPVHDPRDEATSDAWVRRHPALVRLTGKHPFNSEPPVPRLMAHGFITPAPLHYVRNHGAVPRADWSTWTVEVTGLVTRPAKLTMERLVTEFEAVELPVTLVCAGNRRKEQNMVRQTVGFNWGPGAVSTSVWRGARLRDVLRRCGVMRAADGAANVCFEGAEDLPGGKYGTSLRRGVAMDPARDVILAYMQNGEPLAPDHGFPVRVIVPGFIGGRMVKWLRRVVVASDESDSYYHYRDNRVLPSHVDAELANAEAWWYRPEYIINELNINSVITTPGHDEVLPINALTTQRPYTIKGYAYSGGGRKVTRVEVTLDGGETWQVCSLDHPERPTKYGKYWCWCFWSVDVEVLDVLGAKEIAVRAWDEAMNTQPEKLICNLMVSYRFIVLPFRVNACRPHKGEIGLVFEHPTQPGNQPGGWDGASEAPRDVGERAGHAQEEHVHALHEHGHRAVQPCPRCAVHKSPDSAWIVVHGPHLRLHGVPQGPPGRRDSILISAGTDCTEEFDAIHSDKARGLLETYRVGELVVTGSDYSPQNSHADLRAIDEAPAAAAPLPVSTVALSNPREKVKCRLVGKKSLSYNVRLFRFALPSPDQKLGLPVGRHVYVCASIDGKLCMRAYTPTSPADEVGHVELLIKIYFKDEDPKYPNGGLMSQHLDSLPLGATIDIKGPVGHIEYAGRGGFVVNGERRFARRLAMVAGGTGITPVYQVIQAVLRDQPDDDTEMHLVYANRTVDDMLLREEINRWVAAYPARLKVWYVVSKVARPEDGWEYGVGRVDEQVLREHLPLGDSETLALVCGPPAMIECTVRPGLEKMGYDLDRACLVF

SEQ ID NO: 62243 - protein, 136 aa, Zea mays
  Coding DNA Sequence Number=SeqID_20464
MLSAAAYLLIFLLHLSASTTCDAASQNHDVHYHPAMMMARRGGPTPQPSPSSVEVAGVVGGAPQPPVSFAVEAGKRDTGAARMMEPSPMPAPRGEGASSESEASATESASDDVSVDYAGPRTHPHDPPAGPAKSID

SEQ ID NO: 62244 - protein, 789 aa, Zea mays
  Coding DNA Sequence Number=SeqID_20465
  Gene Ontology: Mol. function=nucleic acid binding; Cellular component= chromatin; Biological process=DNA integration
  Homolog annotation: Hit_ID=Q7XBC6; Match level="QueryCoverage=99%, HitCoverage=43%, E-value=0.0, Identity=81%"; Hit description =Putative copia-type pol polyprotein
  Pfam annotation: Domain name=rve; Domain location=368-521; Score =122.6; E_value=1.1e-33; Accession=PF00665.16; Description=Integrase core domain
NNDDDLLARIEELNISLASLRIKNEKLLAKAKDFDVCNATISDLRTKNDMLQAKVVELKSCKPSTSIVEHVSICTRCRDVDINAIHDHMSLIKQQNDHIAKLDAKIAEHNLENEKFKFARSMLYSGRRPGIKDGIGFQKGDNVKLNAPPKRLSNFVKGKAPMPQDNEGYILYPVGYPEDKIRRIHSRKSHSGPNHAFMYKGETSRQPTRAKLPKKKTPSASNEHSISFKTFDASYELTNKSGKVVAKYVGGKHKGSKTCVWVPKVLVSNAKGPKTIWVYASGGSSWILDSGCTNHMTGEKKMFSSYEKNQDPQRAITFGDGNQGVTVFRRSDDSIAFKGVLEGQLYLVDFDRAELDTCLIAKTNMGWLWHRRLAHVGMKNLHKLLKGEHILGLTNIHFEKDREKSQTQETLKGFLRRAQNEFGLRIKKIRSDNGTEFKNSQIEGFLEEEGIKHEFSSPYTPQQNGVVERKNRTLLDMARTMLDEYKTLDRFWAEAVNTACYAINRLYLHRILKKTSYELLTGKKPNISYFRVFGSKCFILVKRGRKSKFAPKTVEGFLLGYDSNTRAYRVFNKSSGLVEVSCDVVFDETNASQVEQVDLDEIGNEEAPCIALRNMSIGDVCPKESEEPPNAQDRPSSSMQASPPTQNEDEAQIDEVEDQADEPPQDDGNDQGGDANEEDKEDEEQRPPHPRVHQAIQRDHPVDTILSDIHKGVTTRSRIAHFCEHYSFVSSIEPHRVEEALQDSDWVVAMQEELNNFTRNEVWHLVPRPNQNVVGTKWVFRNKPVSMVW

SEQ ID NO: 62245 - protein, 69 aa, Zea mays
  Coding DNA Sequence Number=SeqID_20466
MAMDGTLAVVVWLIAIHGGGLGVWRIAAAVGVRRSKIKRSLLAAELAQQASYDDYHKERTSTGAYYYGR

SEQ ID NO: 62246 - protein, 270 aa, Zea mays
  Coding DNA Sequence Number=SeqID_20467
  Gene Ontology: Mol. function=protein dimerization activity
  Homolog annotation: Hit_ID=Q2QNH1; Match level="QueryCoverage=98%, HitCoverage=99%, E-value=1e-30, Identity=44%"; Hit description=HAT family dimerisation domain containing protein, expressed
  Pfam annotation: Domain name=hATC; Domain location=156-246; Score =54.3; E_value=3.9e-13; Accession=PF05699.5; Description=hAT family dimerisation domain
MLPKKSLSGYQKRKKRKHEDQLVVSQKGALHKFFGVSSNVDVNEVEGHESDHAHDDGQQDHDQQYDHNLNAEDVVIEDGSMEENLIAAIDAVEDSMMQENLQPSCDHENSNDDEQDGSGLSIFDPRTWDNLDNNKRDVLTERGLVRELNLVFLDNNMGKFYSELKVLQVSLLDSSMSAPEILKFVMDADCYPNVTVVYRILLTVAVTVASAERSFSKLKLLKNYLRSTMSQERLNGLAMCSIEKDILDTIDFNTVLDEFASRNARRSIFS

SEQ ID NO: 62247 - protein, 141 aa, Zea mays
  Coding DNA Sequence Number=SeqID_20468
MMCRKSGSNNGVERNWADQMMKSAPAYTPMQTGVHLALKSKINPKVRVTWITTHLDSRDPTNIIRLNFVMLDEEVCMQFGAIPNIERKGQRQHGLFSETASVALWGSHADDFNADEYMQTRATGFPFSLVKVEEMGVDPRC

SEQ ID NO: 62248 - protein, 118 aa, Zea mays
  Coding DNA Sequence Number=SeqID_20469
MAHREARLKTELAPACGASRRARLGDSQRRRRSTTSQRGGETGALGDLTAAAQCCSGACSWASETAPGAIPWPAATAGRLRCARARPCLAASMGLSARRPEGVGRPTRSQREERRQAE

SEQ ID NO: 62249 - protein, 126 aa, Zea mays
  Coding DNA Sequence Number=SeqID_20470
MAKGYDMGVQELNVHGENDEERRRCQDRQETQQKYQRGAGTARRLHFYLVAVAVVPVAAASTKSSQARALDWSYKQLQLVVSEGASTLIPCAMVDEKDGRTVVVPEVGMTLEFEEDAYEIYNTPMP

SEQ ID NO: 62250 - protein, 85 aa, Zea mays
  Coding DNA Sequence Number=SeqID_20471
  Subcellular localization annotation: CTP_CleavageSite=48; ConfidenceScore=5.05e-01
MWPMQPWDIDIVGLCRRLKTTSSMPLSSSKVSPSGHRRRRIKSIHNKKGMIVTKAIDAPKLCARELWLNRGKRNQLKGEKAIQSS

SEQ ID NO: 62251 - protein, 292 aa, Zea mays
  Coding DNA Sequence Number=SeqID_20472
MGKLDRFLVLCTGWRRLRCHRLATRGRLGGGFVEEVEGEATKLVGLVTDNKIARSLDIRKRPVQAGAGQPLESSGRRESMCGSPTSSPHDLDVDNDTFMEKLTRIMGLPDVIQGLMTFYIHVTYECSFEALAHKGCSDNSRLVSNDFIVDHNVYTDVCSAVRQDPMAMVGRAHLEAANLLASQPPLVVAASTKPMTSMTHGAKSSKGDLCAYTRETKCLRPDFEGYHQGGDLKRHCGDKDFKGSHREEGEAYCYVGSYLDPTVPSRDFESFRDSFTPLCVSSLRSYLDLVVP

SEQ ID NO: 62252 - protein, 334 aa, Zea mays
  Coding DNA Sequence Number=SeqID_20473
  Gene Ontology: Cellular component=integral to membrane; Biological process=peroxisome organization and biogenesis
  Homolog annotation: Hit_ID=Q2QWH7; Match level="QueryCoverage=98%, HitCoverage=99%, E-value=4e-97, Identity=76%"; Hit description=Amino acid permease I, putative, expressed
  Pfam annotation: Domain name=Aa_trans; Domain location=20-318; Score =71.6; E_value=2.5e-18; Accession=PF01490.8; Description =Transmembrane amino acid transporter protein
MSDDRRTVAYDAEAGDGHERQGTVWTATSHIVAVVAGSGVLALPWTVAQLGWVLGPLVLVGFSCVTYYTSALLADCYRYPDPVHGAVVNRQYVDAVRCYLVREPMGHSRRLHHHRQRQHDAMKRASFYGLGAATAFYLALGCAGYAAFGDDAPGNVLTGFAFHEPSWLVDAANACVVVHLVGAYQVFAQPIFARLESCAACRWPDAKLVNATYYVRVPPFLLRSASSPPTVAVAPLKLVLRTIVIMFTTLVAMLLPFFNAVLGLIGALGFWPLSVYFPVSMHMARLNIRRGELRWWALQAMSFVCLLVSIGASIGSVQDIVHNLKAAVPFKTVN

SEQ ID NO: 62253 - protein, 49 aa, Zea mays
  Coding DNA Sequence Number=SeqID_20474
MSCAFDDYYIKDYGVILAPERLMGTDQVKTSPTKGRSLTSPDPGLGREQ

SEQ ID NO: 62254 - protein, 64 aa, Zea mays
  Coding DNA Sequence Number=SeqID_20475
MKLWKETSRSSKTTTSSRCGLAATPSRLPVKAAFIYVSFPHFDLLLCGCLGHLDVIKVPFRYLL

SEQ ID NO: 62255 - protein, 71 aa, Zea mays
  Coding DNA Sequence Number=SeqID_20476
MRVEWDALSLIIRGTGCSSLCRRAVNGARCGDEDDGFDYDYGNGCPCCNHCSGEDEAVEEAFQEFQEYDEF

SEQ ID NO: 62256 - protein, 57 aa, Zea mays
  Coding DNA Sequence Number=SeqID_20477
MGSFEKGEKGEGVGVLEIGALSLVYALEISILLSGIQDSLGAPGAPNGVAPKLRVDY

SEQ ID NO: 62257 - protein, 68 aa, Zea mays
  Coding DNA Sequence Number=SeqID_20478
  Subcellular localization annotation: CTP_CleavageSite=54; ConfidenceScore=5.30e-01
MELQNAAVSGAPAKATSKPATVGFLPGALHYNSPDYPVSQRSNGSLCANGRLCRATVVNSATAEVRGH

SEQ ID NO: 62258 - protein, 155 aa, Zea mays
  Coding DNA Sequence Number=SeqID_20479
  Subcellular localization annotation: CTP_CleavageSite=59; ConfidenceScore=5.69e-01
MAPRRQLALPSMAPHISFPRRQLSTTTRSQSLQTARPAVSTRIRVRDILHPGSRCLALSASALSMDGDSATWIGYPDPALSMEVCDSPISMEGFGTSALDLRPRPLSPWKATPRIAPDRRPRTPASLSPRDGWAPTASRPARYSRHRAPPPARPR

SEQ ID NO: 62259 - protein, 104 aa, Zea mays
  Coding DNA Sequence Number=SeqID_20480
MAASDTFKVRRSEGEEGGGIRGKKSTARATLSGLRPRFPVIADERGRRVGGSTTPSICGKKSTASVTPSGLRPRFPEIPDQRGRRVGDLRALIAESPRQNRAPI

SEQ ID NO: 62260 - protein, 349 aa, Zea mays
  Coding DNA Sequence Number=SeqID_20481
  Gene Ontology: Mol. function=transmembrane receptor activity; Cellular component=integral to membrane; Biological process=transport
  Homolog annotation: Hit_ID=Q5Z5T2; Match level="QueryCoverage=93%, HitCoverage=50%, E-value=1e-167, Identity=88%"; Hit description =Putative PHG1A protein
  Pfam annotation: Domain name=EMP70; Domain location=1-302; Score =361.0; E_value=1.9e-105; Accession=PF02990.7; Description =Endomembrane protein 70
MIMMRTLYKDIANYNQLDNQDEAQEETGWKLVHGDVFRPPVHSGLLCVYVGTGVQFFGMTLVTMMFALLGFLSPANRGGLMTAMVLLWVFMGVLARYTSSRLYKMFKGTEWKKITLKTAFMFPGIIFSVFFFLNALIWGEKSSSVVPFGTMFVLFLLWFGISVPLVFVGSFLGFKQPAIEDLVKTNKIPKQIPEQTWYLQPIFVILAGGILPFGAVFIELFFILTSIWLNQFYYIFGFLFIVFVILIVTCAEITIVLCYFQLCTEDYHWWWRAYLTAGSSTLYLFVYAIFYFFNKWEITKLVSGIMYFGYMLIISYAFFCADWKLGFGMEFHGFGRNMCSLLGARTVFN

SEQ ID NO: 62261 - protein, 217 aa, Zea mays
  Coding DNA Sequence Number=SeqID_20482
MGRQSCDGEERRIWLLSGGVWRRQVGCSGPSGVCGGAHASGSGASQRLLPGMADGRCGGATGGAAAARPGPWAQPKVVVVDKALWLLWQPARCWPSVWVCVGCLGDIGCGGVLCPGVLAGRCTGGFSWAKALATMTSLGVASPVKGVMFPSFVFRGRKPDPPRTSDDGVPLCHSLPEGVATEVHLSHIIAFSSCFRLSSPGLRVEVGACIVKSKLLR

SEQ ID NO: 62262 - protein, 147 aa, Zea mays
  Coding DNA Sequence Number=SeqID_20483
MGKSKKGRSSLHHSSDKRKREPTPPSEDFGDSEYSEEEFSSEFEGSPVHASPPASFDDSDDSQGIAAEVWTYIQTVERSGLEGSDESEVSSDEENSSDSSEEGSDGDDDSEGNNDDGGDDDGDGDGGKGDGKGVSDSGSGSGKALLA

SEQ ID NO: 62263 - protein, 641 aa, Zea mays
  Coding DNA Sequence Number=SeqID_20484
  Gene Ontology: Mol. function=protein dimerization activity; Cellular component=chromatin; Biological process=electron transport
  Homolog annotation: Hit_ID=Q2QPA8; Match level="QueryCoverage=81%, HitCoverage=73%, E-value=1e-170, Identity=65%"; Hit description=HAT family dimerisation domain containing protein
  Pfam annotation: Domain name=DUF659; Domain location=201-355; Score =186.2; E_value=8e-53; Accession=PF04937.6; Description=Protein of unknown function (DUF 659)
  Pfam annotation: Domain name=zf-C2HC_plant; Domain location=40-96; Score=93.3; E_value=7.2e-25; Accession=PF07567.3; Description =Protein of unknown function, DUF1544
  Pfam module annotation: Pfam domain module=DUF659::zf-C2HC_plant; Domain location=201-355::40-96
MNDVVTSQLPVCLYSVADNPSSVASASITQSTTATIKSDDPAWKHCYRPDLKKKHSLKCNYCDKLINAGITRVKYHLANIAGFNVSKCKKVPTPVKEDMVALLTKNCDAKEKKERKNKGKEMKLILIIQEVIGQVKKRVKMGMMLLCSSQQKKREERRDRACEYICQFFYEAGIAHNTVTLPSFAHMVEAIGAFGRGLRGPSSYEMSGPFLKKCKEKVLDRFKSHQESWQLTGCTIMIDAWTNRKGRGGVMNLVVHSAQGVCFLDSVDYSAMKKDGKYIFDLVDRCIQEIGEEHVVQVVTDNASVNTAAAASLLAAKRPSIFWNGCAAHCLDLMHEDLAKIGAVEKTISSAKHVTAFLYAHTRVLDLMRKFLGKDLVRSGVTRFATEYLNLKSLQDNKKDISRIFRSDELNELGYLKKAKGMKANKVVRSEGFWKNVDMAVNFFEPLANAKKEIAMRFDNNENSFKVAWDIIDKRWDKLKTPLHLAGYYLNLYFYYPNKSEIELDGSFRAAVIACITKTIEDEETQDNIIEELNVYQEQQGTFGHDIAVRQRRNKNFNPDKDEEHGGAQVGATIHEPQLSQPQPKRKRLVRPRKKKIRSLHSLLYGGLENEAAVSSSESKDNGDGDISMHQYSDSDDLGDE

SEQ ID NO: 62264 - protein, 212 aa, Zea mays
  Coding DNA Sequence Number=SeqID_20485
MATWFGCSRKAARGQHVKLVFPGGHVELLDRPTLAADVMARHPRFCVARPDVFREPAGAVAAPDAVLELGHKYFIVPCSTVRRLLKYSAPATPSLSPSSSRGGSSGTVALKRHLASERGYKVGGRRKWFRCLVGGSGGAQAQSQSQRPNREGVGHSGKDKMVRKLDMKETNKENGKAPSGGSPGRRRRRRGASPGNSASYSWQPSLHSITEE

SEQ ID NO: 62265 - protein, 98 aa, Zea mays
  Coding DNA Sequence Number=SeqID_20486
MAEVKAKLWGGSYRRLCGVVPEPQRRAVHGGPSAPERSRELPAIHWSGIDVDRGAALRGGRGPEERGGLSLGGGGDTEAAGLWQNRLDYSSLSARVMP

SEQ ID NO: 62266 - protein, 154 aa, Zea mays
  Coding DNA Sequence Number=SeqID_20487
MRLILRYLFLTCGGCETERKLSSRTEEAKRSAQKATTVAEAKRGELSRVHESTEASMAQAATMLANYNELEELRSAIDGVCSHLSLSPLMETPLVDQLWALLGHVERVVAEAAFHGSSMALGHMVSHFNEIDVAIVVEGSATSRGDEELDVIED

SEQ ID NO: 62267 - protein, 279 aa, Zea mays
  Coding DNA Sequence Number=SeqID_20488
MAQCLTRFTCSGGRRDSDKDDLAFPGIRPLAPCPLPLPKGVVVEKDPRWKRRAIGETLATHVKSIKVKKGKMVSHPTYTELRSLSLSSSIGSEGTDALALVGDPSHHGDAQDSSTVPVQGDDWSHDPTAFVAPPVSSGHLTAEEEAGEDHYLSSFNVPGVDAEEWTRIESASLWVNASLEINEHMLGSFGEAGTIAKTSMTRDLIPHDERLLMWLVARAEVLQTAQRVSEQLRKEVARSEAMEHELVGLRSTVDRTSTDKLYTDGPKHIYSDVFRNRQC

SEQ ID NO: 62268 - protein, 246 aa, Zea mays
  Coding DNA Sequence Number=SeqID_20489
MWDLVQVVVMVEDDWELQPSEIPCGGDLCHVDLPVTAFAEQVASGALTSQFVSEKRRLEGRTERLQTQHTKAVRDKSAAENKSRNLLKKLTALQKEKEDLGRRLTDEKEDAEKGRAEAQAARAKARAAHKRTTDLELEMKNMHGRRERTESSTHAGVEQAHTLFVDVYCDLGAQTAPFDESGEEVGICFLGWLQDELESLSSIVMGLMSYVSLVTCEGATNVLSQEGCRHFEVFDQANEDFDRGVF

SEQ ID NO: 62269 - protein, 155 aa, Zea mays
  Coding DNA Sequence Number=SeqID_20490
  Subcellular localization annotation: CTP_CleavageSite=69; ConfidenceScore=5.22e-01
MDLTSGCSPSEYLPQKTLSKCQIKASAFGNQTPQPNSCMSRGRGVDSSHRGHTTRMCHVTIQKQKEIAEAAAQQNQPKQIYGVQKVAEAQKVVLKSHKYLRSYKKSFYGTQHKFAEVVLRNAAGSKGSGGGDSSAAVENINYFEVAKVNIKSKNR

SEQ ID NO: 62270 - protein, 528 aa, Zea mays
  Coding DNA Sequence Number=SeqID_20491
  Gene Ontology: Mol. function=transferase activity, transferring glycosyl groups; Cellular component=membrane
  Homolog annotation: Hit_ID=Q2QVM7; Match level="QueryCoverage=99%, HitCoverage=100%, E-value=1e-165, Identity=56%"; Hit description =Exostosin family protein, expressed
  Pfam annotation: Domain name=Exostosin; Domain location=94-466; Score= 235.8; E_value=9.1e-68; Accession=PF03016.6; Description=Exostosin family
MHIDAHYPKCFVYYLILGSWLLSCLLHFEYFHLSRSSFAAPRSAALIVLPIAPDASFLPTPTVEAYNRQRSTSSSVVASPSQSSSQPWCEGRYVFMLDVPSRFDMLRDCVAGSPLFDDMWSWCAITVNAGLGPKIGPVAGNGSDGDTDIIPSTGWYSTDQYSLEVIFHNWMRRYECLTDDQTAATAVYVPYYPALELHQHLCGFNTTVRDGPSEAFLRWLSSQPTWAALGGRDHFMVAAKTTWMFRREPGGRDEGCGNNFLGQPEARNITVLTYESNIWAPRDIAVPYPSYFHPSSAGEVVAWQARARAAPRPFLYAFAGARRIKGQLAIRDRVFDVCEAAARRGRCGMVDCSHGLEGSITCRSPRKLVSLFTSARFCLQPRGDSFARRSSIDSVMAGCIPVFFHRPSTLKAQYRWHEPEPGRTNSDDRRYYVLIDSNDVLEGRVDIEEELSRYTDDEVTAMREEVIKMIPRFLYKDPRVRFEGDMRDAFDIIIDEMIARMRRIKNGEQLIWKGDGEDRDEDLIASDS

SEQ ID NO: 62271 - protein, 47 aa, Zea mays
  Coding DNA Sequence Number=SeqID_20492
MDDGFSTKFGLKTRQWWFRQELEEARGVITEDLWKTIEFLSCGWVSG

SEQ ID NO: 62272 - protein, 114 aa, Zea mays
  Coding DNA Sequence Number=SeqID_20493
  Subcellular localization annotation: CTP_CleavageSite=32; ConfidenceScore=5.11e-01
MPTSSSSAAATPPVDASSPVDASSEETPSTLVAEELRAGDSVDFGVSRMSSVRVQDMQRLGYFGGGVAHVPGTEEVPEPEGELVVFEAFFAAGLRLPAHRFVGEVLRRFNVQIH

SEQ ID NO: 62273 - protein, 48 aa, Zea mays
  Coding DNA Sequence Number=SeqID_20494
MTDRSGSEVDEVSAGISATGGAVEVGSGGGMVERQKFQTSCIDVTGHG

SEQ ID NO: 62274 - protein, 66 aa, Zea mays
  Coding DNA Sequence Number=SeqID_20495
MVARQRAHAHYVSLPIGARTSAQGYSGSGQAGRAGEEVYWAANSVLAQNGPNSNLNPILNVNLYSF

SEQ ID NO: 62275 - protein, 95 aa, Zea mays
  Coding DNA Sequence Number=SeqID_20496
ERSIRAENPWGLRNFSPEFGKPPALWPCLAPLLITAAGTIILAMASAVVGRGAAVRSFVWVKVAATVELGTTSAECKTGIIAELTAKSSSGLSHD

SEQ ID NO: 62276 - protein, 153 aa, Zea mays
  Coding DNA Sequence Number=SeqID_20497
  Gene Ontology: Mol. function=metal ion transporter activity; Cellular component=integral to membrane; Biological process=metal ion transport
  Homolog annotation: Hit_ID=Q6ZJ91; Match level="QueryCoverage=83%, HitCoverage=32%, E-value=1e-36, Identity=63%"; Hit description =Putative iron transporter Fe2
MSGTVGDGKSVGRFLVRRWSISFAATEIREEDAREAQRLKLVAVASILASGTAGVLVPLLGRSASTPRTNGDVFFAVKAFSTGVILTTDMVHILPAPFDALVPACGNSARTISFPYADLVAMCSTMATMMVDSTAVAYYQCAHFRKARPVDGG

SEQ ID NO: 62277 - protein, 81 aa, Zea mays
  Coding DNA Sequence Number=SeqID_20498
MADLRPKQTMVSDSPLYSCHPHLSDQRTASLPGELGSTPRRARDGADMLQEVNRGVDGGRGGVDELAGSEEIAADVARKRW

SEQ ID NO: 62278 - protein, 59 aa, Zea mays
  Coding DNA Sequence Number=SeqID_20499
MDVESPLFSAFLCSPCVAVHVSLDMLYVPLFYCGNCAYTRWCLSDTMRCEWFKILGYEK

SEQ ID NO: 62279 - protein, 151 aa, Zea mays
  Coding DNA Sequence Number=SeqID_20500
MGKSKKGGGSSRHSGDKHKREPTPPSEDFGDSEYSEEEFSSEFEGSPAPASPPALSDDSDDSQGITAEVWTYIRAIERVGLEGSDESEYSLDEENPSDSSEEGSGGDGGDGDDDGGDGDGGGDSGKGGDDSGKGGSGDGGGGSKGSNRASG

SEQ ID NO: 62280 - protein, 66 aa, Zea mays
  Coding DNA Sequence Number=SeqID_20501
MESHDLRAERESRLVGKAQPQQSVAMRLMVFGIDSSDGLPCKVKNSTQIVFLSQLMKLLDPLYCIE

SEQ ID NO: 62281 - protein, 404 aa, Zea mays
  Coding DNA Sequence Number=SeqID_20502
MQASIAVAEALDAGKLTPQPVADAADFAVAGLAVAIGTLAVTASFMLVSFDARAGQGQLRRILDLGPSLCGPRLLLVFFVGLLAAAEMLRLPFFHGAMLPPRHHVMPCLAYPLVAHGIAEPGLLACVLLLLRVSVGGARLPASALVVPLACLPFLTVHVLVLATPATVAAYPGQLAHAADGIGHCAYPTYAATLLLALIAVLALALTSVWDMHQYTSPTVGLVGFVAVAVAAEATLVILVMLPHFRVAIILKHAGNERVLQEDISTFSMKQWRIHSEGKEESQPPSRLQPFARKAENRSCPPGASAQQPQAPPPFAQAPSQPAVLFHRSTSRQRPAACGLRPRRSPSGPAVEARTQEPRTQPPSGKSFGPSGSASALARPLNLTEILGEANEKVFSATFKRLWH

SEQ ID NO: 62282 - protein, 185 aa, Zea mays
  Coding DNA Sequence Number=SeqID_20503
MKARCPGQPMPHHPLYPMPHDSRSLAKEIGILIGDPGVDDARRRERKRTAILNVVEASRVSCPQACPARARPPLSAPTKHHAIPDASQVPYHTVVDGGEKSTILYGSRSPHLAASWRTGGCNRTRSSRETDTALTTNREDLQQPRCRGMTRGPHLSASGKKGRERVDRTVVLGVLGRVERVWGRW

SEQ ID NO: 62283 - protein, 50 aa, Zea mays
  Coding DNA Sequence Number=SeqID_20504
MAFASPRRRYEGGMPRATYAPSPALPNSTRCKELGERNRHSYRFQRSNKL

SEQ ID NO: 62284 - protein, 151 aa, Zea mays
  Coding DNA Sequence Number=SeqID_20505
MTTETGTYRWMAPEKLLIVTKCGKKLSNLLYLVNILYARFQRGLKRKPMEIFKKLRNAVKLDFLDEVLVSCLDIFAFLVITSSFLPFLPSMISIPILLHIKGCEELKKKLQSMVSNEEIMSILLHIGLNEKMQQYKIHWLKDNGNNRSAML

SEQ ID NO: 62285 - protein, 130 aa, Zea mays
  Coding DNA Sequence Number=SeqID_20506
  Gene Ontology: Mol. function=cation transporter activity; Cellular component=integral to membrane; Biological process=calcium ion transport
  Homolog annotation: Hit_ID=Q769E5; Match level="QueryCoverage=56%, HitCoverage=15%, E-value=3e-23, Identity=78%"; Hit description =Vacuolar cation/proton exchanger 1a (Ca(2+)/H(+) exchanger 1a)
  Pfam annotation: Domain name=Na_Ca_ex; Domain location=36-126; Score=- 11.4; E_value=0.066; Accession=PF01699.14; Description=Sodiumcalcium exchanger protein
  Subcellular localization annotation: CTP_CleavageSite=44; ConfidenceScore=5.71e-01
MAYKLKLSDSTSIRTVFHVSQLKPSVQPSCLVSASLPAVASSVRMSNAVSDHLSMGPSVGGLLNATCGNAIELIIALFTLMHGGQKIEVVKCSLHGFVLSNLLLVLGTPLFCGGIVNLGDEQLYDRVLTY

SEQ ID NO: 62286 - protein, 49 aa, Zea mays
  Coding DNA Sequence Number=SeqID_20507
MDMTEVPVAIANIISTDPTTKMSCNKKSTLNQGSTAAAGRGGGSKDQIA

SEQ ID NO: 62287 - protein, 72 aa, Zea mays
  Coding DNA Sequence Number=SeqID_20508
MEEAPEMEEGSAPPSPIPLARAPILPRQLVACCFYSRGGNWEKGSWAGPLGKVKWATRPKFQSSQPDRSGCN

SEQ ID NO: 62288 - protein, 96 aa, Zea mays
  Coding DNA Sequence Number=SeqID_20509
  Gene Ontology: Mol. function=RNA-directed DNA polymerase activity; Biological process=RNA-dependent DNA replication
  Homolog annotation: Hit_ID=UPI00004C1733; Match level="QueryCoverage =95%, HitCoverage=6%, E-value=2e-28, Identity=62%"; Hit description =UPI00004C1733 related cluster
MLRIPRDLIENSLNINPTARPIAQRLRRFDEEKRKTISEETTKLLAIGFVREIHHLVWVVNPVLMKKKTGKWRMCVDYTRLNKGCPKGHFLLPCID

SEQ ID NO: 62289 - protein, 76 aa, Zea mays
  Coding DNA Sequence Number=SeqID_20510
MAQRHTPTTKSGSTANQCSDEQFTEPRIRAKCPNQALRTQHQGMKHLSRWPHPAAKCHERMWHDVRPARRPGLAAI

SEQ ID NO: 62290 - protein, 139 aa, Zea mays
  Coding DNA Sequence Number=SeqID_20511
MQDVARRTLLPYCSLFSGVADGHLNYYPRRSTDSAGGVIVSPVGDGNPKLNSMINLVVVLNTELDHAIDELGKARAEIAELRVERAARHHQEGGSPTPVRIQHPFRSPPRGRYTYGTPNCRTQIDFEPEIDRVGVYNNV

SEQ ID NO: 62291 - protein, 97 aa, Zea mays
  Coding DNA Sequence Number=SeqID_20512
MEGKGRWADEGAGPGRFLALARKSRGRHGHGGNGAAASPMDMELARSLWELLRAEEHQGRKGRRCSLHGAAHDRSSAGASRARERSSALACVRACAS

SEQ ID NO: 62292 - protein, 152 aa, Zea mays
  Coding DNA Sequence Number=SeqID_20513
MGKNNKRKREPTPPSEEFGNSEYSEEEFSSESEGSPASIPLRESSDDSDDSQGLAAEVWTYIRAVERSGLEGSDESEYSSDEEDSDDDGEDEDDDDDDEGGGGGDGDGSGRGGSGGSKDGDGGGSRGGSGGGDSSRGSTRGGSSGGSNRASG

SEQ ID NO: 62293 - protein, 59 aa, Zea mays
  Coding DNA Sequence Number=SeqID_20514
MRSPWHTGSQFILGRGSLIGRLEINGEEQVLLEKDYYDEFDEIQGSSPSQLLAPRRYLS

SEQ ID NO: 62294 - protein, 550 aa, Zea mays
  Coding DNA Sequence Number=SeqID_20515
  Gene Ontology: Mol. function=transporter activity; Cellular component= membrane; Biological process=sodium ion transport
  Homolog annotation: Hit_ID=Q6ZFH7; Match level="QueryCoverage=98%, HitCoverage=98%, E-value=0.0, Identity=76%"; Hit description =Putative sodium-dicarboxylate cotransporter
  Pfam annotation: Domain name=CitMHS; Domain location=84-489; Score= -93.3; E_value=0.00083; Accession=PF03600.6; Description=Citrate transporter
  Pfam annotation: Domain name=DctM; Domain location=154-542; Score= -226.3; E_value=0.017; Accession=PF06808.2; Description=DctM-like transporters
  Pfam annotation: Domain name=Na_sulph_symp; Domain location=56-541; Score=6.7; E_value=1e-12; Accession=PF00939.9; Description =Sodium:sulfate symporter transmembrane region
  Pfam module annotation: Pfam domain module=CitMHS::DctM::Na_sulph _symp; Domain location=84-489::154-542::56-541
MDKRGSFGGTSSDDVEAPLLPPPARDDGAQELRLPPSWVRALLAHRYPAVAAGPAAAAAVCALVDLAVGGGAHAHHHREARNMLAVLAWVFLWWVTGAVPLAVASMAPLFLFPLFGVSSADAVAKAYMDDVISLVLGSFILALAIEHYQIHRRLALNITSLFCGDPVRPPLLLLGITGTTFFVSMWIHNTACTVMMMPVATGILQRLPRGGAGAGTGAHDEVRRFSKAVVLGVVYASAIGGMATLAGTGVNIILVGMWSTYFPEQEPITFSSWMSFGLPMALILFLALWITLCLMFCSNNTGKALSGYLDRSHLRRELSLLGPMVFAEKMVLAVFGGLIVLWMTRNLTADIPGWGALFHNNVGDGTVTIMMATLLFIIPSRKNKGEKLMDWDKCRKLQWDIILLLGAGFAIAEGFRSSGLTDILSDGLRFLKGAETVVIVPVACIVSGVVTEFTSDDATTTLLLPLFAELAKAIDVHPALLMVSGAVGAQLSYLLPTGSPSNVIGFSTGHITIKDLVTTGLPLKLVGIAALTVLMPTLGNITAAQIMSKN

SEQ ID NO: 62295 - protein, 97 aa, Zea mays
  Coding DNA Sequence Number=SeqID_20516
MAHRTVRCATGAPTVRHRGLDAFSLLEGKDVNAVTIQREQYGGIVRLFIGNHIALYDIASISSKITYKVYKCYRDNIVISISSLNNTFSLRRPSAST

SEQ ID NO: 62296 - protein, 86 aa, Zea mays
  Coding DNA Sequence Number=SeqID_20517
  Subcellular localization annotation: CTP_CleavageSite=51; ConfidenceScore=5.84e-01
MAVPAPWPSSLRAAAHSSARSYPLPTLLPYCSTPHRRQWSRSPQLSFGRARSSARRGRRLSISQQAALHLALSRHSGFSSLWRPSP

SEQ ID NO: 62297 - protein, 67 aa, Zea mays
  Coding DNA Sequence Number=SeqID_20518
MTPLSVQLRALLAHVEDNMVEGTLFGSNMAWTLGDTYSIFVGSTASTLNARKNGVHPIALKEVLHKL

SEQ ID NO: 62298 - protein, 850 aa, Zea mays
  Coding DNA Sequence Number=SeqID_20519
  Gene Ontology: Mol. function=RNA-directed DNA polymerase activity; Cellular component=intracellular; Biological process=RNA-dependent DNA replication
  Homolog annotation: Hit_ID=UPI00004C1731; Match level="QueryCoverage =93%, HitCoverage=54%, E-value=0.0, Identity=83%"; Hit description =UPI00004C1731 related cluster
  Pfam annotation: Domain name=RnaseH; Domain location=356-483; Score =6.6; E_value=1.4e-05; Accession=PF00075.14; Description=RNase H
  Pfam annotation: Domain name=rve; Domain location=549-721; Score =105.2; E_value=1.9e-28; Accession=PF00665.16; Description=Integrase core domain
  Pfam module annotation: Pfam domain module=RnaseH::rve; Domain location=356-483::549-721
MADVCRLHWSQQSMSEGYHQIRMKESDQLATSFITPFGMYCYVTIPFGLRNAGATYQRCMNHVFGEHIGRTVEAYVDDIVVKTRMASDLLSDLEVTFRCLKAKGVKLNPEKCVFGVPRGMLLGFIVSERGIEANPEKIAAITSMGPIKDLKGVQRVMGCLAALSRFISRLGERGLPLYRLLRKTECFAWTPEAEEALGNLKALLTKAHVLVPPADGEALLVYVAATTQVVSAAIVVERQEEGHALPIQRPVYFVSEVLSETKIRYPQVQKLLYAVILTRRKLRHYFESHPVTVVSSFPLGEIIQCREASGRIARWAVEIMGETISFAPRKAIKSQVLADFVAEWVDTQLPTAPIQPELWTMFFDGSLMKTGAGAGLLFISPLGKHLRYVLRLHFPASNNVAEYEALVNGLRIAIELGVRRLDARGDSQLVIDQVMKNSHCRDPKMEAYCDEVRRLEDKFFGLELNHIARRYNETTDELAKIASGRTTVPPDVFSQDLHQPSVKIDDTPEPEAPSTQPEAPSAQPEAPSVRPEVPSAPGAEALHVEEEQKGATPDRNWQTPYLQYLRQGELPLDQAEARRKAPGGYTHLLVAIDKFSKWIEVRPLNSIRSEQAVAFFTNIIHRFGVPNSIITDNGTQFTGRKFLDFCEDHHIRVDWAAVAHPMSNGQVERANGMILQGLKPRIYNGLNKFGKRWMKELPSVVWSLRTTPSRATGFTPFFLVYGAEAILPTDLEYGSPRTRAYNDQSNQASREESLDQLEEARDKALLHSARYQQSLRRYHARGVRPRDLQVGDLVLRLRQDARGRHKLTPPWEGPFVIAKVLKPGTYKLANNQGEIYDNAWNIKQLRRFYP

SEQ ID NO: 62299 - protein, 73 aa, Zea mays
  Coding DNA Sequence Number=SeqID_20520
MSIPCSQSLTPELVNGYYDELYEHTELLKQHLNWTESYKRGLATERGGLRLAGDRGKGKTGVAAALGEIGGGN

SEQ ID NO: 62300 - protein, 97 aa, Zea mays
  Coding DNA Sequence Number=SeqID_20521
  Gene Ontology: Mol. function=RNA-directed DNA polymerase activity; Biological process=RNA-dependent DNA replication
  Homolog annotation: Hit_ID=UPI00004C1733; Match level="QueryCoverage =96%, HitCoverage=8%, E-value=2e-16, Identity=39%"; Hit description =UPI00004C1733 related cluster
MKPIVGSKRLSKVLMNEEAATTSFRGVDFQRSFKAILGRSCYAKFMDIPNYTYLKLKMHGPRGIITTSASFKAAYTCELASTLAITRELVELQKTVP

SEQ ID NO: 62301 - protein, 345 aa, Zea mays
  Coding DNA Sequence Number=SeqID_20522
MQSRRPEHGSSGELDVFGATSYFAGLPAPGGDHCRRPSSVTELCFQANKQVELDTTRSVTRHGPPQQQHQHQRAGWHDDHASSERHATDKLLQLQVVVAANKRRPSSASSGKSKLAALLSFMVSPSPRASFRKENNRQEALPSPSSARMLRQAEAARGGGDGDGEEPEPASNIDGSATAASPPPPPSSSRESSAQLQGLFGALDDDDDDEFDLGVATGDRRLQGITVVRGGGGGGEERWVVRCCVPGGGGGSAWDDEERREKAVDAESSSEQSIKQDEQLVVVEAEQAEQNIKDVVVEVEVEQAGDVDDVDDDGSGNVDDPAHSHSDSWDSDSSSDLFDLDLEHR

SEQ ID NO: 62302 - protein, 159 aa, Zea mays
  Coding DNA Sequence Number=SeqID_20523
  Gene Ontology: Mol. function=kinase activity
  Homolog annotation: Hit_ID=Q6QP54; Match level="QueryCoverage=53%, HitCoverage=23%, E-value=1e-10, Identity=63%"; Hit description =Putative kinase
  Subcellular localization annotation: CTP_CleavageSite=63; ConfidenceScore=5.31e-01
MEGTAASPPGYWLVPGGVTRCSPGKITFMSLTFTVNQKVGRGGGSSEVEIESEPPGRTRRRPSAEARAEFELWGRAKWSSSSFGAEPESEPWGQAKRSSSSSGAEPESEPWVGRSGVRRLPGLSPSPSPGVGRSGVRRLPGLSPSPSPGVGRSGVSYDA

SEQ ID NO: 62303 - protein, 540 aa, Zea mays
  Coding DNA Sequence Number=SeqID_20524
  Gene Ontology: Mol. function=GTP binding; Cellular component =intracellular; Biological process=small GTPase mediated signal transduction
  Homolog annotation: Hit_ID=Q10C01; Match level="QueryCoverage=68%, HitCoverage=91%, E-value=1e-140, Identity=74%"; Hit description =GTP1/OBG family protein, expressed
  Pfam annotation: Domain name=GTP1_OBG; Domain location=79-245; Score=- 27.2; E_value=7.6e-08; Accession=PF01018.12; Description=GTP1OBG family
  Pfam annotation: Domain name=MMR_HSR1; Domain location=296-443; Score= 135.1; E_value=1.9e-37; Accession=PF01926.13; Description=GTPase of unknown function
  Pfam module annotation: Pfam domain module=GTP1_OBG::MMR_HSR1; Domain location=79-245::296-443
MALLLHPRLPSHPFRAAAHHHHAISDASCFLTLHGPGRKRRMLLAAVTCRAARVKEPAPSAGASPPPPPQALTKEAHKYFDHAVVTVRAGDGGHGAVLAMPPAPSADAAKPRGRFNRGEKKSKKVSYKRNYDGSVALPTGGHGGDVVVYADEAEETLLRFHEKARYCAKRGGNVGAAGGTLSSRMHSGFAGETLRIPVPVGTVVKRKKGAVLADLAHHCDEVLVARGGQGGISLIDVPEYKRRKAMALSPNIMRDTSDKLKDFEVILLSTIVKSKVLTHGQPGEEVSLELILRVVADVGLVGLPNAGKSTLLSAITLARPDIADYPFTTLMPNLGRLGGDPALGALQFSSEATLADLPGLIEGAHLGKGLGRNFLRHLRRTRVIVHVVDAAADDPVNDYKIVREYYNVHDLSDLLVTLALIELRMYNPQYLERPYVVVLNKIDLPKAQDRLSALVLEISSIGCEEGHEQSGSKDNLNGRVSDHQVLSEAKAEGVEKELGDYPRPEAVVAASVLRHIGIDEMLKEIRAALRKCFDHKLPEH

SEQ ID NO: 62304 - protein, 238 aa, Zea mays
  Coding DNA Sequence Number=SeqID_20525
  Gene Ontology: Mol. function=protein binding; Cellular component =integral to membrane
  Homolog annotation: Hit_ID=Q1HTV3; Match level="QueryCoverage=67%, HitCoverage=76%, E-value=8e-37, Identity=47%"; Hit description=Green ripe-like 2
  Pfam annotation: Domain name=DUF778; Domain location=68-211; Score =198.8; E_value=1.3e-56; Accession=PF05608.2; Description=Protein of unknown function (DUF778)
  Subcellular localization annotation: CTP_CleavageSite=20; ConfidenceScore=5.16e-01
MPTVWVARRSPRPRSSVGIRPASLQPNLEPCLFFFDLLAQRSPSLVGVATTWRPSLPPYARCPDHLRPLRRRRSPSIREDGVILDFSGPHFVSVDNFAFGAVARYIQVNCDECYKLIEPEGDATWDGALKKGTQEFQNRNYNLFTCNCHSFVANNLNRLFYSGHDEWNVVSLAAVMFLRGRWVSTASVVKTLLPFAVVLSIGTFLGGTTFLTGLLAFAAAMTVWFLVGTYCIKGLIEL

SEQ ID NO: 62305 - protein, 56 aa, Zea mays
  Coding DNA Sequence Number=SeqID_20526
MATATKRRSRELARLLGMDFSDFVWAPRSWVPNKRLDPGLDFVLLPLGYENFPLFL

SEQ ID NO: 62306 - protein, 113 aa, Zea mays
  Coding DNA Sequence Number=SeqID_20527
  Subcellular localization annotation: CTP_CleavageSite=51; ConfidenceScore=5.62e-01
MRSSTLAVAAAVLVLSVLVASGGAAARRPVVMRQGQGGSSPGASAVLQDRVAMAVQSTSTNSSAQPSNCTYGHNSGGAGPVGRSRSPWASAPTDTGLVSIIARLLHFQVLDPL

SEQ ID NO: 62307 - protein, 70 aa, Zea mays
  Coding DNA Sequence Number=SeqID_20528
MALVSEGSRMDASTGVTSTTSSPIAPRRAKQEAGTCDHHSGRHKGKREYSSIKYKYKGGFDKEALKKKYL

SEQ ID NO: 62308 - protein, 173 aa, Zea mays
  Coding DNA Sequence Number=SeqID_20529
MARARGRSAAGCESAAACNYGEELQGLGSILMFGTPHTQSTHAVERPRPNPDHPTPVQERGNNGGRWPSLSGLFARSREGGGWLRGVLGFRVKRPRLYAQPRRGGGYATGEIGPVVGASWIRGGDGMTAIPIRTAVEDVQMDGIRCSVERRVHVVGAGEAESIRSCGFAAEDC

SEQ ID NO: 62309 - protein, 186 aa, Zea mays
  Coding DNA Sequence Number=SeqID_20530
MSDDMWGLRARVFLLLGLPSSPNKPRTLLNPAKIGTVAAREGPPLPLLLGPRPAAAMDLAASSCSDRKGVIGAQCRGCAPLASIAALGGEKSVCRYLLVKPLGLGWWLEGNSPACAGISSGDSGDRCRRFRISPEWSCWALASGGCAAWMKDELERRCLLEQDDPGQYGLGAMCTHTWEDHLVSGS

SEQ ID NO: 62310 - protein, 665 aa, Zea mays
  Coding DNA Sequence Number=SeqID_20531
  Gene Ontology: Mol. function=transferase activity, transferring acyl groups, acyl groups converted into alkyl on transfer; Cellular component=intracellular; Biological process=carboxylic acid metabolic process
  Homolog annotation: Hit_ID=Q30DX9; Match level="QueryCoverage=83%, HitCoverage=86%, E-value=0.0, Identity=65%"; Hit description=2 -isopropylmalate synthase 1
  Pfam annotation: Domain name=HMGL-like; Domain location=84-381; Score= 327.4; E_value=2.4e-95; Accession=PF00682.9; Description=HMGL-like
  Pfam annotation: Domain name=LeuA_dimer; Domain location=474-619; Score=180.3; E_value=4.9e-51; Accession=PF08502.1; Description=LeuA allosteric (dimerisation) domain
  Pfam module annotation: Pfam domain module=HMGL-like::LeuA_dimer; Domain location=84-381::474-619
  Subcellular localization annotation: CTP_CleavageSite=28; ConfidenceScore=5.77e-01
MASSLLSSPAKPTITTTTKTTPAPRPARSAHVHVLSAARCLRLRLRASSQHPPPPPTPRSRRPDYVPNRIDDPNYVRIFDTTLRDGEQSPGATMTSAQKLVVARQLARLGVDIIEAGFPASSPDDLDAVRSIAIEVGNPAPGPAGEEDAVHVPVICGLSRCNRKDIDAAWEAVRHARRPRIHTFIATSDIHMQHKLRKTPDQVVAIAREMVAYARSLGCTDVEFSPEDAGRYSAVAKSVVILAIFVQFLAAFYESEGEVIKAGATTLNIPDTVGYNLPYEFGKLIADIKANTPGIEKAIISTHCQNDLGLATANTLAGARAGARQLEVTINGIGERAGNASLEEVVMAIKCRRELLDGLYTGIDSRHITLTSKMVQEHSGLHVQPHKAIVGANAFAHESGIHQDGMLKYKGTYEIISPDDIGLTRANEFGIVLGKLSGRHAVRSKLVELGYEIGDKEFEDFFKRYKEVAEKKKRVTDEDLEALLSDEIFQPKVIWSLADVQATCGTLALSTATVKLVAPDGEEKIACSVGTGPVDAAYKAVDKIIQIPTVLREYSMTSVTEGIDAIATTRVVVTGDVSNNAKHALTGQSFNRSFSGSGASMDIVVSSVRAYLSALNKICSFAGAVKASSDQIGILYQIATTIRISETLSRPGQHDHTAIYSSPTC

SEQ ID NO: 62311 - protein, 578 aa, Zea mays
  Coding DNA Sequence Number=SeqID_20532
  Gene Ontology: Mol. function=protein serine/threonine kinase activity; Cellular component=cytoplasm; Biological process=protein amino acid phosphorylation
  Homolog annotation: Hit_ID=Q84SX8; Match level="QueryCoverage=96%, HitCoverage=98%, E-value=0.0, Identity=63%"; Hit description =Putative MAP kinase
  Pfam annotation: Domain name=Pkinase; Domain location=24-312; Score =231.2; E_value=2.2e-66; Accession=PF00069.15; Description=Protein kinase domain
  Pfam annotation: Domain name=Pkinase_Tyr; Domain location=24-312; Score=95.4; E_value=1.7e-25; Accession=PF07714.7; Description =Protein tyrosine kinase
  Pfam module annotation: Pfam domain module=Pkinase::Pkinase_Tyr; Domain location=24-312::24-312
MAAANNAASGGGDEARYPLNAESYRLLCKIGSGVSAVVYKAVCLPLGSSAVVAIKAIDLERSRADLDGVQREAKAMALLSHGNVLRAHCSFTVGSHLWVVMPFMGAGSLHSILRHGFPGGLPEPCVAVVLGETLRALCYLHGQGRIHRDIKAGNILVDSDGAVKLADFGVSASIYETIRQHASASASTAAAVGTGSSASCCFNDVAGTPYWMAPEVIHSHVGYGIKADIWSFGITALELAHGRPPLSHLPPSKSMLMRITSRVRFEESVGTGNRRDKNNKFSRAFKDMVSACLCQEPAKRPSAEKLLRHPFFKACSRRSRDFLVRNVLAAVPSIEERCRKDDEAGNDLCGCVGGGARCVSPCPRHADNVVVAKNRRISGWNFNEDNLEFDPTTEERPVEAEKRCLPFDFDEGDDQVELHDSNSAGDGDGDRGRPPAQPQHGDGDDHVHGKAAEAVGLKQQQQVVTQQLMTVLQSLEMQRDMVTHVLQRTAGRLDDGGGNGDVSVTAPREEREEMLLGYVRQLEHRVEDLRKEVEEEMAWNARLEKMLQERVIISDDDKKMNSSKTSSSAELRAVDENI

SEQ ID NO: 62312 - protein, 73 aa, Zea mays
  Coding DNA Sequence Number=SeqID_20533
  Gene Ontology: Mol. function=catalytic activity; Biological process =metabolic process
  Homolog annotation: Hit_ID=Q2RAL6; Match level="QueryCoverage=74%, HitCoverage=11%, E-value=2e-14, Identity=76%"; Hit description=AMP -binding enzyme family protein, expressed
MLPLSVTLVALLAHRRYISYLPLAHIYERVNQIAALHCGVAIGFYQGEYDHLVQNMHWALELLWTIQRVAVHQ

SEQ ID NO: 62313 - protein, 124 aa, Zea mays
  Coding DNA Sequence Number=SeqID_20534
  Homolog annotation: Hit_ID=Q2QYQ0; Match level="QueryCoverage=92%, HitCoverage=34%, E-value=2e-28, Identity=59%"; Hit description =Expressed protein
MASISEPAAREKPIVVRVKRKPSQNRPDAFWLEINERPAKKAAIDFSRLSISEPSSSSASVKASEEPRVKKILVQHIETVHHSEAVEDVLQSLLLVDSNSKETKSKTKEWNDRIKQDKALTFTT

SEQ ID NO: 62314 - protein, 182 aa, Zea mays
  Coding DNA Sequence Number=SeqID_20535
  Gene Ontology: Mol. function=nucleotide binding; Cellular component =extracellular space; Biological process=cell-cell signaling
  Homolog annotation: Hit_ID=Q2RAL9; Match level="QueryCoverage=89%, HitCoverage=28%, E-value=3e-76, Identity=86%"; Hit description =Expressed protein
  Pfam annotation: Domain name=RED_N; Domain location=5-177; Score =157.1; E_value=4.5e-44; Accession=PF07808.3; Description=RED-like protein N-terminal region
MSSKKNYYKEKLMRRKEEKKEEPETPRYRDRAKERREDQNPDYEPTELGSFHAVAPPGNDLRLADAHKISIEKSKYLGGDLEHTHLVKGLDYALLHKVRSEIEKKPEAEDGKDTKSRAAKEDQAVSFRTATAKSVYQWIIKPQSIIKENELFLPGRMSFIYNMGHHSLIIAKYSTFSVFMFY

SEQ ID NO: 62315 - protein, 94 aa, Zea mays
  Coding DNA Sequence Number=SeqID_20536
  Homolog annotation: Hit_ID=Q8H594; Match level="QueryCoverage=93%, HitCoverage=29%, E-value=2e-22, Identity=45%"; Hit description =Putative WD-repeat protein 12
MENHLENSFALFCGKALNCLDCGGEGSSLIAAGGSDPVLRWPLASVDSHEDKEKGKWMICWLLQVLCADWWKGDSVISGGADSKLCISSGIQIV

SEQ ID NO: 62316 - protein, 104 aa, Zea mays
  Coding DNA Sequence Number=SeqID_20537
  Subcellular localization annotation: CTP_CleavageSite=69; ConfidenceScore=5.94e-01
MAGNSGFGGSSTSGNGGSSTLGSGGSSTSGNGGSSTLGSGGKSCSGTGRSGTVRWGSPSLGVASSSSLRAALLTAAQERSSRRAREDAVVPEAHVDRNIRADWR

SEQ ID NO: 62317 - protein, 138 aa, Zea mays
  Coding DNA Sequence Number=SeqID_20538
  Homolog annotation: Hit_ID=Q8H5A1; Match level="QueryCoverage=85%, HitCoverage=80%, E-value=9e-07, Identity=34%"; Hit description =Proline-rich protein family-like protein
MMLSLVLLMALLLSCSSISGAARLLEEVAPKEEYPHPATLELPKPELPPHPTVPELPKPQPSDAVPELPMPEVEHPAVPELPKPDVPAHPAVPELPKPELPPHPTVPELPYPEVPEVPKHELPPKPAENHYPVPETKP

SEQ ID NO: 62318 - protein, 75 aa, Zea mays
  Coding DNA Sequence Number=SeqID_20539
MSKLLKFDQVYKEYCQYLMTPNRMLSGSTVGIFPSTYDLWDSLFEKWSLIAYGLLEKFMNTPTTEFKVIFQNNHI

SEQ ID NO: 62319 - protein, 701 aa, Zea mays
  Coding DNA Sequence Number=SeqID_20540
  Gene Ontology: Mol. function=protein binding; Biological process =defense response
  Homolog annotation: Hit_ID=Q6ZBX8; Match level="QueryCoverage=19%, HitCoverage=15%, E-value=6e-67, Identity=91%"; Hit description =Putative aminopeptidase N
  Pfam annotation: Domain name=PPR; Domain location=185-219; Score =22.9; E_value=0.0011; Accession=PF01535.11; Description=PPR repeat
  Pfam annotation: Domain name=PPR; Domain location=220-253; Score=8.3; E_value=0.77; Accession=PF01535.11; Description=PPR repeat
  Pfam annotation: Domain name=PPR; Domain location=256-290; Score =22.0; E_value=0.0022; Accession=PF01535.11; Description=PPR repeat
  Pfam annotation: Domain name=PPR; Domain location=322-356; Score =28.7; E_value=2e-05; Accession=PF01535.11; Description=PPR repeat
  Pfam module annotation: Pfam domain module=PPR::PPR::PPR::PPR; Domain location=185-219::220-253::256-290::322-356
MPINTTPTTRCAAASPRCRCPPRPADIRELFLQASSRFPLSWRPVHRLLSHLSTLHRGAGAGDGDGDSDSDSGGGGFPHSPATAARLLDVLAKSGNIDLLHSTLFSLPRSLLSAAALRAAVRGLAPAREVGKVAALVTLFPECHRARVLTFVTDVACSEPCRLPDVAEKAIKRAEHRHGVARTGRCCDLLVVAYCRAGSLADACRVWNGMERRGLEPGAAAYQEIVVTMFKNNRVADAMKLFDGMRRSGVRDNGGGCCRAVVSWLCKEGRVWGAYMVLAEMVKRGLEVDGEVLGDLVYGLMSRRRVREAYRVFHGVKEKEIALYHGLMKGLLRIKRAGEATEVFREMITRGCEPNMHTYIMLLQGHLGKRGRKGRDPLVNFESIFVGGLVKAGRTLEATKFVERTMWGGVDVPRFDYNKFLYYFSNDEGAVMFEEVSKRLKEVGVIDLADILSAYAYLASLNEPDFVELALHEYKSAINMTEQFAALAALSQNPGQVRDDALLDFYNKWQHEYLVVSKWFALQATSEIPGNVANVQKLLSHPAFDLRNPNKVYSLIGGFCGSPVNFHTKDGSGYKFLGEIVLQLDKINPQVNANTGTDTTAGFSIRRFRIPDGQHVLHLDAVSFSSFEEAQGALHDQLPRAKGGGNAEGEYPAFALARKKELFSRAFTAAVGVAFLAAAGQRSEPIWWSRMPQKQSTVSHV

SEQ ID NO: 62320 - protein, 129 aa, Zea mays
  Coding DNA Sequence Number=SeqID_20541
MSRDDMPQALEHADRHARPPISHQTHWTRAGFDILPPSSCMNGLSMHGDIGKGNGPLLTNFPNHDDSERRASVRLVGVVTSSCNKARAQAEFKEDDCCTITAARISSWIPSTERPYMTRLSANVVNRYT

SEQ ID NO: 62321 - protein, 209 aa, Zea mays
  Coding DNA Sequence Number=SeqID_20542
MWTHRTVPEGINSEPLDSEGQRRGSTCRGAHRGKRCGPRGGVVAATKGRGLVSGDRCGQPYADRSGSLFLLHTFSSLASGDEPRHANHPRRDRMVLLRERHQVVSAHGGTRRALGNHLQGVCGGSEGSSPSSGEGIGVFDDWRMSLEGRVEDLRLEVGKLSKNWERAVIDKSSVMTGVMAPSPVAAERSSTGLTDASAQRHRVYLQHQR

SEQ ID NO: 62322 - protein, 120 aa, Zea mays
  Coding DNA Sequence Number=SeqID_20543
MGDKGLGWEHPWEGSRRAAGRSGQARPSKGVAAREQRQSSELQPTMDGAGAGQSAPVTEVDASTKRERHQALAERVEKKERSAMETRWSAQQRSKQRARQTSAARKLRAVRERAGSHGAT

SEQ ID NO: 62323 - protein, 172 aa, Zea mays
  Coding DNA Sequence Number=SeqID_20544
MPSAPVYHIPICASRKDCLQFGGVVANELPLLRIGRGRGKRASKGSQGSIRLVHGCGHGYVSSSQSDLLDVDLNLNSTPTNDDDVEEMMHNNTFNYPFFYIHVGPFKLETNKGPPEHEELLHEMFGAIVVDGSSACTPGEVFGGNDEEEVAMDVMVEMIVIDLHHLLLVPIL

SEQ ID NO: 62324 - protein, 74 aa, Zea mays
  Coding DNA Sequence Number=SeqID_20545
MEEDRGDRPQRKNASSLPHMSNPVEARKMKEKLMKMKDPQTEEKKENTTLPKDVHLIPTLGKNGHPGKIIKDMS

SEQ ID NO: 62325 - protein, 106 aa, Zea mays
  Coding DNA Sequence Number=SeqID_20546
MELDTPGMESETATQFGAQVSVIGVHQRPVGCDWKEEVGDHRERMICAEGGRFDHASWLTTRDFCAKIAHSLRRCRERRTVCCGEKNELTRFPITNIILRALQISK

SEQ ID NO: 62326 - protein, 116 aa, Zea mays
  Coding DNA Sequence Number=SeqID_20547
  Homolog annotation: Hit_ID=Q6QP51; Match level="QueryCoverage=97%, HitCoverage=55%, E-value=2e-15, Identity=53%"; Hit description =Putative growth-regulating factor 1
MRVVGLRPRSGEAETSPEAEVEVGRGCDSSRGRGRGPRLGETGTFPEAGAKAEAWGRARWSSLSRPRLNSGEVTTYCCYSDPGGWHNSQSGANNAVFLSDRSVKGRSDCGHFDLAD

SEQ ID NO: 62327 - protein, 131 aa, Zea mays
  Coding DNA Sequence Number=SeqID_20548
MSHKDKYRHRRPISIDRIPIVLSLKKHPSGSVAGRSMHLEINCSAGESYSSGDNDDPYMHHPGRQGDGLLDESQAEALRRKGMATPQRHHDDIAVGGANNRRRVPTSAACEGHGGVWAFPLASPMSQIDCR

SEQ ID NO: 62328 - protein, 838 aa, Zea mays
  Coding DNA Sequence Number=SeqID_20549
  Gene Ontology: Mol. function=catalytic activity; Cellular component =intracellular; Biological process=metabolic process
  Homolog annotation: Hit_ID=Q2QNV4; Match level="QueryCoverage=94%, HitCoverage=74%, E-value=0.0, Identity=57%"; Hit description =Pentatricopeptide, putative, expressed
  Pfam annotation: Domain name=PPR; Domain location=110-144; Score =28.5; E_value=2.3e-05; Accession=PF01535.11; Description=PPR repeat
  Pfam annotation: Domain name=PPR; Domain location=211-245; Score =46.7; E_value=7.6e-11; Accession=PF01535.11; Description=PPR repeat
  Pfam annotation: Domain name=PPR; Domain location=288-321; Score=9.0; E_value=0.63; Accession=PF01535.11; Description=PPR repeat
  Pfam annotation: Domain name=PPR; Domain location=341-375; Score =46.2; E_value=1.1e-10; Accession=PF01535.11; Description=PPR repeat
  Pfam annotation: Domain name=PPR; Domain location=442-476; Score =32.4; E_value=1.6e-06; Accession=PF01535.11; Description=PPR repeat
  Pfam annotation: Domain name=PPR; Domain location=543-577; Score =39.1; E_value=1.5e-08; Accession=PF01535.11; Description=PPR repeat
  Pfam annotation: Domain name=PPR; Domain location=604-638; Score=4.6; E_value=2.1; Accession=PF01535.11; Description=PPR repeat
  Pfam annotation: Domain name=PPR; Domain location=670-704; Score=2.0; E_value=4.3; Accession=PF01535.11; Description=PPR repeat
  Pfam module annotation: Pfam domain module=PPR::PPR::PPR::PPR::PPR::PP R::PPR::PPR; Domain location=110-144::211-245::288-321::341-375::442 -476::543-577::604-638::670-704
MTCREVAASLHRSLAKFIVPDNPEKILSLVAAKASHHRALGSADLTCALQACRGRGNRWPLVLEIHATSVVRGLGADRLIGNLLIDLYAKNGLVWQARQVFKELSSRDHVSWVAMLSGYAQRGLGKEAFRLYSQMHWTAVIPTPYVLSSVLSACTKGKLFAQGRMIHAQVYKQAFCSETFVGNALIALYLGFGSFKLAERVFCDMLFCDRVTFNTLISGHAQCGHGECALQIFDEMQLSGLRPDCVTVASLLAACASVGDLQKGKQLHSYLLKAAHDIFNLGDRTNVVLWNLMLVAYGQISDLAKSFEIFGQMQATDMYSKYRCLDKARKILEMLEKRDVVSWTSMIAGYVQHDFCEEALATFKEMQDCGVWPDNIGLASAASACAGIKAMRQGLQIHARVYVSGYAADISIWNTLVNLYARCGRSEEAFSLFREIDHKDEITWNGLISGFGQSRLYEQALMVFMKMSQAGAKYNVFTFISAISALANLADIKQGKQVHGRAVKTGHTSETEVANALISLYGKCGSIEDAKMIFSEMSLRNEVSWNTIITSCSQHGRGLEALDLFDQMKQEGVLAACSHVGFGEEGLSYFKSQSNAYGVNPIPDHYACVVDILGRAGQLDRARRFVDEMPITANAMIWRTLLSACKVHKNIEIGELAAKHLLELEPHDSASYVLLSNAYAVTGKWANRDQVRKMMKDRGIRKEPGRSWIEVKNAVHAFFVGDRLHPLSDQIYKFLSELNDRLSKIGYKQENPNLFHEKEQEQKDPTAFVHSEKLAVAFGLMTLPPCIPLRVIKNLRVCDDCHSWMKFTSEVTRREIVLRDVYRFHHFNSGSCSCGDYW

SEQ ID NO: 62329 - protein, 108 aa, Zea mays
  Coding DNA Sequence Number=SeqID_20550
  Subcellular localization annotation: CTP_CleavageSite=18; ConfidenceScore=5.32e-01
MVESYCDRQRRRSPTFHRASSPPHQPPPTAGQPTVYRVVTPDAQGAPRLPPLPRPPSTTPPRLFRGQRPEPLGSAGTAPFPLNSWPLGAGSLDSGLDEDMEDANTVPH

SEQ ID NO: 62330 - protein, 40 aa, Zea mays
  Coding DNA Sequence Number=SeqID_20551
MTRQSAAVASGCFRAWLIGESVVEGLPAMALPLSVIDRRD

SEQ ID NO: 62331 - protein, 77 aa, Zea mays
  Coding DNA Sequence Number=SeqID_20552
MTRQSAAVASGCFRAWLIGESVVEGLPAMALPLSVIDRRDRLIFDHGAVGGLKFFKSSSSDLDPMAVLAYRFSARVI

SEQ ID NO: 62332 - protein, 48 aa, Zea mays
  Coding DNA Sequence Number=SeqID_20553
MARLRLETGEEVCCKPGFGKSLMKMLSHLSEIRSSIAHSPTIRGKKLG

SEQ ID NO: 62333 - protein, 400 aa, Zea mays
  Coding DNA Sequence Number=SeqID_20554
  Gene Ontology: Mol. function=catalytic activity; Biological process =aromatic compound metabolic process
  Homolog annotation: Hit_ID=Q8S125; Match level="QueryCoverage=67%, HitCoverage=96%, E-value=1e-110, Identity=73%"; Hit description =Putative ethylene-induced esterase
  Pfam annotation: Domain name=Abhydrolase_1; Domain location=158-394; Score=48.6; E_value=2.1e-11; Accession=PF00561.10; Description =alphabeta hydrolase fold
MMNGIIRETKATEEGKDLLDMLLDWMREHWPLAEDDDSRISDTDIAAKECEVDRNCFKDKLILPKSSLDKHKHKLYSLYKPVTLLIDPAASRRTRGEGTRTAHKSWGLPSVHPQPQTSRMDAPAAAEGCGKHIVLVHGACLGGWSWYKVATLLRAAGYRVDAPDMAASGADPRPLREVPTFRDYTRPLLDLLASLPDGDRVVLVGHSLGGVNVALAAETFPDKVSAVVFLCAFMPDCTARPSHVLEKGELIIVSISRPLVKFIEGKWLDWMDTEMKPQDQDGEGKLPTSMLFGPRIIREKFFQLCSPEDLTLSASLMRVSSMFVEDLALRQPYSKERYGSVRRVYVVCTEDYAIVEGFQRWMVDNSPVDEVKEIAADHVVMLSRPDELVRCLTDIADKYA

SEQ ID NO: 62334 - protein, 102 aa, Zea mays
  Coding DNA Sequence Number=SeqID_20555
  Gene Ontology: Mol. function=glutathione transferase activity; Cellular component=cytoplasm; Biological process=auxin mediated signaling pathway
  Homolog annotation: Hit_ID=Q9FQB4; Match level="QueryCoverage=97%, HitCoverage=44%, E-value=1e-42, Identity=85%"; Hit description =Glutathione S-transferase GST 25
  Pfam annotation: Domain name=GST_N; Domain location=3-76; Score=43.0; E_value=1e-09; Accession=PF02798.10; Description=Glutathione S -transferase, N-terminal domain
MADDLKVLGLWTSPFVIRVRIMLNLKGLAYEYAEEDLGNKSALLLSSNPVHKTVLVLLHAGRPVNKSQIILQYIDKVWAGTRPTVLRCDPYKHAVTRFWVAG

SEQ ID NO: 62335 - protein, 558 aa, Zea mays
  Coding DNA Sequence Number=SeqID_20556
  Homolog annotation: Hit_ID=Q9LW95; Match level="QueryCoverage=68%, HitCoverage=69%, E-value=3e-10, Identity=20%"; Hit description=KED
MAAGSDRPSTLPVLGLGVGDGDIKCRDIREKEPGVYVPAWLTPPRKKSKNRVEVISGKYRGGEAKKPEPGHFNSHHPPELAKGAQPLHTSETNPKSPTLSHLSRFVGHFWGKPRRSFASVVKNPRAPTTVVKMQPRGAGRRGGVASRGTGRRSARENVWRRVEEGSSSAHRQEADPTDEEKMKGEEPHQQNPWEQQRKRPEGKSGIDWRHVAEDEDFKEENIKKELRVPWGLFIYDFHFEREIQEEDPHDNRGSGIKIDDQDQNNAKRTKFEGNPWSEGKNKGKTQEGYNNNQQKGKNDQPMQHRYMKAPPAPPAEKNMWNLNKGKDIIQDISTEENLTKEGRVQITDSEEEDTSDLLGEELFAAGMNIGMYDTHKKWDTGEKDEDANERATYDKKETTKKGNMVIEEIVDEFKDEEEKNEILVSTQDSGIMLGSQEEVDQKEEAEKDMMNPKNKKHAEEKMCTKKEDRRVSERLKKDAGIRIEEKNRRIAAKRNLEGKFYATRQKVDFSSLNDIADLAFKAGIKIRDDNLESIDLVKEMEIANECLAQKNRARKRQG

SEQ ID NO: 62336 - protein, 881 aa, Zea mays
  Coding DNA Sequence Number=SeqID_20557
  Gene Ontology: Mol. function=protein binding; Cellular component =membrane; Biological process=defense response
  Homolog annotation: Hit_ID=Q5ZAY2; Match level="QueryCoverage=99%, HitCoverage=100%, E-value=0.0, Identity=75%"; Hit description =Putative disease resistance protein RPS2
  Pfam annotation: Domain name=LRR_1; Domain location=502-525; Score =7.2; E_value=13; Accession=PF00560.23; Description=Leucine Rich Repeat
  Pfam annotation: Domain name=LRR_1; Domain location=527-548; Score =18.0; E_value=0.033; Accession=PF00560.23; Description=Leucine Rich Repeat
  Pfam annotation: Domain name=LRR_1; Domain location=550-571; Score =15.1; E_value=0.25; Accession=PF00560.23; Description=Leucine Rich Repeat
  Pfam annotation: Domain name=LRR_1; Domain location=573-595; Score =10.7; E_value=2.8; Accession=PF00560.23; Description=Leucine Rich Repeat
  Pfam annotation: Domain name=LRR_1; Domain location=655-680; Score =0.0; E_value=2.8e+02; Accession=PF00560.23; Description=Leucine Rich Repeat
  Pfam annotation: Domain name=LRR_1; Domain location=756-780; Score =0.5; E_value=2.3e+02; Accession=PF00560.23; Description=Leucine Rich Repeat
  Pfam annotation: Domain name=LRR_1; Domain location=801-823; Score =3.6; E_value=60; Accession=PF00560.23; Description=Leucine Rich Repeat
  Pfam annotation: Domain name=LRR_1; Domain location=827-849; Score =1.2; E_value=1.7e+02; Accession=PF00560.23; Description=Leucine Rich Repeat
  Pfam annotation: Domain name=NB-ARC; Domain location=133-403; Score =156.5; E_value=7.1e-44; Accession=PF00931.13; Description=NB-ARC domain
  Pfam module annotation: Pfam domain module=LRR_1::LRR_1::LRR_1::LRR _1::LRR_1::LRR_1::LRR_1::LRR_1::NB-ARC; Domain location=502-525::527
MEFVASIVDTVFRPLKDYFARTVGYVMSCGDYIDAMGNEMNELKSKRDDVKRMVDAAERQGMEATSQVKWWLECVALLEDAAARIVDEYQARLQLPPDQPPGYKATYHLSKKADEAREEAAGLKDKADFHKVADELVQVRFEEMPSAPVLGRDALLHELHACVRDGDVGIVGIYGMAGVGKDFDLNDIPEGSSATGLGVSWENRTLKERAGVLYRVLSKMNFVLLLDDVWEPLNFRMLGIPVPKHNSQSKIVLTTRIEDVCDRMDVRRKLKMECLPWEPSWELFREKVGDHLMSASPEIRHQAQALAMKCGGLPLAIITVGRAMASKRTAKEWKHAITVLKIAPWQLLGMEFDVLEPLKKSYDNLPSDKLRLCLLYCSLFPEEFSISKDWIIGYCIGEGFIDDLYTEMDEIYNKGHDLLGDLKIASLLEKGEDEDHIKMHPMVRAMALWIASDFGTKETKWLVRAGVGLKEAPGAEKWNDAERISFMRNNILELYERPNCPLLKTLMLQGNPGLDKICDGFFQYMPSLRVLDLSHTSISELPSGISSLVELQYLDLYNTNIRSLPRELGSLSTLRFLLLSHMPLETIPGGVICSLTMLQVLYMDLSYGDWKVGASGNGVDFQELESLRRLKALDITIQSVEALERLSRSYRLAGSTRNLLIKTCSSLTKIELPSSNLWKNMTNLKRVWIVSCGNLAEVIIDSSKEAVNSNALPRSILQARAELVDEEQPILPTLHDIILQGLYKVKIVYKGGCVQNLASLFIWYCHGLEELITVSEEQDMAASGGGGQGSAAFRVITPFPNLKELYLHGLAKFRRLSSSTCTLHFPALESLKVIECPNLKKLKLSAGGLNVIQCNREWWDGLEWDDEEVKASYEPLFRPLH

SEQ ID NO: 62337 - protein, 95 aa, Zea mays
  Coding DNA Sequence Number=SeqID_20558
  Homolog annotation: Hit_ID=O49064; Match level="QueryCoverage=30%, HitCoverage=4%, E-value=4e-08, Identity=82%"; Hit description =Plastid starch synthase I precursor
MENFNPLSENGEQGTGWAFTPPTTENMLWVCIGASFTLPWFYCIDHLGWAALPELKGRQHTGSAAAPDRRRDGIASRGWRLCINDVPHSPTCIYP

SEQ ID NO: 62338 - protein, 141 aa, Zea mays
  Coding DNA Sequence Number=SeqID_20559
MTWKLVKKKENSPSDQRAPARRRRPRMFLGEPVHLPGPSSGLLRLSVLVQSQSFIVSQDGIVKLDICDKECRPPNQSGAPRTVFPCVFTVVTTLDLEKKKSQKEAETEKIKKKSDSDKACRKELENDKSPKRDSANEKKAS

SEQ ID NO: 62339 - protein, 342 aa, Zea mays
  Coding DNA Sequence Number=SeqID_20560
  Gene Ontology: Mol. function=oxidoreductase activity; Cellular component=membrane; Biological process=response to oxidative stress
  Homolog annotation: Hit_ID=Q8S130; Match level="QueryCoverage=90%, HitCoverage=92%, E-value=1e-130, Identity=75%"; Hit description =Putative peroxidase
  Pfam annotation: Domain name=peroxidase; Domain location=56-303; Score=395.9; E_value=5.9e-116; Accession=PF00141.13; Description =Peroxidase
MALRRRLLLLVVVVAAAVARCRADDPAVSMLLPGLPVAGLAVGFYNEKCPQAEDLVLAEMRTLVDKDETIGPALLRFMFHDCLVRGCDASIMLVSRNGTAERDAFPSYGLRGYAEIEHIKAKLEDACPLTVSCADIIVMAARDAVYLSNGPRYAVETGRRDGKVSAEYDADNDLPPPSSKIVDLKTYFSFKGLGWKDLVVLSGSHTIGRAQCTTFASDRLYNYSGHVGQDPSLNKAYAAQLREMCEPGLADDTTMVEMDPRSPYTFDLSYYRNVRANRGLFTSDQALLDDPWTSAYVERMADAASPDEFFADYAAAITNMGRIEVLTGDNGEIRSACAAYVD

SEQ ID NO: 62340 - protein, 116 aa, Zea mays
  Coding DNA Sequence Number=SeqID_20561
  Subcellular localization annotation: CTP_CleavageSite=34; ConfidenceScore=5.01e-01
MLHLGLWLLLLLLLPFLGQLWPGGGGIRAASRIGASKRFGDRGPIAMTQPTPSLSTGLAKSARDGAAAREPLPLLQRARAMLRPPYLAVAPHLTHLVYGPHGAGHLLADKSPEHYH

SEQ ID NO: 62341 - protein, 385 aa, Zea mays
  Coding DNA Sequence Number=SeqID_20562
  Gene Ontology: Mol. function=protein binding; Cellular component =membrane; Biological process=meiosis
  Homolog annotation: Hit_ID=Q653D8; Match level="QueryCoverage=96%, HitCoverage=98%, E-value=1e-112, Identity=57%"; Hit description=LEM3 (Ligand-effect modulator 3)-like
  Pfam annotation: Domain name=CDC50; Domain location=70-370; Score =322.9; E_value=5.7e-94; Accession=PF03381.6; Description=LEM3 (ligand-effect modulator 3) family  CDC50 family
  Subcellular localization annotation: CTP_CleavageSite=37; ConfidenceScore=5.33e-01
MVPTHGDTAGPSSSQDDPAASVKKRNSNRPQYHPFTQQQLPACKPILAPQTVIPVLLFVGVVFIVIGLGCIAASNRVVEVVYEYETSCIPRHMLGNKVAYIQNPSIDKTCTWILKVPRDMKHPIYVYYQLDKFYQNHRRYVKSRSDKQLRDPKEANSTQQYCKPEATTEHGSAVVPCGLVAWSLFNDTYSFARGNNRALRVHKRGISWRSEREHIFGKQVFPRNFQKGALIGGGTLDPRIPVSVLQYLWNFITGEKKQGCDEVEIPQLSEQEDLIVWMRTAALPTFRKLYGRIEADLRAGELVTVTTQNNYNTYSFGGKKALVLSTAGVLGGRNGFLGRGYAVVGLACLLLALLLTMLCLVFPLKEEHLALQYPLLRPATVTMHA

SEQ ID NO: 62342 - protein, 98 aa, Zea mays
  Coding DNA Sequence Number=SeqID_20563
MMVPWSHERTTLSIRHHDGNGEDGEDETMRGSHLGGQGGAHGTLLLQGEGRSALALLRGSHGAWIVVMAATNAESVVGVVNVGAVRVKPGGVDGDAAA

SEQ ID NO: 62343 - protein, 190 aa, Zea mays
  Coding DNA Sequence Number=SeqID_20564
  Gene Ontology: Mol. function=hydrolase activity; Cellular component =cytoplasm
  Homolog annotation: Hit_ID=Q9LUG8; Match level="QueryCoverage=100%, HitCoverage=80%, E-value=7e-50, Identity=53%"; Hit description =Similarity to endo-1
  Pfam annotation: Domain name=DLH; Domain location=29-190; Score= -47.8; E_value=0.00054; Accession=PF01738.9; Description=Dienelactone hydrolase family
MASSRCFENPPVLEPASGGGEVVDDFGGQKAYVSGSAGSKAAVVLISDAFGFEAPNLRKIADKVASLGYFVVVPDFLHGDPYDPSNNAHSNPGTWIQSHNPQTAFEEAKPVIAAIKEKGVSSIGAAAKVVVELAKVHEIQAAVLAHPSLLTVDDMKDVKCPISILGAEIDRSAPPELLKQFEQVLSANPE

SEQ ID NO: 62344 - protein, 219 aa, Zea mays
  Coding DNA Sequence Number=SeqID_20565
  Gene Ontology: Cellular component=chloroplast inner membrane
  Homolog annotation: Hit_ID=Q2QTT0; Match level="QueryCoverage=86%, HitCoverage=43%, E-value=1e-91, Identity=86%"; Hit description =Expressed protein
MTGDQVGTLADPSFPHKMSLEFIATIASSIWCEMNIRKERFKQEWDLVIVNALTAACCNLMVLGLLAPCRSYASTSRFDFQNAIEKLPNNIFEKSYPLREFDLAKRISAFFYKAAELSLVGFVAGSVQGGMSIVLSARKERRLSVTIPSISTNALGYGAFLGLYANLRYQLLCGVDQYMVKRFDVLGVAIFFSTAARKGAHHYTKKQQQQSLLVRTMSG

SEQ ID NO: 62345 - protein, 67 aa, Zea mays
  Coding DNA Sequence Number=SeqID_20566
MARVACTLRGKRLDSGVFVLSVGVNLVCIPLRVFSLVGLRVTLIVIDVKRRWAQPSYRSKYLSYTSY

SEQ ID NO: 62346 - protein, 102 aa, Zea mays
  Coding DNA Sequence Number=SeqID_20567
MGEVEGEEGECHGKQGTGGELGWGLGEVMATSGEEAQAAKLEELPVEAVLLTRVVGMSRSHREQTGVFVILTAVCLLARRCVIMQHEVTTGVPPQRREKERQ

SEQ ID NO: 62347 - protein, 285 aa, Zea mays
  Coding DNA Sequence Number=SeqID_20568
  Subcellular localization annotation: CTP_CleavageSite=59; ConfidenceScore=5.05e-01
MSRRPDTGRRPARGQDRTGRTPLPMSVIPRCFTIHRWNKSTRAHPVVLFPRISSWRNLRLELERGCMLISLDSNSALVICLDIDRKHLLIQIEPKGVNSSRSIDIDQQSEKHKSMSRVSASVERELVHEQPTDDDASALAYLVRRRCPNTYLFFYGHALEDRVVRMTFIAKPTYSSRRKYLNDLLDADLVSLSRGDRKRWHNMRAAAEAAAEAAAQAARLLLRLSLLTMQAMKTKPDGAAGSVCSLELQSLIYFLLILDLCELRTLCLSCRMFGVSKSLDIVLLF

SEQ ID NO: 62348 - protein, 270 aa, Zea mays
  Coding DNA Sequence Number=SeqID_20569
  Homolog annotation: Hit_ID=Q0TB22; Match level="QueryCoverage=26%, HitCoverage=12%, E-value=6e-25, Identity=84%"; Hit description =Hypothetical membrane protein YidE
MVHQWKCRSDGDELRDGVSIRHVRDLFTMWMWRVIFRVNIETEAQQHESSRINGGALIKTINIRVENPSLHDSAIKELEQEHACSSCSSVPTNQQLEKSSAGVRIEPKGVNLSRSIDIDQQSEKHKSMSRVSASVERELVHEQPTDDDASALAYLVRRRCPNTYLFFYGHALEDRVVRMTFIAKPTYSSRRKYLNDLLDADLVSLSRGDRKRWHNMWAAAEAAAQAARLLLRLSLLTMRAMKTKPDGAAGSVCSLELQSLIYFSTNSRFL

SEQ ID NO: 62349 - protein, 55 aa, Zea mays
  Coding DNA Sequence Number=SeqID_20570
MPEEFAVAIVAMEAKTAAQQQPHGGGGSTPKLGLRAEVVFHMIKYMEKLRAPRGG

SEQ ID NO: 62350 - protein, 170 aa, Zea mays
  Coding DNA Sequence Number=SeqID_20571
  Gene Ontology: Mol. function=molecular_function; Cellular component =cellular_component; Biological process=biological_process
  Homolog annotation: Hit_ID=Q94HS1; Match level="QueryCoverage=97%, HitCoverage=57%, E-value=3e-46, Identity=49%"; Hit description =Putative thaumatin-like protein
  Pfam annotation: Domain name=Thaumatin; Domain location=1-168; Score =132.6; E_value=1.1e-36; Accession=PF00314.8; Description=Thaumatin family
MDAPSSGTWSDTLWARTGCVADPATGRFSCATADCGTGDVACQGRGPAPPVSLVEVTLAAPGSGRPDFYDVSLVDGFNVPVRVAPSGGGGRLPPRGLRGRPCKSACIAYGSARYCCTGQYGTPAMCGPTNYSQVFKSACPSAYSYAYDDATSTFTCSGPSSYDVTFCPAN

SEQ ID NO: 62351 - protein, 661 aa, Zea mays
  Coding DNA Sequence Number=SeqID_20572
  Gene Ontology: Mol. function=nucleic acid binding
  Homolog annotation: Hit_ID=Q338D7; Match level="QueryCoverage=68%, HitCoverage=71%, E-value=1e-146, Identity=56%"; Hit description =Calmodulin-binding family protein, putative, expressed
  Pfam annotation: Domain name=IQ; Domain location=119-139; Score=16.6; E_value=0.089; Accession=PF00612.17; Description=IQ calmodulin -binding motif
MGVLFSCPVEEEEDVPAGAAAALPAPCNAAVEPPALKPSLQGSGKLRFERSLGSLIRREQQSPSARLHVDVDVDVDAAAKQVPATSTVAPVPPVMPRELARTRFADAAPAPAPESPKHEAAAVTVQKVYKSFRTRRRLADCAVVVEQSWWELLDFALLRRSSVSFFDIERQESAVSKWARARTRAAKFQFFPQEITDGIRNKSHRDQVGKGLSKDDKAQKLALQHWLEAIDPRHRYGHNLHYYYDCWLRCESKEPFFYWLDVGEGKEINLERCPRLKLLSQCIKYLGPKEREEYEVVIEDGKFMFKKSRQILDTSDGPRDSKWIFVLSTSKNLYVGQKKKGTFQHSSFLAGGATSAAGRLVVEDGILKAIWPHSGHYRPTEENFQEFQSFLKDNNVDLTDVKMSPDEDDEEFWSRLRSISSDCCAVADKPEEDQQAAAQETSNSCQAPQVTESTTPDEVSPSPSQQEETSKSLSPTATVTRQDSSEDAETSTTSHRALFEDGQEEDHAAAATAADDNTAVPREKILQRISSKKETKSYQLGKQVSFKWTTGAGPRIVCVRDYPSELQLRALEQVHLSPRSGGAAAAAGAGRAASSRFASPQRCGSPVAARGRREPLASAGCGRAASSRFASPQRSSSPMARARCEQLTPREAFRTHLMARG

SEQ ID NO: 62352 - protein, 166 aa, Zea mays
  Coding DNA Sequence Number=SeqID_20573
MGVAVEGQQHSGLTLTDTEHAQRHGKARIYGILESGEQPSHAGMGTGKPQQRELKRRALTGQTAGRADERTEPSPPSTTATLTAAHGGRSAELGKRATDAPAATDAPAATDGRHECAGLAPSRRNADPGGGPQVRQLQRLGERPAVVSCCAEAEAPRHSRGGIELI

SEQ ID NO: 62353 - protein, 677 aa, Zea mays
  Coding DNA Sequence Number=SeqID_20574
  Homolog annotation: Hit_ID=Q1S3J7; Match level="QueryCoverage=78%, HitCoverage=94%, E-value=1e-177, Identity=56%"; Hit description =Proteinase inhibitor I4, serpin
  Subcellular localization annotation: CTP_CleavageSite=62; ConfidenceScore=5.26e-01
MSSSDPDDAPDGGEDSPLFRRSGGPSSGGTVGDVPVSQSLIKAASNVCFSLFVLAVLVVTVVAVTYQPPDPWLQSSAAITTSLSRVLPNSTFLVPDDSLLPTGEDFNSSTAVPAPVRDDDDAAAAVSAASAAAAGNRTCDPDAPLNCSDPRVLAAVKAFNARAFFRKSIVFLSYEAPVSGPKPGQCDVAWRFRNRREKSWRRYRDYRRFSLASGDGCALDIVSVGKFRSGTNAARRPYPKGSKSKRPRVSPPPVDAEINDTIPVVGSEAEFKKGKYLYYMRGGDHCKSMNQFVWSFLCGLGEAKFLNRTFVMDLNICLSGAHTVDGKDVDGKDFRYYFDFEHLKESVPVVEEGDFLKDWKRWDKKKGPGRITVRKVPSYKVTPMQLKRDKSNIIWRQFNGHEPENYWYRVCEGRAAKVIQRPWYAIWKSKRLMNIVTEIAGRMDWDYDGLHVVRGWKAQNKQMYPNLDSDTSPDALVDKVTKLVKPMRDLYIATNEPFYNYFDKLRSHFHVHLLDDYKELWSNTSEWYNETTTLSRGKPVPFDAYMRVIVDTESSESLRSSWNKKLKVTSQHPFKLRTESSESLRSSWNKKLKVTSQHPFKLRTEDLCVFASPLTRQIYTSVMNDESIHMNPVQRRKTIETKGIGIPRKVTDDGDGVDEKDEKKGASASQGKRKTTA

SEQ ID NO: 62354 - protein, 234 aa, Zea mays
  Coding DNA Sequence Number=SeqID_20575
  Homolog annotation: Hit_ID=Q8LHP5; Match level="QueryCoverage=38%, HitCoverage=40%, E-value=3e-35, Identity=89%"; Hit description =Putative Rab GTP-binding protein Rab11a
  Pfam annotation: Domain name=Ras; Domain location=16-89; Score=-10.1; E_value=1.6e-08; Accession=PF00071.12; Description=Ras family
MANDGDDGQSQDYLFKIVLIGDSSVDHSDMNVVTILVGNKTDLKHAREVSTAEGQALAEAQGLFFMETSALDSSNVAAAFQTVVKEIYSILSRKVFQSLEQKKSELQSLSSGKAVVLQVIDLCRYTQDTRTAAMEGDRIVRHSGAFNAKGESDRQSGLAKGATANSAPPDPRARTRAKTRKTANSAPPDPRARTRAKTRKTANSAPPDPRTRTRAKTRKTANSAPPDPRARTRG

SEQ ID NO: 62355 - protein, 321 aa, Zea mays
  Coding DNA Sequence Number=SeqID_20576
  Gene Ontology: Mol. function=protein binding
  Homolog annotation: Hit_ID=Q10KR0; Match level="QueryCoverage=99%, HitCoverage=77%, E-value=3e-64, Identity=42%"; Hit description =Expressed protein
  Pfam annotation: Domain name=SNARE_assoc; Domain location=68-235; Score=54.9; E_value=2.6e-13; Accession=PF09335.1; Description=SNARE associated Golgi protein
MSSVPWARLVFGLLLLVLLGFAFFKWGLPFLSEKVIMPIIEWEAKSFGLPVLAVVIVVSLAVFPVVLLPSGPPMWLTGIVFGYGFGFLIIMVGVTIGMSIPYWIGLLFRDRLNVMSLSFHLIMSATIRCISLAAGWLVPMPWFLVLLPFFSHLFVDAQLWLEKKWPRQIALIKLVGQGSWFQQFRVAALLRISPFPYALFNYAVTVTEMKFVPYIWGSVIGMVPDVFINIYSGRLIRTLAELNYRKHRMTAVEIAYNAISVIVTVVFAIVFTVYARRALDNMEQSEVACAEPVVGDPAGSTESRDHLQGCSTARSVPIDVV

SEQ ID NO: 62356 - protein, 156 aa, Zea mays
  Coding DNA Sequence Number=SeqID_20577
  Subcellular localization annotation: CTP_CleavageSite=56; ConfidenceScore=5.02e-01
MGLLEVLTARDRLLPRSACRYQRLRGGELGGSSPSTGASVRARRPLRLRLRRRACKAGGRWGATTTTANGGGKRLRLRLVRLLLLLPARRVAALVAEVVRRLLAAAVAAADCPAIVFSSQWGLPVLSPHCGSSSRSSRPRGFYLDRSLSGAGSGVL

SEQ ID NO: 62357 - protein, 205 aa, Zea mays
  Coding DNA Sequence Number=SeqID_20578
MGNQGPWFNELTQNGIRCSGPSDQRWEAKIGRLIVPTSQGAASLMPAIAQSPEARWAGDLGVLGLSGQARAIEENPMNTVVELRFARTGPRFICAKWLRSANQESRDTTKKSGNELEKFWPSLAKPALACGAPDSVRCPGWPGDELVALGKKTVALRLKFNGLSGVHRTVRVRGSNLWRFLTNGKTSLKKKIVVFKWIVGSLERG

SEQ ID NO: 62358 - protein, 46 aa, Zea mays
  Coding DNA Sequence Number=SeqID_20579
MAMMGSTSKKMYLSQVKKQQTFVAFVPRWYRKKRIKIKAAGGKALS

SEQ ID NO: 62359 - protein, 105 aa, Zea mays
  Coding DNA Sequence Number=SeqID_20580
MHDLIGNLIGRVVEAYIDNILVKTRKSEGLVFDLGLTFESFVCEINAGHRRSKTKQKQTKPPFGMPLPKEPSETKVFCPVKISNSFNSFGRDRKTYDRIVVNYGV

SEQ ID NO: 62360 - protein, 118 aa, Zea mays
  Coding DNA Sequence Number=SeqID_20581
MAQNVFGEDQPAGRSHTLASPSSSSEHDTRFFLSPVGHGHRDERRGVGAAGGDGLGDGQLAGGHRGSPIKKADRTSAHGWADVGSCKPATNVVPVPTATARPFRGVFGDRGVVHDVGR

SEQ ID NO: 62361 - protein, 40 aa, Zea mays
  Coding DNA Sequence Number=SeqID_20582
MDDETPMLARRWLVVRACEETVQPGAAETLVHVALAALLG

SEQ ID NO: 62362 - protein, 147 aa, Zea mays
  Coding DNA Sequence Number=SeqID_20583
  Subcellular localization annotation: CTP_CleavageSite=54; ConfidenceScore=5.42e-01
MVWRLAWQIWMAYWVFLSVQGGPVAQSPAGRRIKTSSTRPAVRSGTRGGGTAVSASTPTSSGVRGAGLHGDHCDERRATCHPQRLRRRRPARHNAAADYAYGTRRDLDSTVTIGLMFVLQPTPDILRAAFLSPSRLAQAARTPRGHN

SEQ ID NO: 62363 - protein, 106 aa, Zea mays
  Coding DNA Sequence Number=SeqID_20584
  Homolog annotation: Hit_ID=Q0Q421; Match level="QueryCoverage=50%, HitCoverage=6%, E-value=1e-16, Identity=81%"; Hit description=Class III HD-Zip protein HDZ31
MWIEFFHLIQLQLREFSYTFYLSTSNYLQYMLLKIVVTAWRGQHPAVLRTFSQRLSRGFNDAVNGFPDDGWSLMSSDGVEVVTIAINSTSGATGLPSQDIYCAYSW

SEQ ID NO: 62364 - protein, 1356 aa, Zea mays
  Coding DNA Sequence Number=SeqID_20585
  Gene Ontology: Mol. function=peptidase activity; Cellular component =cell surface
  Homolog annotation: Hit_ID=Q03I02; Match level="QueryCoverage=64%, HitCoverage=36%, E-value=1e-10, Identity=17%"; Hit description =Subtilisin-like serine protease
MEHLFMQAFESRDRVAAQVQQQADFYSQTLASSLLAAGHQPPEWLIPSTTLPQELNGKPIVLTGRQITTPAINRTVFLPLAIPSTLSTKSGDPNGYDGYPNTNCTAMGTNQHEEEHQEQSSLAQELTESCTADKMFSRIQRSRTRQMHIEDRVHGQDQAAKSGSCDGMHRSNLKTVGSNRAAASSLMPCDDVPNLAATTSDPGQGSGFCAIQGKSIDFLKCNNNPEDQGVKLDGFPPLIVENKIICSDSDIGVSNNCSIRDSLGAPLPDFSKPNTADSVCLCHRIPETHLLVEPKILQFDVAESVCMNPSSEQTGQQQESSLKSNHLDLAFTNPSSEDPSSTSSQGPHSMGRLLLNHVKSRNLNPDSEPVEQHHKYTSECGHPDLTSMHSPNKKPSLTCPVEAPNSMGEPLLHKDTEHIPETNSLGRAYSKFSQPLKIDTSNSNETNCSVVNSLLDNDTLQATEDTDKLKSHVSPPYSGPLQLPTQLADARFGAHTSPGILPNSLLGVDGCNHLSNLQKNDTNSRCSRYRSAVSLELLPPQNFISTDACQSRLLSYRTQSNDKHSSSVASAMNASKSADSKLPQEQYLLVRPSLEFNGSISDAETPLGRSPLGMQNEMLQADPVYDSANCSPGILGDDAHVSKAYGGSADNRKNISVVPKVGPISSSRIRDMQITEKNVVASSEKNNGKLQEGKAQETPHPKDDVQVNADSCTAENIEKMKSPCTSESCEENNKHQEDRGHAQKKSAADVVQINGGMSSKRKRMKCQDIAFPSSQDTNPLFPNHQDGIGTHVVIAEKISMEIQPSDPYILRSTGFDDFMLLKSETKNDAVNHSISVASDVQQNESSSPKLRNRFSLAEVALCNSSRAKALSPNFSCDISSRNVAEEMDLQNYQAQLQNTFDVATSSIMPSRSDISLDSVELCSQEENTYLKGEGLSVSNSNVEHSRMAPQMDEILSQSVILNPANYLSTDSTNIFLNYALDQHGKHAPSPVKKLSYGSGVEADRKFRSEDLTGCLLYDGTTSRKKDSDSVKFNDAMPQFESFDFSLPLDSSTTEEKAFGSVHDSIQFGTFNSDPANKHEMSAVSGMYQLLATMSGKATNCLFNDDERQPGESIDGSVTDIFGSSGLGHKGSFITPDFAASCSSNAANKKDNGENPLTPSVEKYCLGKLSEKNGSVSEHMGSIPELLCFRIDEDNDIAEGNDYREILPRSIGNQEQSGRKALQDITGLCQSIGNSASYSIGMSMDTGDTDMTVETCSSELNHHPDLRNDGDNKKPKESCGSLLKKGGKMSRSLHNRLSKTETRHMNEANPGKRSKPSNIVANVASFIPLVKPKVQPTACGKSHLFTSTLSYSLYPNI

SEQ ID NO: 62365 - protein, 196 aa, Zea mays
  Coding DNA Sequence Number=SeqID_20586
MGWICLLDQIQRPRLDRVSNERVCNCDPWILDQQLRTAHAKITPGPLDPHPTGVTRPMKGVFPAFNHRHPSRDERLPSYPQYSAKHQGGATTPNGGGITGDGHTDVQCDGKALGDAMRTGSGTNSDERLRPPQTDYLRAKKGKATPWLRFYVRARQQPDPPGFAATATTYAEIPGWPMHTNGRGADDRADGRLCAS

SEQ ID NO: 62366 - protein, 65 aa, Zea mays
  Coding DNA Sequence Number=SeqID_20587
MANVEYGLERINAERINSRTLLWLIGYSSALLSYHLVSKFLMKILLWFLSNSLFENYELKLSFDS

SEQ ID NO: 62367 - protein, 113 aa, Zea mays
  Coding DNA Sequence Number=SeqID_20588
MGYREATTHIQFSFYRPAPEDPVLVPDPVLDIRAEDEAFRQFETQGAIADSSSDDAEDPGILPPPLVPPRSHDHEVGSSSAAPTAPTAIDPALAAILQSLSQQQAHLAAEQAQ

SEQ ID NO: 62368 - protein, 83 aa, Zea mays
  Coding DNA Sequence Number=SeqID_20589
  Subcellular localization annotation: CTP_CleavageSite=34; ConfidenceScore=5.05e-01
MGRPSISPIGTAAYGAKIVHESSRGRRPWALRLCGSTFKTFMVFGLEYAGVGSLSEGDVFAFVPTFFPPRDQFDQVSWCRRLP

SEQ ID NO: 62369 - protein, 261 aa, Zea mays
  Coding DNA Sequence Number=SeqID_20590
MVVEAELGEKGDDMGSASMAGIGIVLRAERIIGSQPRLCARTRVHGSGVRDLLAVEGAQRWRNSPRRWECRAPRTGGRGAETVQGTGHAGTRGRRSSWKMASHGGPVGLAEISPTTGKSATNAAMVEASSDPWRLLQAGCLEKRAHHGHQDEIRQRGKLLELGRRLARHGERERSQLLARCASEAAMGEEAPARWGRRALRLVTSAESWASSGGMEQRMEMAPWLLLFTGDDRVRHWWLGRLLLVGWYQALAKSLVAGWLI

SEQ ID NO: 62370 - protein, 148 aa, Zea mays
  Coding DNA Sequence Number=SeqID_20591
MELRGAGAEGRGGAMDELGAQTCLLADAGGSSRAWGRERAWGSSGLARHGEREGSQLLARCAREAAMGEEAPARWGRRALRLVTSAESWASSGRMEQRMEMAPWLLLFTGDDRVRHWWLGRLLLVGWYQALAKSLNLVASHWPGAGMR

SEQ ID NO: 62371 - protein, 1463 aa, Zea mays
  Coding DNA Sequence Number=SeqID_20592
  Gene Ontology: Mol. function=nucleoside-triphosphatase activity; Cellular component=integral to membrane; Biological process =proteolysis
  Homolog annotation: Hit_ID=Q8GU89; Match level="QueryCoverage=99%, HitCoverage=100%, E-value=0.0, Identity=83%"; Hit description =Pleiotropic drug resistance protein 4
  Pfam annotation: Domain name=ABC2_membrane; Domain location=1188 -1402; Score=252.6; E_value=8e-73; Accession=PF01061.14; Description =ABC-2 type transporter
  Pfam annotation: Domain name=ABC2_membrane; Domain location=506-718; Score=192.4; E_value=1e-54; Accession=PF01061.14; Description=ABC-2 type transporter
  Pfam annotation: Domain name=ABC_tran; Domain location=181-404; Score= 70.9; E_value=4.1e-18; Accession=PF00005.17; Description=ABC transporter
  Pfam annotation: Domain name=ABC_tran; Domain location=887-1074; Score=93.2; E_value=7.6e-25; Accession=PF00005.17; Description=ABC transporter
  Pfam annotation: Domain name=DUF258; Domain location=59-271; Score= -159.6; E_value=0.0033; Accession=PF03193.7; Description=Protein of unknown function, DUF258
  Pfam annotation: Domain name=PDR_assoc; Domain location=723-785; Score=112.9; E_value=9.3e-31; Accession=PF08370.2; Description=Plant PDR ABC transporter associated
  Pfam module annotation: Pfam domain module=ABC2_membrane::ABC2 _membrane::ABC_tran::ABC_tran::DUF258::PDR_assoc; Domain location =1188-1402::506-718::181-404::887-1074::59-271::723-785
MDREIHRVTSLRRDSSLWRRGDDVFSRQSSRFQDEEEDDEEALRWAALERLPTYDRVRRGILALHDAGGEKVEVDVGRLGARESRALVERLVRAADDDHERFLLKLKERMDRVGIDYPTIEVRYENLHVEAQVHVGDRGLPTLINSVTNTIESIGNALHVLPSRKQPMTVLHDVSGIVKPRRMTLLLGPPGSGKTTLLLALAGKLDKDLRVSGKVTYNGHGMNEFVPERTAAYISQHDLHIGEMTVRETLAFSARCQGVGTRYEMLTELSRREKAANIKPDHDIDIYMKASAMGGQESSIVTDYILKILGLEVCADTVVGNEMMRGISGGQRKRVTTGEMLVGPARALFMDEISTGLDSSTTYQIVNSLRQTIHILGGTAVISLLQPAPETYNLFDDIILLSDGHVVYQGPREHVLEFFEFMGFRCPARKGVADFLQEVTSRKDQGQYWCRQDRPYRFVPVKKFADAFSTFHVGRSIQNELSEPFDRTRSHPAALATSKFGASRMELLKATIDRELLLMKRNAFMYIFKAVNLTVMSFIVMTTFFRTNMKRDASYGSIYMGALFFALDTIMFNGFAELAMTVMKLPVFFKQRDLLFFPAWAYTIPSWILQIPITFLEVGVYVFTTYYVIGFDPSVIRFFKQYLLLLALNQMSSALFRFIAGIGRDMVVSHTFGPLALLAFQTLGGFILARPDVKKWWIWGYWISPLSYAQNAISTNEFLGHSWSKIENGTTVGIRVLRSRGVFTEAKWYWIGLGALVGYALLFNLLYTVALAVLSPFTDSHGSMSEEELKEKHANLTGEVAEGHKEKKSRRQELELSHSHSVGQNLVHSSEDSSQNRKGMALPFPPLSLTFNDIRYSVDMPEAMKAQGVAEDRLLLLKGVSGSFRPGVLTALMGVSGAGKTTLMDVLAGRKTGGYIEGDITISGYPKKQETFARISGYCEQNDIHSPHVTVYESLLFSAWLRLPSDVNLETRKMFIEEVMDLVELTSLRGALVGLPGVSGLSTEQRKRLTIAVELVANPSIVFMDEPTSGLDARAAAIVMRTVRNTVNTGRTVVCTIHQPSIDIFEAFDEVTDSSCYDVAREDHLFLMKRGGEEIYVGPVGQNSSRLIEYFEGIEGISNIKDGYNPATWMLEVTSSSQEEILGVDFSEIYRRSELYQRNKALIEELSAPPPGSSDLNFATQYSRSFFTQCLACLWKQKKSYWRNPSYTAVRLLFTIVIALMFGTMFWDLGRKTKKQQDLFNAMGSMYAAVIYIGVQNSGSVQPVVVVERTVFYRERAAGMYSAFPYAFGQVAIEFPYISVQTLIYGVLVYSMIGFEWTAAKFLWYLFFMYFTLLYFTFYGMMAVGLTPNESIAAIISSAFYNVWNLFSGYLIPRPKMPVWWRWYSWACPVAWTLYGLVASQFGDITEPLEDSVTGQSVAQFITDYFGFHHDFLWVVAVVHVGLAVFFAFLFSFAIMKFNFQKR

SEQ ID NO: 62372 - protein, 1388 aa, Zea mays
  Coding DNA Sequence Number=SeqID_20593
  Gene Ontology: Mol. function=nucleoside-triphosphatase activity; Cellular component=integral to membrane; Biological process=transport
  Homolog annotation: Hit_ID=Q8GU90; Match level="QueryCoverage=99%, HitCoverage=100%, E-value=0.0, Identity=76%"; Hit description =Pleiotropic drug resistance protein 3
  Pfam annotation: Domain name=ABC2_membrane; Domain location=1116 -1330; Score=238.9; E_value=1.1e-68; Accession=PF01061.14; Description=ABC-2 type transporter
  Pfam annotation: Domain name=ABC2_membrane; Domain location=466-667; Score=157.2; E_value=4.2e-44; Accession=PF01061.14; Description=ABC -2 type transporter
  Pfam annotation: Domain name=ABC_tran; Domain location=185-364; Score= 50.7; E_value=5e-12; Accession=PF00005.17; Description=ABC transporter
  Pfam annotation: Domain name=ABC_tran; Domain location=829-1019; Score=109.7; E_value=8.4e-30; Accession=PF00005.17; Description=ABC transporter
  Pfam annotation: Domain name=PDR_assoc; Domain location=672-738; Score=156.9; E_value=5.4e-44; Accession=PF08370.2; Description=Plant PDR ABC transporter associated
  Pfam module annotation: Pfam domain module=ABC2_membrane::ABC2 _membrane::ABC_tran::ABC_tran::PDR_assoc; Domain location=1116 -1330::466-667::185-364::829-1019::672-738
MDAAGDIQKVASMRRGDSGSMWRRGDDVFSRSSREEDDEEALRWAALEKLPTYDRIRRAIVPLGLGDEAPGSKGLVDVDVLSLGPRERRALLERLVRVADEDNERFLLKLKDRIDRVGIDMPTIEVRFQNLEAEAEVRVGSSGLPTVLNSVVNTVEEAANALHILPSRKQIMPILHDVSGIIKPRRLTLLLGPPGSGKTTLLLALAGRLDKDLKFSGKVTYNGHEMTEFVPERTAAYISQHDLHIGEMTAAALGGQDANVVTDYILKILGLDICADTMVGDEMLRGISGGQRKRVTTGEMLVGPARALFMDEISTGLDSSTTFQIVNSLRQSIHILGGTAVISLLQPAPETYNLFDDIILLSDGQVVYQGPREEVVEFFESVGFRCPERKGVADFLQEVTSKKDQKQYWARPDEPYRFVSVKELATAFKSSHTGRALANELAVPFDKSKSHPAALTTTRYGVSGKELLKANIDREILLMKRNSFVYMFRTFQLMVMSIIAMTLFFRTKMKHDTVNDGGIYMGALFFGVLMIMFNGLSELALTVFKLPVFFKQRDLLFFPAWSYTIPAWILKVPITFIEVGVIVAPRFFKQYLLLLAVNQMTAALFRFVGGVSRNMIVANVFASFMLLVVMVLGGFILQRDKVKKWWIWGYWISPMMYAQNAISVNEMLGHSWDKILNSTASNETLGVQVLKSRGVFPEAKWYWIGFGAMVGFTILFNALFTLALTYLKPYGNSRPSVSKEELKEKHANIKGEVVDGNHLVSVNPVTDSAIMEDDSASTKKGMILPFVPLSVTFDNIKYSVDMPQEMKGQGVQEDRLELLKSISGSFRPGVLTALMGVSGAGKTTLMDVLAGRKTGGYIEGDIRISGYPKKQETFARVSGYCEQNDIHSPQVTVYESLLFSAWLRLPKDVDSNKRKIFIEEVMELVELKPLRNALVGLPGVNGLSTEQRKRLTIAVELVANPSIIFMDEPTSGLDARAAAIVMRTVRNTVDTGRTVVCTIHQPSIDIFEAFDELFLMKRGGEEIYAGPLGHNSSELIKYFEEIQGVSKIKDGYNPATWMLEVTTISQEQILGVDFSDIYKKSELYQRNKALIKELSQPAPGSTDLHFSSKYAQSFNTQCVACLWKQNLSYWRNPPYNTVRFFFTGIIALLLGTIFWDLGSKVYTSQDLLNAMGSMYSAVLFIGVMNCTSVQPVVAVERTVFYRERAAGMYSAFPYAFGQVVIELPYALAQDILYAVIVYSMIGFEWTVAKFFWYLFFGYFTLLYFTFYGMMTVGLTPNYHIAAIVSAAFYAIWNLFSGFVIPRPKVPIWWRWYCWICPVAWTLYGLVVSQYGDIMTEMDDKRTVKVFVEDYFDFKHSWLGWVAAVVVAFGVLFATLFAFAIMKLNFQKR

SEQ ID NO: 62373 - protein, 291 aa, Zea mays
  Coding DNA Sequence Number=SeqID_20594
  Pfam annotation: Domain name=Ribosomal_L30_N; Domain location=114 -183; Score=-13.3; E_value=0.078; Accession=PF08079.2; Description =Ribosomal L30 N-terminal domain
MTNDVRWNFYRQVPIYDRPQDLSHLLDLKKAGATDFVLENAERKEGEKNSIVTLCFFFHSQDEKAGMTATGSRKLPLLQPPKYKQCPVAIETVGAHQMRETARFIVTTKKRAFSNLKRPRQLAQWRTQKLAKTRTESEAERINQESEAERGATYIQYAGCRDWAEARRRGAQIPIARRARLAGGRRLGGRGLGVWAAGWAAAALAAGRALGLGGPWTRTGQADSGRDGATAVSGAARGGRAVARGAAAQWGAGATGGWGQGAARDGRAGRRAAAMGLGPPLIGLVEIEFDL

SEQ ID NO: 62374 - protein, 203 aa, Zea mays
  Coding DNA Sequence Number=SeqID_20595
  Subcellular localization annotation: CTP_CleavageSite=54; ConfidenceScore=5.28e-01
MHDSRAAVGDVNEARSGGDSRYRSVSTSTTCRQRVFMLNTSSVSVAALMLKARRATHVVGEDDADADADAAAAPARAVIVAAAEPNGPPLCRRATRHCPSATRRTTDRRGAVPSAVRLSRPRPGSAEAERSPSGQRGSGPAGSPDAQSASTEPAPASQPRAPSNWDLGASPPRLSPVPAACILPRLAARDGVENFMRRTDALK

SEQ ID NO: 62375 - protein, 944 aa, Zea mays
  Coding DNA Sequence Number=SeqID_20596
  Gene Ontology: Mol. function=protein serine/threonine kinase activity; Cellular component=integral to membrane; Biological process=protein amino acid phosphorylation
  Homolog annotation: Hit_ID=Q8GVW0; Match level="QueryCoverage=97%, HitCoverage=98%, E-value=0.0, Identity=62%"; Hit description =Putative leucine-rich receptor-like protein kinase
  Pfam annotation: Domain name=LRRNT_2; Domain location=25-66; Score =34.1; E_value=4.8e-07; Accession=PF08263.3; Description=Leucine rich repeat N-terminal domain
  Pfam annotation: Domain name=LRR_1; Domain location=123-146; Score =11.2; E_value=2.3; Accession=PF00560.23; Description=Leucine Rich Repeat
  Pfam annotation: Domain name=LRR_1; Domain location=148-169; Score =5.4; E_value=28; Accession=PF00560.23; Description=Leucine Rich Repeat
  Pfam annotation: Domain name=LRR_1; Domain location=172-195; Score =4.2; E_value=46; Accession=PF00560.23; Description=Leucine Rich Repeat
  Pfam annotation: Domain name=LRR_1; Domain location=197-219; Score =9.6; E_value=4.6; Accession=PF00560.23; Description=Leucine Rich Repeat
  Pfam annotation: Domain name=LRR_1; Domain location=221-243; Score =15.5; E_value=0.19; Accession=PF00560.23; Description=Leucine Rich Repeat
  Pfam annotation: Domain name=LRR_1; Domain location=245-267; Score =8.7; E_value=6.7; Accession=PF00560.23; Description=Leucine Rich Repeat
  Pfam annotation: Domain name=LRR_1; Domain location=269-292; Score =7.1; E_value=13; Accession=PF00560.23; Description=Leucine Rich Repeat
  Pfam annotation: Domain name=LRR_1; Domain location=335-357; Score =6.1; E_value=20; Accession=PF00560.23; Description=Leucine Rich Repeat
  Pfam annotation: Domain name=LRR_1; Domain location=359-381; Score =10.1; E_value=3.7; Accession=PF00560.23; Description=Leucine Rich Repeat
  Pfam annotation: Domain name=LRR_1; Domain location=383-405; Score =4.9; E_value=35; Accession=PF00560.23; Description=Leucine Rich Repeat
  Pfam annotation: Domain name=LRR_1; Domain location=407-429; Score =10.8; E_value=2.7; Accession=PF00560.23; Description=Leucine Rich Repeat
  Pfam annotation: Domain name=LRR_1; Domain location=431-453; Score =5.0; E_value=34; Accession=PF00560.23; Description=Leucine Rich Repeat
  Pfam annotation: Domain name=LRR_1; Domain location=455-477; Score =8.2; E_value=8.3; Accession=PF00560.23; Description=Leucine Rich Repeat
  Pfam annotation: Domain name=LRR_1; Domain location=479-501; Score =19.2; E_value=0.015; Accession=PF00560.23; Description=Leucine Rich Repeat
  Pfam annotation: Domain name=LRR_1; Domain location=503-525; Score =15.0; E_value=0.27; Accession=PF00560.23; Description=Leucine Rich Repeat
  Pfam annotation: Domain name=LRR_1; Domain location=526-548; Score =12.4; E_value=1.4; Accession=PF00560.23; Description=Leucine Rich Repeat
  Pfam annotation: Domain name=LRR_1; Domain location=75-97; Score=2.9; E_value=81; Accession=PF00560.23; Description=Leucine Rich Repeat
  Pfam annotation: Domain name=LRR_1; Domain location=99-121; Score =13.5; E_value=0.78; Accession=PF00560.23; Description=Leucine Rich Repeat
  Pfam annotation: Domain name=Pkinase; Domain location=646-932; Score =109.3; E_value=1.1e-29; Accession=PF00069.15; Description=Protein kinase domain
  Pfam annotation: Domain name=Pkinase_Tyr; Domain location=646-920; Score=68.8; E_value=1.8e-17; Accession=PF07714.7; Description =Protein tyrosine kinase
  Pfam module annotation: Pfam domain module=LRRNT_2::LRR_1::LRR_1::LRR_ 1::LRR_1::LRR_1::LRR_1::LRR_1::LRR_1::LRR_1::LRR_1::LRR_1::LRR_1: LRR_ 1::LRR_1::LRR_1::LRR_1::LRR_1::LRR_1::Pkinase::Pkinase_Tyr;
  Pfam module annotation: Domain location=25-66::123-146::148-169::172 -195::197-219::221-243::245-267::269-292::335-357::359-381::383 -405::407-429::431-453::455-477::479-501::503-525::526-548::75-97
MTPLLLLRLLCLVPLVTAACAEAKLPADFTTLLAAKFSLADPGSALDAWDSRLSPSPCRWPHILCSNRSVSDAPAVASLLLSNLSLAGAFPSSLCSLRSLVHLDLSFNSLTGPLLPCLAALPSLTHLDLAGNEFSGQVPGAYGAGFPYLATLSLAGNNLYGAFPGFLFNITTLHELLLAYNPFAPSPLPEDVSGPTQLSQLWLAGCGLIGEIPPSIGSLSSLVNLDLSTNNLTGEIPSSIRRMDNVMQIELYSNRLTGSVPEGLGALKKLRFFDASMNRLSGEIPADVFPRSEAGEPAPIPERTVRPHASDVGTGASVGRPQAVSRTPALCNAGKLEQLLILNNELIGPIPAELGQCRTLTRVRLPNNRLSGPVPQGLWSLPHLYLLELAGNMLSGTVDPTIAMAKNLSQLLISDNLFTGALPAQIGTLPALFELSAANNMFSGMLPASLADVSTLGRLDLRNNSLSGNLPQGVRRWQKLTQLDLAHNHLTGTIPPELGELPVLNSLDLSNNELTGDVPVQLENLKLSLFNLSNNRLSGILPPLFSGSMYRDSFVGNPALCRGTCPSGRQSRTGRRGLVGPVATILTVASAILLLGVACFFYTYHRSHNGGHPAEPGGGDGGGKPRWVMTSFHKVGFDEDDIVGCLDEDNVVGMGAAGKVYKAVLRRGGEDVAVAVKKLWSGGGKATGSTAKESFDVEVATLGKIRHKDIVKLWCCFHSGDCRLLVYEYMANGSLGDLLHGGKGCLLDWPARHRIMVDAAEGLAYLHHDCGPPIVHRDVKSNNILLDAQLGAKVADFGVARVIGDGPAAVTAIAGSCGYIAPEYSYTLRVTEKSDVYSFGVVMLELVTGKKPVGAELGDKDLVRWVHAGIEKDGVDSVLDPRLAGESSRDDMVRALHVALLCTSSLPINRPSMRIVVKLLLEAAPRARPLESKPKAAEEEPLDV

SEQ ID NO: 62376 - protein, 161 aa, Zea mays
  Coding DNA Sequence Number=SeqID_20597
  Gene Ontology: Mol. function=heat shock protein binding; Cellular component=nucleus; Biological process=protein folding
  Homolog annotation: Hit_ID=Q6ZDI1; Match level="QueryCoverage=78%, HitCoverage=37%, E-value=4e-42, Identity=85%"; Hit description =Putative DnaJ, heat shock protein hsp40
  Pfam annotation: Domain name=DnaJ_C; Domain location=11-150; Score= -29.9; E_value=0.00049; Accession=PF01556.9; Description=DnaJ C terminal region
IEVKPGWKKGTKITFAGKGNQQWNQLPADLVFVVDEKPHPVYRRDGNDLLAEVRVTLAQALGGTVVVLTALDGRELAVDVGGGGEDEDDEDDAPVVCPRLRAGAAWRRHAHRARARAPRQLKDPSIHSFDTHLLPVRLSVIEYELFRVVQGSLYAILPNFE

SEQ ID NO: 62377 - protein, 104 aa, Zea mays
  Coding DNA Sequence Number=SeqID_20598
MAPKKATFKATTSLDDTAKATLTEKKGKAAPVGEVPQEAPENDGAVNNKRPHTENPPILEGIVRKSSSEGLPRNPLPGFTPRKAHDIIEDGVVLGISAEDQLKL

SEQ ID NO: 62378 - protein, 143 aa, Zea mays
  Coding DNA Sequence Number=SeqID_20599
  Homolog annotation: Hit_ID=Q43247; Match level="QueryCoverage=23%, HitCoverage=10%, E-value=3e-07, Identity=79%"; Hit description =Glyceraldehyde-3-phosphate dehydrogenase, cytosolic 3
MRGWGSLRHSTPRSASWGGLGLQRHGHDATGFGKIRRLVAKVALQSDDDELVAMNDPLISTNYMYSKQVAPTMFFWATIFDWTAIGDRSVHPNSSVMVKQSFLHVGKAGRVFSTQFYANSGVHVTFADMDLGGYVFSTLGKSY

SEQ ID NO: 62379 - protein, 76 aa, Zea mays
  Coding DNA Sequence Number=SeqID_20600
MAWSSSVISNEQRVRRKELRAWWNGGERSPRTSRREQQHVQGLRMERNQRRRSGTSGEGVTKSTPLKNLVLEIKEG

SEQ ID NO: 62380 - protein, 124 aa, Zea mays
  Coding DNA Sequence Number=SeqID_20601
MAWLSSAISNEQRVRHKELRAWLNDGPCISVSLLRQVHDGERRSARHPASLNRPEYTTTDALTRLTPISTPGDSNLTLNCTNLARSLSAHDNGETRGEIKVFLVIQGGLAQSNGSTSNRRLKGG

SEQ ID NO: 62381 - protein, 175 aa, Zea mays
  Coding DNA Sequence Number=SeqID_20602
MAQSDVVKPPKAWRDQGNDGSHDDDHAAMSPGKWVRGWLPVSSTVKIFSPRVVIRAPMGMNRIADANLGAKGSTQTNKKIKVKGSKERSKRNRREPWSGAPDSVWCTKGDRLKLFTFGFLESRSAIIHRTVRCATGATTIERNGQLQRSTANENSALTVSRRVRTAPEGAPDSER

SEQ ID NO: 62382 - protein, 114 aa, Zea mays
  Coding DNA Sequence Number=SeqID_20603
MSGGSAKKEMETDTSRGKAPSMESGAQGREDSPPRVKSHLSGDKMKKMKKVVYYETDSSSPSTSGSNAPSVTSRRHECKKFSKPPVFDGEDYCMWSDKMMHLLGAFVFRRSSKT

SEQ ID NO: 62383 - protein, 240 aa, Zea mays
  Coding DNA Sequence Number=SeqID_20604
  Gene Ontology: Mol. function=motor activity; Cellular component =myosin complex; Biological process=cell adhesion
  Homolog annotation: Hit_ID=Q6L5H7; Match level="QueryCoverage=73%, HitCoverage=33%, E-value=8e-27, Identity=34%"; Hit description =Putative myosin heavy chain
MAALETSLRSERQQNDAIMKQLAESQGEIGELQRKLEDADARNGLLQDSLQRHEENMAALETSLRSERQQNDAIMKQLAESQGEIGELQRKLEDADARNGLLQDSLQRHEENMAALETSLRSERQQNDAIMKQLAESQGEIGELQRKLEDADARNGLLQDSLQRFHYYLVPISSVMFQLPCYPSVKITHHVSELIWVNYCPPKAISEPEGTAYPVVFSILSSCPYPYGVKVETPAKFEQK

SEQ ID NO: 62384 - protein, 432 aa, Zea mays
  Coding DNA Sequence Number=SeqID_20605
  Gene Ontology: Mol. function=motor activity; Cellular component =myosin complex; Biological process=signal transduction
  Homolog annotation: Hit_ID=Q6L5H7; Match level="QueryCoverage=99%, HitCoverage=36%, E-value=8e-87, Identity=29%"; Hit description =Putative myosin heavy chain
  Pfam annotation: Domain name=IQ; Domain location=109-129; Score=12.6; E_value=1.4; Accession=PF00612.17; Description=IQ calmodulin-binding motif
  Pfam annotation: Domain name=IQ; Domain location=13-33; Score=15.5; E_ value=0.2; Accession=PF00612.17; Description=IQ calmodulin-binding motif
  Pfam annotation: Domain name=IQ; Domain location=132-152; Score=19.1; E_value=0.016; Accession=PF00612.17; Description=IQ calmodulin -binding motif
  Pfam annotation: Domain name=IQ; Domain location=36-56; Score=10.1; E_ value=3.5; Accession=PF00612.17; Description=IQ calmodulin-binding motif
  Pfam annotation: Domain name=IQ; Domain location=61-81; Score=2.8; E _value=20; Accession=PF00612.17; Description=IQ calmodulin-binding motif
  Pfam annotation: Domain name=IQ; Domain location=84-104; Score=16.0; E_value=0.14; Accession=PF00612.17; Description=IQ calmodulin -binding motif
  Pfam module annotation: Pfam domain module=IQ::IQ::IQ::IQ::IQ::IQ; Domain location=109-129::13-33::132-152::36-56::61-81::84-104
MADLDARRTEMRNNAAKGVQSQFRTHVAREQFLVLRDTSIYLQSFVRARLACKQHEFLRQQAAALRIQKNARWYFAWKTYYQLRLSAITLQAGLRSMAARNEFTFRKKNKASVHIQSQWRCHRDYSNYMNLKRAALTYQCAWRRRVARKELRKLKLAARDTQALKVAKEKLEERVEELTSRLDREKKLRADLEKSKADEVSKLKEALHEMEQRVEEVLLVAEREENDKMKKAHANALETNEELNKEVSDADEKIKQFSDTVRRLEGTVSEHEGLLLTERQQNEAANAALAESQARNEALVSKLEDAVKQNDLLHEADQRFQEATKNLESSLTFEKQRHEANLIELAEAREKIEELQREVGDTDEKFTLLQTSIQSVEERLREKDALLTTERLESEATKKSLNESEDRNQDLLLKIEIAQKDIAHFQETVRRS

SEQ ID NO: 62385 - protein, 95 aa, Zea mays
  Coding DNA Sequence Number=SeqID_20606
MGQVKATLTTTAVAVSESALDICQSNFGFFYHILHIRTAPYTRLDFSRSTNSASEGYTYDYDSSCLRVCFGCVVALVGSVGFRLDTHETNSNVTI

SEQ ID NO: 62386 - protein, 90 aa, Zea mays
  Coding DNA Sequence Number=SeqID_20607
  Gene Ontology: Mol. function=nucleic acid binding; Cellular component= spliceosome; Biological process=nuclear mRNA splicing, via spliceosome
  Homolog annotation: Hit_ID=Q7XDP6; Match level="QueryCoverage=54%, HitCoverage=15%, E-value=2e-12, Identity=63%"; Hit description =Splicing factor 3B subunit 4, putative, expressed
MALQIMRDSKTGNSIVHESFELSDQAVKAMNNQHFCNHPIIVSYAYKKGTKGDTMAHQQVEIHLGQPHQIRIHLAYNGHPLVVKPIAHST

SEQ ID NO: 62387 - protein, 83 aa, Zea mays
  Coding DNA Sequence Number=SeqID_20608
MDPISLLVKKTLGENPEIMEIRMERRGRSSIWALARLRELKKIVPDAQDAADVDVLLRRTADYICALELKLTVLRRVSAIYGV

SEQ ID NO: 62388 - protein, 107 aa, Zea mays
  Coding DNA Sequence Number=SeqID_20609
MGADEPAQPRTPRARDAEIEKRTAGLQEHGSLKGEFSSLVTMRHGLTGRLRKPPLLGIAVPMHKEERARRGSEWHRARGRGKANSSGNAKSERERGEVATRERRGSG

SEQ ID NO: 62389 - protein, 552 aa, Zea mays
  Coding DNA Sequence Number=SeqID_20610
  Gene Ontology: Mol. function=transferase activity; Cellular component= membrane; Biological process=protein metabolic process
  Homolog annotation: Hit_ID=Q9M3I0; Match level="QueryCoverage=99%, HitCoverage=94%, E-value=0.0, Identity=69%"; Hit description =Putative glucosyltransferase
  Pfam annotation: Domain name=Glycos_transf_2; Domain location=89-265; Score=6.1; E_value=0.00044; Accession=PF00535.16; Description =Glycosyl transferase
MPEFHVPEVEDIQGWLHTAYLAWMSFRADYIRRPIEFLSKVCILLFVVQSLDRLVLCIACFWIKLKKIKPRLEGDPFREGSGYLHPMVLVQIPMCNEKEVYEQSISAVCQLDWPRDKFLIQVLDDSSDESIQMLIKAEVSKWNQQGVNIVYRHRVLRTGYKAGNLNSAMSCDYVKNFEFVAIFDADFQPSTDFLKKTIPHFDGNPELGLVQARWSFVNKDENLLTRLQNINLCFHFEVEQQVNGVFLNFFGFNGTAGVWRIQALEESGGWLERTTVEDMDIAVRAHLNGWKFIFLNDVKVLCEVPESYEAYRKQQHRWHSGPMHLFRLCFPDIITAKISSWKKANLILLFFLLRKLILPFYSFTLFCVILPLTMFVPEAELPVWVICYVPICMSFLNILPSPRSFPFIVPYLLFENTMSVTKFNAMVSGLFKLGSSYEWVVTKKSGRSSELDLLTSEEKNRKCTTLPQLQNQLPENSELVEINVRKEQREKVPNDAKRGNKIYKKELALSLLLLTAATRSLLSAQGIHFYFLLFQGMSFLAVGLDLIGEQIS

SEQ ID NO: 62390 - protein, 55 aa, Zea mays
  Coding DNA Sequence Number=SeqID_20611
MTLNMEEARRDRDRMTASEDLGFATKVRNGKGISIKHYHYLAIDYMNMSTPLKGF

SEQ ID NO: 62391 - protein, 74 aa, Zea mays
  Coding DNA Sequence Number=SeqID_20612
  Subcellular localization annotation: CTP_CleavageSite=47; ConfidenceScore=5.55e-01
MAAPSFHRSSCAPTASTDTRGLRPQPALLQAPAGKPGTQPALANLCRLSRSRPPSSPSGGGSPAYMQFEDVVIL

SEQ ID NO: 62392 - protein, 202 aa, Zea mays
  Coding DNA Sequence Number=SeqID_20613
  Homolog annotation: Hit_ID=Q6QP51; Match level="QueryCoverage=55%, HitCoverage=48%, E-value=3e-13, Identity=60%"; Hit description =Putative growth-regulating factor 1
MGRHETEHKGGEKQQKGKLAAFVLSCALVGPWGWARQSSSSEVEAESEPWGQARRSPSSEVEAESEPWGRARRSSSSEVEAEYEPWGRVRRSLSSEVEAESEPWGRAIRSPSSGVEAESEPWGRARRSPSSGVDAEFEPWGRARRSFPWRPRLDLAAVSLTLSSGTTIEAGQAALFSCQVGQWSGEVTAVTSALSTEERVSG

SEQ ID NO: 62393 - protein, 132 aa, Zea mays
  Coding DNA Sequence Number=SeqID_20614
MAHLLILFVVSFGELSQHLLLNGPYEVIEGLLVISRSASMGVLIMLVVETLVSKIQHKTNKKNKTRVKRKEQKETEVLPGRAHRTVRCATGQCPVHQGRLPSNSSPSGFSGAAHYNSPDCPVLHRTVSGAPE

SEQ ID NO: 62394 - protein, 123 aa, Zea mays
  Coding DNA Sequence Number=SeqID_20615
MTKRVFSAKSLDPLRRDPVEEESSRGYLVVGAGRFDWIDCGGFNRSYPFIYIMRGGLDPLQVGSRAYPMSFANKPRKKSGTQIDFAHSWKVIGVASLADCKVHRCCGLLSLPDYPAGLQTVRA

SEQ ID NO: 62395 - protein, 383 aa, Zea mays
  Coding DNA Sequence Number=SeqID_20616
  Gene Ontology: Mol. function=transferase activity
  Homolog annotation: Hit_ID=Q6Z0Z4; Match level="QueryCoverage=84%, HitCoverage=65%, E-value=1e-101, Identity=56%"; Hit description =Putative HGA1
  Pfam annotation: Domain name=DUF563; Domain location=1-185; Score =51.6; E_value=1.2e-12; Accession=PF04577.5; Description=Protein of unknown function (DUF563)
MAHVREYTLKALPEPGAGAAPASTRNHTNPGFLFSNGGFSGNMYHDYTDVLVPLFISTHQFRERVSGMKPWWMGKFTPFFRQLTRHDVIDVDNDREVHCFPRIVVGATFHRDMGVDPRRSPGHISVVDLKRALRAAFRLKREAASRGGVPQRRHGARQTAAAHHLPVWLTLVPERAGDGARRGRRRVRGAGGGARPATDMATFVALVNSADSMVGVHGAGLTNMVFLPCGVVLVQVVPFGGLEWLTGVTFKEPASDMEVSYMDYNVRLEESSLVDQYPRGHQVLTDPYAVHRQGWDALKTAYLDKQNIQMDLDRFRATLREAMMCGNGVCCFARFIAEIENLQGTNRSLLNTAVPAVLICWSSLKSEVQMIASKVYHTALVLK

SEQ ID NO: 62396 - protein, 289 aa, Zea mays
  Coding DNA Sequence Number=SeqID_20617
  Homolog annotation: Hit_ID=Q6Z0Z4; Match level="QueryCoverage=35%, HitCoverage=29%, E-value=1e-27, Identity=50%"; Hit description =Putative HGA1
MEATAEALTQEEVLRRCRRRAARLAGVYCRIYWAMAKEVRARHRQYVWHLARSPLEAEQPSAPLEVSSRRRSGSHQSRHWCQRRCARGTGSTSGISPGAHWRQSSRRRLLEVPSRWRSGSRRSRHRCRGGRNAGSQGARCGTRVAGWPFGIAVRAPVNRSALVLPFPSLPTNTSTSPDLGVRAEGGMKSSLRSRQEPRRVSNGVIIGAMLLSLCVLSFVKARYCATPLGKAEDQLEEQMNASIRMQPEESSKKKKGKPACYMTSKRSERCDASDDIRVDGNRSTIYAAG

SEQ ID NO: 62397 - protein, 104 aa, Zea mays
  Coding DNA Sequence Number=SeqID_20618
  Subcellular localization annotation: CTP_CleavageSite=55; ConfidenceScore=5.19e-01
MNPLPMHERCGSFGMATFHPKVTKSRSRGAFSFALRESRLLEKAASWIQPFGWLLAFRGQKPKPKAKPNTPLVQWRRSDFLGNCKKQPTERYHTASSPLGPWRQ

SEQ ID NO: 62398 - protein, 168 aa, Zea mays
  Coding DNA Sequence Number=SeqID_20619
MAARLRTDETRFAEFGHKNHPALRMSCFAEFGHQNSEVAVPVGIGGNTWHHNEGRGGGLARHKQWPGVTDSVLQPKARSSAATAARGTSGDADRLRQHPMTTTSSNLTRLGHPMTAFDSVDFEASSGPVAQGRPPVMTSSIRVYAFHYCVLCLLLTPFMHSIEDFYDG

SEQ ID NO: 62399 - protein, 428 aa, Zea mays
  Coding DNA Sequence Number=SeqID_20620
  Gene Ontology: Mol. function=mismatched DNA binding; Biological process=mismatch repair
  Homolog annotation: Hit_ID=Q6K624; Match level="QueryCoverage=76%, HitCoverage=44%, E-value=5e-76, Identity=48%"; Hit description=BRI1 -KD interacting protein 135
MTEQPKVVKDNESLVASELSPETNDGDKKQLTESGNITADESSKPIDTKPASVKPKRGRPPAAKSQEKKPVGKKQASNLKSPKLDPVTDSVGRATRQLNNDVAKSSSTKAVDGESGKKQHKTSMKFQKEDAASDKDTDDDISLKEMVSPTRIDKSKGQQEDRGTSSKRKRLLEAQDTPVSKKNKMLDKNLIGSRIKVWWPDDKMFYAGVVESFDASSKKHKVSYDDGDVEVLALKKERWEFIAEEQGADPDVASNMPRGRKAKGSSVQQMEGKTGTPQSDVKNSPKKRGRPKGVRSSNNMPNADSSVTPARLKGKSVEKDTEETPKTGSNSKKEGAKPSRSTGKAKDSVVKASSKDEADSTDNSKDAAASEDKDSKDEVKSSEAIDGSKTNGLSTKRKPDENEGESSEEEKASTKTTTRKKRRRKSRN

SEQ ID NO: 62400 - protein, 102 aa, Zea mays
  Coding DNA Sequence Number=SeqID_20621
  Gene Ontology: Mol. function=kinase activity; Cellular component =ornithine carbamoyltransferase complex; Biological process=amino acid metabolic process
  Homolog annotation: Hit_ID=Q6QP54; Match level="QueryCoverage=81%, HitCoverage=26%, E-value=1e-09, Identity=48%"; Hit description =Putative kinase
MAPPVDVAGLRPRLGDVEAPPKLRSSPSSVAEVESEPLVRARRRPSAEFDHFQHLRNEDSREKPRSETLAIHLGSEYGVECEPWGRAERSSSSSGAEPKSEP

SEQ ID NO: 62401 - protein, 130 aa, Zea mays
  Coding DNA Sequence Number=SeqID_20622
  Subcellular localization annotation: CTP_CleavageSite=50; ConfidenceScore=5.15e-01
MAWLVPCSRVLRFSAHARTQTVTMPSTWAHAAAAGPKKSGLRNRLPLCARASTIEARKEAAVSLIRSPCTSHLLCSALAISAPAACTSSPDQSHTAPEPRHTADVDAGEPFSGQPIVSGCVNFVRMSCTR

SEQ ID NO: 62402 - protein, 131 aa, Zea mays
  Coding DNA Sequence Number=SeqID_20623
  Gene Ontology: Mol. function=carboxyl- and carbamoyltransferase activity; Cellular component=ornithine carbamoyltransferase complex; Biological process=amino acid metabolic process
  Homolog annotation: Hit_ID=Q8SA97; Match level="QueryCoverage=87%, HitCoverage=14%, E-value=7e-09, Identity=38%"; Hit description =Ornithine carbamoyltransferase
MRSSSSSEAEPESEPWGRVKQSSSSSGAEPESEPWGRVKHSFLWRLRPDLAAVSLTLSGGTAVGAAARVRIRCQATFALNAPAIRSVGVATWPRLLPGEDWASGELKLCADGGYQLRFRSLEGTPNYGPRQ

SEQ ID NO: 62403 - protein, 156 aa, Zea mays
  Coding DNA Sequence Number=SeqID_20624
MLSSSLGTATRRRASTVAAATAGEARPRHPNAQDKNPRIAIRCVRHGDHSGCLLTVIRAAQSLYIDAWRHGRSPVSNGAHTEAARPNRPPGHGTRVSAALIGRSPSIAQPRKFWSTRDGGHVASSTYGEHQICHNGHKETSRRRLEGQGGLGAPDL

SEQ ID NO: 62404 - protein, 53 aa, Zea mays
  Coding DNA Sequence Number=SeqID_20625
MAGAERGRGPGPVMMGTEFLVVSAVEHYDVSVPPFFPNSCSPGATGASAHRHL

SEQ ID NO: 62405 - protein, 599 aa, Zea mays
  Coding DNA Sequence Number=SeqID_20626
  Homolog annotation: Hit_ID=Q6Z1K3; Match level="QueryCoverage=27%, HitCoverage=34%, E-value=9e-10, Identity=29%"; Hit description=Zinc knuckle domain containing protein-like
  Pfam annotation: Domain name=zf-CCHC; Domain location=168-185; Score =13.3; E_value=0.0064; Accession=PF00098.13; Description=Zinc knuckle
  Pfam annotation: Domain name=zf-CCHC; Domain location=187-204; Score =15.7; E_value=0.0025; Accession=PF00098.13; Description=Zinc knuckle
  Pfam module annotation: Pfam domain module=zf-CCHC::zf-CCHC; Domain location=168-185::187-204
  Subcellular localization annotation: CTP_CleavageSite=67; ConfidenceScore=5.70e-01
MASPHPPPPPPPHHHAPPPAISNPSPPNTIINHSQGLSLTSTPDSATTSSTSRRFSQGDEPFSFQARQGGRSKTQRWSDDSSSGGSSHKFCSFKEALVSGSRRLHSLVTTSSSAPEGVKDKKEKAGVVEQKQLVESLRDELGWQVVERRKKTQRVHLPRRGSLVDLRGRCFNCFSSSHLAAACRRSTRCFRCFDFGHQVSSCPTRPVARTRQCGGLKQEKKVDRIPVWQRLTRMVGDVPLRTDGQGSRPRKSVWKRISPLQEGGMPEYISPSSVQGASVGGHEGLRCKRKRNRSKRGRGEKMTIDHPQQEAPVSVIGAASPDPSLLFGNNSEEFDSTLNSNCVLDYSDDLAREEIALRRALFVSVAGTRPMVLASEVVDEVARQFDIAVKNMSIQRTMPEDFLLLLPDEDAAAMVFNDGKALRGPRFTLLFKKWSRFAHASASSLSKLVDIEIRGIPEHARSRSTAEHILRNSCWITEVHQNSGSERDFASFWVRAWCLSPERLCRKLDLHILEPGDVIHEKRCLTYKIDISCRLVDLHPANSAAPPIPPEPFQESEEDQDQDEQEPHRRHCGDANAAGDPRRSLHLRLGPRPPLGPYA

SEQ ID NO: 62406 - protein, 138 aa, Zea mays
  Coding DNA Sequence Number=SeqID_20627
MLLRQSSDLQGQEIVNTNFGGDTGDAFEAHEWRYVRTFNVFGQGIRIFEDISITNPKVGKVILLKSVGVVSANPDTVFEVVLDLDKHKRYEWDMLTADLELVERIDGYYDVVYGTYEPKYLNWRTAPFYKLKREVTWS

SEQ ID NO: 62407 - protein, 143 aa, Zea mays
  Coding DNA Sequence Number=SeqID_20628
  Subcellular localization annotation: CTP_CleavageSite=40; ConfidenceScore=5.30e-01
MAVWYCKIEQTVGVPTWPVFVDAVSRQFAATASLTTPAVTALAASEPSTAPASTSLAASGISTIIHAGGWLHQLQWQHRQLHRTRMPSHLQLRHCHASSSNPDVFSPGDRGITTFVPASEGPGLILMVIVLEFGDTHKAWGNL

SEQ ID NO: 62408 - protein, 105 aa, Zea mays
  Coding DNA Sequence Number=SeqID_20629
  Subcellular localization annotation: CTP_CleavageSite=67; ConfidenceScore=5.23e-01
IRRRQIPKPPSSPTFSLGTSPHLPHIGSIPIPLDPAAIRRNRVRFASPHPRLTLPTTRAAPAITPPSLALYSGILRSYVKIRDPVRCLSYARVGHKGLQSGIASQ

SEQ ID NO: 62409 - protein, 235 aa, Zea mays
  Coding DNA Sequence Number=SeqID_20630
  Homolog annotation: Hit_ID=P24345; Match level="QueryCoverage=39%, HitCoverage=39%, E-value=7e-13, Identity=59%"; Hit description =Homeotic protein knotted-1
  Subcellular localization annotation: CTP_CleavageSite=83; ConfidenceScore=5.10e-01
MGPQTLPQPGRTLQGEGSPGPSRGFLLGAVANSFRYAGIQPQHVKPTSQGGLGRAKSVQPPTSWRPVRPSRRLVGGGGLLDACAETKEPALLEATSGPLKPKSWKRGSTWRLAAWPLKGSRSSTSSWRRATRPLQEAMKSMRKMEPQLNSLSTSAKLMNILEMEHWQKSATSHEAALLQQQQEERQGRQRQHIGDEEHGLPGGKIVEEDGTSVNPSAERQRAPSKQTAHHVECPL

SEQ ID NO: 62410 - protein, 93 aa, Zea mays
  Coding DNA Sequence Number=SeqID_20631
  Subcellular localization annotation: CTP_CleavageSite=53; ConfidenceScore=5.56e-01
MPWLAHALLLPLARGTPAHPLGPAGALPFPGLGPATRSRPPPAPRVPSRTFARGSAAAARNVPTTAPRTAPSCKFFLLQHLFLYLSPHASRNG

SEQ ID NO: 62411 - protein, 112 aa, Zea mays
  Coding DNA Sequence Number=SeqID_20632
MQAACNRARWTRFSDSRYASMEAQAHASRNRRAGCRIQGPGKGDTPKGILPREGTRLRASLLIRGSKAGPPKGSTAASDRVGPTPTTGQRFEGRPPEGFHGRLRLFGLRAHY

SEQ ID NO: 62412 - protein, 290 aa, Zea mays
  Coding DNA Sequence Number=SeqID_20633
MAFTSMSDHLAVATMGAAAAAELGTRAVGLGATSALGVIGLDVAIAAGLGAAAAGLSMSAAATLGTGVNANAATLGAHLAAADLDGTLATVDLTVVSRAAAAAASAPSSPARPTSSPPSRPSLPTRTGSSPQHAANSPWVAPLTSTALAPSLASLAAQQPRIPRSPPGFPAHHPALAAPAWTDIVASLSAPPPTSYVLVAAIATIQPDPPVAHDAPTVASEAPHASGLDANTIAALHIQSLVSVVLDPGDLSMSEYCHQMKGMADSLRDLSEPVADRTLVLNLLHGLSPY

SEQ ID NO: 62413 - protein, 199 aa, Zea mays
  Coding DNA Sequence Number=SeqID_20634
  Gene Ontology: Mol. function=RNA-directed DNA polymerase activity; Cellular component=integral to membrane; Biological process=RNA -dependent DNA replication
  Homolog annotation: Hit_ID=Q7FS87; Match level="QueryCoverage=79%, HitCoverage=11%, E-value=2e-49, Identity=59%"; Hit description =Putative glycerol 3-phosphate permease
MAPNGFLSSVAFRGELGSRQRLLCRVSFYADCSTLGKQGSFWWRDILKIQESYKELAWVEIGDRKTTLLCHDNWDGMCKSARFPELWSFASIKDITIHQARTATSHEMFHTPLSVEAFEQFHALQDLLANLPQHDQRGKWLCNGSSSLFSSQKAYTHMSGNQWTHMSGNQWTHLIFSWLWKTKCQPKHKVFSSYCLKID

SEQ ID NO: 62414 - protein, 155 aa, Zea mays
  Coding DNA Sequence Number=SeqID_20635
  Gene Ontology: Mol. function=nucleoside-triphosphatase activity; Cellular component=integral to membrane; Biological process=protein catabolic process
  Homolog annotation: Hit_ID=Q5Z974; Match level="QueryCoverage=55%, HitCoverage=13%, E-value=2e-16, Identity=58%"; Hit description=Cell division protease ftsH homolog, chloroplast precursor
  Subcellular localization annotation: CTP_CleavageSite=35; ConfidenceScore=5.34e-01
MPAPHSNRLCSRPTLQPRPPPPLSAPAPKLQIEAPASTANPFSNSLLTALKPSASASDLPEGADNRHIVFPSVIKRGKEPVRFSKDDGLLQLAAVDGCHTTVVACVPDLLKVALNCIDNVRDTYGTLGVVKSKDADVVQISYIPKFIGASYISRR

SEQ ID NO: 62415 - protein, 85 aa, Zea mays
  Coding DNA Sequence Number=SeqID_20636
  Gene Ontology: Mol. function=receptor activity
  Homolog annotation: Hit_ID=Q6H6Q2; Match level="QueryCoverage=86%, HitCoverage=14%, E-value=1e-21, Identity=70%"; Hit description =Receptor protein kinase-like
MVCLPQQQIRFVAAVALISSLIGAAAGETAAQELRQGLSVAHDQSYSQFQPVLADPTGVFALDFLRVNSTMLDLAVVHLPSAFPL

SEQ ID NO: 62416 - protein, 148 aa, Zea mays
  Coding DNA Sequence Number=SeqID_20637
MDAGGAVPAHGGKVTGVGAGVGSRGFEVTEVGQDRREGPSELTGGTSATRPRPETRERRRECSGRVGVTPARNLGHGEGQSGALRLILAPVKEGECHGSKQGAQNRANLAGHHASAGFNSNQITIKIQIIQTCASNKHDTNIHIYPRF

SEQ ID NO: 62417 - protein, 126 aa, Zea mays
  Coding DNA Sequence Number=SeqID_20638
  Gene Ontology: Mol. function=ubiquitin binding; Cellular component =nucleus; Biological process=protein neddylation
  Homolog annotation: Hit_ID=UPI000051A33A; Match level="QueryCoverage =96%, HitCoverage=29%, E-value=5e-16, Identity=35%"; Hit description =PREDICTED: similar to CG6597-PA, isoform A
  Pfam annotation: Domain name=DUF298; Domain location=26-122; Score =51.4; E_value=3.1e-12; Accession=PF03556.6; Description=Domain of unknown function (DUF298)
MGCEKQGYFTLDEWRAGLKALRADSISKLKKAFPELVQECNLAYHFHVFYKSRLQGRQISRISTYMHFVIASQYQNDYKVINMDQWMGFMRFCNEINFPSLDNYDSDLAWPLILDNFVEWLRENKS

SEQ ID NO: 62418 - protein, 414 aa, Zea mays
  Coding DNA Sequence Number=SeqID_20639
  Gene Ontology: Mol. function=DNA-directed RNA polymerase activity; Cellular component=nucleus; Biological process=transcription
  Homolog annotation: Hit_ID=Q8LNU6; Match level="QueryCoverage=61%, HitCoverage=28%, E-value=1e-109, Identity=79%"; Hit description =Putative DNA-directed RNA polymerase I subunit, 5'-partial
  Pfam annotation: Domain name=RNA_pol_Rpb2_6; Domain location=55-379; Score=118.6; E_value=1.8e-32; Accession=PF00562.18; Description=RNA polymerase Rpb2, domain 6
MAGLTTWRWFRFRGCRTTTTSGTVGATSGRTTDWYQCWEPDEELKVWDWYQTTEGVCHALHPTILLADEVVPLGEHAERGIELNSEGANELREDNTVHLVLGWRQWAKDVVDDVALEREEHLITPTECIDLSTKSRDNVPETFAKSILTRDTSNVIDSDGLPRLGQAVHPNEQYYSVHNSLTNVIRPVKLKGTEPAFIDYVAVNGTGSKCGLQKANIRLRRVRNPIIGDKFSSRHGQKGVCSQLWPDIDMPFSANTGMRPDLIINPHAFPSRMTIAMLLESMAAKISWFLSSQAGSLHGKFIDATPFANSLKKDKDSDKPNSIVDELGPMLASYGFNYHGNEVLYSGVFGTEMDCEIFIGPVYYQRLRHMVSDKFQRAGMDYKPCATPVDTKAKVSGDGAPTSDPTAYQSCRRS

SEQ ID NO: 62419 - protein, 62 aa, Zea mays
  Coding DNA Sequence Number=SeqID_20640
MPGLIYFMEVIKLLPMLLGEGTEATTTVMAKAEGVVALLVVMAIKVGTIGWDVYILTLTGAG

SEQ ID NO: 62420 - protein, 252 aa, Zea mays
  Coding DNA Sequence Number=SeqID_20641
  Gene Ontology: Mol. function=DNA-directed RNA polymerase activity; Cellular component=nucleus; Biological process=transcription
  Homolog annotation: Hit_ID=Q337H6; Match level="QueryCoverage=87%, HitCoverage=22%, E-value=3e-97, Identity=76%"; Hit description=DNA -directed RNA polymerase
MGLVRNSFLKRGAGYTDKAVVIRCVQRDQSSVTIKLYYILNGSARLGFWLGGREFLLPVGIVLKALIDASDREIFTSLTCCYSDKHGRGKGVVSTQLIGERAQIVLDEVRNLSILTRTQCLVHIGQYFRSVMEGFENDDYITVVSNVPFVFTLTFMLQKLYALVDQTASPDNPDALQYQEALLPGHLFTVFLKDRLQEWLRKSKRLILEEAAKNKGFDLGNAVERTQASVAYDLGVEQLELEVEAHIMALGL

SEQ ID NO: 62421 - protein, 220 aa, Zea mays
  Coding DNA Sequence Number=SeqID_20642
  Subcellular localization annotation: CTP_CleavageSite=55; ConfidenceScore=5.37e-01
MDPHVIDSCGSTWPIQAVRLLTKRPGSLLSGHPKTRPTPAPPKSPNPCSASITITSSHIGPRCCRKQIGAASSALGDGCCSLRLPRPDLRWLLLASLATHQIPAPPPSSLNSAPPRCDRSAPRRRSPGADQQPPGLLRRREWPRSPGRQAAQIVGLAGGTGFGLVFRGDGRREAVPCPPRTASGSSLPLRHLPSWPSVGGWRSRESRGGPGAEAVTRRAR

SEQ ID NO: 62422 - protein, 576 aa, Zea mays
  Coding DNA Sequence Number=SeqID_20643
  Pfam annotation: Domain name=Myb_DNA-binding; Domain location=47-92; Score=31.9; E_value=2.2e-06; Accession=PF00249.21; Description=Myb -like DNA-binding domain
MGSCITSSADPGLKISMKRVEHVLSQENDKNVNEEESLSDQECEFDPVDWNDDEKSIFIEAMNNYGKDFSRISSCVKSKSYEQCKVFFSKARKSLGLDLIHQGAADVSMPASDTNGGRSDTDEACAVEMDSAICRKQSCSKIVQDVCPTEGAILGPDSVLISKQTEGDISNRCIVDVKIEEDDKEADKNCSNVDDKRSSDSTHQAGPININCPESTDKLQGTDDAVDQVNMHSSVLNSSNEHAMAMHSEVRSSLHSVDVLQTDKAEGTGTDPSQVEECSHHAVYTPMTAGNSGSSAFLTSDSGIKDNVHISNMSGASTVSPAFTSNYQHSLPGDMPLSKPKPLVTSLTPKDLMPVQFSSVLPDPTAFRFEGIKPNFEDSSGNKVSSALGAKDICKYPAFKDPSDNEHDTLFRNIDGYMNNHLTTELPVFSQRTASGTVSTSQTKFQNGRSSSVCLPNSSEGIQWPRKPEEVPEDSLRPCARNAKTEGGEKQKRPGDVKLFGQILSHQPTLPSSGSLCNGSQSKPPSPKIDKTSVRLTNNPKGSCSFFFQAWCQSTCGSGGKISEELRPSGWKHDTA

SEQ ID NO: 62423 - protein, 254 aa, Zea mays
  Coding DNA Sequence Number=SeqID_20644
MYKGATKFELKLKFEFGKEEKIKEKKIKRKRNETPNWASVTNSAHPQKPTARPTRSSHSARTADCHVGPLGSRSRTLLRFLSLALYDRQGPPAVTSHVRRFTAPWDPFDRSRFPESADSVSVHLLPQIRVELNRPRASFGTTPISPAYFYRVYLATSPSASPSPYQVIGAPAEHRACAERVRQGRNRPRVPGSSSSKGQALEWCPGALRGVERRFHGHPRRKRPQWRPEFTVGASFPPRFGLNRGQSASQRDHW

SEQ ID NO: 62424 - protein, 115 aa, Zea mays
  Coding DNA Sequence Number=SeqID_20645
  Homolog annotation: Hit_ID=Q8RYK2; Match level="QueryCoverage=67%, HitCoverage=21%, E-value=4e-08, Identity=49%"; Hit description =Putative phosphatidylglycerol specific phospholipase C
MASGLNPPLAFYDSPRPIPRTFWAKPDMGGVTTEVTAEPKICSRMSSKPWLGSESTQLAEDVAKTAVHHHHDHHRLDQRVDLVLPPATLQPEVRVRGWHGGERDGECAPPAMFPL

SEQ ID NO: 62425 - protein, 146 aa, Zea mays
  Coding DNA Sequence Number=SeqID_20646
MPIPRTFWAKPDMGGVTAEVTAEPKICSRMSSKLWPGSESTQLAEDVAKTAVHHHHDHHRLDQRVDLVLPPATLQPEVVHTQGSAQRQPTPQGALRGVAPRGHGERDLLPWRQRVTSMRGANNRVPLDPTAKTLRCRMLVPVVAVT

SEQ ID NO: 62426 - protein, 125 aa, Zea mays
  Coding DNA Sequence Number=SeqID_20647
MATKEHIAQHGFTGIHRIWNLAQKGWKRGLHWAESERREMSEGKAAHQREKGRAQRLEVARAWPETVDAGDQRGEGGRQRIREQRAQREKKASGSVAGWRRFFKTWYGRTGQSTVHVRCTPDSAR

SEQ ID NO: 62427 - protein, 66 aa, Zea mays
  Coding DNA Sequence Number=SeqID_20648
  Subcellular localization annotation: CTP_CleavageSite=3; ConfidenceScore=5.00e-01
MVQRNHNKGKGKPKSNKPNKTTNFKKKKNKAELTCFACGEAGASGIIPCYWGMVTMPLFWHWHGGF

SEQ ID NO: 62428 - protein, 278 aa, Zea mays
  Coding DNA Sequence Number=SeqID_20649
  Homolog annotation: Hit_ID=Q6V5I0; Match level="QueryCoverage=18%, HitCoverage=13%, E-value=5e-08, Identity=56%"; Hit description =Protein kinase
  Subcellular localization annotation: CTP_CleavageSite=14; ConfidenceScore=5.01e-01
MAAAGDDSIGAPRRASKKGGRGRRGDGFHNAVPRGTRTNPKITNQGEAGQAKNVGRLVRPREHLGLVDKVEIEEDADVGGTTRMGDIDGQGTCVIQGEGDNADGRHRWVGTLRDSGGGSCCARRGHGGAKQGEGGDDAAADVGGGLPGKEHPLSFHCGGSGEDTQIRVGEDRVDCSGGGEKGGRSAGVDCLRRGVLALMVGRVWGQRVREDDRGGRTVFRISEVGLYLLPNLACVQEMVDTSTMQGYNTSEMIKIMDGTRESDIYSLGVIRRSQMISY

SEQ ID NO: 62429 - protein, 526 aa, Zea mays
  Coding DNA Sequence Number=SeqID_20650
  Gene Ontology: Mol. function=binding
  Homolog annotation: Hit_ID=Q6Z3Z9; Match level="QueryCoverage=94%, HitCoverage=91%, E-value=1e-134, Identity=54%"; Hit description=Arm repeat containing protein-like
  Pfam annotation: Domain name=Arm; Domain location=152-194; Score =18.1; E_value=0.032; Accession=PF00514.13; Description=Armadillobeta- catenin-like repeat
  Pfam annotation: Domain name=Arm; Domain location=195-239; Score=8.6; E_value=1; Accession=PF00514.13; Description=Armadillobeta-catenin -like repeat
  Pfam annotation: Domain name=Arm; Domain location=240-283; Score =19.9; E_value=0.009; Accession=PF00514.13; Description=Armadillobeta- catenin-like repeat
  Pfam annotation: Domain name=Arm; Domain location=284-326; Score=2.0; E_value=6.9; Accession=PF00514.13; Description=Armadillobeta-catenin -like repeat
  Pfam annotation: Domain name=Arm; Domain location=328-369; Score =29.6; E_value=1.1e-05; Accession=PF00514.13; Description =Armadillobeta-catenin-like repeat
  Pfam annotation: Domain name=Arm; Domain location=371-411; Score=3.0; E_value=5.1; Accession=PF00514.13; Description=Armadillobeta-catenin -like repeat
  Pfam annotation: Domain name=Arm; Domain location=413-455; Score =14.4; E_value=0.19; Accession=PF00514.13; Description=Armadillobeta -catenin-like repeat
  Pfam module annotation: Pfam domain module=Arm::Arm::Arm::Arm::Arm::Ar m::Arm; Domain location=152-194::195-239::240-283::284-326::328 -369::371-411::413-455
MMGEAGEEESAAAPAEVSRQAELDEQRCLAEALDALSSLVSASLSATLFPLKWQLTRDRLHACLADTTVPAGDESGEDRRDAFVNLLRDVAATAREARELVPRSQGRQYGGGKLRLRSDLDVLAAALDAHVARLDEMRREAATALSEVLRDDEKCVRVVASDVADGVGVLVALLECPDARVREDVLEAVSVIAGSDAHRGDLVVGGVIAPVVRVLDAAASASSEAAKERAARVLCKLTENSDNAWAVAAHGGVTALLDLCTDHGASGGELVCAACRVLRSLAGVDEIRKYMVADAGAVPVLVSLSQRATDDAARIQAMELVVAIGSGDSSAREAVVQEGAIEVLVRALDASSSSKVREVALRAIDGLCLSPPTSTDRLLAAGFLDSVLSLLRTGDTTLQHCALKAAHRLCPVSEEIRKAMGDAGFMLELVSVLGASSKSPEAREMAAESLCALVSVHRNRKRFVQEDRDDVARVLQLLGSGDEEKLTPAKRFLLSTVTRLADSSSGRRKILTSEHVRHKQHTPTYQ

SEQ ID NO: 62430 - protein, 165 aa, Zea mays
  Coding DNA Sequence Number=SeqID_20651
  Gene Ontology: Mol. function=pyridoxal phosphate binding; Biological process=threonine biosynthetic process
  Homolog annotation: Hit_ID=Q6L4H5; Match level="QueryCoverage=58%, HitCoverage=18%, E-value=6e-27, Identity=63%"; Hit description =Putative threonine synthase
  Subcellular localization annotation: CTP_CleavageSite=65; ConfidenceScore=5.66e-01
MARLKKVLINSTPPSSSAARGFRPARHAFTIAQRQPPPLSSQALLPNPPPPSSPVGRPLPVHPAPARTDTAVLFPAVTTKHQHTTDENICEEATWQPAPKQGLSAWYEPFPPAPNVDPNERYSLDEIVYHSSLGGLLDVRPDTVVLARFSGAYWRDLFDSFPECS

SEQ ID NO: 62431 - protein, 512 aa, Zea mays
  Coding DNA Sequence Number=SeqID_20652
  Gene Ontology: Mol. function=sugar porter activity; Cellular component=integral to membrane; Biological process=carbohydrate transport
  Homolog annotation: Hit_ID=Q6VEF1; Match level="QueryCoverage=96%, HitCoverage=96%, E-value=0.0, Identity=82%"; Hit description =Monosaccharide transporter 6
  Pfam annotation: Domain name=MFS_1; Domain location=21-439; Score =55.2; E_value=2.1e-13; Accession=PF07690.6; Description=Major Facilitator Superfamily
  Pfam annotation: Domain name=Sugar_tr; Domain location=26-478; Score =488.3; E_value=9.1e-144; Accession=PF00083.14; Description=Sugar (and other) transporter
  Pfam module annotation: Pfam domain module=MFS_1::Sugar_tr; Domain location=21-439::26-478
MAGGVVVSSGGGKDYPGKLTMFVLFACIVAATGGLIFGYDIGISGGVTSMNPFLMKFFPSVYRKEQEAERNQSNQYCKFDSQLLTMFTSSLYLAALVASFFAATVTRVAGRKWSMFGGGRHDVGMLILGRVLLGVGVGFANQSVPVYLSEMAPARLRGMLNIGFQLMVTIGILCANLINYGTAKIRGGWGWRVSLALAAVPAAIIAVGALFLPDTPNSLIDRGYTDAAKRMLKRVRGTDDVEEEYSDLVAASDESKLVAHPWRNILLPRYRPQLVMAIAIPMFQQLTGINVIMFYAPVLFKTLGFADDASLMSAVITGLVNVFATFVSIVTVDRLGRRKLFLQGGTQMLACQIVVGSLIGAKFGFSGVAEIPKGYAAIVVLFICAYVAGFAWSWGPLGWLVPSEIFPLEIRSAGQSINVSVNMFCTFIIAQAFLPMLCRFKFILFFFFGAWVVVMTIFVALFLPETKNVPIEEMVLVWKAHWYWGRFIRDEDVHVGADLEMPSANAKLGGMQ

SEQ ID NO: 62432 - protein, 142 aa, Zea mays
  Coding DNA Sequence Number=SeqID_20653
MRFAVANKAYIAVTLGAAIELKEQVAKPCSSAAKRGALRLSAAGKIGGGGGAEESLRMIMSTTDCALEVAKWPTTPATVLGFSLSSETPLRNLVFMDWMDARLKLQKLKSDITVDYETSSSRIELNRLFISGFSLGTVVQYE

SEQ ID NO: 62433 - protein, 115 aa, Zea mays
  Coding DNA Sequence Number=SeqID_20654
  Subcellular localization annotation: CTP_CleavageSite=40; ConfidenceScore=5.34e-01
MAAPSVTAMYALFATANLILFFFPAFRRNYDSAWTLKNVSAHVDGQRFRRQLGKQVAERTTGSVKQGARAGTESMFLKLVNVSVGSSWSQFRVRLQLQVCNAAQAATQQVSVGTM

SEQ ID NO: 62434 - protein, 145 aa, Zea mays
  Coding DNA Sequence Number=SeqID_20655
  Gene Ontology: Mol. function=oxidoreductase activity, acting on the CH-OH group of donors, NAD or NADP as acceptor; Cellular component =mitochondrion; Biological process=isocitrate metabolic process
  Homolog annotation: Hit_ID=A0EJ87; Match level="QueryCoverage=65%, HitCoverage=20%, E-value=7e-33, Identity=72%"; Hit description =Cytosolic NADP+-isocitrate dehydrogenase
MAFEKIKVSNPIIEMDGDEMTRVFWQSIKDKAFRLDDDNIFFQLIFPFLDLDIKYYDLGILHGEATDDKVTVEAAEATLKYNVAIKCATITPGETRRTYEARLVAIYRHVREDGVEGQPISVSTEQFAMTSLLITIIDLGLFHQN

SEQ ID NO: 62435 - protein, 101 aa, Zea mays
  Coding DNA Sequence Number=SeqID_20656
  Gene Ontology: Mol. function=RNA-directed DNA polymerase activity; Biological process=RNA-dependent DNA replication
  Homolog annotation: Hit_ID=UPI00004C1733; Match level="QueryCoverage =50%, HitCoverage=3%, E-value=6e-21, Identity=92%"; Hit description =UPI00004C1733 related cluster
MPGIPRDVTEHSLDIRAGARPVKQPLQRFDEEKRRAIGEEVHKLMAAGFTKEKAPGGYTHHWEGLFVIAKILRSGTNKLADSQGEAYTNTCNIQQLRRFYP

SEQ ID NO: 62436 - protein, 223 aa, Zea mays
  Coding DNA Sequence Number=SeqID_20657
MRPDLVSTTKRRASLPLLRAAVLAAEADEHDGGRGNSTATIWASATQETRERDALTRKQEAVMKELGVQTRRAGRAAIREQEPGRTRRETDTAAGQGTTLDEACDGRTNPEHEQGAPQLEGERHGERAEGDAVRAGRRRAPEMHGGVRRACQRGRRRWERGARAGDRKKLRPWGIQGAGASSGRKYRGAQENWTLSKNTAGRSSAGRHGASSGKVHGGVRGVG

SEQ ID NO: 62437 - protein, 247 aa, Zea mays
  Coding DNA Sequence Number=SeqID_20658
MEERTQGRRGLGVHGCWPSRGVGHGDCSLCLHQGRSSGKEDEQALAGRCGALEKRRCHGREEPSPMLAAVEQGGRKGIRGPTDIGGPERWHTLHTLRAGPAEDEGEGRSMTARERLGTREEQRHGRASVGRLLGDGDAAEPLGGRGSGRARELESKPGARRREEQRLSSAAMGASWLEKSSTSHGEQGEDEAPAKEKQGARGREEAGRGYQEAEARAEDEVTDGAWGMGARSRAQPHGYDRRRWKTS

SEQ ID NO: 62438 - protein, 63 aa, Zea mays
  Coding DNA Sequence Number=SeqID_20659
MDAGRRCPPWCSTKWVTYLILDLAVVVGHAMVVDALHSRYRVFNCRWKGRFQVSELMNISEMS

SEQ ID NO: 62439 - protein, 186 aa, Zea mays
  Coding DNA Sequence Number=SeqID_20660
  Subcellular localization annotation: CTP_CleavageSite=36; ConfidenceScore=5.16e-01
SLHGTTPALCRPGPLLDPLSWLLRPLFRLPLSMVVVAPARADVGGRSSTRGGSTGQGWWPGLAVVLHPLDRHLLHVVGLVPQCLSSSGASAGSLDYATLQRTSVAYLRHASIRHAPNDPTFGSAYKDIYHDTMDLATWTPLARCESVKPLYTLRPSSTAHLHLPSWSPPPLPRIGIVVSATQDLAL

SEQ ID NO: 62440 - protein, 658 aa, Zea mays
  Coding DNA Sequence Number=SeqID_20661
  Homolog annotation: Hit_ID=Q4JEV5; Match level="QueryCoverage=51%, HitCoverage=67%, E-value=2e-68, Identity=41%"; Hit description=Pore -forming toxin-like protein Hfr-2
  Pfam annotation: Domain name=Agglutinin; Domain location=341-479; Score=41.4; E_value=2.5e-11; Accession=PF07468.2; Description =Monocot mannose-binding Lectin
METRDRMLWRTTAGNGERRSGLCRVQRRGEPLRGRRCVKGHQGMPVDEALRGGHLGSQGGTHGPLVLQGQGRDVLAFLGGGNNFLDGGSEERGRRRVPRPVMNRTSSTGEGEGLDAPRGRCNDEGAREFRDVAGGEQCPARAVVASLPLWGMERGGGDEGHTHGGRGGGGRLGGHAHGHNGGMGGGAGAWVCHPGMGRREETETARPGMPAAATGGREEGEGRRRPVAGGRDEGSSGGGRRQWPERGRKGEQLRRPGAGSGGWEGGHHPPSTLLSTASSYSPLVPFSKPSLLLNHLGAGNLVADGISGVTGVASQVVEGVEDTLGSIVEAIDQGVKDEDQLDLPKYVCFKGDNGLYLSARTVEGHPYLQFASEDIGDPSVRFITYNHKVNGKRVVRFKSNHLGKFWRRSPNWIWADTDDTSTKNSDTLFEVIKIDEDGVYALRNLGNNHFCHRLTYDGKESCLNATIPTIRKEAHIKIEEAVLSRKISNIEYHLKGAKIFDKKAKTLITREAVNGTSTDSKTTITLKYSVIKGKLWDSSKSMKLGVTTTIEAGVPVVLPATIEVQSEFNSTYSWGESIIEKEEYSNAYEVVVPAYSVVTVSVLATQGICQVPFSYTQEDVLTTGERKVFKFDDGIFRGVNSFGFKSEVTERKLSKDDD

SEQ ID NO: 62441 - protein, 61 aa, Zea mays
  Coding DNA Sequence Number=SeqID_20662
MKKSLVLPQKTELSPPEPYNPDADPALKSTLVEIRIANVAIDEAVNRLLNEDAERVLKEDD

SEQ ID NO: 62442 - protein, 58 aa, Zea mays
  Coding DNA Sequence Number=SeqID_20663
MASGGGKAHAAREWLIEATDNNKHNNLLSCELNLPPKLCPPLPLGASGQKELCRVPND

SEQ ID NO: 62443 - protein, 60 aa, Zea mays
  Coding DNA Sequence Number=SeqID_20664
MTKNNMVVTNMERYLFICYTWKTLLDHVFEDLRKTKAPNTFLFWFRASLGESPSWLVSSG

SEQ ID NO: 62444 - protein, 83 aa, Zea mays
  Coding DNA Sequence Number=SeqID_20665
MAQGHISLSESHTALEEAKKVEEVVERERLISELSPPMGPYDPEADPAMNGALEVIRIANKAVDEAVNRLLNEAPDNVLKVDD

SEQ ID NO: 62445 - protein, 678 aa, Zea mays
  Coding DNA Sequence Number=SeqID_20666
  Gene Ontology: Mol. function=histone-lysine N-methyltransferase activity; Cellular component=nucleus; Biological process=chromatin modification
  Homolog annotation: Hit_ID=Q2RB00; Match level="QueryCoverage=94%, HitCoverage=97%, E-value=0.0, Identity=55%"; Hit description=YDG/SRA domain containing protein
  Pfam annotation: Domain name=Pre-SET; Domain location=415-518; Score =77.4; E_value=4.5e-20; Accession=PF05033.6; Description=Pre-SET motif
  Pfam annotation: Domain name=SET; Domain location=520-669; Score =61.6; E_value=2.5e-15; Accession=PF00856.18; Description=SET domain
  Pfam annotation: Domain name=YDG_SRA; Domain location=230-388; Score =228.2; E_value=1.8e-65; Accession=PF02182.8; Description=YDGSRA domain
  Pfam module annotation: Pfam domain module=Pre-SET::SET::YDG_SRA; Domain location=415-518::520-669::230-388
METTSQDESESDEQDQPLEAKPLRSLAPMLPLPMKYDVATQSTDPMLVFVTPFRPCTSPEPSAARQPLPKSPAPLRATPVSAAFPMPRPGAGGDPLEATPVSAAAPAFRMPRREDESSEEEYNPFFCGRKKPTRLKTAGKRTHQQAECSNARDMKRRPTQTSLSLNKELATFTPSSSSDPTESVQETLTMFDSLRRRILQLDENREDAAGKRADLKAGSLMMQNGLRINNLKTVGPVPGVEVGDIFFFRMEMCVVGLHAPAMAGIDYVSARRGGSGTDEVVAVSVVSSGGYENDDTDSDVLVYTGQGGSSRRRKDKHDQRLERGNLALMNSMERRSVVRVVRGAQDPFCRSSKIYVYDGLYRVEGSWTERARDGFSVFKYKLRREPGQRDGISVWKMAERWRADPVTRSHVVSADMSSSAEKLPVCLVNDADDDDEQRVPGRFNYVTGVEYEYPRPLGKTKPCKCPSVCLPSDDPDCSCARLNSGHLPYTACGLLVKRVPVLYECGPECRCSGNCRNRVAQKGVRLRFEVFWTGDACGWGVRSWDPIRAGAFVCEYAGQAVDVSTGGEEDEYAFCASGEGWRWWNLGAGLVEEASDGDAAENLEERLPVMISARRSGNVARFLNHSCSPNLLWQPVRGNFRTLADSSHASVAPPVAEVLSDERNHGVVKQVLVFPLYI

SEQ ID NO: 62446 - protein, 341 aa, Zea mays
  Coding DNA Sequence Number=SeqID_20667
  Gene Ontology: Cellular component=plastid; Biological process =peroxisome organization and biogenesis
  Homolog annotation: Hit_ID=Q2QQS3; Match level="QueryCoverage=99%, HitCoverage=99%, E-value=2e-65, Identity=65%"; Hit description =LILLIM08, putative, expressed
  Pfam annotation: Domain name=Aa_trans; Domain location=84-323; Score=- 108.9; E_value=0.0013; Accession=PF01490.8; Description=Transmembrane amino acid transporter protein
MAMAAEGAASEPELVSIPATPHGLSTPEGAATPTGAGGGGGGRSKGSGTPGRRVVEGLRGYLEDVGHLTRLDPRDAWLPVTESRGGNARYAAFHSLNAGLGFQALLLPLAFPDLGWSWGIISLTIAYFWQLYTLWILVKLHEAVPGRRYNRYVELAQAAFGTATALILVGGETMKLFFQIVPPGGMLAALYAFHSHDISQGVLATTCLLVVLNCLSSFQIYSMPVFDSFEAYYTGRTNRPCSAWVRSGFRVFYGFLSLFISVALPFLSSLAGLLGGLTLPVTFAYPCFMWICVKKPERFSFSWYLNWGLGLLGTAFSLAFSLGGVWSIVNNGMKLKFFKPN

SEQ ID NO: 62447 - protein, 68 aa, Zea mays
  Coding DNA Sequence Number=SeqID_20668
MAMMGSTSDKTYLCRVPNFGILNDKVETGLPYLDSLKPAYPWESFLLSGGTQRRAPAVKSWEDVGLPL

SEQ ID NO: 62448 - protein, 123 aa, Zea mays
  Coding DNA Sequence Number=SeqID_20669
MPDGEGLSPGCTSYGHQGGVIGQHSRNEWMKNGEKGGSIGLTVGDAESRLASQYKLSLLEPRDPRLAISLLILPNNSDVLFGFNQNIQAEHLPFTGLVPMQQSVGHLFLIVVNQKRGNTIVKH

SEQ ID NO: 62449 - protein, 96 aa, Zea mays
  Coding DNA Sequence Number=SeqID_20670
MGGREDAVSGGQQRSPRAEGGENCRHKEESGAPSSEPWPDSWLGIRRCGCEIGALGYRDTVLRQALNRAGRRSGYCRRLWVEDDLCVVGSWTNGGD

SEQ ID NO: 62450 - protein, 260 aa, Zea mays
  Coding DNA Sequence Number=SeqID_20671
  Homolog annotation: Hit_ID=Q6F379; Match level="QueryCoverage=56%, HitCoverage=28%, E-value=6e-38, Identity=62%"; Hit description =Expressed protein
  Pfam annotation: Domain name=Frigida; Domain location=1-207; Score= -69.3; E_value=5.2e-05; Accession=PF07899.2; Description=Frigida-like protein
MDSTAFLGFVVARRKEWDALRAEVSAALKLRVDPNKFLMDVITDFFPVDHREVRNPADLAWACVLILEATVPALANPDPDIGPAHPLVLCAAREHAWGMARVWRVPSHPTPRVSTARRHFTVVFSRRRRTRCCTAGLSSASPGANRCHDLPSLLPLRKKWPLELRMTYVSTTVFSELEQLDLGTVETDVDEEVEDKVMLYVDMKVNGVHLKVMLYGGQWCTFEVFVVVVVLLAVTCLSNFTKSNYECTFGSKKSRGTSVT

SEQ ID NO: 62451 - protein, 79 aa, Zea mays
  Coding DNA Sequence Number=SeqID_20672
MADAERVGARDKPALDLGHFNFFDSQNMSRLLKIIERAHQRFITLNKLYSIHNLATEASSKPPYNGLIYVRESLVWHML

SEQ ID NO: 62452 - protein, 156 aa, Zea mays
  Coding DNA Sequence Number=SeqID_20673
MDRAKASAKSAILANLELQREGSLAPHAAVLNIHAVNAGDSRSSYVIMCVHEVKISPSIQTAPYSTELKFARLVFDANGYGPTGVKESEPCMLMNSDETELWAAPAGEREAPAFFRGAKEPTVSLASGRPQGSRDREAADNSSALSVFSSYSVPEQ

SEQ ID NO: 62453 - protein, 520 aa, Zea mays
  Coding DNA Sequence Number=SeqID_20674
  Gene Ontology: Mol. function=6-phosphofructokinase activity; Cellular component=6-phosphofructokinase complex; Biological process=glycolysis
  Homolog annotation: Hit_ID=Q5SNH5; Match level="QueryCoverage=90%, HitCoverage=91%, E-value=0.0, Identity=91%"; Hit description =Putative 6-phospho-1-fructokinase
  Pfam annotation: Domain name=PFK; Domain location=132-383; Score =17.5; E_value=3.8e-14; Accession=PF00365.10; Description =Phosphofructokinase
MEAVGVTPAPVAAPEKKKLLDLKDPFPAAANSGAKASSASKWATKKKLVGGDAGYVLEDVPHLTDYMPQLPTYPNPLQDNPAYSVVKQYFVNPDDTVTQKIVVHKTSARGTHFRRAGPRQRVYFQSDEVNAAIVTCGGLCPGLNTVIRELVCGLYDMYGVSSVVGIEGGYKGFYSKNTVALTPKSVNDIHKRGGTVLGTSRGGHDTAKIVDCLQDRGINQVYIIGGDGTQKGASVIYEEVRRRGLKCSVVGVPKTIDNDIAVIDKSFGFDTAVEEAQRAINAAHVEAESAENGIGVVKLMGRNSGFIAMYATLASRDVDCCLIPESPFYLEGKGGLLEFVERRLKDNGHMVIVVAEGAGQDLIARSMNFVDTQDASGNKLLLDVGLWLSQKIKDHFKKKPSFPITLKYIDPTYMIRAVRSNASDNVYCTLLAHSALHGAMAGYTGFTVAPRITEKQNKVVITDRMWARVLCSTNQPCFLSHEDVENMKHDDDEHHHMHNTQLLEGGSSPVSKCNGSAAAV

SEQ ID NO: 62454 - protein, 144 aa, Zea mays
  Coding DNA Sequence Number=SeqID_20675
  Subcellular localization annotation: CTP_CleavageSite=56; ConfidenceScore=5.45e-01
MYPCTSRAPCPALLTSTPLQSRRTAQAQRSAARATPPDPRARRYFQAPTWRPNPLRDSEASGAGDRPTKLRVSAPSVCPSVTVHRRPSPSYIRSPAVPFPPRCAKPPTNDHPLPRPRPLGPAGSRFSPYQLPVSRKITEPSERD

SEQ ID NO: 62455 - protein, 137 aa, Zea mays
  Coding DNA Sequence Number=SeqID_20676
  Gene Ontology: Mol. function=nucleic acid binding; Cellular component= nucleus; Biological process=jasmonic acid mediated signaling pathway
  Homolog annotation: Hit_ID=Q9FU27; Match level="QueryCoverage=95%, HitCoverage=48%, E-value=2e-12, Identity=33%"; Hit description=CCCH -type zinc finger protein-like
MMMMGEGVSVPPWSHHVPVSGVDAGVGGDEMTPYLLAALRQYLPCNDAGAAEGGRRGGGGHGRGRGWFRLRRVPHVRVQGAAKKCDFAHGVFECWLHLARSRTQPCFSHGCRRRVCVGVPYQLRVLLPRRSSLATNL

SEQ ID NO: 62456 - protein, 154 aa, Zea mays
  Coding DNA Sequence Number=SeqID_20677
MGKKGEGWGRGGKVSGMRSARWRAGASASGHVGSSRYKATVVEMKKIIREVKSDKFSSIQKATKSRSSGAFRFALQESRLLEKAASWIQSFGWLLTFRGAKTKAKSQTKHALRHLPSMAPSDAGPRHVPRRRGGRTGSPEPTVRKYCHVINPLP

SEQ ID NO: 62457 - protein, 92 aa, Zea mays
  Coding DNA Sequence Number=SeqID_20678
MAFTITLVAIILRIERIPKPRWLKLNLQWCRRLETGGSPKPTSECAACPSPDGSSAWASAKGGSEAAGDERERGGNPAAFVFVPRPGRVRLQ

SEQ ID NO: 62458 - protein, 155 aa, Zea mays
  Coding DNA Sequence Number=SeqID_20679
  Homolog annotation: Hit_ID=Q6QP51; Match level="QueryCoverage=81%, HitCoverage=48%, E-value=9e-09, Identity=49%"; Hit description =Putative growth-regulating factor 1
  Subcellular localization annotation: CTP_CleavageSite=39; ConfidenceScore=5.03e-01
MNEFAVTEMVGSLGAMSSEDKENSVACPAPTAVPPARVRLTTAKSSLRRNRKLRLARPWASASEGGLRLARPQGSAPASASEGGLRLARPQGSASTSASEDGLRLARPQGSASTSTSEGIASSPHLSLGLRRSLRLARPWARTDHATGGTSLPYP

SEQ ID NO: 62459 - protein, 107 aa, Zea mays
  Coding DNA Sequence Number=SeqID_20680
  Gene Ontology: Mol. function=unfolded protein binding; Biological process=cellular protein metabolic process
  Homolog annotation: Hit_ID=Q6ASR1; Match level="QueryCoverage=47%, HitCoverage=12%, E-value=5e-09, Identity=73%"; Hit description =Putative chaperonin
MSFPGCTEATDFVVTIALCFTSSHDGKVEVRMELLMAKALCGGICGRKVCDGGSSDLVYEYVLVEEKYTFVGNVKNPCSCTILIKGFKDDVLLRTQLRMKQLCCYHP

SEQ ID NO: 62460 - protein, 738 aa, Zea mays
  Coding DNA Sequence Number=SeqID_20681
  Gene Ontology: Mol. function=RNA-directed DNA polymerase activity; Cellular component=intracellular; Biological process=RNA-dependent DNA replication
  Homolog annotation: Hit_ID=UPI00004C1733; Match level="QueryCoverage =90%, HitCoverage=48%, E-value=0.0, Identity=89%"; Hit description =UPI00004C1733 related cluster
  Pfam annotation: Domain name=RVT_1; Domain location=75-244; Score =149.7; E_value=7.7e-42; Accession=PF00078.17; Description=Reverse transcriptase (RNA-dependent
  Pfam annotation: Domain name=RnaseH; Domain location=474-601; Score =2.3; E_value=3.6e-05; Accession=PF00075.14; Description=RNase H
  Pfam module annotation: Pfam domain module=RVT_1::RnaseH; Domain location=75-244::474-601
MLVDFLRANADVFAWTPSDMPGIPRDVAEHSLDIRAGARPVKQPLRRFDEEKRRAIGEEIHKLMAAGFIKKVFHPEWLANPVLVRKKGGKWRMCVDYTGLNKACPKVPYPLPRIDQIVDSTAGCETLSFLDAYSGYHQIRMKESDQLVTSFITPFGMYCYVTMPFGLRNAGATYQRCMNHVFGQHIGRTVEAYVDDIIVKTRKASDLLSDLEVTFRCLKAKGVKLNPEKCVFGVPRGMLLGFIVSERGIEANPEKIAAITGMGPIKDLKGVQRVMGCLAALSRFISRLGERGLPLYRLLRKAECFTWTPEAEEALGNLKALLTNAPILVPPAAGETLLIYVAATTQVVSATIVVERREEGHTLPVQRPVYFVSEVLSETKIRYPQVQKLLYAVILTRRKLRHYFESHPVTVVSSFPLGEIIQCREASGRIAKWAMEIMGETISFAPRKAIKSQVLADFVAEWVDTQLPTAPIQLELWTMFFDGSLMKTGAGAGLLFISPLGKHLRYVLRLHFPASNNVAEYEALVNGLRIAIELGVRRLDARGDSQLVIDQVMKNSHCRDPKMEAYCDEVRRLEDKFYRLELNHIARRYNETADELAKIASGRTTVPPDVFSRDLHQPSIKIDDTPEPEAPSAQPEAPSARPKAPSARPEAPSVQPEAPSAPEGEALRVEEERSGVTPNQNWQTSYLQYLHRGELLLDRAEARRLARRAKSFVLLGDGKELYHRSPSGILQRCIPIAE

SEQ ID NO: 62461 - protein, 77 aa, Zea mays
  Coding DNA Sequence Number=SeqID_20682
MAELDKVFSPAIDRAKRSARAQGMRSCRRHCRQGNRRGRCGEKIYSALPPGSSHDRSEHQRSACEGAWAVRCQWRVA

SEQ ID NO: 62462 - protein, 363 aa, Zea mays
  Coding DNA Sequence Number=SeqID_20683
  Gene Ontology: Mol. function=nucleic acid binding; Cellular component= ribonucleoprotein complex; Biological process=RNA processing
  Homolog annotation: Hit_ID=Q6ZJG0; Match level="QueryCoverage=57%, HitCoverage=50%, E-value=8e-66, Identity=60%"; Hit description =Putative RNA recognition motif (RRM)-containing protein
MAKEGEGHQEGAGRRLLHLWDRCRCVLIGWIKTSSVESENVSKALYETIGKLSIHKEEARLIGQLCSGMLANLIGCCRERGGPNCSLRSVSSFSPTSTTTTPTRPHASLALSRIVVAENLPEDQKHQTLMKIFSAVGNVKSIRTCYPQDISLAAANKTSRIEMIFANKLHSFVEYSTVGDAEKAVAEFGGGGNWREGIRVRSLLGCLKHGLGQGRKGGDEEYAADEDGPDTTDHPRDFGTDVTAQISEAHFDHQAEDGTHDKGGMRQQGRGRGRGGRGRGRGQHYGHNSRDGHHPIGTPPSEHPAVLKPPLGPRITDGTKGFVFKILVLNIFLVNGSSVTVAGVFNRSLATCAFQQCSCVYWL

SEQ ID NO: 62463 - protein, 96 aa, Zea mays
  Coding DNA Sequence Number=SeqID_20684
  Subcellular localization annotation: CTP_CleavageSite=56; ConfidenceScore=5.25e-01
MTAWAEFPSVGPPDMSFRAAQDGHDADIQVPPISRNPRVSLSGGTANSTGSPRPLRSGARMSGWVVVNNSPELRAGDGQWTSAKSACAVTILPLSL

SEQ ID NO: 62464 - protein, 137 aa, Zea mays
  Coding DNA Sequence Number=SeqID_20685
MAGGKKGKKGRRPADGKRKRPSSPPSEDFGDSEYSGEVSSKYDRSPILASPVASSEDSNDSMRLSVSERAYARSIERVGLGGSDDSEEASSEEVEDSSDSKEGSGCEGDGDRDEGDGGSSGGGDNSDDGDGGGDDDD

SEQ ID NO: 62465 - protein, 407 aa, Zea mays
  Coding DNA Sequence Number=SeqID_20686
  Homolog annotation: Hit_ID=Q6BTJ4; Match level="QueryCoverage=39%, HitCoverage=17%, E-value=5e-08, Identity=31%"; Hit description =Similar to CA1621|CaIFF6 Candida albicans CaIFF6 unknown function
  Pfam annotation: Domain name=AT_hook; Domain location=163-175; Score =3.4; E_value=6.1; Accession=PF02178.9; Description=AT hook motif
  Pfam annotation: Domain name=AT_hook; Domain location=182-194; Score =8.2; E_value=0.88; Accession=PF02178.9; Description=AT hook motif
  Pfam annotation: Domain name=AT_hook; Domain location=201-213; Score =8.2; E_value=0.88; Accession=PF02178.9; Description=AT hook motif
  Pfam annotation: Domain name=AT_hook; Domain location=220-232; Score =8.2; E_value=0.88; Accession=PF02178.9; Description=AT hook motif
  Pfam annotation: Domain name=AT_hook; Domain location=258-270; Score =0.8; E_value=17; Accession=PF02178.9; Description=AT hook motif
  Pfam module annotation: Pfam domain module=AT_hook::AT_hook::AT _hook::AT_hook::AT_hook; Domain location=163-175::182-194::201 -213::220-232::258-270
MQAACNRTKGAHPFDFDASSMEAQAHTSWTEKGDTPKGILLREGSGPRAPLLIRGSKAGPSEGFNSCLRALGLCAHYWLALEGFDGRLRRRARDDPGYVRYITKARATLPRLRGCSRKPGSGQTVDSVNITARELGTRLGYTRRRPSPASGAIGSSTSLDPRARTRARPQKTTNSASLDPRARTRARPRKTTNSASPDPRARTRARPRKTTNSASPDPRARTRARPRKTTNSASPDPRARTQPRPRKTTDSASPDPRARTRPRPRRTDSTRPRRSHRLARPRARTNHVTGGAIITLPLASSGCGEQDRRPIWLAPGTRTRRLAARGNGTTRISLSLSPTWTLVTPYCKHTRPGRGTNTKAAGFPFTPVSLWFPPFALRLAPTHLGWGTRRQFTRRSRDPPGSKRRQS

SEQ ID NO: 62466 - protein, 153 aa, Zea mays
  Coding DNA Sequence Number=SeqID_20687
MGKNNMRKREPTPPSEDFGDSEYSEEEFSSESEGSPAPIPLRESSDDSDDSQGLAAEVWTYIRAVERSGLEGSDESEYSSDEEDSDGGGEDEGDDDDDDEGGGGGDGDSSGRGGSSGSKDGDDGGSRGGSGGGGSSRGSNRGGSGGGSNRASG

SEQ ID NO: 62467 - protein, 66 aa, Zea mays
  Coding DNA Sequence Number=SeqID_20688
MKMGRKVKEILLEEQVNMGGGIKVLNVEKKLAMASLEFEGYALIWWEQLLHDREEDGEDLLLLGKR

SEQ ID NO: 62468 - protein, 529 aa, Zea mays
  Coding DNA Sequence Number=SeqID_20689
  Gene Ontology: Mol. function=GTPase activator activity; Cellular component=intracellular; Biological process=signal transduction
  Homolog annotation: Hit_ID=UPI000034F109; Match level="QueryCoverage =74%, HitCoverage=43%, E-value=1e-156, Identity=71%"; Hit description= Rho GTPase activator
  Pfam annotation: Domain name=PH; Domain location=52-158; Score=61.8; E_value=2.2e-15; Accession=PF00169.19; Description=PH domain
  Pfam annotation: Domain name=RhoGAP; Domain location=214-362; Score =134.4; E_value=3.2e-37; Accession=PF00620.17; Description=RhoGAP domain
  Pfam module annotation: Pfam domain module=PH::RhoGAP; Domain location=52-158::214-362
MATKRDEPSLIQQRMASKREDREPSQGHQGDVAAAAAPGSLEYQNSRSGNTVLKSGPLFLSSKGIGWTSWKKRWFILTHTSLVFFRSDPNAVSQKGNEVNLTLGGIDLNNSGSVIVKADKKLITVQFQDGRDGRTFTLKAETLDDLFEWKAALENALSQAPSSANAMGQNGIFRNDQSEEVDASREPANDKPPVRSTVIGRPVLLALEDVDGAPTFLEKALKFIEEHGVRVEGILRQAADVEDVKRRIQEYEQGKTEFSSEEDAHVIGDCVKYILRELPSSPVPASCCNALLEACRTQRGSRVNAMRLAVLDTFPEPNRRLLQRILMMMQVVASHKNENLMSTSAVAACMAPLLLRPLLAGDCEIETDFDVGGDGSMQLLQAAAAANHAQAIVITLLEEYDQIFGEGSISSDLYSDSEESGSESEEAAEDDSESYDEDESYEDDECDDETEGSDVSNDDDDDDDDDDDDEDGDDDDDDDGDEPSETGSESGHSVTSDVDVDKKRTEHQIAAVNCYRNQKMKVEKTNFRK

SEQ ID NO: 62469 - protein, 168 aa, Zea mays
  Coding DNA Sequence Number=SeqID_20690
MELDTITSLTAQGAKWMISRNDCYTVNSVALKLHCKELSLKPKEDDEEGDEPTAEKQTIAYGGEAEKTKSVHVESEKKDDDVTQAPAPATTTTTLRATTPITAQERAVHQLINELTKSDSDSEDQLPLSQKKRKHFKTTAGEAVPAENGESELQQRYKCAAKKSTEPT

SEQ ID NO: 62470 - protein, 66 aa, Zea mays
  Coding DNA Sequence Number=SeqID_20691
MPPDGSERPVTISQGGRARKAFFQAMNEWFAEFIQKAKFWLNNTIRVFDELSCTPEECMKGVGNPK

SEQ ID NO: 62471 - protein, 101 aa, Zea mays
  Coding DNA Sequence Number=SeqID_20692
MTKEGKRGSKDLVRRTDAPPNRNHKPQHNPRYVPSDNVISLARLPKLSGETTRMSGGQGSYLPVRLAIRSPGVSRGGSTGPDLSDPPAGHSASQSGSQTGR

SEQ ID NO: 62472 - protein, 92 aa, Zea mays
  Coding DNA Sequence Number=SeqID_20693
MVGGRPPKGPRRSYVALEAANTEVQRLLAYLVALNDSGAGHKLHFSGNLRSAIGLPKGSMVADQDLFTSNFDATMNVVLGVVFEEEIIHNLM

SEQ ID NO: 62473 - protein, 106 aa, Zea mays
  Coding DNA Sequence Number=SeqID_20694
MATIVKGVMSEKGDLQKWKLEIQVEKFEKKHVMGQTGLVKPMVEANWSRLSHNPRSWSSQVVRTSFGILICPDDRAWREGITSHLTQGGWSQGSGSLVPNMGFLVF

SEQ ID NO: 62474 - protein, 132 aa, Zea mays
  Coding DNA Sequence Number=SeqID_20695
  Homolog annotation: Hit_ID=Q6QP51; Match level="QueryCoverage=44%, HitCoverage=27%, E-value=4e-13, Identity=63%"; Hit description =Putative growth-regulating factor 1
MEGQAHTSYNRRAGYYVQETASPLALVPRLLDCGTSTTTRGDPAHDPTMPTEHIGHGPGSENGILRKGSFSAKEAGPSPPTDQRFKGWPLERVQQPPQSTRAPRPLLVRGSKAGPLKGFNGRLRPLGLHAHY

SEQ ID NO: 62475 - protein, 139 aa, Zea mays
  Coding DNA Sequence Number=SeqID_20696
MDDSDLIKSELRAAPRFPINGADPPSTQRYDDLISSAYCRSDGPTVISLTSIPITAAAPVRAAERHRSEGLMGETRIYPSLGPAESETWASWRRKEREEPARCVWGDASRFPNSTRATMADLWAMAVGAGFTRSWAARR

SEQ ID NO: 62476 - protein, 42 aa, Zea mays
  Coding DNA Sequence Number=SeqID_20697
MELVADGLGLGNTGVCGELPLALLAPAGHLMHDEVAEGWINE

SEQ ID NO: 62477 - protein, 153 aa, Zea mays
  Coding DNA Sequence Number=SeqID_20698
MGNYEITGTEQRGGEWSSSAVSVNFRVWFEKLNKILSLLYSTHVLELGYIPEDLGSLYTAKISRLGLAWEFWAVNWVCPKALHASSRVGDYTHRDPYLAVARTFQRIARPYSSRPVIFRECVDAVAVDYVGPPWTIRRGLTGALRGGVVAEVM

SEQ ID NO: 62478 - protein, 76 aa, Zea mays
  Coding DNA Sequence Number=SeqID_20699
MAEVKVMRAHADGLRAVKDECSILAGGLEQPGRGGVDHVADVVEDWWDTHLVVEDLHAVRYSRLVWWLGPQNHLAL

SEQ ID NO: 62479 - protein, 117 aa, Zea mays
  Coding DNA Sequence Number=SeqID_20700
MDALLADGQPPFEDIIRHDEDEVLRWLAERRDKEDEENHSRLHIGYKWVILGPAIIWYADARVCVIITASAARHTTDSRYSQLVSESSRTVQLHRGPSNVFLKVKCALGLFLYYFCD

SEQ ID NO: 62480 - protein, 199 aa, Zea mays
  Coding DNA Sequence Number=SeqID_20701
MQHAEANRVKSAAEYKSRNLLDKVTVLEKEKKDIDCRLNDEKEATAEAKIEEESTRVEAQAGRKRACLPREDGVGHPCRWWIGCTHYLWMRTVTTVTVSGPAQANFGDNGNGELLMCQSLIVLSSDESDVESWSSEGEGLMSPFARMENESLEDDLDYFMALDLAVVESSPRVAPTVTESSSRVAPAKLWDKGRIGMSK

SEQ ID NO: 62481 - protein, 67 aa, Zea mays
  Coding DNA Sequence Number=SeqID_20702
MSEEANLSAEDIPGALECIEKQVDIFDDVITGHSDFCALVASRVPAFVILQDDDAKSYWAEAVSEAL

SEQ ID NO: 62482 - protein, 151 aa, Zea mays
  Coding DNA Sequence Number=SeqID_20703
MRGRYFRDISIVQAGGESNVPLPVTPRALRDKVRTATAGKVPRYSRVVAAHEPTGSELRKYRGGSYNGRPPSASRGGERRPRPQAHSPECAVTWSHPAVPRARARRLGLPTNEPTASVVAVEADGLVFGMTKANLARGAHAPDSGRICACV

SEQ ID NO: 62483 - protein, 106 aa, Zea mays
  Coding DNA Sequence Number=SeqID_20704
MEEQGRRAMAEGAWSTGSSTLRSWQPRPPRLAMGERGARRVELLGDVACTRSRKEDGAMEALLLRAGEKGRRGGRHGCWPCSLLSAVGKKGQGKRKWQLGKSERWE

SEQ ID NO: 62484 - protein, 127 aa, Zea mays
  Coding DNA Sequence Number=SeqID_20705
MRWSLLLGRGSSAAGRGWRAWKMKGVPAPAQGWAPSLCWKQPGRGACCREGGDERSHSSAREGAWLAVVVRESGGRRGEEGSRAGGLPFKEASPAAIGRDGRPAELWSVSLLAELIQSCLSKMTRFY

SEQ ID NO: 62485 - protein, 109 aa, Zea mays
  Coding DNA Sequence Number=SeqID_20706
MSYSVPAKIMPQSKVEYANIQLDLPGYKGSSSLISCEKQTIRIRGTPSPHISTVPIDSSFAARAHRLGIQCSIDPGCRRAVTALVPTIASMGDTVSGQVRGKSAPDFTQ

SEQ ID NO: 62486 - protein, 131 aa, Zea mays
  Coding DNA Sequence Number=SeqID_20707
  Subcellular localization annotation: CTP_CleavageSite=30; ConfidenceScore=5.66e-01
MAAGDASLNGSPPALLPSSPRRPPLSLTTTASQAPSLAELWLLSSPPSRQQAPLPGCFQQRLDAQPCAGAGAPFISHARQPLPAAELPLPSSKLHLIVVNLHCPATPSRCSVLPAALRKVEEEPFDYDRYD

SEQ ID NO: 62487 - protein, 152 aa, Zea mays
  Coding DNA Sequence Number=SeqID_20708
MATGDNDKPPSLDADVDMADLASLDATAATSAAAGGAPSTRFRPKAKGKPRPKAEPPRPVPVAVPKPEPEPEPEAVPMPEPDANPAPPPEDTMEVDGAVDAPGHGEGAVEEDFVLREIDVYFNPKPFEDDTQWPIRTADMFIEYPSDWSVSD

SEQ ID NO: 62488 - protein, 86 aa, Zea mays
  Coding DNA Sequence Number=SeqID_20709
MKKSSTKLSKSIMEPKMPDLPKVQEQSKKTPIPARTPKKGKRMANVLDVVLRSLKAATPALPKVSKDNTDEAMIGILDTFFRLGQG

SEQ ID NO: 62489 - protein, 181 aa, Zea mays
  Coding DNA Sequence Number=SeqID_20710
  Subcellular localization annotation: CTP_CleavageSite=93; ConfidenceScore=5.60e-01
MELVVSSAYGSGHHSSGCVSPASRLHPFMLVSGARSAYSSLVPRPPCCSCSSSAPVEHRRLGMAHGHPVSTSSSSSIPCSLALAKGLSFIFCRVSTPMAASTHELAGRRSICSLLGLPGVLLPRLGAPASSFSLARTPYRQFSSSFLGYNLVSFCESCASCVRVEPKDFKEKEALVLRPVK

SEQ ID NO: 62490 - protein, 167 aa, Zea mays
  Coding DNA Sequence Number=SeqID_20711
MENSTRTSGQVRSGITTYPGQGGRSLDPLRCAPGPWSEKAWECHFIAYPLSCLLSRQGSGADAWPDAPKCASPGLIVPDSPSPWPSFLARVTRPAHSTCLRSSPASGPILAPESYQRVRWTFFTSSSPHRRPQTPSEVVCPVSDNEKFVVPECVPGDFLEQQPGEGK

SEQ ID NO: 62491 - protein, 337 aa, Zea mays
  Coding DNA Sequence Number=SeqID_20712
  Gene Ontology: Mol. function=protein serine/threonine kinase activity; Biological process=protein amino acid phosphorylation
MGNTFGFRGGLRADVADLMQDAGEHLRSSGVFVKRAVASQYQSNRTGNDEIDESSAEELRDAASYVQHNAMLIQVPVVGTARTFWRLSDEATRMIRKLALILRNHHSVCKCLAAPLQASNVWVGSAGNAKLRGARFTDKGFSVERVREDYRNLSRVLQQLISISGGDTSKLPPDYIDFLSLLTEDNLTNKDEFLVVNHAALLPLKNRLIWVSCGHSTEAFLMLYDRIVKYLGKRNRAKMNRILSCLPYQDDWLDTATANAKINQWIVNVQNTKEYRKTTLDLLRLNRNVRSHLHEYGHDDDVEEILYCEWPMLLVVMEKMLHREGELQDTDIENKFG

SEQ ID NO: 62492 - protein, 34 aa, Zea mays
  Coding DNA Sequence Number=SeqID_20713
MDESEKGDRPPGTSNCITFESQRIGDASVTNLGM

SEQ ID NO: 62493 - protein, 300 aa, Zea mays
  Coding DNA Sequence Number=SeqID_20714
  Gene Ontology: Mol. function=oxidoreductase activity, acting on single donors with incorporation of molecular oxygen, incorporation of two atoms of oxygen
  Homolog annotation: Hit_ID=Q7EYC9; Match level="QueryCoverage=94%, HitCoverage=97%, E-value=3e-68, Identity=50%"; Hit description =Putative 2-oxoglutarate-dependent dioxygenase
  Pfam annotation: Domain name=2OG-FeII_Oxy; Domain location=164-242; Score=4.7; E_value=0.042; Accession=PF03171.10; Description=2OG -Fe(II) oxygenase superfamily
MDAGKVAELRRVDLRGLRPGGPGWVQACAAVAASMEELGCVVVAHGALDGELRRDLFGRAMPELFALPLPAKQGTLSGHIGGYIGPDPEKAPGLESLRISEATDAGKVHAFADLVWPDDGNAAFCQTIGAFAKGMLELDHAVQKMVLESLGVRKERVDSHLASLVYDVRLSRYGALAPVTAGDDDEATTYMVAHRDCSMVTTITQHEVEGLQVVTNGRVPACVHRVRTPSNRERLSVLFGSSLKHGAVVGALEELVDHGRHPLRFRPCDFDEYVKFRFGQQRPGLNSALQEFCGIGTGTK

SEQ ID NO: 62494 - protein, 148 aa, Zea mays
  Coding DNA Sequence Number=SeqID_20715
MSDGNGPPEHHAAKPDDHIELLGVKSNWNMGDAEKVIRKAWVYMGIATLLCRIKDIFKAFIGLGLLFLKVTFGTGLQGVKSTFVFRRKRGCASLPTSHVTHLPRDRDFPYTSTEEARQGTPRMTAIAAKSSQGPPYTDHSPTALAPFG

SEQ ID NO: 62495 - protein, 209 aa, Zea mays
  Coding DNA Sequence Number=SeqID_20716
  Homolog annotation: Hit_ID=Q8H6R4; Match level="QueryCoverage=38%, HitCoverage=43%, E-value=6e-13, Identity=45%"; Hit description=Jp18
MDWVGLHPDVALEYALLFARNQLGAADVRHLDHEFLLSMGVAVAKHRLEILKLARKESSSSHRKAAAIAVVLPWRATRLLAAAVHRSARSALGRLRACRDRNRERGRDRDRAAAVLATQRVPLLRHRGGRVALAHRHSSCWSKAAPPVATIRTGGKLLVKTLPAPAASIAACRLVSTDVCSCDEDEEVAVMDGGEAMRWESMFQDLRPT

SEQ ID NO: 62496 - protein, 609 aa, Zea mays
  Coding DNA Sequence Number=SeqID_20717
  Gene Ontology: Mol. function=hydrolase activity; Cellular component =membrane; Biological process=biological_process
  Homolog annotation: Hit_ID=Q5SNA6; Match level="QueryCoverage=80%, HitCoverage=92%, E-value=0.0, Identity=64%"; Hit description =Putative beta-glucuronidase
  Pfam annotation: Domain name=Glyco_hydro_79n; Domain location=94-400; Score=442.9; E_value=4.4e-130; Accession=PF03662.4; Description =Glycosyl hydrolase family 79, N-terminal domain
MDRTGASEHGMVVAAAESHRTVEWSIYYLAEVWVGALAATGNTVLPSPSSSRVLSSPILSAPGTQLGRLLGGLWFLAALLGRPGATAAAAGQPAAPAVAAVDGRRAVAATGEDFVCATLDWWPPDKCDYGTCAWGRAGLLNLDLSNKVLLNAVRAFSPPLLLRLGGSLQDKVMYGYGAGRPCAPFVRNASEMHGFSQGCLPLRRWDDLNAFFRRSGAKVVFGLNALNGRVPLPDGSMGGPWDYTNAASLIRYTANKGYRIHGWELGNELSGTGVGARVGADQYAADVIALKALVDDVYRSEPSKPLVVAPGGFFDQAWFTELVVKTGPDLLSVVTHHVYNLGPGTLAATLRRSCDLQRLLKSTGTSAVAWVGEAGGAYNSGRHLVTDAFVFSFWYADELSDQLGMAARFDTKSYCRQSLVGGNYGLLNTTTFQPNPDYYSALLWHRLMGTKVLAVTFSGTNKIRAYAHCARDSPGITLLLINLSGNATARVSVTAQGAAAAHAHRHRHDARKHGGGRKFRHVHVPGFAGGGEAAAGAVRHEYHLTPKDGDLTSQVVMLNGRALATDAAGNIPALEAVEVDAARPIAVTPYSIVFARVPHFSAPACRVDR

SEQ ID NO: 62497 - protein, 76 aa, Zea mays
  Coding DNA Sequence Number=SeqID_20718
MMNIFFLVYLSDKEHRKNTEHPSLELIQDCNLADGEYVLIPEQRAVHEEDQEPAPETATKDLPTAPAFEGKPRFYA

SEQ ID NO: 62498 - protein, 37 aa, Zea mays
  Coding DNA Sequence Number=SeqID_20719
MGIGKKYPPQTFVWILEGKQIVTGRSKCIYDTPSVPK

SEQ ID NO: 62499 - protein, 1018 aa, Zea mays
  Coding DNA Sequence Number=SeqID_20720
  Homolog annotation: Hit_ID=Q53JI5; Match level="QueryCoverage=24%, HitCoverage=40%, E-value=6e-97, Identity=73%"; Hit description=POT family, putative
  Pfam annotation: Domain name=zf-CCHC; Domain location=758-775; Score =13.6; E_value=0.0056; Accession=PF00098.13; Description=Zinc knuckle
MKAQDGPGGSSAGKKSPWIMCTPAEVEQVKLLLCVVPIFACTIIFNTILAQLQTFSVQQGSAMDTRLAASFHVPPASLQAIPYIMLVALVPAYEAAFVPAMRRLTGVPTGITPLQRIGVGLFAVTFSMVAAALVEARRRHAAATDGGRLLSILWIAPQFLVFGLSEMFTAVGLIEFFYRQSLAGMQAFLTSMTYCSYSFGFYLSSVLVSLVNRLTSSSSSTAGNGNGGWLANNDLNKDRLDLFYCLLAALSMLNFFNYLFWARWYSKSVETLQVQVVGVGSGGADTARWSTAASRYGWTRTRPSAPARRPASTARTASCRSSGGSCRQTQSMSASTSLAKSSSEQSAFVELMAEDSGGWACSPRTRRSNHGRLRQACKLIHGKYNSQTGISFDLADSSSSFGVPSGEHGAYGSSSESASSSDEPTGAHTQIEGGVNCDNRMLEQTSLVGGDTLIPHNTDSGVLAEQIVLTAKHFGSPEEDDKVFTKIESNRNVRLRRGPKARIMASAHPFWTHKSVSSGGNEIISGVNAGGLSSPEESRAILPRTTCTSSSSCGWDSKVGRGPQVNSSDSVLADLIKRAKAFGKPRSCLFRLHQGKVPRPVAVDLKGAILSSHSPSYAEMAARPPAPASRSSEAAHRPFVPNSRLPGMAVSRQSDGWRGRTSPRQGRGFGVQPQRHGPGHGGPLGRGSLGRGAAGRGGRFPPQPRFQQYGEVPAASQETMPQAATADGMSWMPRDAERRQSTAAPPGNSVKAKKLKSPLCFRCKLSGHLNDECKADLDCVVCNKKNSHVVAKCPLLKLPKPDASFFGFGNNELGFFRIPDFDYRLETPDPAPTALIKVSGGKLSAEAVQAELARFITKEWVWEALPHSDDSFLVVFPSVDELIRMADVEFTLKNHGVTLTISEWKDASDVEPSYQLDEVWVHVRGVPHAWRHYLGFWALGSVIGATLDVDMYTYRKMGVIRLLVGVMSRDPLPLTTDIVFDKKGYEITYSIEDKNFIPASPVIFREESRNGGGGCLYK

SEQ ID NO: 62500 - protein, 127 aa, Zea mays
  Coding DNA Sequence Number=SeqID_20721
MPSSALTDDYTTEKREWGERKESLAAELTSSEAQSGRSSERQWRTTIKDSMVSLPWGSERLWDATIARRGEAGKRALQGLWGRERGREWGLRATAPTRRAHRAESWGSGCAGGEDGPVGPKCNVSVI

SEQ ID NO: 62501 - protein, 234 aa, Zea mays
  Coding DNA Sequence Number=SeqID_20722
  Subcellular localization annotation: CTP_CleavageSite=4; ConfidenceScore=5.06e-01
MKKRCFALGSLDFLPFLFRKLVLRALFTRVADIVKTPRLMNYSSRAPNLTGIVTVAEKRVAGLTTDDLASVKWSQRSGRSWRTRRWSDDDQWWSESPVYLPRRSEFDGRGALLVGDGRARFLWRTSTSGSGNTIPQRLVVEAGPRAPTLGCGPASGGATLARRADEMDWPRRFTGARETPGGDGVRVGRWYWLGHGGWPFGWQGRWWRTPTVANSGKEGLQWASRERLRAHWYL

SEQ ID NO: 62502 - protein, 68 aa, Zea mays
  Coding DNA Sequence Number=SeqID_20723
MKRERDMGDGFAASISCIDPMFDHSQIPKQSPDEGQPTPRSYGAQVRWLTVKVMRFHANGPVAVKDER

SEQ ID NO: 62503 - protein, 72 aa, Zea mays
  Coding DNA Sequence Number=SeqID_20724
  Subcellular localization annotation: CTP_CleavageSite=17; ConfidenceScore=5.50e-01
MAGPAVSLSGSFARLARVSLRRGSPGQLVRGARMKRDSSHRRISAACGTRRCALARQGGGRRPWSVHPVIYD

SEQ ID NO: 62504 - protein, 457 aa, Zea mays
  Coding DNA Sequence Number=SeqID_20725
  Gene Ontology: Mol. function=oxidoreductase activity; Cellular component=integral to membrane; Biological process=electron transport
  Homolog annotation: Hit_ID=Q6H4B5; Match level="QueryCoverage=93%, HitCoverage=89%, E-value=0.0, Identity=83%"; Hit description =Putative cytochrome P450
  Pfam annotation: Domain name=p450; Domain location=33-456; Score =35.3; E_value=1.4e-12; Accession=PF00067.12; Description=Cytochrome P450
MDEYIYQSLFLSVLAVALLQLVKMALKPRPRLPPGPWKLPVIGSMHHLVNVLPHRALRDLADVHGPLMMLQLGQTPLVVASSKETARAVLRTHDTNFATRPKLLAGEIVGYEWVDILFAPSGDYWRKLRQLCAAEILSPKRVLSFRHIREEEVMLRVEEIRAAGPATPVNLSVMFHSITNSVVSRAAFGKKRKNAAEFLAATKAVVGLSSGFNVPDLFPTWTTVLAKLTGMTRSLKEIHKTVDTILEEIIVERKRIRDEKIKGGDAAEDVDENLVDVLIGLQEKGGFGFQLTNSIIKAIILNGHVRGRDGDVGVGHGVGDVGADAEPASDEEDAGADQGGVPWEDGCDGGRPVGEQPPVPEAAKSRVIINAWAIGRNPKYWDDAGEFKPERFEDGSRDFTGSSYEFLPFGSGRRMCPGFNYGLASMELAFVGLLYHFDWSLPEGVKDVDMGEAPGLG

SEQ ID NO: 62505 - protein, 126 aa, Zea mays
  Coding DNA Sequence Number=SeqID_20726
MANAGEEFSPAGTKHRGPTAESGWSAADSVTDEKFTEPWPPTAPEFHTATSANLDKAFPSARFALNGRNLQTSRKEGHSVVTFMVPGARDQQSAGEDDPDALGPHGSDPAWRVPDGRRLRSDPTCQ

SEQ ID NO: 62506 - protein, 383 aa, Zea mays
  Coding DNA Sequence Number=SeqID_20727
  Pfam annotation: Domain name=DUF241; Domain location=111-378; Score= -37.1; E_value=0.0011; Accession=PF03087.5; Description=Arabidopsis protein of unknown function
MGERHSPIPNPQARQCQGRILPHRELPQQAAHKQQQMAAGFRRRLTALTVPKASSLLRRTRHKKLSYSRVRCNSLPGRFHPAVAGLHESANALIRWTEEPAQQASPAWVADGAAHLARLLSGLTDLLHHPQARDPLIRHHRGGNGNGNGNGNTNSNSKTPASWAERLLDDLLLLADAHGFSARRTPALRRRDAARLAAALRARRRADRDLSRLASTLRCLSHRCSSGAGAAVAPDHGEAAVADAVAAATCAAAAASAAIFAGLASASASSASRAMPSPLATVSPAKVAAAPVWWVADLLRWRRRTVAVVAGSGSGSEPGPGAREANFEAERCSDEEEGERQAAMERLRRLEDCVVAAENGCERVYRALVNARVSLLNVLTPCF

SEQ ID NO: 62507 - protein, 349 aa, Zea mays
  Coding DNA Sequence Number=SeqID_20728
  Gene Ontology: Mol. function=chromatin binding; Cellular component =signal recognition particle, endoplasmic reticulum targeting; Biological process=chromatin assembly or disassembly
  Homolog annotation: Hit_ID=Q8LSQ2; Match level="QueryCoverage=93%, HitCoverage=96%, E-value=1e-116, Identity=59%"; Hit description =Probable signal recognition particle 43 kDa protein, chloroplast precursor
  Pfam annotation: Domain name=Chromo; Domain location=220-266; Score =3.0; E_value=0.43; Accession=PF00385.14; Description='chromo' (CHRromatin Organisation MOd
  Pfam annotation: Domain name=Chromo; Domain location=270-323; Score =39.2; E_value=1.4e-08; Accession=PF00385.14; Description='chromo' (CHRromatin Organisation MOd
  Pfam annotation: Domain name=Chromo; Domain location=68-127; Score =8.6; E_value=0.093; Accession=PF00385.14; Description='chromo' (CHRromatin Organisation MOd
  Pfam module annotation: Pfam domain module=Chromo::Chromo::Chromo; Domain location=220-266::270-323::68-127
  Subcellular localization annotation: CTP_CleavageSite=43; ConfidenceScore=5.34e-01
MEAVLRHPSLSRTRPPNLNPPTTPSPSLHAPSLLRLRARRLIAAAVFQDQKPKEPASKGGDDEEEAYGEVDRIVSSRTVSSPVFAEDGSATAAVATEFLVEWKDGHEPSWVPAEAIAADVVAEYETPWWTAAKKADSEALAALLADETLRRDPDAEDAQGRTAAHFAAGLGSEECLRALGAAGADEVLARAPKGNPATFQLRQGLEAAQKELEKAVYEWAEVEKVIDGRGEGKWREYLVEWRDGGEREWVKAAWVAEDLVSDFEAGLEYAVAEAVLDKRQAATATAEEEDSWEYLVKWVDIEEATWEPAENVDTELVQKFEQQQSGSAGEVDEVVDKVVDYFGNNFVNF

SEQ ID NO: 62508 - protein, 129 aa, Zea mays
  Coding DNA Sequence Number=SeqID_20729
  Subcellular localization annotation: CTP_CleavageSite=61; ConfidenceScore=5.72e-01
MASTAATCSFNGTATTTTNDPTPTQRAGGERARPTNLSPSTGFTPPVGSSPPSSSEFAPPVAGTNPPSGSDLGPGFGTPSGSFNGTGSFRPSGTLNPYNGVSRGLPRVGLFTALSAAAVAVLLVSMDAM

SEQ ID NO: 62509 - protein, 68 aa, Zea mays
  Coding DNA Sequence Number=SeqID_20730
MDEYIRADNDFHQRREEVQRYVEIAKSFRGRFNQSHKERAQESPDDKAMRTSMTLPRNYEWSTKRSKF

SEQ ID NO: 62510 - protein, 99 aa, Zea mays
  Coding DNA Sequence Number=SeqID_20731
MAPKKITRSTASLDEASRAALAENKGKAVLADSTLAATTEIDKAAAPSKHPRAEDPPCRRAAFILTPRTYPPATYHLGLLQWGPTQIKRMRTNSKIANT

SEQ ID NO: 62511 - protein, 87 aa, Zea mays
  Coding DNA Sequence Number=SeqID_20732
MPYSACDLVPHSGNMHNLLLALELLGCSGWLLGQEGEVPGCFDADTDFLPTGYSDGTAADDDEGTASGIATGADADAGVGDLEGDLA

SEQ ID NO: 62512 - protein, 150 aa, Zea mays
  Coding DNA Sequence Number=SeqID_20733
HFEAFDQGNEDFDLEVLQALRDEEVEDLAGLECSLATQDVGVEIGVEEQSSYAEANRAILVQRRLCNLLLMSRAPITTIKGKRNRVGVLKRRLGVLAHLHVVARIFKDIVVWDWAGLAHWFRSTRRFSCRLRVLMKGRGRGQKRDLAELF

SEQ ID NO: 62513 - protein, 50 aa, Zea mays
  Coding DNA Sequence Number=SeqID_20734
MNDFREESHHLLRLDVGEGSDLDPLGKLVDGDQQANRSDKTDVPLNFTNY

SEQ ID NO: 62514 - protein, 135 aa, Zea mays
  Coding DNA Sequence Number=SeqID_20735
  Subcellular localization annotation: CTP_CleavageSite=34; ConfidenceScore=5.04e-01
MADTWTYLPWRRSLFPAGRRCPSMVLARSQAELVSMAAGQPLLPVRLSRDLAGPRPCSASPERLPPARFLASTMGPAARHRVCTFSSEQQPRIYAAPALFSTSLATDVMACAPRVRQNPQSDGHLCAIRVDSASL

SEQ ID NO: 62515 - protein, 44 aa, Zea mays
  Coding DNA Sequence Number=SeqID_20736
MGRDWELLGQQENERERAGKMSQNDGSCTRLDISRNKYARSMRH

SEQ ID NO: 62516 - protein, 350 aa, Zea mays
  Coding DNA Sequence Number=SeqID_20737
  Gene Ontology: Mol. function=protein serine/threonine kinase activity; Biological process=protein amino acid phosphorylation
  Homolog annotation: Hit_ID=Q2QXA8; Match level="QueryCoverage=74%, HitCoverage=48%, E-value=1e-91, Identity=66%"; Hit description =Protein kinase family protein, putative, expressed
  Pfam annotation: Domain name=ACT; Domain location=160-223; Score =31.3; E_value=3.5e-06; Accession=PF01842.15; Description=ACT domain
MAAVAGDGGGGPEEGVGESSSPPRNPVLAPAPAASGGSGSGGGGRGGGLRDICREVFERLVNDGHRAGSELLAQLEAHFNRLPISYKLDVNIDKAEDVLIHQKVLAEAQDPDRRPAFTVRFLRLEEVNVDETTNSDAHEEGADIGEALSTRSKTSYAHIHEILFSTKDKPKLLSQLSALLSDIGLNIKEAHVFSTTDGYSLDVFVVDGWPVEETDGLHKALEVSILRNEGSWSGSESSASKRSLPFLAQDFESDIDTRLLKLVNKIASGSCGDMFLGTYSGEEVAVKVLNPQNLNKNVWSEFKQEINMLRNCSLKIGISRHAFTSTSLFVASTNKDIYLAFTFHASFQGS

SEQ ID NO: 62517 - protein, 266 aa, Zea mays
  Coding DNA Sequence Number=SeqID_20738
  Subcellular localization annotation: CTP_CleavageSite=46; ConfidenceScore=5.09e-01
MTPPVTWSVRALGRARRRLLRGRGPSPSPGSGEAEFVVFRGRGRVRALGSGEAELIVFRGRGRVRALGSGEAEFVVFRGRGRVRALGSGEVEFVVFRGRGRVRALGSGEAEFPMAPAAGLACCQPHSVEWHSRRCCPLVRPLCADGGYQLRLGLLGVPLILFPDRVQNKGAKETKENPGLADRTVRCTRVDQLQTLHLQVSEAALRYNSPDCPVGHRTVREQVSMALSKRTSGGGAPQGQWRRQLREVQRARDFDSSEARSRSGAH

SEQ ID NO: 62518 - protein, 91 aa, Zea mays
  Coding DNA Sequence Number=SeqID_20739
  Gene Ontology: Mol. function=transferase activity; Cellular component= intracellular; Biological process=chromatin assembly or disassembly
  Homolog annotation: Hit_ID=Q8W513; Match level="QueryCoverage=40%, HitCoverage=8%, E-value=7e-12, Identity=89%"; Hit description =Histone aceytl-transferase HAC108
  Pfam annotation: Domain name=PWWP; Domain location=20-79; Score=10.4; E_value=0.0012; Accession=PF00855.8; Description=PWWP domain
MVSTKRKRTTGAAVVMTVVKWKVGDLVLTKMKSFPAWPAMQGHEELDGASLREHEEFTKVKNISKVELGRYEIDTSYMLHEAQRISFRGIW

SEQ ID NO: 62519 - protein, 244 aa, Zea mays
  Coding DNA Sequence Number=SeqID_20740
  Gene Ontology: Mol. function=phospholipid binding; Cellular component= coated pit; Biological process=endocytosis
  Homolog annotation: Hit_ID=Q8LJJ6; Match level="QueryCoverage=87%, HitCoverage=42%, E-value=5e-61, Identity=58%"; Hit description =Clathrin assembly protein-like
  Pfam annotation: Domain name=ANTH; Domain location=18-240; Score =11.7; E_value=7.2e-09; Accession=PF07651.6; Description=ANTH domain
MAPRTLCDDGGSRPPYGSKRMRPHPCSASRRLSAHGDPAYEQEVFLATRRGRRMLDLSRFHDRDCAQCRDWCFATFVHAYATYLDDRLKHRMQARGAGGASLGKWHVDGDPDGMACEVAEAWEPMPRGRSASATETTAAEDVIGKAQQLKHLLGRFIQCRPTGKARTNPVVTVALYRLVKESATMYCELMEVMVVLLDRFADLGTPACMRVHSIFTSLAKLVDELDDFYLWCKATDVCHPSGYP

SEQ ID NO: 62520 - protein, 457 aa, Zea mays
  Coding DNA Sequence Number=SeqID_20741
  Gene Ontology: Mol. function=RNA-directed DNA polymerase activity; Cellular component=intracellular; Biological process=RNA-dependent DNA replication
  Homolog annotation: Hit_ID=UPI00004C1733; Match level="QueryCoverage =99%, HitCoverage=33%, E-value=0.0, Identity=93%"; Hit description =UPI00004C1733 related cluster
  Pfam annotation: Domain name=RVT_1; Domain location=56-225; Score =135.0; E_value=2e-37; Accession=PF00078.17; Description=Reverse transcriptase (RNA-dependent
MPGIPRDVAEHFLDIRAGARPIKQPLRRFDEEKRRAIGEEIHKLMAAGFVKEVFHPEWLANPVLVRKKGGKWRMCVYHTGLNKACPKVPYPLPRIDQIVDSTVGCETLSFLDAYSGYHQIRMKESDQLATSFITPFGMYCYVTMPFGLRNAGATYQRCMNHVFGQHIGRTVEAYVDDIVVKTRKASDLLSDLEVTFRCLKAKGVKLNPEKCVFGVPRGMLLGFIVSERGIEANPEKIAAITGMGPIKDLKGVERVMGCPAALSRFISRLGERGLPPYRLLRKAECFTWTPEAEEALGNLKALLMNAPILVPPAAGEALLIYVAATTQVVSAAIVVERRGEGHALPVQRPVYFISEVLSETKIRYPQVQKLLYAVILTRRKLRHYFESHPVTVVSSFPLGEIIQCREASGRIAKWAVEIMGETISFAPRKAIKSQVLADFMAEWVNTQLPTVPIQPEL

SEQ ID NO: 62521 - protein, 114 aa, Zea mays
  Coding DNA Sequence Number=SeqID_20742
MAPRTLPDDDGSQPLTEARGRQQGLDSPDSCPSARLQRSSDGHDTTRTGCQNLFGCHDGMGDPQHVAGEQQGVDELQAGLDHIKGLQVEQGTTATTARLPKQQQPGARAVQQVQ

SEQ ID NO: 62522 - protein, 63 aa, Zea mays
  Coding DNA Sequence Number=SeqID_20743
MAACHEVWDTEGDSRDLAGRRSSNLRRPACCSTCCWTSSSCYVSSTVLWVLLLPILVVIPPPT

SEQ ID NO: 62523 - protein, 33 aa, Zea mays
  Coding DNA Sequence Number=SeqID_20744
MTLGGVGTDISTKSKGITSVESTIETKATAYHP

SEQ ID NO: 62524 - protein, 220 aa, Zea mays
  Coding DNA Sequence Number=SeqID_20745
  Gene Ontology: Mol. function=hydrolase activity
  Homolog annotation: Hit_ID=Q6Z8N3; Match level="QueryCoverage=38%, HitCoverage=20%, E-value=1e-32, Identity=80%"; Hit description =Putative phosphoprotein phosphatase PP7
MLLGSVGGLCCWWLLKQEGDLRHAGNGGALDPYVYMVTDRSDEVNEALFIEIVMEMFTGGKGHKYKANFTNDLTSMKLGSLDELLKAMITVLDPPWEGSNLIPRDVMWSDPSLQMGLSPNKDQDIGLLWGPDITQQFLRTNNLKRRTGELIMWRPGSVMVVYRGSIYKRPLKSQALNGASSSVKGEFGALFIPNASNAVENDIQGIYLSAKHATVSLLNV

SEQ ID NO: 62525 - protein, 818 aa, Zea mays
  Coding DNA Sequence Number=SeqID_20746
  Homolog annotation: Hit_ID=Q7XDI4; Match level="QueryCoverage=96%, HitCoverage=81%, E-value=1e-142, Identity=34%"; Hit description =Expressed protein
  Pfam annotation: Domain name=DUF810; Domain location=1-818; Score =1242.3; E_value=0; Accession=PF05664.2; Description=Protein of unknown function (DUF810)
MSAKDAENANIVDSDMLTDKMEADLHVQFKASDFSDPQEYEAWRSRNLKLLEAGLLVHPLVPLNKSDSSVQRLRQIIRGAYDRPLETGKNSESMQGLRTCVMSLAGRSHDGTSDGCHWADGFPLNLHLYQTLVEACFDNDEGTVVDEIDEVMELLKKTWVILGINELLHNLCFTWALFNHFVMSGQVDIELLSAAENQLAEVAKDAKTTKDPNYCKVLSSTLSSIMGWTEKRLLAYHETFNTSNIESMQGIVSIGVSAARVLVEDISHEYRRRRKEETDVARSRVETYIRSSLRTAFAQRMEEADSKRSSRNPTPVLSILAKDISDLATKEKKLYSPILKTWHPLASGVAVATLHSCYGNELKQFVAGLTELTPDTVEVLKSADKLEKDLVNIAVEDSVDSDDGGKSLIREMPPYEAENAIANLVKVWIKERVDRLKGWVDRNLKQETWNPGANRDNFAPSSVEMLRVIGETLDAFFQLPIPMHPALLPDLTVGLDRSLQLYVAKAKSGCGARNSFMPQLPPLTRCEVGSKLLFKKKEKPQNLQVRVSQNGASNGNDPLGLPQLCVRLNTLQYIRGEFENLEKKIKTSLRNVESAQADITDGLNIKFELCQAACQEGIQQICETTAYKVMFYDLGHVLWDTLYVGDTASNRVEVLLRELDPVLETVSSMVHNKVRNRAITALMKATFDGFLLVLLAGGPLRTFTRQDSQIIEDDFRALRDLYLADGDGLPEELVDKASSQVKNVLPLFRADSESLIERFKRMMVESNRPASKNRLPLPPTTGHWSPNEPNTVLRVLCYRNDETATKFLKKTYNLPKKI

SEQ ID NO: 62526 - protein, 183 aa, Zea mays
  Coding DNA Sequence Number=SeqID_20747
  Homolog annotation: Hit_ID=Q5VPC4; Match level="QueryCoverage=26%, HitCoverage=8%, E-value=2e-13, Identity=75%"; Hit description =Pherophorin-like protein
MELNNVGLSPVKNTRDFMLRNIPSHKNGQGIQSLAQLFGSNLMVCPHQVEKHFTFAEVLEAKLAAKKTELQRCRDTAERLEAENGRLCAELDAAALEVTSRKQRIVELEKEMAELRTRQDAAADADDCSSSASASSKRLESSSAAPKPNRASLAGLNRGASTSMGDLRAGAEGAPEGARDPRG

SEQ ID NO: 62527 - protein, 61 aa, Zea mays
  Coding DNA Sequence Number=SeqID_20748
MRTIFVSYPYPNREFSTDSLFDVIDRGAEITHLGVTDFDAEIRALLARESNMALTWLSSAP

SEQ ID NO: 62528 - protein, 68 aa, Zea mays
  Coding DNA Sequence Number=SeqID_20749
  Homolog annotation: Hit_ID=Q6ST18; Match level="QueryCoverage=98%, HitCoverage=100%, E-value=1e-25, Identity=71%"; Hit description=Heat shock factor binding protein 2
MASSKSGIPIKAEQDSDGSAQSTADMTAFVQNLLMQMSLNDLKAEIGGEGMSTPSKMKEESRPSDSSA

SEQ ID NO: 62529 - protein, 145 aa, Zea mays
  Coding DNA Sequence Number=SeqID_20750
MAPPHFEDTGDPTRLNFEAQPWVKPVPDGGGTHDLSPHGDSPRRWCPRPHFSTASSLQSIDEGGFARKIFLLKKEIYYWKSFYSQIFGELFKSSKQDFGCYKGTSSGRTDPRAILFGRFVLAGDRGFFVGRLHRTTFLLAYLESN

SEQ ID NO: 62530 - protein, 108 aa, Zea mays
  Coding DNA Sequence Number=SeqID_20751
MASVNCSPRTTSAVRCGHKIQLHNSRSHRTLWPSRNCKRVPYLLAIQPAILWGCALCLHILTPSPLGFSEFEAQFRAYLNEEPVTEDPGEQQQIEVAEQELIEGKLCP

SEQ ID NO: 62531 - protein, 63 aa, Zea mays
  Coding DNA Sequence Number=SeqID_20752
  Subcellular localization annotation: CTP_CleavageSite=25; ConfidenceScore=5.31e-01
MADAVNSSSRISHRVPSIHHLERVRAALVLNTNLTVSRFSKPRQGLSPMFSNQLVGPGRLVTD

SEQ ID NO: 62532 - protein, 282 aa, Zea mays
  Coding DNA Sequence Number=SeqID_20753
  Gene Ontology: Mol. function=protein transporter activity; Cellular component=nuclear pore; Biological process=protein import into nucleus, docking
  Homolog annotation: Hit_ID=Q5VN12; Match level="QueryCoverage=87%, HitCoverage=35%, E-value=4e-70, Identity=73%"; Hit description =Putative Importin 9
  Pfam annotation: Domain name=HEAT; Domain location=114-150; Score =10.9; E_value=2; Accession=PF02985.12; Description=HEAT repeat
  Pfam annotation: Domain name=HEAT; Domain location=77-111; Score=9.2; E_value=3.2; Accession=PF02985.12; Description=HEAT repeat
  Pfam annotation: Domain name=Xpo1; Domain location=93-247; Score= -16.2; E_value=0.051; Accession=PF08389.2; Description=Exportin 1 -like protein
  Pfam module annotation: Pfam domain module=HEAT::HEAT::Xpo1; Domain location=114-150::77-111::93-247
MEAHGDQRWLVDCLTATLDTARDVRAFAEESLRQASLLPGSPPPTFTPSLVDDWLFIKQHWQEDEENFVPPVVSASEKVVIRQLLLTSLDDSNGKIRTAISMAVAAIGQQDWPEDWPELLPVLLKLIGDQSNGNEVRGALRCLALLSDDLDDMCVPKLVPELFPSLYRIISSPHLYENSLRAKAFAIVHSCISMLGSMSGVYKRDTASLMTSVLDPLIEQFSIVLNYPVQSQNPDDWSMQMEVLKCLLQLVQNFPRLPEAKISGKHETQPEQKYIYVLNIYT

SEQ ID NO: 62533 - protein, 79 aa, Zea mays
  Coding DNA Sequence Number=SeqID_20754
  Subcellular localization annotation: CTP_CleavageSite=61; ConfidenceScore=5.15e-01
MAAAEESPEPALRFMPPPSRSAVDRPPPVPLPRPRPHQRIPRVLPNLPGRSGRLGGPPNARAPRLRRVLRRGDERRRPS

SEQ ID NO: 62534 - protein, 141 aa, Zea mays
  Coding DNA Sequence Number=SeqID_20755
MTLPKTQTNKDKGPKTTDEGFVKANHITSSSTCLSWYVLQQHSQLQEGEQGWMTSSTTSIPFASTSDFESRMTQNQEGEHDEYMDANYIVKAQSIIVPSSRRVEVQFIHEFGWDCRSGSHENGCLGYIRTLFSTFKTPLES

SEQ ID NO: 62535 - protein, 84 aa, Zea mays
  Coding DNA Sequence Number=SeqID_20756
MARQRLLVAEMSYKWPERQLAGHDRRRRVWLWGYAKAKDGGQGRTKMAGDRILLEEEPTLETLSMSARRRRRSTPSRGQRRGDV

SEQ ID NO: 62536 - protein, 156 aa, Zea mays
  Coding DNA Sequence Number=SeqID_20757
  Subcellular localization annotation: CTP_CleavageSite=76; ConfidenceScore=5.17e-01
MPRRCRELSVLQRPLQNRPRSEQNGKALFNNGRLPRPAGAGAAATATCRRSPRPRTDPSVGRLLPSVWSPRVTFTSAVTDRAEQGPSARHSTTHSHSTQSPEVGTTTGIGCEVSRHDSVLRGPTASAFSTVNCIPESRLFSSGQGFRRAANISTRL

SEQ ID NO: 62537 - protein, 454 aa, Zea mays
  Coding DNA Sequence Number=SeqID_20758
  Homolog annotation: Hit_ID=Q2QX94; Match level="QueryCoverage=58%, HitCoverage=40%, E-value=1e-128, Identity=71%"; Hit description=ZW18 protein, putative, expressed
  Pfam annotation: Domain name=DUF676; Domain location=224-374; Score =86.4; E_value=8.9e-23; Accession=PF05057.5; Description=Protein of unknown function (DUF676)
MGTRKGLAYLFSYVERKSGGFIPGRAKTVVEIRGVLQRPLRGCCDGVRRTTERGERGADCAVGAIGTVFGEMGALQPIPGGVCQGHKDDCDLLHTSRQMLLGLSMHLEHITIRLVEFWRWNLGSDLDPLQVKEFMEIHSLNYNGDTFYLVEPYKLYFFQARLYDSCYLICVDLCKCGNAWQFHAFTNGEKHGMVVPQHSSNKDLASNASEQKDTVVLPKLQGESLVPKSSAGHHLDLRLVRNQWLLLDPGADCLMSEANEDKTSRDFKEMGSRLAGEPYLKNLYTYMSISGPHLGYWYNSNSLFNSGLWLLKKLKNAQCIHQLTFSDDQDPHNTYFYKLCKLKTLENFKNIILLSSPQDGYVPYHSARMELCPAASSDTSKKGQVFTEMLNNCLDQIHAPSSDTRTFMRCDVNFDRSNHGQSLNTMIGRAAHIEFLETDIYAKFIMWSFPDLFR

SEQ ID NO: 62538 - protein, 727 aa, Zea mays
  Coding DNA Sequence Number=SeqID_20759
  Gene Ontology: Mol. function=nucleic acid binding; Cellular component= intracellular
  Homolog annotation: Hit_ID=Q2HRQ8; Match level="QueryCoverage=26%, HitCoverage=43%, E-value=1e-69, Identity=69%"; Hit description=IMP dehydrogenase/GMP reductase
  Pfam annotation: Domain name=G-patch; Domain location=60-104; Score =73.7; E_value=6e-19; Accession=PF01585.13; Description=G-patch domain
  Pfam annotation: Domain name=zf-C2H2; Domain location=156-180; Score =15.0; E_value=0.24; Accession=PF00096.16; Description=Zinc finger, C2H2 type
  Pfam annotation: Domain name=zf-C2H2; Domain location=469-492; Score =25.7; E_value=0.00017; Accession=PF00096.16; Description=Zinc finger, C2H2 type
  Pfam module annotation: Pfam domain module=G-patch::zf-C2H2::zf-C2H2; Domain location=60-104::156-180::469-492
ESKQWGKTPQEAVGAGGGRQVDLDEEDDLEEFRLPMGHRPTENLDTDGLQQASVYTQLTASNVGFRLLQKMGWKTGKGLGKNEQGILEPIRADMRDAKLGVGKQEEDDFFTSEENVQRKKLNIELEETEEHIKKREVIAEREHKIRSEVKEIQKVFFCNLCNKQYKLAHEFESHLSSYDHNHRKRFKEMREMQSSSGSRDDRQKREQQREEKELAKIAQLLDFLNEASVRMLIGSSRRISKKSMPLATLLLPSVSTPTAGDHRTHSRRHDHHHGSKRKKKPPPPPSPQPSLPLAPRTPPPPGAPSPKVRAAGKNNHAQYQYQQRRGQPTKNRAAAASSSWEQVKSLLSCRTATAAARVHDPSALARLRGASLCAMRDVVLSSASGDRDTAPLNRRRAPSSSAASGAGSSSHHSSLRGLSGCYECRAIDVEPMSRSVRFRPINLFLKQITMINARLTITRRRYPRPRELCACPQCGEVFTMADSLEHHQAIRHAVSELGPEDSGRNIVDIIFNSSWQKRGRPICHIDRILKVHNAPRTVARFEAYRDAVRSRSRCRAAARVAADGNELLRFHSAPLACALGLGGATALCCAGGASSPCGVCTAIRHGFAPWAGAHPLGVRTTASSARAHDCGCSASPSSVQQTQQPANDAAACRAMLVCRVIAGRVRRGGGGGATSNAADEDQEGPFDSVAVEDAVSSSMYGNLEELFVANPRAILPCFVVIYRVLDA

SEQ ID NO: 62539 - protein, 261 aa, Zea mays
  Coding DNA Sequence Number=SeqID_20760
  Gene Ontology: Mol. function=transcription factor activity; Cellular component=nucleus; Biological process=regulation of transcription
  Homolog annotation: Hit_ID=Q3E0G9; Match level="QueryCoverage=61%, HitCoverage=24%, E-value=9e-11, Identity=35%"; Hit description=Ig -like, group 1
MDPTVRGVTKHPGIAATVEHTQPGGAMESGGRTPSATAIRRPNGTFTNVLELDRLFWLSGNGVYGHRLTSRTTQVAKDPQFQSNYVERKSGRFVPGRAKTVVEIRGVLQRPLRGCCNGQPSPASGTIGSSASPDPRARTNLDPGRRSPPRPTPGLGLNLDPGRRSPPRPTPGLGLNLDPRRRSPPRPTLGLGLNLDPRRWSPPRPTPGLGLSLDLGGVTALPDLGLEPTTLQGDTSFTLPLASSGYGEQDRRPIWLAPVNK

SEQ ID NO: 62540 - protein, 93 aa, Zea mays
  Coding DNA Sequence Number=SeqID_20761
MSGDHAKREIVTSDKAKGSGRKNNERTPSRKSDDKYKEESTISIKSHRKGDKKKKKMKKVVYYETDSSSHSTSGTESTTLKRQERKKRKGHDA

SEQ ID NO: 62541 - protein, 508 aa, Zea mays
  Coding DNA Sequence Number=SeqID_20762
  Gene Ontology: Mol. function=binding; Cellular component =intracellular; Biological process=protein amino acid phosphorylation
  Homolog annotation: Hit_ID=Q2QNV4; Match level="QueryCoverage=99%, HitCoverage=57%, E-value=2e-65, Identity=28%"; Hit description =Pentatricopeptide, putative, expressed
  Pfam annotation: Domain name=PPR; Domain location=121-155; Score =27.0; E_value=6.8e-05; Accession=PF01535.11; Description=PPR repeat
  Pfam annotation: Domain name=PPR; Domain location=222-255; Score =19.2; E_value=0.015; Accession=PF01535.11; Description=PPR repeat
  Pfam annotation: Domain name=PPR; Domain location=327-361; Score =34.6; E_value=3.5e-07; Accession=PF01535.11; Description=PPR repeat
  Pfam annotation: Domain name=PPR; Domain location=430-464; Score =48.0; E_value=3.1e-11; Accession=PF01535.11; Description=PPR repeat
  Pfam annotation: Domain name=PPR; Domain location=465-499; Score=3.2; E_value=3.1; Accession=PF01535.11; Description=PPR repeat
  Pfam annotation: Domain name=PPR; Domain location=7-41; Score=14.9; E_ value=0.13; Accession=PF01535.11; Description=PPR repeat
  Pfam annotation: Domain name=TPR_4; Domain location=120-145; Score =8.5; E_value=3.7; Accession=PF07721.5; Description=Tetratricopeptide repeat
  Pfam annotation: Domain name=TPR_4; Domain location=190-215; Score =15.6; E_value=0.18; Accession=PF07721.5; Description=Tetratricopeptid e repeat
  Pfam annotation: Domain name=TPR_4; Domain location=221-246; Score =4.1; E_value=12; Accession=PF07721.5; Description=Tetratricopeptide repeat
  Pfam annotation: Domain name=TPR_4; Domain location=295-320; Score =3.2; E_value=16; Accession=PF07721.5; Description=Tetratricopeptide repeat
  Pfam annotation: Domain name=TPR_4; Domain location=89-114; Score =16.4; E_value=0.1; Accession=PF07721.5; Description=Tetratricopeptide repeat
  Pfam module annotation: Pfam domain module=PPR::PPR::PPR::PPR::PPR::PP R::TPR_4::TPR_4::TPR_4::TPR_4::TPR_4; Domain location=121-155::222
MPRRDEVAYATLLSGYAAAADFPGAMALFSRFRASSSQPHDAADPFILSPVLKACASAAASAGLLPLPHAAAAAALHAFAVRSSSLPSVFVSTALADAYAKAGRLDLALQVLDEMPSRNVVSWTTLVASLARAGRRHDALRRFAEMRASGVACDSHACSAALTACADAGLLPRGREVHALCAKLGLDAVPFVANALAALYARCGDVDRALAAVGRMGSHDVAVCTTLIASYVQTGRTEEAIEAFVRMLRDESSNSASPNEYTFSAVIAACPNMDRAYLGEQLHAQAARRGLSHARSVANSLVKLYSRRGHLSAADAIFRESVVKDVVSWSTIISGYTQEGLAEESFALFSEMRHHSSCPRPNEFTLASLFSVCASAASLDTGRQLHALAVAAGLEHHAMVRSALVNMYGKGGSMSDANVVFSNRTKDDVISWTAMIVGHAEHGHSKEAFELFEEMCRIGLKPDHVTFIGVLTACSHAGELELGLRYLNAMNKSYGLEPEKEHYGCVVD

SEQ ID NO: 62542 - protein, 70 aa, Zea mays
  Coding DNA Sequence Number=SeqID_20763
MASRDVCKGRVTRTGRELCEGGESVVRGISGCACGCRLGHDGGGGYCGGCVSCVEDRIPATTKGSPLASR

SEQ ID NO: 62543 - protein, 232 aa, Zea mays
  Coding DNA Sequence Number=SeqID_20764
  Gene Ontology: Mol. function=protein dimerization activity; Cellular component=nucleus; Biological process=regulation of transcription
  Homolog annotation: Hit_ID=Q7Y1H8; Match level="QueryCoverage=49%, HitCoverage=59%, E-value=4e-20, Identity=56%"; Hit description=Auxin- responsive protein IAA14
  Pfam annotation: Domain name=AUX_IAA; Domain location=1-206; Score =21.8; E_value=5.4e-11; Accession=PF02309.7; Description=AUXIAA family
MEMIDAELRLGPPGSNNSDVVVTVVPPAAARKPAAPAPASAAKRPSSSVVKSDDASGTGDHDDDAAPASKAARDTPRTQLLYRARSDQLMIGLVLVNERRRVRAVGWPPVRAYRKNAFHAAAEAARRTNNKGEELQGGGGRLYVKVSMDGAPYLRKVDLRTYGGYRELRDALDALFRLLLLLLRLLLLGRRRLPVRRRLRGQGRRPHARRRRALGQRDNVQYQTHTTGPAAQ

SEQ ID NO: 62544 - protein, 415 aa, Zea mays
  Coding DNA Sequence Number=SeqID_20765
  Gene Ontology: Mol. function=DNA binding; Cellular component=nucleus; Biological process=regulation of transcription, DNA-dependent
  Homolog annotation: Hit_ID=Q5WA77; Match level="QueryCoverage=98%, HitCoverage=100%, E-value=1e-105, Identity=51%"; Hit description=MYB transcription factor-like
  Pfam annotation: Domain name=Myb_DNA-binding; Domain location=127 -173; Score=55.3; E_value=2.1e-13; Accession=PF00249.21; Description =Myb-like DNA-binding domain
  Pfam annotation: Domain name=Myb_DNA-binding; Domain location=179 -224; Score=54.8; E_value=2.8e-13; Accession=PF00249.21; Description =Myb-like DNA-binding domain
  Pfam module annotation: Pfam domain module=Myb_DNA-binding::Myb_DNA -binding; Domain location=127-173::179-224
MDFSCFQPHTGICSYLPFDSYMQHDGQYELHLHPADHHPLEVTGDYTSATFDDLGHEFFAEREIEKPIFNRTSSIGRRVGSQLPLPTIKTEVSHLIDSGLVSCKAYEINDRFLARKKTSLKKANVVKGQWTPEEDRKLVKLVEQFGLRKWSYIAQLLPARVGKQCRERWHNHLRPNIKKDIWSDEEDMVLIEAHKEVGNKWAEIAKRLPGRTENSIKNHWNATKRRQFARRRSRTSSKAPKPGTLLQSYIEGLGIVGPSDKSAAPLSEPTLSPEAPGAKSAKTGGTTLPEEHSPPSNMLDSQGVLLPSEELLAPICDELLDGMCGGLFDCTNEDAFFRVCAVDDDIDVSYIFDHAIKVDPEIDMEMMMMWDDDALACTAGPAAGTAHVETVHVKEEMDLMEMVAATQNCGEAENH

SEQ ID NO: 62545 - protein, 42 aa, Zea mays
  Coding DNA Sequence Number=SeqID_20766
MTPDESWSSPLGRRRRPRPQTVIQSLRRREPPEPMFARSCDS

SEQ ID NO: 62546 - protein, 150 aa, Zea mays
  Coding DNA Sequence Number=SeqID_20767
  Gene Ontology: Mol. function=nucleic acid binding; Cellular component= intracellular; Biological process=chromatin modification
  Homolog annotation: Hit_ID=Q69L90; Match level="QueryCoverage=61%, HitCoverage=29%, E-value=9e-28, Identity=61%"; Hit description=C2H2 -type zinc finger protein-like protein
  Pfam annotation: Domain name=zf-C2H2; Domain location=63-85; Score =22.1; E_value=0.002; Accession=PF00096.16; Description=Zinc finger, C2H2 type
MDQIGKYWGMWGARRSSSSSSTIPISAWAAAYGGSSEPSWEEQAFARDAAEHLGGCVWPPRSYSCTFCQREFRSAQALGGHMNVHRRDRALLRLGGSSSPEDVHATTNDQPHPQQGALLYRAAASNPSTTTPSTTAAAASTKGRYQCCSM

SEQ ID NO: 62547 - protein, 42 aa, Zea mays
  Coding DNA Sequence Number=SeqID_20768
MAASLSIAAELPYFPSHGAELHLPAYCSNGGRRSHFVPMTAL

SEQ ID NO: 62548 - protein, 58 aa, Zea mays
  Coding DNA Sequence Number=SeqID_20769
MEFAFIRSSHNCRRFVCPCTWATSAFTPAKGYRGERPALPSCGLEVEDGVPAVGSAMD

SEQ ID NO: 62549 - protein, 380 aa, Zea mays
  Coding DNA Sequence Number=SeqID_20770
  Gene Ontology: Mol. function=transporter activity; Cellular component= membrane; Biological process=transport
  Homolog annotation: Hit_ID=Q2QN30; Match level="QueryCoverage=99%, HitCoverage=75%, E-value=0.0, Identity=84%"; Hit description=Metal transporter Nramp2, putative, expressed
  Pfam annotation: Domain name=Nramp; Domain location=1-308; Score =521.5; E_value=9.2e-154; Accession=PF01566.9; Description=Natural resistance-associated macrophage protein
MGLLVQLLAARLGVATGRHLAELCRDEYPDWARRALWLMAEVAMVGADIQEVIGSAIAIKILSRGYLPLWAGVVITALDCFIFLSLENYGVRKLEAVFALLITTMAVSFAWMFTDTKPNGKDLLIALVQSRKIDQNKEYQVREALRYYSIESTIALVVSFMINLFVTTVFAKGFYGSKEAGNIGLENAGQYLQEKFGGGFFPILYIWGIGLLAAGQSSTITGTYAGQFIMGGFLNLRLKKWVRALITRSFAIVPTITVALFFDTSDSALDILNEWLNVLQSIQIPFALIPLITLVSKEQVMGVFKIGPNTQAVTWTVATLLITINGYLLMDFFSSEIRGPLSGSLLCVAVLIYASFVLYLILRGTELSEKIAKAIRGSFS

SEQ ID NO: 62550 - protein, 201 aa, Zea mays
  Coding DNA Sequence Number=SeqID_20771
  Subcellular localization annotation: CTP_CleavageSite=47; ConfidenceScore=5.11e-01
MGRRNGANNSDKRSIDSPLNSITRGFGFLSADVGLGLFGFGSGRVASGAARRSGCVALWHPGGALFGGFGRGRERHEGEGEPGNSGRTQGRLRRIGRPASWRRRGRKERDACGWGPQGGAQESFDITRGKYDEASFVTMKQEGNEGRRCCSTDHGQGQAAGVEADVGRRGWGRLVLSGATDRDKAANVGWCRGSRPWARPG

SEQ ID NO: 62551 - protein, 150 aa, Zea mays
  Coding DNA Sequence Number=SeqID_20772
  Homolog annotation: Hit_ID=Q6AT27; Match level="QueryCoverage=26%, HitCoverage=11%, E-value=9e-14, Identity=92%"; Hit description =Putative fibrillarin protein
MAKKRTNVIPIIEDVRHPARYQMLVGMVDVIFSDVAQPNQTHENSEDIVFLQPLDNKIYILVKLVLTQYLIPRLQAQDSKRDYLDHSSGSGVGLYGCTECEADVVALIEEEVSRVGEAARRFEWIGGEVLLFLPLQSQQILNGNTSPRSR

SEQ ID NO: 62552 - protein, 307 aa, Zea mays
  Coding DNA Sequence Number=SeqID_20773
  Subcellular localization annotation: CTP_CleavageSite=100; ConfidenceScore=5.48e-01
RPSAHAHVRSPPPPPPPRVSRRRPASHLQSAALPRIVLRPVHLPLLVKCLRPPPAQNPSPQSRRARRNQPNPSPFSARVPADPMAPHQHNPGPGQRPPVDASLIGSPRSMGSPWSANGRRDEYVRIPEEVEVASKGEGDAAAAIKAAVAAECPRVLRCRAIRWWAKVAVLGIFLAGAGAAAVVFLGPLVIKKDKWWACGVARTIYTTPRGEDGWKRIKRTCSNGNHLGESDSVHREEGEYYNGFLHRGAGVDAHADEDAQFIASTRWRSRRPRQRGRTVHRERGERDNISFTFSTAVQSNSTSTAMV

SEQ ID NO: 62553 - protein, 98 aa, Zea mays
  Coding DNA Sequence Number=SeqID_20774
MSGEYSVKHNDGDRGRGGAEKEEVWDDGVNVSCEDAAKVWARYHVLEAPNSWRIHRTRGRRRRNWRLRIDEEGRVGVDGQMKLKLCWGRRRGRHGRGA

SEQ ID NO: 62554 - protein, 552 aa, Zea mays
  Coding DNA Sequence Number=SeqID_20775
  Homolog annotation: Hit_ID=Q10A14; Match level="QueryCoverage=26%, HitCoverage=13%, E-value=4e-46, Identity=70%"; Hit description =Alanyl-tRNA synthetase, mitochondrial, putative, expressed
  Pfam annotation: Domain name=DHHA1; Domain location=102-174; Score =10.2; E_value=0.031; Accession=PF02272.9; Description=DHHA1 domain
KIASIKSGLDAAAIPAARKADLRGKVSKLEDDYYNCCTSQDELRKAKKKMGEQNIQKAVKSAMDAAEAALSGNKPFCVTHVDVGLDTTAVREAVIKVMDQKGLPIMLFSTDEASNKAVIYAGVPPNAPSGFKVLDWLTPSIAPLKGRGGGGKNGVAQGQERYGRGDKSYPLFDGGAVRVVVIETTISMVKNAWQRPGSGKTKVPPEALVEPASGHAVVQGGVSIVVGVATYGIHGELLPGQLAEAELGRSGVFFEVKADFGRGGVPSRGWARGCPPVRDGLGRGGNRYLVKRGHRGLVDDGLLRPCSLGTHPEWLTPWDEKEPTPPAGYVATIYTTVCEEYLGIEPHWDLLLHLFCVEPFSRPSEVKKSHWFYLRNDDGRLPEYTKRVRLYDRGATAAEVVVAFHYRRVLPLVERHLRMDEMTPEASMESSRMASVALSTDKLLKREREGLPLEASPSRDDDDDEGMEVRLVFCPEVRIWSEPSLVGSSVGADVSVLELEASVPLPEIRASTESGPILATEEEAAVVERAADPLPVPTSRTKGPRSQGHALV

SEQ ID NO: 62555 - protein, 183 aa, Zea mays
  Coding DNA Sequence Number=SeqID_20776
MTISLGTVGACALRRKNLQTYAWSAAPSPKEAFFGGMIKVMACQRWSNEFTGDEGYEGRAFIISVNNKTFGRRRPPTCIELGQEVANSGEGSKPREEPKALMGAKTLQSEAPEACKHKGQILSLEQATKAALAASAKKAKVTFADEIPPPTKNVTLTINKPEEENNQDHPLQKAVSTPAALRA

SEQ ID NO: 62556 - protein, 47 aa, Zea mays
  Coding DNA Sequence Number=SeqID_20777
MATKGNPYFVLDDAEEKRMWSEFHTMARGLMAKFVAKSIFIRREHDV

SEQ ID NO: 62557 - protein, 50 aa, Zea mays
  Coding DNA Sequence Number=SeqID_20778
MSSFSAALAVLASWSKRKHQLLNNSSQFTSIFDSFSSHYYIMYPCHPLGG

SEQ ID NO: 62558 - protein, 187 aa, Zea mays
  Coding DNA Sequence Number=SeqID_20779
MKRISGKKELGVVLRTPSISFDCAVVGMVVDGAFGVTLVPKVHASLRRVIQVHARVGDVDNGVRRVGGLIGGILIVAVCGNPTVAFGATGEAFFLGGSAMRCKMPPRSVMQEMDPKWKISPALKVIMVLKEYEDYKMRIVDEDELECEVGVNPSQSPSWLLHNLHGELDRDTTKPSMRRQPLRVTRR

SEQ ID NO: 62559 - protein, 125 aa, Zea mays
  Coding DNA Sequence Number=SeqID_20780
MEETPISVLISFLMRVFLPSCGEVLNSAGLPYAPYVHSAALGWRSLDSQIIGFRTDDTTEAEAMKTLTTFYGYHPLEMVMHPLGLFPAEKKDDPLWCNRVSHVKDVWVMYLDLVGRITVQCMSAL

SEQ ID NO: 62560 - protein, 76 aa, Zea mays
  Coding DNA Sequence Number=SeqID_20781
MGEARSPGASCTPRWRMGAWKTGARLVAPCTRREGSPYTRAKDEPKPPPRALSTSATRGPLVSRTSQVPFHNSTPT

SEQ ID NO: 62561 - protein, 36 aa, Zea mays
  Coding DNA Sequence Number=SeqID_20782
MWKLKEQGPNPFIAVGQKAVSFYRQAHQTGVASSLP

SEQ ID NO: 62562 - protein, 99 aa, Zea mays
  Coding DNA Sequence Number=SeqID_20783
MADDQRQVCSDTHHGPGRAGDDVHEPQGYSWRGLHATARSENADEIPDVENGGSGTSTGELTRLADGKLRRARVKKLDAKLLLFWRREARRWRAGVRDR

SEQ ID NO: 62563 - protein, 516 aa, Zea mays
  Coding DNA Sequence Number=SeqID_20784
  Gene Ontology: Mol. function=kinase activity; Cellular component =cellular_component; Biological process=carbohydrate metabolic process
  Homolog annotation: Hit_ID=Q9FUY5; Match level="QueryCoverage=99%, HitCoverage=100%, E-value=0.0, Identity=89%"; Hit description =Protein kinase AKINbetagamma-1
  Pfam annotation: Domain name=CBS; Domain location=196-346; Score =20.1; E_value=0.001; Accession=PF00571.18; Description=CBS domain
  Pfam annotation: Domain name=CBS; Domain location=377-514; Score =58.7; E_value=1.9e-14; Accession=PF00571.18; Description=CBS domain
  Pfam module annotation: Pfam domain module=CBS::CBS; Domain location =196-346::377-514
  Subcellular localization annotation: CTP_CleavageSite=85; ConfidenceScore=5.62e-01
MFSHGADSAHDAGAVGVSSGGATVPTRFVWPYGGKRVFVSGSFTSPLPVNHRYSGAPNSYTFCRRWSEHLPMSPIEGCPTVFQAICSLSPGIHEYKFFVDGEWRHDERQPTISGEFGIVNTLYLTREYNQINTLSSPSTPGSRMNMDVDNENFQRTVTLSDGTVSEGTLRVSEAAIQISRCRVSEYLSLHTCYDLLPDSGKVIALDINLPVKQSFHILHEQGIPVAPLWDSFRGQFVGLLSPLDFILILRELETHGSNLTEEQLETHTISAWKEAKRQTNGRNDGQWRPQQHLVHATPYESLRDIAVKLLQNGISTVPVIYSSSSDGSFPQLLHLASLSGILKCICRYFKNSTGNLHILNQPVCSIPLGSWVPKIGDLNSRPLAMLRPNASLSSALNMLVQAGVSSIPIVDDNDSLLDTYSRSDITALAKDKVYTHVRLDEMTIHQALQLGQDANTPFGFFNGQRCQMCLRSDPLLKVMERLANPGVRRVFIVEAGSKRVEGIISLSDIFKFLLSL

SEQ ID NO: 62564 - protein, 157 aa, Zea mays
  Coding DNA Sequence Number=SeqID_20785
MEHSSRPTLGFPLGTALLLLVIFALSGMFSCCYHWDKLRALLRSRHPDMFLEAEEHTAVSVASSSPPRKAVSGHKRRVTYSKLELRIICSWRDRGKSAVCPLLLCLETRSPSSWRWRGPALAAPKQQQRRPPNVGIIRNPPSVSVYMMKAQLAVSMI

SEQ ID NO: 62565 - protein, 358 aa, Zea mays
  Coding DNA Sequence Number=SeqID_20786
  Gene Ontology: Mol. function=NAD+ ADP-ribosyltransferase activity; Cellular component=nucleus; Biological process=protein amino acid ADP-ribosylation
  Homolog annotation: Hit_ID=Q8W3G3; Match level="QueryCoverage=67%, HitCoverage=43%, E-value=4e-61, Identity=49%"; Hit description =Putative CEO protein
MEQMAMRGALEIAKPHKGSICGVGTCLAPANCTNSCARYSDFHEDGIIRMMLCRVIMGNVEVVLPGSKQFQPSNGSFDNGVDDLQNPQNYIVWDANVHKHIYAEYAVIVQAPLVTNECSGLKDSVPNISEIISSGSRDNLTKEDRFAPCGVEQEAPRLGRAPRAPSSPWMPFSMLFAAISTKVPRSDMELVIRYYEEFKVRKRMSRSDLVVRMRQIVGDKILVSTIMRLHHQKKKEANRGGDDGFLQPPSMAAAAAGLARALARGEEGGGVAELNRKHPTIALPSVSASAVAPLSKEVDRLIADERQLSSCRYPVARWRRRRVLNFSVLKVPVGASSNPLADTPYPEATRERVTLRSI

SEQ ID NO: 62566 - protein, 185 aa, Zea mays
  Coding DNA Sequence Number=SeqID_20787
  Gene Ontology: Mol. function=binding; Biological process=protein kinase C activation
  Homolog annotation: Hit_ID=Q10AH5; Match level="QueryCoverage=99%, HitCoverage=61%, E-value=1e-44, Identity=56%"; Hit description =Pentatricopeptide, putative, expressed
MDVASTASCFNTVIAAVAESGEHPAQAIEVVGTTMDALTSVKEVHGFAVRQCIVSEGPQPGSCSGRGCLELSGFSLRFPWSCNLAFPTHGGPGDMEWELVQIIIRAWCRRLQLHQAYELIRTMPAVKVTAKAWELFLLHAGSMGMCGWQRLPGEHCLRSNQRMHEILFRLQTSTRIVACMRMQSG

SEQ ID NO: 62567 - protein, 133 aa, Zea mays
  Coding DNA Sequence Number=SeqID_20788
  Homolog annotation: Hit_ID=Q6ZIX9; Match level="QueryCoverage=61%, HitCoverage=8%, E-value=7e-22, Identity=61%"; Hit description=Cyclin- like protein
  Subcellular localization annotation: CTP_CleavageSite=35; ConfidenceScore=5.12e-01
MQRRRLTRAKVVALMVMASSALVNVVTVAHHPHPSAVAGAARVLAPRSFLVEQFWFMRELSHISSEFDNVVQVVLENYKPQKMQNDDQGTNDADSQLVQEDQKAEHPPSPFIITVAPSWESIVNIKGEVSLPE

SEQ ID NO: 62568 - protein, 169 aa, Zea mays
  Coding DNA Sequence Number=SeqID_20789
  Gene Ontology: Mol. function=3'-5'-exoribonuclease activity; Cellular component=exosome (RNase complex); Biological process=RNA processing
  Homolog annotation: Hit_ID=Q84T68; Match level="QueryCoverage=96%, HitCoverage=98%, E-value=2e-46, Identity=70%"; Hit description =Putative exosome component
  Pfam annotation: Domain name=RNase_PH; Domain location=14-154; Score=- 4.9; E_value=0.011; Accession=PF01138.11; Description=3' exoribonuclease family, domain 1
MEGGSRADGRNPNQLRPFTCTGNPLHRAHGSARWAQGDTVVLAAVYGPKSGTRKGENPEKASIEVVWKPKTGQIGTLLFPSSSLRPTAARVTGSLKWRVVFAGRQEREYEMTLKRTLQSICLLTVHPNTTTSVVLQDDYFNCIERGVMASSRISDFMRKTLQKEASRDA

SEQ ID NO: 62569 - protein, 148 aa, Zea mays
  Coding DNA Sequence Number=SeqID_20790
  Homolog annotation: Hit_ID=Q10AH5; Match level="QueryCoverage=80%, HitCoverage=26%, E-value=8e-23, Identity=53%"; Hit description =Pentatricopeptide, putative, expressed
MAPQGPNDGVAGGQFVEHAAGEFVEGSATAAAVCAVGRDEKGHEEGAGEEATLGGERVEAAAALGTERGGGLEREREDVGRTAGGVDERRDVGGGKHAGGGAELVAVAGGVHLGGQQQLRQALVAGAGRERASFLSLSSARTMVGERL

SEQ ID NO: 62570 - protein, 332 aa, Zea mays
  Coding DNA Sequence Number=SeqID_20791
  Gene Ontology: Mol. function=protein binding; Cellular component =nucleus; Biological process=protein transport
  Homolog annotation: Hit_ID=Q84T78; Match level="QueryCoverage=98%, HitCoverage=84%, E-value=1e-107, Identity=62%"; Hit description =Putative p21 C-terminal-binding protein
MPRPPSKRVKRAEPSSDEVEDRGSSGSEEESFSTSGSDSDDGEESSEELETVQADFAFFDPKPSDFHGARLLLKTYLDSKPWDLTGFADLILAQTTVGTVVKLADDEEEEGEGNGVQKANSSTNNDDDDLFGLISVLNLGQHAEQKCIKDLKEYLLDVCPDKGTKKQLRSLLEEKASSVGLLVCRRFVNFPYELVPKLYDALFDEVSWATEDEPTQELQDSFRFKHYLLIVRMLEKGNPGALVRVISLSYQRKTPPKHKSKANKDDDEPIIYPKFEDEIFHELSSWSFTFPIRSEESAQQEMKNYKEMGLVMAIKAGTVPKFRKKLGDLVSE

SEQ ID NO: 62571 - protein, 75 aa, Zea mays
  Coding DNA Sequence Number=SeqID_20792
MDPYFKVSADNVRRQGKQPKRLWILEKTSEQKNLKVVIDVKHTEAEAKDVAAEAKAISARAIEKVEDDATLKICE

SEQ ID NO: 62572 - protein, 105 aa, Zea mays
  Coding DNA Sequence Number=SeqID_20793
  Subcellular localization annotation: CTP_CleavageSite=47; ConfidenceScore=5.57e-01
MTTFHSMCAPSFSPSLDVPFVFSAFALFFLPNLLPTPTVAIASRLTLVDAGTGGILPMSPLDAQVFIVFFSGNKQDLEIHGGTTTGCSSLVFLALACIWSFLRSH

SEQ ID NO: 62573 - protein, 87 aa, Zea mays
  Coding DNA Sequence Number=SeqID_20794
  Subcellular localization annotation: CTP_CleavageSite=51; ConfidenceScore=5.16e-01
MPYRSIALRCPFHGCALVIGETETGKPLRLRKAPTRANLLRSSPSPRPQARSSLKRQARHRRGAAKPSGATPPPSTLGSQGRHQPPG

SEQ ID NO: 62574 - protein, 67 aa, Zea mays
  Coding DNA Sequence Number=SeqID_20795
  Subcellular localization annotation: CTP_CleavageSite=52; ConfidenceScore=5.23e-01
MATRSSLPHGSNARATNLASALLADPQPPLAPSLSSSHWSADRHVSLPLNKQAANRGSCGDLLGLLR

SEQ ID NO: 62575 - protein, 209 aa, Zea mays
  Coding DNA Sequence Number=SeqID_20796
  Gene Ontology: Mol. function=protein binding; Cellular component =spliceosome; Biological process=mRNA processing
  Homolog annotation: Hit_ID=UPI0000DA43ED; Match level="QueryCoverage =56%, HitCoverage=98%, E-value=5e-16, Identity=37%"; Hit description =PREDICTED: similar to keratinocytes proline-rich protein
MAPPVDVVGPCPGLDEVETPPRSRSSLSSKAEVESEPLGRARRRPSAEARAESEPWGRAKRSSSSSRAEPESEPWGRAKRSSSSSGAEPESEPWGRAKRSSSSSGAEPESEPWGRAKRSSSSSGAEPWGRAKQSSSSSGVEPESEPWGRAKRSFLWRLRPDLAAVSLTLSSGTTVEAAQAALSSCQTGQWSGEVTTVTSALSTGGHASG

SEQ ID NO: 62576 - protein, 135 aa, Zea mays
  Coding DNA Sequence Number=SeqID_20797
MGSIVSAGKRAHGDLICKLLASSGSCCRVEELRPCPREVGIASPWLKGPPCALNFSPGVGIVAVRRVLCAGPLLLQSEIISARAGSTPQSKLLRPTWRARIKAGLHSMWTVDLSAGDWDGIGAFQLGDLIWRDEI

SEQ ID NO: 62577 - protein, 110 aa, Zea mays
  Coding DNA Sequence Number=SeqID_20798
MGSIVSAGKRAHGDLICKLLASSGSCCRVEELRPCPGEVGIASPWLKGPPCALNFSPGVGIVAVRRVLCAGPLLLQSDVCFLPRRSPCSILCVKPIVSESRALEYAGGLP

SEQ ID NO: 62578 - protein, 102 aa, Zea mays
  Coding DNA Sequence Number=SeqID_20799
MGFTHRMEQGDRRGRKHTSDWSSRGPAHSTRRTATMPTPGGARAGYLWFRARESGKRDVGGGNPELHGGAGMRGWETDKWDTPVGAGSCSHLLGQMRYGYGK

SEQ ID NO: 62579 - protein, 271 aa, Zea mays
  Coding DNA Sequence Number=SeqID_20800
  Gene Ontology: Mol. function=protein binding; Cellular component =peroxisome; Biological process=peroxisome organization and biogenesis
  Homolog annotation: Hit_ID=Q6H697; Match level="QueryCoverage=73%, HitCoverage=71%, E-value=4e-58, Identity=60%"; Hit description =Peroxisomal protein PEX19-like
  Pfam annotation: Domain name=Pex19; Domain location=53-270; Score =97.0; E_value=5.6e-26; Accession=PF04614.3; Description=Pex19 protein family
MASNSAAPAAADGGDDLDQLLDSALDDFTSLDLSASAAPKSAGEASGSGSGGKGPVKGLGLGLPDPKVPKRRAGKQPPPRGACAKEALEELTRETREAVRELETATGGVPSLDDDAMMEEFVKQFEDYLSSISLGTSWFQSGQGKKENSGVLLAGQGLSGTMTMGDMDSIVETMMQQLLSKEILHEPMKDIVEKYPKWLEDNKNKISKEEYERYNNQLELMVKLIEVYENDPENMTKIFDIMQNMQECGQPPSDLVQDTVPDLDLSKLGQL

SEQ ID NO: 62580 - protein, 196 aa, Zea mays
  Coding DNA Sequence Number=SeqID_20801
  Gene Ontology: Mol. function=3-beta-hydroxy-delta5-steroid dehydrogenase activity; Cellular component=endoplasmic reticulum; Biological process=steroid biosynthetic process
  Homolog annotation: Hit_ID=Q7Y0G5; Match level="QueryCoverage=52%, HitCoverage=26%, E-value=2e-27, Identity=52%"; Hit description =Putative 3-beta hydroxysteroid dehydrogenase/isomerase
MGRRPMGYGRCRGCRGGEQMGIAGATTGRGINLHGTTYEKNEDGESKSVSCLYQQARNQCTNVFELHYRPSVKIPVSVMMPVAHVVEWTYQKFAKYGMKVPQLTPSRIRLLSCNRTFSCSRAKEQLGYEPLVSLKVSLSLLVVSILSSMSSQAAFKIGSSLVSPASKAYEKWRDSMDVLGARPVPFFGALFGQGIP

SEQ ID NO: 62581 - protein, 90 aa, Zea mays
  Coding DNA Sequence Number=SeqID_20802
  Gene Ontology: Mol. function=transferase activity, transferring glycosyl groups; Biological process=metabolic process
  Homolog annotation: Hit_ID=Q8H462; Match level="QueryCoverage=94%, HitCoverage=17%, E-value=3e-11, Identity=48%"; Hit description =Putative Flavonol 3-O-glucosyltransferase
MEPLDANLAAELGAAVRVPQERFGEFRAEDVARTVRRAMRGEESRALRRHAAELREVVARNDADDAQVAALVQRMARLCGKGQQRVAVPN

SEQ ID NO: 62582 - protein, 131 aa, Zea mays
  Coding DNA Sequence Number=SeqID_20803
  Gene Ontology: Mol. function=actin binding; Cellular component=F -actin capping protein complex; Biological process=actin cytoskeleton organization and biogenesis
  Homolog annotation: Hit_ID=Q8H358; Match level="QueryCoverage=93%, HitCoverage=41%, E-value=4e-35, Identity=61%"; Hit description =Putative alpha subunit of F-actin capping protein
MAVGVQFGLWNSIMSCSLLILKEIYRLAFLLNKVDAHYFEEGNVQLDTNIDRKDSTIMQSPDDCAVSITSIIRHHESEYLSSLEESYLNLSDATFKDLRRKLPVTRTLFPWHNTLAVSLTRDLAKQLALGK

SEQ ID NO: 62583 - protein, 302 aa, Zea mays
  Coding DNA Sequence Number=SeqID_20804
  Gene Ontology: Mol. function=cysteine-type peptidase activity; Cellular component=nucleus; Biological process=proteolysis
  Homolog annotation: Hit_ID=Q75K43; Match level="QueryCoverage=68%, HitCoverage=62%, E-value=1e-80, Identity=61%"; Hit description =Putative sentrin-specific protease
  Pfam annotation: Domain name=Peptidase_C48; Domain location=141-300; Score=65.5; E_value=1.7e-16; Accession=PF02902.9; Description=Ulp1 protease family, C-terminal catalytic domain
MGNLISQLLWKSTRDGVSEAHTKRLDGSPEVVDLTVEPELENNDAVGRMFGDRSVPALGSSKSPEKKATFYEEPHGRRLQESGFKKLKLAELPDPLDNTSKEDLSELFTPLSDKDEREVNALLCSSDDSDKIVVIHTPSNIEITKEKLQCLRPRGWLNDEVINLYIELLKEREKREPNRFLKCHFFNTFFYKRLTCGIAGYDYQSVRRWTTFKRLGYGLVECEKARYIVDELKDKSNIEVEPSSWTVVSESLPLQQNGWDCGMFMLKYIDFHSRGIKPSFSQEHMMYFRKRIAKEIMALRAD

SEQ ID NO: 62584 - protein, 40 aa, Zea mays
  Coding DNA Sequence Number=SeqID_20805
MELFGDGDDDRPTLSSNLLDFMRVDISLTCSIIHMPGHNV

SEQ ID NO: 62585 - protein, 402 aa, Zea mays
  Coding DNA Sequence Number=SeqID_20806
  Gene Ontology: Mol. function=kinase activity; Biological process =ubiquitin cycle
  Homolog annotation: Hit_ID=Q8H451; Match level="QueryCoverage=83%, HitCoverage=89%, E-value=1e-120, Identity=64%"; Hit description =SKP1(S-phase kinase associated protein) interacting partner 6 (SKIP6)- like protein
  Pfam annotation: Domain name=F-box; Domain location=18-65; Score =18.5; E_value=0.023; Accession=PF00646.23; Description=F-box domain
  Pfam annotation: Domain name=Kelch_1; Domain location=110-155; Score =25.5; E_value=0.00018; Accession=PF01344.15; Description=Kelch motif
  Pfam annotation: Domain name=Kelch_1; Domain location=157-203; Score =20.8; E_value=0.005; Accession=PF01344.15; Description=Kelch motif
  Pfam module annotation: Pfam domain module=F-box::Kelch_1::Kelch_1; Domain location=18-65::110-155::157-203
MSAEPTSPPLSTAQVRGSLIPPLPDDLAVHCIALLPRAAHPSLALVSRAFHALLCRHPEPLLAARRTLRCSEPHVLLSLRPPSSASPIFFLLLPHPGWPPLPLPSPPVPVSSSASAATDGARLFLVGGSVSAVPSASVQILDPRARSWSAGPRLSSTREFAAAVAHSGALFVAGGCIPSSPFWAEALDLSTPNAKWRAVASPAHLREKWMHGCASLDGKVVVVADRGGLSYDPSAPPAEAWAPVSPVLDMGWKGRAAVVEGILYSYDYLGQVKGYDPYTDSWSTVEGLEGELPKFLCGATLADVGGLLYLVWEGKWKGKLKEVQRSHIALHWSCDAADADVKQVTLISILKVPISSFSCTAACLREVPTMIQAVCSTYIGFQGLLANGTIFPKYRNAFIATP

SEQ ID NO: 62586 - protein, 1030 aa, Zea mays
  Coding DNA Sequence Number=SeqID_20807
  Gene Ontology: Mol. function=endonuclease activity; Biological process=proteolysis
  Homolog annotation: Hit_ID=Q9FHU7; Match level="QueryCoverage=85%, HitCoverage=95%, E-value=1e-142, Identity=35%"; Hit description =Similarity to nonsense-mediated mRNA decay trans-acting factors
  Pfam annotation: Domain name=DEAD; Domain location=362-535; Score= -47.2; E_value=0.054; Accession=PF00270.19; Description=DEADDEAH box helicase
MGSPTIHLAHACIYSKLLGIPTGGRLHRLLAVALGNCDFISSVFLRLHASCDLHPGVNCTNDWADYKPLGIMSNDGTMSAAGEDMEAKPKQDPLLEMMEAAVRHCNLDLSYLQRKIFSWSIQDVFNKDLLKQQVRRIPDTFMLLNAYLDSFTGPLIEEVHCDVFLSLSGYAHANFIEIVRLDKLNHEKSIYGFVVSMPSKDAKSREIYAPKEGDIVVVSLQKPKHVSDLTKNRSSYNLGSILKSGKEEEEDSDLPPNFCIVRFLSAIPVEVDPETSKPRGPCFAVFLINTTTYDHIWTCLHLVANDHNLAPLQKRGSNTAIVNLVWQYKRRAAEDGSLSFSQLSQSVTQSVDDLGLEKFGLNDSQLHAVADCVLSAIDNRLPSLKLIWGPPGTGKTKTICTILWAMLMKGLRTLTCAPTNTAVLEVASRIVRLVEHLHGSVCFLNDIVLFGSKEKMKIGREDALSMVFLDSRAKRLLPCFMPTTGWMHCLRSLMDHLESPITQYRLHLEKLLKNEKKKESNKGGSRATQGTIIRIPPFKDFFKGYFNKVSNLLRKCVETMYNDHPRSPETGHSFQCMLEVLELIGILQELINCKNDDIWSDEFHDCKIEDDGDPILWSEQLAHVRSNTSKKHKLKLARSLCVRELRYLHKNLELPGYSSKRSVETYLLQRAKCILCTVSSSFRLYNVPMDSSCTDIHSLLKGPETFKLLDMLIVDEAAQLKECETLIPLQLPGIRQAVFVGDEYQLPALVRSKISDGANFGRSVFERLSSLGYGKYLLNVQYRMHPEISRFPVATFYDGKLSDGPNVTSMSYERTFLASKVFGPYSFINVDGGRETTEKHGTSLKNTVEVAAVLRIVQRLFKESVSTGCKLSVGVVSPYNAQVRAICQKVGESYNAHDGFSVKVKSVDGFQGAEEDVLIISTVRSNGAGSVGFLTNLQRTNVALTRAKHCLWIVGNGATLSSSKSVWQKIVKDARDRGCYFEASDDGDLSNAVVKAIIEQDDADNLVRMESLHISRPRSQLQKSGPKNFS

SEQ ID NO: 62587 - protein, 82 aa, Zea mays
  Coding DNA Sequence Number=SeqID_20808
MKCGSLSRTSPMAKPHDRMASLESFYKICWPIIKSGLMRAIDAPRWVERVGEREGGRGEVAGVECERGGSPAAFVFVPRPGQ

SEQ ID NO: 62588 - protein, 760 aa, Zea mays
  Coding DNA Sequence Number=SeqID_20809
  Gene Ontology: Mol. function=calcium ion binding; Cellular component =mitochondrion; Biological process=protein amino acid phosphorylation
  Homolog annotation: Hit_ID=Q6YSW9; Match level="QueryCoverage=88%, HitCoverage=88%, E-value=0.0, Identity=54%"; Hit description =Pentatricopeptide (PPR) repeat-containing protein-like
  Pfam annotation: Domain name=PPR; Domain location=122-156; Score =22.0; E_value=0.0022; Accession=PF01535.11; Description=PPR repeat
  Pfam annotation: Domain name=PPR; Domain location=202-236; Score=3.8; E_value=2.7; Accession=PF01535.11; Description=PPR repeat
  Pfam annotation: Domain name=PPR; Domain location=238-272; Score =27.0; E_value=6.4e-05; Accession=PF01535.11; Description=PPR repeat
  Pfam annotation: Domain name=PPR; Domain location=311-345; Score =13.3; E_value=0.2; Accession=PF01535.11; Description=PPR repeat
  Pfam annotation: Domain name=PPR; Domain location=358-392; Score =14.1; E_value=0.16; Accession=PF01535.11; Description=PPR repeat
  Pfam annotation: Domain name=PPR; Domain location=393-427; Score =29.8; E_value=9.6e-06; Accession=PF01535.11; Description=PPR repeat
  Pfam annotation: Domain name=PPR; Domain location=429-463; Score =13.4; E_value=0.19; Accession=PF01535.11; Description=PPR repeat
  Pfam annotation: Domain name=PPR; Domain location=465-499; Score =30.8; E_value=4.9e-06; Accession=PF01535.11; Description=PPR repeat
  Pfam annotation: Domain name=PPR; Domain location=500-534; Score =11.9; E_value=0.29; Accession=PF01535.11; Description=PPR repeat
  Pfam annotation: Domain name=PPR; Domain location=535-569; Score =27.0; E_value=6.7e-05; Accession=PF01535.11; Description=PPR repeat
  Pfam annotation: Domain name=PPR; Domain location=570-604; Score =40.2; E_value=6.9e-09; Accession=PF01535.11; Description=PPR repeat
  Pfam module annotation: Pfam domain module=PPR::PPR::PPR::PPR::PPR::PP R::PPR::PPR::PPR::PPR::PPR; Domain location=122-156::202-236::238 -272::311-345::358-392::393-427::429-463::465-499::500-534::535
MRAASPPLPSLHHHDPDHLLRLVDDLCASGRSAEAHRRASLLLLSPASRLHARAADALLIRLLRARTPLLTLRLLQALPAAATAPAPSLPNRNRLLAHLCRAGHVLLAHRFLLRMGAAPDALSYAALLDGYARAPDARAVQRLLDEMPARGVPPTSLARTFLAKALLRARDVGAAMDVVDTALWPSAAGGDRLREDQEVTSAAFANLVQCLCAEGFFHVLFRVAEEMPQRRCGVGDDFAYAQMIDSLCQAGQHHGASRIVYIMRKRGICPSAVSYNCIVHGLCTMPKPGACLRAHQLVMEGTSFGYRPREVTYKVLVDELCRENELAKAKDVLELMLQPTVQCGQDSGGDAGEETRTRIYNVFLGALRVVDNPSEQLGVLVSMLQAGCKPDVITMNTVIHGFCKSRRTQEARRIMDDMLSGKFCAPDVVTFTTLISGYLGAGDHAQALDVLRSLMPRRRCSPTVVTYNCVLKGLFGVGQVDTAMQVLEEMSANKVAADPVTHTVVIKGLCDAGLLEKAKEFWDNVVWPSGIHDDYVYSAVFRGLCKQMKLEQACDFLYELVDCGVAPSVVCYNILIDAACKQGSNKLAYQLVKEMKRNGLAPDAITWRILSKLHHYDEEEREGNQHQMFDVDRISTEGREERLVLTKDKMPLLPSSENFHGVNEDDNAAETEEEIDYLPDMASKSEAEEVGCSTKMTVEEAPDNTKQTKEQGNCLRDNPTRGTTIDKADITWGDGLKNSDNQPSVKEPLSTVVRKVFGLL

SEQ ID NO: 62589 - protein, 329 aa, Zea mays
  Coding DNA Sequence Number=SeqID_20810
  Gene Ontology: Mol. function=protein serine/threonine kinase activity; Cellular component=cell surface; Biological process =protein amino acid phosphorylation
  Homolog annotation: Hit_ID=Q2QMD5; Match level="QueryCoverage=80%, HitCoverage=38%, E-value=8e-83, Identity=61%"; Hit description =Protein kinase domain containing protein, expressed
  Pfam annotation: Domain name=Kdo; Domain location=60-244; Score= -84.7; E_value=0.059; Accession=PF06293.4; Description=Lipopolysacchar ide kinase (Kdo)
  Pfam annotation: Domain name=Pkinase; Domain location=77-286; Score =130.4; E_value=5.1e-36; Accession=PF00069.15; Description=Protein kinase domain
  Pfam annotation: Domain name=Pkinase_Tyr; Domain location=77-307; Score=45.1; E_value=3.1e-15; Accession=PF07714.7; Description =Protein tyrosine kinase
  Pfam module annotation: Pfam domain module=Kdo::Pkinase::Pkinase_Tyr; Domain location=60-244::77-286::77-307
MALTIGLAAAASVILFLFVLATALFIYRRQKRTAATVADQESNKDDETEGVFRFFSKASAGPKRFAYDVLAAATGNFSDDRKLGEGGFGSVYRGFLAELGLSVAVKRVSSSSTKRRKEYASEVTIISRLRHRNLVKLIGWCHTHNELLLIYELMTNMSLDMHLYSAENNVLSWRRRYEIILGIGSAVLYLHQDCEQGVVHRDIKPSNVMLDASFNAKLGDFGLARLVDHARGAHTTELAGTMGYMDPACISTGRFSTQSDMYSFGVVLLEQDPTLRPSIRQAVSALRDEAPLPTIIVSKAPLLVERLGSLPSSFVPDEGRVTSRMTSTY

SEQ ID NO: 62590 - protein, 95 aa, Zea mays
  Coding DNA Sequence Number=SeqID_20811
MPMRFIKNKNCQPLLLSIREEEEVQCHDEEVAAIDAGVQGHEEEEVAGIDAGVPKVHNKPIKRPKMGSNKESQRHPKACASGMSFDGVSDIRAAL

SEQ ID NO: 62591 - protein, 255 aa, Zea mays
  Coding DNA Sequence Number=SeqID_20812
MDTAPGPRCGWQARPRTPKRDARSAKRAALVDGAVHGAGGVEGAARGVGRGVSGGVETARGTGRGASGGVGAARGTGNDARWGVRDGGGTGSDSRRVDIGGWGGASKGKHIFVENNMTRDEYEVGDEVKTVGPCPVTGRERRLEEKASGLCSEGSGENTEGLKAGNEGAPVPGEFAGVGEEELTARAPAGTAVQCPRGPTSRGRRGGSLPRRRAQRRQHPRWLHKQQSQRSRKVGRWVPWWRMHREKRRSVSGRA

SEQ ID NO: 62592 - protein, 72 aa, Zea mays
  Coding DNA Sequence Number=SeqID_20813
MAMGHDEGRRGDGSRRWGTARGGAAMGHGEEAGVTDKAKKTLGFQGLQPALLPPSPEQYSKQWQEIAAHLVR

SEQ ID NO: 62593 - protein, 324 aa, Zea mays
  Coding DNA Sequence Number=SeqID_20814
  Gene Ontology: Mol. function=protein phosphatase type 2C activity; Cellular component=protein serine/threonine phosphatase complex; Biological process=protein amino acid dephosphorylation
  Homolog annotation: Hit_ID=Q53Q11; Match level="QueryCoverage=82%, HitCoverage=66%, E-value=2e-83, Identity=63%"; Hit description =Avr9/Cf-9 rapidly elicited protein 284
  Pfam annotation: Domain name=PP2C; Domain location=58-312; Score =221.8; E_value=1.5e-63; Accession=PF00481.12; Description=Protein phosphatase 2C
MVEQQQAAQSLMKKASLAARRRPARLVIPVGDDAGEVAAGWGAAAAPAKEADVEVEGEGFSLASRAGPRHAMEDAYAVVTDADSQLAFYGVFDGHGGRAAVDFVSERLSKNVVSAVLAAAGKDTRCEASSSGDDDAVSAAIRAAYLATDSELLTQHQQGASGGACAATAVVKGGDLYVAHLGDCRVVLSREGAAVALTADHTCAAEDERARIEREGGYVSRSGSGVWRVQGSLAVSRAFGDGALKQWVISEPAVTRVPLAAGCEFLVIASDGLWDKVSNQEAIDAVSGGRSRAASCRDLVDMARRRGSRDDVTVMVVDLQRFVR

SEQ ID NO: 62594 - protein, 278 aa, Zea mays
  Coding DNA Sequence Number=SeqID_20815
  Gene Ontology: Mol. function=transferase activity, transferring hexosyl groups; Biological process=carbohydrate biosynthetic process
  Homolog annotation: Hit_ID=Q2RB54; Match level="QueryCoverage=97%, HitCoverage=37%, E-value=8e-64, Identity=52%"; Hit description =Glycosyl transferase family 8 protein, expressed
MPPPSKRRCSALAAAVPALVVCSTLLPLVYLLALHRPAGYGSDDRAAVVISTELAGLGARGSRHLENGGAMKHKLLKDVSKKVSGSDGVSAERSTRSRFSQDHAAKSKAKLKGAFSLLGLNNDTFKGPRTSKRFQLKDLSWRSKYFGCLHSAALHFAYLKNSRVASRAYHAQNGEDTTVNGKENHDQETVHEENTKSCEHEYGSYCLWSTEHREVMKDAIVKKLKDQLFMARAHYPSIAKLKQHEAFTRELKQNIQEHERMLSDTITDADLPPLLVLS

SEQ ID NO: 62595 - protein, 81 aa, Zea mays
  Coding DNA Sequence Number=SeqID_20816
  Subcellular localization annotation: CTP_CleavageSite=56; ConfidenceScore=5.01e-01
MAQPTVADLGAVGAPDMSGAHRTVRCTPDSPNWPKGTFPFQDRGNQARVKPQRLLLGAGGFGSLGDGGMARKPPGGGYRGS

SEQ ID NO: 62596 - protein, 481 aa, Zea mays
  Coding DNA Sequence Number=SeqID_20817
  Gene Ontology: Mol. function=hydrolase activity; Cellular component =integral to membrane; Biological process=mRNA transport
  Homolog annotation: Hit_ID=Q2QYE1; Match level="QueryCoverage=91%, HitCoverage=93%, E-value=1e-148, Identity=60%"; Hit description =GDA1/CD39 family protein, expressed
  Pfam annotation: Domain name=GDA1_CD39; Domain location=71-480; Score= 348.8; E_value=9e-102; Accession=PF01150.8; Description=GDA1CD39 (nucleoside phosphatase) family
MAARPVAATVLLLSLQLAWWSSSYPGVQVLADAAVLGRKAGGLLLAMRDGNDDDNDNDNDKPVINAESSVNAAAAGPGRYAVIFDAGSTGTRMHVFRFDNHMDLVGIGHGIEFFAKVKPGLSSYAGEPQEAANSILPLLKKAKRVVPSELIEKTPLKLGVRDLVHTKSKTQFQYNPDWINVIEGYQEGSYLWVALNYLLDKLGVGDYSQTVGVVDMGGGSLQMAYAISAKDAAKAPKAPDADDRYVTREYLKGKDYNIYAHSYLHYGAFAARVKILDAKKYGQFSSCMLRGFKGGCNYTYNGQQHDATASPEGAVYGKCREEVAKALNLSAPCVISCCGCCTFNGVWSGGGGPGLDTLYLASSFHFLAAQVGMIDGKLPSAKSTPSAFRVAAKKACQMSVEEAKAAYPGVQDIHVPYLCMDLTYQYTLLVDGFGLKSIKKVTLVSKVKHGEYYVQAAWPLGTAIEALSPKMGHRHRAHGFE

SEQ ID NO: 62597 - protein, 89 aa, Zea mays
  Coding DNA Sequence Number=SeqID_20818
  Subcellular localization annotation: CTP_CleavageSite=72; ConfidenceScore=5.06e-01
MRLHGTRLGTPWSGLRLHRPPPVDSRALDIGFNNTSFFVFFDSATGVACDVTGTPACATPLRLHVHLCRLVVATTDREAPPSTLPSSSV

SEQ ID NO: 62598 - protein, 36 aa, Zea mays
  Coding DNA Sequence Number=SeqID_20819
MGRSCFAATTSIRAAAERESYCTGHRVEFEYEYVNG

SEQ ID NO: 62599 - protein, 443 aa, Zea mays
  Coding DNA Sequence Number=SeqID_20820
  Homolog annotation: Hit_ID=Q6QP54; Match level="QueryCoverage=28%, HitCoverage=44%, E-value=4e-11, Identity=44%"; Hit description =Putative kinase
MAASGYSGSAPITDQGFEGWPPKEGQRRLRHSDCSATRQSESDRQSGLAKGATANSAPPDPRARTRAKTRKTANSAPPDPRARTRAKTRKTANSAPPDPRARTRAKTRKTANSAPPDPRARTRAKTRKTANSAPPDPRARTRAKTRKTAKLRSARPQGSDSTLASAERLPPRPTPWLGLGRGNGRQTQPRLRRNPHVALPRARTATSTGSAIIILPRINSGHGEQDRRPIRPAPTGGAMMALHKLYDDGGPQLSYGSRTTLRRTSDSHDITPAGCPDLSGCHIGMAFLEKVGRAGPRTGQALSWGRSLPSPAWTLVTPLLQAHLTWARDEHEGRGTSTSLTLDSGHLASPPFALAHALDPSGLGHAAHSLVGLGTPLSRNADKYKNPQLFNPTQRFLSKDLKWERQEMCVREWEERNPSSTGLEASSTGFGQRVSRLKLKFNS

SEQ ID NO: 62600 - protein, 125 aa, Zea mays
  Coding DNA Sequence Number=SeqID_20821
MTRCEWLDRGHIKNYGINRRNIWDLGVVIFYLPPTFFIFSFLVLDRIFHVKGPMMMANLSFGKRQTYHMGKTINPPPTYHPIKLFDLALLLDISIFSQIDNEPEIRSTDQKRGDEALIELVTTMF

SEQ ID NO: 62601 - protein, 744 aa, Zea mays
  Coding DNA Sequence Number=SeqID_20822
  Gene Ontology: Mol. function=copper ion binding; Cellular component =periplasmic space; Biological process=electron transport
  Homolog annotation: Hit_ID=Q9SW88; Match level="QueryCoverage=93%, HitCoverage=94%, E-value=0.0, Identity=60%"; Hit description=Amine oxidase
  Pfam annotation: Domain name=Cu_amine_oxid; Domain location=303-732; Score=774.2; E_value=8.1e-230; Accession=PF01179.10; Description =Copper amine oxidase, enzyme domain
  Pfam annotation: Domain name=Cu_amine_oxidN2; Domain location=80-168; Score=79.3; E_value=1.2e-20; Accession=PF02727.6; Description=Copper amine oxidase, N2 domain
  Pfam annotation: Domain name=Cu_amine_oxidN3; Domain location=173 -272; Score=140.5; E_value=4.5e-39; Accession=PF02728.6; Description =Copper amine oxidase, N3 domain
  Pfam module annotation: Pfam domain module=Cu_amine_oxid::Cu_amine _oxidN2::Cu_amine_oxidN3; Domain location=303-732::80-168::173-272
MDRSTSLLRLILLALGAALVLLVVRSAFRLPRGIDTPTTSLFDDEATAGSSCTRFAPWGCRQADRIKQKPPSHENDVPRHPLDPLTISEVNRARELLRAHPPFASSPSSMFVHSLALDEPDKPVVLSWRKGVDPLPPRRAVAVVRFRGEAFVLAIDLASGAVTPLPVPASGYPTMTMDEQVLLCYTPFRDPAFNATIQRHGVRLSDVACLPISLGWYGPSEENRRLIKIQCFSAEGTANFYMRPIEGLTVLVDMDTREVVRISDRGAGIPIPPAANTDYRYSRHMQDEGDDQQTAGFQKVRAPSMEPGPSSGPRVELVDGHTVRWGGWEFHLKADARAGMVVSRARVQDPGTGAHREVLYKGMASELFVPYMDPTEAWYFKTYMDAGEYGFGLQAMPLVPLNDCPRHARYLDGVFVAADGRPYVREKMICVFERYAGEVAWRHSESPITGLDIRESRPKVTLVARMVASVANYDYIMDWEFQMDGLVRIKVGLSGILMVKGTSYSHLSEARGNEGDMHGTLLSENVIGVIHDHYVTFRLDMDVDGADNSFVRVEMARQETGPGDESPRRSYLRATRRVAETEKDARVRLSLYHPAEFHVVNPAKKTRVGNPVGYKVVPAGTAASLLDPEDPPQKRGAFTNNQIWVTPYNKSEEWAGGLFVYQSKGEDTLDTWSERDRPIENKDLVLWYTLGFHHIPCQEDFPIMPTVSSSFDLKPVNFFESNPILKQRPTKEDDLPICTASTAA

SEQ ID NO: 62602 - protein, 211 aa, Zea mays
  Coding DNA Sequence Number=SeqID_20823
MDLPCAPSPASHHRLADTLPQPQPPAVHALHAVIRSPANACARGRHGGNVAGKATATAEGVRISSARPGALHPPLLVGTYTLHPHNPTEFPMCRWTRPLCARPTRISLALPCALHSPRFADAYTRKVTSSSPCAGGQGAYMRPTLPWRNPEAAGQQLRPVVTRSSPRSPPSRFQLNDTLSATNQPTLAALSARLRHFRASSCARRPRLPPS

SEQ ID NO: 62603 - protein, 100 aa, Zea mays
  Coding DNA Sequence Number=SeqID_20824
MEARRASRYQVHGRRSKRLRSPKPRVKKKTCKVKGPSATKHGPNSNHLNIVEGSTCQIDRFEQMEEEVEIDSKPRIFLRQEFQIRCNLLEGSFTPLRSSL

SEQ ID NO: 62604 - protein, 119 aa, Zea mays
  Coding DNA Sequence Number=SeqID_20825
  Gene Ontology: Mol. function=nucleic acid binding; Cellular component= intracellular; Biological process=translation
  Homolog annotation: Hit_ID=Q3LRV2; Match level="QueryCoverage=99%, HitCoverage=61%, E-value=6e-34, Identity=57%"; Hit description=Gag
MKKVVYYETDSSSPSMSDTESSTTSKCHERKKYSKPPYFDEDYCMWSDKMRHHLTSLHESIWDIVEFGAQAPKVGDEDYDSDEAAQIRHFNSQATSILLASLCREEYNKVQGLKNAKEI

SEQ ID NO: 62605 - protein, 114 aa, Zea mays
  Coding DNA Sequence Number=SeqID_20826
MARNTLNKIGRGSKLAGGSLSVLLPLIVCLAAWVKPRFFFNLENVCGATRGGQGSLIGVETRRRHDCLGIQQQFAGQEAAHRHWEWAPASRSCPHAACDHGGGEKELMSRGGLS

SEQ ID NO: 62606 - protein, 289 aa, Zea mays
  Coding DNA Sequence Number=SeqID_20827
  Gene Ontology: Mol. function=transferase activity, transferring hexosyl groups; Cellular component=mitochondrion; Biological process= metabolic process
  Homolog annotation: Hit_ID=Q1T4I9; Match level="QueryCoverage=74%, HitCoverage=75%, E-value=2e-31, Identity=31%"; Hit description =Pentatricopeptide repeat
  Pfam annotation: Domain name=PPR; Domain location=115-149; Score =21.4; E_value=0.0032; Accession=PF01535.11; Description=PPR repeat
  Pfam annotation: Domain name=PPR; Domain location=150-184; Score =34.2; E_value=4.5e-07; Accession=PF01535.11; Description=PPR repeat
  Pfam annotation: Domain name=PPR; Domain location=185-219; Score =48.2; E_value=2.8e-11; Accession=PF01535.11; Description=PPR repeat
  Pfam annotation: Domain name=PPR; Domain location=220-254; Score =31.1; E_value=3.9e-06; Accession=PF01535.11; Description=PPR repeat
  Pfam annotation: Domain name=PPR; Domain location=255-289; Score =45.4; E_value=1.9e-10; Accession=PF01535.11; Description=PPR repeat
  Pfam module annotation: Pfam domain module=PPR::PPR::PPR::PPR::PPR; Domain location=115-149::150-184::185-219::220-254::255-289
MSHLLIAHRLSHLALPLLRLLVSRLGRDSPPRLLPLLVSAASTDDPAPLVSAVAKVYADEGLLPDGCSLLLLALRRGIRVPMPAWSDLMNRLPSVPEAYAFYLHLLDAGVPPEARQFNMLMRDMIRSGKLASARNVFDEMLRRGVQPTVVTFNTLMSGMCKASDLNNANALRGLMAKAGIAPDVYTYGAFIQGLCKTGRIQDAMEMFEEMCERGLNPNTVVLTTLIDAHCKEGDVTAGLELRWEMATRGVKADLVAYNALVNGFCRVRDMKAANDIVEEMRKDGLKPDK

SEQ ID NO: 62607 - protein, 216 aa, Zea mays
  Coding DNA Sequence Number=SeqID_20828
  Gene Ontology: Mol. function=heat shock protein binding; Biological process=protein folding
  Homolog annotation: Hit_ID=Q850Z3; Match level="QueryCoverage=88%, HitCoverage=80%, E-value=7e-47, Identity=53%"; Hit description=DnaJ -like protein
  Pfam annotation: Domain name=DnaJ; Domain location=12-73; Score=58.0; E_value=3.2e-14; Accession=PF00226.21; Description=DnaJ domain
MVGAGAATDAARALAAREIGEAASEDAVRRRYRQLALQLHPDKNRHPKAEVAFKIVSEAHACLTDQARRRAFDLERRGSFCAACHDRYAARWSQPASGHQAPAPAASRSKAARETIQSRLRDECRVIDGCLRANDAAACARRRQSFPLFDPSDGRRFPDYPHVRPPPFELRHSEDWLGRAAVDRQALNRRWCRGGGESPVYQIRTVATECTDRRAW

SEQ ID NO: 62608 - protein, 185 aa, Zea mays
  Coding DNA Sequence Number=SeqID_20829
MEEGKRGAAVEGKRKSVERNFGLNVCVCATAEQQQLQLQLGQSVQTTQSVLVFQVKPQVYSLLGNSHTWPQLPEGGGGTSAPYSPKPRFLTSATFDAASHTGDHARPRRTRSGPDRHYDPKRGGAARRTQQRPGKRPPLSAVRTVPADPVRAGAGGRSAGPRCPPRENPKFPRPRRIDGTAPRAL

SEQ ID NO: 62609 - protein, 37 aa, Zea mays
  Coding DNA Sequence Number=SeqID_20830
MAAVSPPRMTEVYISEDTVYMSEDIYTEGDPPLLREP

SEQ ID NO: 62610 - protein, 298 aa, Zea mays
  Coding DNA Sequence Number=SeqID_20831
  Pfam annotation: Domain name=PMEI; Domain location=130-283; Score =42.5; E_value=1.5e-09; Accession=PF04043.6; Description=Plant invertasepectin methylesterase inhibitor
MAFSLRCQYATPNRSTNGVNFGRSKFETVCVDRFAVDVVRTLGLDVRACMHACSSANLPGLTSRYKTEKNDTSNGPSPLRDDDLDRVPCNATTTVTAIARPDRVNMAAALRVLIAVLAVVSVSLRRATAATVPTVVDEACKQYTKYPELCVKSLSSAAPEAKAKAERGGLAGLAGLALAQAAQCGAETVAFVKGLEKMPGGMPPVCLNECVAKFQGALVDLQRSKVAVQKAKDEAAVDTWLTAAKLDGDSCLSDCQKVEGGGEMRIVDKIGDLGKMCSVAMSLADASHRNHTASAAAA

SEQ ID NO: 62611 - protein, 300 aa, Zea mays
  Coding DNA Sequence Number=SeqID_20832
  Homolog annotation: Hit_ID=Q18DN4; Match level="QueryCoverage=44%, HitCoverage=1%, E-value=1e-09, Identity=31%"; Hit description =Halomucin precursor
  Subcellular localization annotation: CTP_CleavageSite=43; ConfidenceScore=5.43e-01
MGTIKSGISPHDATRQSKSDRQSGLAKGATANSAPPDPRARTRAKTRKTANSAPPDPRARTRAKTRKTANSAPPDPRARTRAKTRKTANSAPPDPRARTRAKTRKTANSAPPDPRARTRAKTRKMANSAPPDPRARTRAKTRKTANSAPPDPRARTRAKTRKTANSAPPDPRARTRAKTRKTTKLRLARPQGSDSALASAERLPPRPTPWLGLGHGNRRQTQPRLRRKPHVALPRAQTATSTGGAIIIPPRIDSGQRQQGLDRSNSCPSIRLRRTSDSHDITPAGCPDLSGCHIGMYLGR

SEQ ID NO: 62612 - protein, 105 aa, Zea mays
  Coding DNA Sequence Number=SeqID_20833
MKLSDANLTLEKKYVHLNRLQAKMEAFLRTKDDESASHSTVLRGARLISVVVAATSSSPVEVDAEPLLPTAAAERERERDDDGRTVRLDKSERTSDAERGLQARM

SEQ ID NO: 62613 - protein, 135 aa, Zea mays
  Coding DNA Sequence Number=SeqID_20834
MEARAAMSWYCGSLLAVAIALFLSVSLGVRAAGAGAGVDIKVSCAATPDPDCLNECAGEIEEALDHLDDTEGGLDDGKLHDVKLTPPSTPVKTTLLAKNKDFEALMRVAHALIKRATGGAGDAPAPAPAARAKIH

SEQ ID NO: 62614 - protein, 167 aa, Zea mays
  Coding DNA Sequence Number=SeqID_20835
  Subcellular localization annotation: CTP_CleavageSite=33; ConfidenceScore=5.46e-01
MRAPSFSLSSDVPFVFPVFALFFHPNLLPPPTVAAASRPTLVDTGLGKHSHSLALLGLTPGADALVFVVSFSGNEQRASVRHLPLCSPQGISRKRIDMAAASAAALRGLVVVLAVLSVSTWGAVATINVKDTCSFTAHPNLCEKAMTKLMGQNGVPTSAPAAPETSA

SEQ ID NO: 62615 - protein, 193 aa, Zea mays
  Coding DNA Sequence Number=SeqID_20836
  Homolog annotation: Hit_ID=Q6YU89; Match level="QueryCoverage=63%, HitCoverage=6%, E-value=5e-20, Identity=57%"; Hit description =Putative HECT ubiquitin-protein ligase 3
MEPSPSSRRRSRAAAADKGKDPDPASSGHPSPPAPDNDADVTFPEPFTSASTALQGLLRRLGAGLDDLLPSSSSAPSSATSDHLKRTLAGLQAHGDESRQLQSLMQLCEMLSIGTEDSLARLPGRRFRPNPRRDARPRGRACHRWCQPQRHAARGAAIAAMTAPREETARGQNGKIKCANDYLEGPMLNVQSG

SEQ ID NO: 62616 - protein, 141 aa, Zea mays
  Coding DNA Sequence Number=SeqID_20837
  Subcellular localization annotation: CTP_CleavageSite=40; ConfidenceScore=5.54e-01
MAGPSGAAASSSTSRGVPENRFYNPPHVRRQQQQEQQRLRSASPSPSPSPSPRSARQKPPPPPGALASAADVDSRVDSDDSSSTTSSKPSVASTAAGNLERFLTSTTPSVTAQYLPKVSSGLLFATSVGCCVVVLLLRAVC

SEQ ID NO: 62617 - protein, 481 aa, Zea mays
  Coding DNA Sequence Number=SeqID_20838
  Gene Ontology: Cellular component=membrane
  Homolog annotation: Hit_ID=Q1SD20; Match level="QueryCoverage=49%, HitCoverage=63%, E-value=4e-41, Identity=37%"; Hit description=TMS membrane protein/tumour differentially expressed protein
  Pfam annotation: Domain name=Serinc; Domain location=18-296; Score= -225.8; E_value=3.9e-05; Accession=PF03348.6; Description=Serine incorporator (Serinc)
AATDTNTMAVHWFFLFQGPSPMIVRYVYAVLFLLANLSAWLTRENGISYFISQRVSGGCHGKIAQVGAGLFLVLQLVSTIKFITQLNYKLCVTNFEERYLWVAAISATAVIISMGLIIFMTLKFAQCWHNMEVIVITLVLFFIMCVLSLMSKANKFFMEPALIGGYATFICLLAMTSEPESGCGMKSKAGPGAGWLTISFFVSGLLSTVYSAFTMGTGYKCTRSTVESEDDVPYGYGFFHFIFSAGCMYFGMMFVAWDTHHTMEEWNVDIGWISTWVHIASEALVVVSYLTILLARILGVGWLQHFLAKIFGTDDQPHNDESHTTTDESHMMTVHGDEPQTTTVHGDEPQTTTVHGDESHTTTVHGDEPQTTTVHGDESHTTTVHGDESQATTTNDDESETMNTHVTSPSSLYHTASPSLLYYSPEQSPTNNTDHQPPPPSPPSLSPPHTIELQMSEVPNIGTSGMNEEDGDDYIREWESE

SEQ ID NO: 62618 - protein, 426 aa, Zea mays
  Coding DNA Sequence Number=SeqID_20839
  Homolog annotation: Hit_ID=P30792; Match level="QueryCoverage=46%, HitCoverage=37%, E-value=5e-85, Identity=81%"; Hit description=2, 3 -bisphosphoglycerate-independent phosphoglycerate mutase
  Pfam annotation: Domain name=iPGM_N; Domain location=182-424; Score= -20.1; E_value=4.5e-15; Accession=PF06415.4; Description=BPG -independent PGAM N-terminus (iPGM
MTIGNVLNSLKQFQSFILNYYYAIKESSELFDSDVNDINPTSCNGIMKFTDELFAKSSSVHFKAERLWMLRLLSAGSNLADDAKIYKRGRVLELALAFCSSPVSDFESKVLVLKVLENCVKLPSSSSSSRKLESSIVAVNSSDSSHIVYVCQQHRGTTDPLRQSWGQVATMIGIANIFDEALSSSKESCSSASASVKVRALCSFFEEKTSTSAIAKLVDQALASGKIYDGDGFNYIKESFENGTLHLIRLLSDGGVHSRLDQLQLLLKGVSERGAKKFVCTSLPMGVAFLDGSNVGFVETLENDLLELRGKGIDAQIASGGGRMYVTMDRYEVLGEAPYKFKSALEAVKTLRAQPKANDQYLPPFVIVDDIGKAVGPVLDGDAVVTINFWADRMVMLAKALTEWSFDFDGTRSQHPLSSHMASLFS

SEQ ID NO: 62619 - protein, 192 aa, Zea mays
  Coding DNA Sequence Number=SeqID_20840
MKRRSSGRRCDRAWGRRRADAPSLAPADGSAAAAKQRSLGQVTTSCMGESQTTTTSDETYTTSSSLSSFYLTVEKTTTTTDQMYTAPPSLPSLYLTPKETLNNGVISISNYNTDEAPSPQPVSLVSDEIDISESSPPPSPSPHTVDEMDNSEESPSPLSHTIELQMFEVPTTSGNNEEDEEDDDSFREWESD

SEQ ID NO: 62620 - protein, 341 aa, Zea mays
  Coding DNA Sequence Number=SeqID_20841
  Gene Ontology: Cellular component=membrane
  Homolog annotation: Hit_ID=Q1SD20; Match level="QueryCoverage=48%, HitCoverage=43%, E-value=1e-38, Identity=46%"; Hit description=TMS membrane protein/tumour differentially expressed protein
  Pfam annotation: Domain name=Serinc; Domain location=60-325; Score= -254.8; E_value=0.0012; Accession=PF03348.6; Description=Serine incorporator (Serinc)
MSREMRVRRYVLQIGEGPRIVAPLIPDVNVVVAGKIAGGELLRWRSREGSQASEARTTIMNCVFSCQGLSPMNVRYLYAAIVLLANLSAWFARENTVSYYLKQRLSGSHKFYEIYHKAELQIVPNQLPRKVPRGWDLHLCQHGSTGLTIVMIVKHRHCWLDIEFLGTTLLLVYIMCALSLMSKANKLFMEPGLIGGYILFLCLLAITSEPESSCYQKHKAGPHAIWITISCFAFGLLGTVYSTFSIGSDYKCIHLWNIVESEDDVPYGYGFFHFVFAVGSMYVGMVFVGWDKHHTMKQWSVDIGWMSTWVHIANEALLVVFYTTFGGQKLRKAETNWHDDG

SEQ ID NO: 62621 - protein, 75 aa, Zea mays
  Coding DNA Sequence Number=SeqID_20842
MSKMDALPKVVEINDLQTKVMKDIPSSFYRINMNINKKASTDYFGARFCRSLCPPTAPSAPRHQLDAEPPPTPIL

SEQ ID NO: 62622 - protein, 82 aa, Zea mays
  Coding DNA Sequence Number=SeqID_20843
  Subcellular localization annotation: CTP_CleavageSite=48; ConfidenceScore=5.14e-01
MAYSTTRPVHRRPMQPGHGRGVRSGQPLGPSRQVSRILVPVVDLRWIGSSNVAYRGNLKSRWDDGDLRHSHSDSSHSERLVD

SEQ ID NO: 62623 - protein, 801 aa, Zea mays
  Coding DNA Sequence Number=SeqID_20844
  Gene Ontology: Mol. function=DNA topoisomerase (ATP-hydrolyzing) activity; Cellular component=chromosome; Biological process=DNA topological change
  Homolog annotation: Hit_ID=Q6Z3H8; Match level="QueryCoverage=99%, HitCoverage=74%, E-value=1e-137, Identity=53%"; Hit description =Putative bzip-related transcription factor
  Pfam annotation: Domain name=DUF630; Domain location=1-59; Score =68.4; E_value=2.3e-17; Accession=PF04783.3; Description=Protein of unknown function (DUF630)
  Pfam annotation: Domain name=DUF632; Domain location=489-798; Score =382.5; E_value=6.5e-112; Accession=PF04782.3; Description=Protein of unknown function (DUF632)
  Pfam annotation: Domain name=Extensin_2; Domain location=38-390; Score=-137.1; E_value=0.06; Accession=PF04554.4; Description =Extensin-like region
  Pfam module annotation: Pfam domain module=DUF630::DUF632::Extensin _2; Domain location=1-59::489-798::38-390
MGCGQSKMEEEYAVRHCRVRSELLALAIRQRYTLADAHHAYAESLRAVGALLHDFLRGVQSLPPPPPEPALRLPQQRKGDGLPAASPPPAMASSSAAAAAPPVAKQVRIAPDDGHIQFSDGDSDSEDGHIKFHSDEEPDPARRRPEVVRSTGAPGPPPPQMGQPYASGGGYAPPPYGPGYGYGYATGPGPGPGPDYGGIGMNGGGGYEPGHGVMYGQSYGGSGSGGGYDDQGYGGMGSGGGAGGYDQSYAGIGGYGQSFFNISYARSQPPPPSVSHEQRLEATNARVHYYSGNGEQQPPPRGYGGGYSYPPQSSRSYNQYAYGGYYGGGSAPAPPADIPSSSGEPAAVPPPPSPPRVSTWEFLDPFGTYESYYEQPTATAAPYSPGRSLKDVREEEGIPDLEDEDMEVVKEAYGDEKHPVKGYMGNGKAAKGEGRSSTGDELPRKSKSSEASGSGSSLEHDVHVVEKSVVGEQVRHSEPRQHVAGLPPTGSEKLYIDDTEVVVEIRTQFERASQSAGEVSKMLEVGKMPYYQKGSGFKVSAMIVCGIPTMEEEFLRFEEDKAMGSGNLSSTLQKLYMWEKKLLEEVKTEETMRVLYDRKREELKMLDEKGAEAHKLEATEVYIRKLSTKISIAIQVVNTISEKISKLRDEELWPQTCELIQGLMRMWSVMLECHQIQLHAISQAKNIDSMIDTAKFGDAHMDLIKRLELQLLDWIACFVAWVSAQKNYVKTLNRWLTNGVIYVPEETEDGAPPFSPGRLGGPPIFVICNNWAASVDRISEKEVVEAMQAFASNVLNLWERH

SEQ ID NO: 62624 - protein, 151 aa, Zea mays
  Coding DNA Sequence Number=SeqID_20845
  Gene Ontology: Cellular component=nucleolus
  Homolog annotation: Hit_ID=Q7X9B0; Match level="QueryCoverage=88%, HitCoverage=93%, E-value=5e-73, Identity=100%"; Hit description =Auxin induced protein
  Pfam annotation: Domain name=Auxin_inducible; Domain location=7-107; Score=40.2; E_value=1.9e-09; Accession=PF02519.5; Description=Auxin responsive protein
MINAKKIAHLAKKWQRMAAQGRRRLTLGATSANGADECCSSVASKGHCAVYTADGARFEVPLACLSTPVFGELLQMSEEEFGFAGGDGRITLPCDAAVMEYAMCLLRRGASAELEQAFLSTMAMSCHCASHMAPLKTRHFPQQDGGQGGMD

SEQ ID NO: 62625 - protein, 49 aa, Zea mays
  Coding DNA Sequence Number=SeqID_20846
SPAKLRRVADQLEFGVSEIGESNASRGMGYRRSRLETGVRLTGNRGCRI

SEQ ID NO: 62626 - protein, 778 aa, Zea mays
  Coding DNA Sequence Number=SeqID_20847
  Gene Ontology: Mol. function=RNA-directed DNA polymerase activity; Cellular component=mitochondrion; Biological process=RNA-dependent DNA replication
  Homolog annotation: Hit_ID=Q8S463; Match level="QueryCoverage=91%, HitCoverage=40%, E-value=0.0, Identity=86%"; Hit description =Putative prpol
  Pfam annotation: Domain name=RnaseH; Domain location=213-340; Score =5.8; E_value=1.7e-05; Accession=PF00075.14; Description=RNase H
  Pfam annotation: Domain name=rve; Domain location=490-649; Score =118.7; E_value=1.7e-32; Accession=PF00665.16; Description=Integrase core domain
  Pfam module annotation: Pfam domain module=RnaseH::rve; Domain location=213-340::490-649
MGPIKDLKGVQRVMGCLVALSRFISRLGERGLPLYRLLRKAECFAWTPEAEEALGNLKALLTKAPILVPPADGEALLVYVAATTQVVSAAIVVERQEEGHALPVQRPVYFVSEVLSETKIRYPQVQKLLYAVILTRRKLRHYFESHPVTVVSSFPLGEIIQCREASGRIAKWAVEIMGETISFAPRKAIKSQVLADFVAEWVDTQLPTAPIQPELWTMFFDGSLMKTGVGAGLLFISPLGKHLRYVLRLHFPASNNVAEYEVLVNGLRIAIELGVRRLDARGDSQLVIDQVMKNSHCRDPKMEAYCDEVRRLEDKFYGLELNHIARRYNETADELAKIASGRTTVPPDVFSRDLHQPSVKIDDSPEPEVPSAQPEAPSARPEAPSVQPEVPSASEGEALHVEEERSGATPDRNWQTPYLQYLRQGELPLDRAEARRVARRSKSFVLLGDEKELYHRSPSGILQRCISITEGCQFYAKQTHLPAQALQTIPITWPFAVWGLDLVGPLQKAPGGYTHLLVAIDKFSKWVEVRPLNSIRSEQAVTFFTNIIHRFGVPNSIITDNGTQFTGRKFLDFCEDHHIRVDWAAVAHPMSNGQVERANGMILQGLKPRIYNDLNKFGKRWMKELPSVVWSLRTTPSRATGFTSFFLVYGAEAVLPTDQEYGSSRTRAYSDQSNQVSREDSLDQLEEARDKALLHSARYQQSLRRYHARGVRPRDLQVGDLVLRLRQDARGRHKLTPPWEGPFVIAKVLKPRTYKLANSQGEVYGNAWNIQQLRRFYP

SEQ ID NO: 62627 - protein, 59 aa, Zea mays
  Coding DNA Sequence Number=SeqID_20848
MGVPDFYVRWRVFNALQSNPRVMKAGEHREDKEGECFVRFGHGGGLTPSGITVKKKEIG

SEQ ID NO: 62628 - protein, 343 aa, Zea mays
  Coding DNA Sequence Number=SeqID_20849
  Homolog annotation: Hit_ID=Q75M70; Match level="QueryCoverage=26%, HitCoverage=41%, E-value=1e-14, Identity=69%"; Hit description =Expressed protein
MAHLTVRCATGAPTVRHQCANALSGFCDWEGSAVDQPGPTWQRMDRELIARPPSHVALDTFARDSQGARVPPPQTSAQLLGLPAGLDTYRRRVTIEPWATRAHYELKLLGDSHVSPCVPVPCKPGNSLISESPARQSRVSTPETSESMAEAEVDARATADDEGRGGSSSNVAEDGQPAAAKGRATISVTVVLLALLVASVAAFLTSSLPRAGDGDGEGVQGAAGRAGEVGKRARARRARRRHPGVQQPAGRVPHLGGADVDEAPAAALLRRATLCDVVAACVLCVVPRYDDDGAVGSLGDAAKKSFEMGKETVEQAAAATARATRDAAETAKEKVKGIDDAEL

SEQ ID NO: 62629 - protein, 78 aa, Zea mays
  Coding DNA Sequence Number=SeqID_20850
MALHAVHEREEDEGPDTWGPQTTSSPWFLSVLSKIFLSNNLVKASVFYRGWLPRFFRFDFVSHPSYGEKYGVYQTGET

SEQ ID NO: 62630 - protein, 135 aa, Zea mays
  Coding DNA Sequence Number=SeqID_20851
MPPCSDEQFGAVHRTQPAHRCHTKLQRAPVNIPRKFGGLGGELAARTGTRPWRPAILHYAMRPAYWLGGREGYAALLFMPLWAKNPNDSPKITVRLRYTCATSHSVERRRRGKMIDPTERAHTAVSRSSQRQARK

SEQ ID NO: 62631 - protein, 103 aa, Zea mays
  Coding DNA Sequence Number=SeqID_20852
  Homolog annotation: Hit_ID=P19023; Match level="QueryCoverage=47%, HitCoverage=8%, E-value=1e-14, Identity=81%"; Hit description=ATP synthase subunit beta, mitochondrial precursor
MAQPTVADLGAVGAPDMSETNHFLLIHHEALAFVEQATEQQILIIGIKVVDLLAPYQRGENIGLFDGTQEWVAKQPPPYHHPSKDNNRSRHKMWCITPTRELM

SEQ ID NO: 62632 - protein, 414 aa, Zea mays
  Coding DNA Sequence Number=SeqID_20853
  Homolog annotation: Hit_ID=Q5N941-2; Match level="QueryCoverage=99%, HitCoverage=44%, E-value=1e-114, Identity=57%"; Hit description =Isoform 2 of Q5N941
MAESDGGSEAQSPSPDPRSGDGANPDPRPPRPQLTKSRTISGSVAASILAADRVAGGGGGSGGGGLRDSILVRRSSTAPLPPYTASAAGASSAPRRLTVAVDDPSYAAPNGGVLDRDWCYPSFLGPHASRPRPPRQQQTATTTERRSANPTVPVPPRVAVSQREEEKSLASVVKRPALLEERRTPPPTLPPPRAPRFDLSPYLSLEKIRSCSEANAGDRDGTEKVSWIDRDHGSAFFGSRRWNLAQSSTIFALAIPLFLFKYIDLLRRRQTNSMRGRSGEEEVPLKKRIAYKVDVFFSGHPYAKLLALLLATIILIALGGIALYVVSGSGFLEALWLSWTFVADSGNHADQIGLGPRIVSVSISSGGMLVFATMLGLVSDAISEKVDSWRKGKSEVIEINHILILGWSDKLVTF

SEQ ID NO: 62633 - protein, 420 aa, Zea mays
  Coding DNA Sequence Number=SeqID_20854
  Gene Ontology: Mol. function=ion channel activity; Cellular component= integral to membrane; Biological process=ion transport
  Homolog annotation: Hit_ID=Q5N941-2; Match level="QueryCoverage=88%, HitCoverage=39%, E-value=0.0, Identity=90%"; Hit description=Isoform 2 of Q5N941
MDEGLDEDVSELQSGRDADITDDDTLADKVEVDLPVFHALVLHRIGGEIWEDILGFENAEFYIKQWPELDGMRFGDVLISFPDAVPCGVKVASKSGKILMNPDDGYVLREGDEVLVIAEDDDTYAPAPLPEVNKGFLPNIPTPPKYPEKILFCGWRRDIHDMIMVLEAFLAPGSELWMFNEVPEKEREIKLTDGGLDIGGLINIKLVHKEGNAVIRRHLESLPLETFDSILILADESVEDSIVHSDSRSLATLLLIRDIQSKRLPSKELKSPHRYNGFSHSAWIREMQHASDKSIIISEILDSRTRNLVSVSKISDYVLSNELVSMALAMVAEDKQINRVLEELFAEEGNEMCIRSAEFYLYEQEELSFFDIMVRARERDEIVIGYRLANTDQAIINPEYKSQIRKWSLDDVFVVISKGD

SEQ ID NO: 62634 - protein, 402 aa, Zea mays
  Coding DNA Sequence Number=SeqID_20855
  Gene Ontology: Mol. function=protein serine/threonine kinase activity; Cellular component=spindle pole body; Biological process =protein amino acid phosphorylation
  Homolog annotation: Hit_ID=Q5N942; Match level="QueryCoverage=78%, HitCoverage=86%, E-value=1e-171, Identity=93%"; Hit description =Serine/threonine-protein kinase SAPK4
  Pfam annotation: Domain name=Pkinase; Domain location=4-266; Score =299.6; E_value=5.6e-87; Accession=PF00069.15; Description=Protein kinase domain
  Pfam annotation: Domain name=Pkinase_Tyr; Domain location=4-267; Score=42.3; E_value=4.6e-15; Accession=PF07714.7; Description =Protein tyrosine kinase
  Pfam module annotation: Pfam domain module=Pkinase::Pkinase_Tyr; Domain location=4-266::4-267
MDKYEAVRDIGSGNFGVARLMRNRETRELVAVKCIERGHRIDENVYREIINHRSLRHPNIIRFKEVILTPTHLMIVMEFAAGGELFDRICDRGRFSEDEARYFFQQLICGVSYCHYMQICHRDLKLENVLLDGSPAPRLKICDFGYSKSSVLHSRPKSAVGTPAYIAPEVLSRREYDGKWYLFMQLADVWSCGVTLYVMLVGAYPFEDPDDPKNIRNTIQQIMQVQYKIPDHVHISTECQQLIARIFVANPMRRITMKEIKSHPWFLKNLPRELTETAQGMYYRRDNRVPSYSDQTSEEIMKIVQDARTMPKSSRSGYGWSSEYSDEEEEKEEEHRPEEHEEEEDEYDRRVKESARFRYDNSNACVSDDNNLHNLHQTHNGTILIPIRQLLKEKRGCSTNRM

SEQ ID NO: 62635 - protein, 88 aa, Zea mays
  Coding DNA Sequence Number=SeqID_20856
  Subcellular localization annotation: CTP_CleavageSite=29; ConfidenceScore=5.10e-01
MASKSLSASSLCMLVKGERSTPWGLKGLEAQSTSGCGKPMMRSRKSRSLVEGSRIDKLEPTTESIKVGNPWMPAEDKGPVRMRVPLGN

SEQ ID NO: 62636 - protein, 100 aa, Zea mays
  Coding DNA Sequence Number=SeqID_20857
MAETQFGGNEQFMVSGEQLEQLLVLWMGDYPTELTACSIYSVLERWPVNLMERRGGRRKRGLLALGISGFHRGKLPSDHRICKTRFTAMWSSALARGALR

SEQ ID NO: 62637 - protein, 170 aa, Zea mays
  Coding DNA Sequence Number=SeqID_20858
MAPCRGSSASSAMERLVRPLATAVHGAGGGAGGKGRHGQELGQRPSREVEARAHGRRRWHARHGRGMQSCCSAMGEGVSVPWTTNGRKGPVQRKGMRCAMERGAKLHACCRGAGRKKRGALLLRVGEEGMEERLWWLKNEGWEWKNSQVQGEMDPIYRRSPRVRVSYGLG

SEQ ID NO: 62638 - protein, 50 aa, Zea mays
  Coding DNA Sequence Number=SeqID_20859
MKKVVYYESNSSMSSTFDAESTSSKHQEREKYSDEDYDSDEATQVRHFNS

SEQ ID NO: 62639 - protein, 43 aa, Zea mays
  Coding DNA Sequence Number=SeqID_20860
MGVTSIERTIRTKTMATAFFVAEALRSNDSRSCRGGPNLWVPF

SEQ ID NO: 62640 - protein, 106 aa, Zea mays
  Coding DNA Sequence Number=SeqID_20861
MWSLVRRWRWGRRRRTARVVDESALGADGDTDGGAAAPAAGGAVVAPTLGGALARALLALACAIRFDGADVSATEEAWAVTGWRPRAADEVSHLMVRESMRYAIYA

SEQ ID NO: 62641 - protein, 101 aa, Zea mays
  Coding DNA Sequence Number=SeqID_20862
  Subcellular localization annotation: CTP_CleavageSite=47; ConfidenceScore=5.13e-01
MANTIMGTTTALRHRRTTVRVGVARRQRDFTPVSNRAQPRTEKGQIRGGEERDGADTRGPDGRGSRREHASARTATERNTQPIFKPYNAFYVLTEIFAFPI

SEQ ID NO: 62642 - protein, 53 aa, Zea mays
  Coding DNA Sequence Number=SeqID_20863
MAATRGNGNGLCGEGDEKDSARRGDEKDSARRGCDISDIREMLTVVLLFSISL

SEQ ID NO: 62643 - protein, 174 aa, Zea mays
  Coding DNA Sequence Number=SeqID_20864
MNGGVVGVFIAPTTKSGRWEAVCRMAYRTVRRALNALQLTVACEVVVAPLAHRTVRVKFPAGASSLAPPVPIAQAPAPRGDDPDDSGDDGDDDDEAEEEENNNEEVNDDQEDNLVGMWHITEHYTSMFETGHFPNLLQNVLHALGTYVRPLYDTRHTSISPHPAWPFRERINPF

SEQ ID NO: 62644 - protein, 36 aa, Zea mays
  Coding DNA Sequence Number=SeqID_20865
MGFTLIPDVIEPPKRQVHDVNDGERALRRTCTGQNA

SEQ ID NO: 62645 - protein, 128 aa, Zea mays
  Coding DNA Sequence Number=SeqID_20866
MGEIQGASDNLLINPRAHINQSMARSHWPSRYAQGDHSRLLIQRPQPILPPAPRPNQVAARPEFAPRRSALGRHCPTSGDQSSSENGPKRCREINKANDGAHTGQGSSSGPANEFMQRGGGSPTPAGS

SEQ ID NO: 62646 - protein, 96 aa, Zea mays
  Coding DNA Sequence Number=SeqID_20867
MAVCSACLPRLGVFVSFYRVIRVHSLVGEVDNGVRQVGEAMVDRPSTLSGILSLASCEIMLHRTICGDFVGTEMVPKQKTAPRLKVIMLLKTMAME

SEQ ID NO: 62647 - protein, 83 aa, Zea mays
  Coding DNA Sequence Number=SeqID_20868
  Homolog annotation: Hit_ID=Q7XBD9; Match level="QueryCoverage=60%, HitCoverage=2%, E-value=9e-12, Identity=66%"; Hit description =Putative gag-pol
MNPPCWGKSLPSMMHNDGETGVKTYDDTMKPESEIRLSPSLGTKLWKWGKPLTKERIENDAILAAVIIAKLRSASGSKPNKTD

SEQ ID NO: 62648 - protein, 300 aa, Zea mays
  Coding DNA Sequence Number=SeqID_20869
  Subcellular localization annotation: CTP_CleavageSite=77; ConfidenceScore=5.22e-01
MAPKRANSKAAPSIDDTAKAVFLVDKKGKALVDATPKRPSRTTLSTAKDNAKTTPPRRHRTHLQFQRRAPGTTARLRSTRGRKHRRGRRSHRHLSRRNTQLWLNPGQQHSPFQMPSSPWPPAAGAPPPQQRAAQGTVSTVAPERLPVEGSRSGPAKEEDTARLPSVDYYSWPFNKVVCRSSKDFAEKKSSTEKGIFSTSGWYTETHAFAYIYIDIIPPEGRFNFLPEIWVPTKIVALRKPNITMIQDVIGIMMSSRWVNTPELHQLLLIFMQLWCCRSMASTVRHGMVDDGALVLLPPAP

SEQ ID NO: 62649 - protein, 163 aa, Zea mays
  Coding DNA Sequence Number=SeqID_20870
  Gene Ontology: Mol. function=unfolded protein binding; Cellular component=mitochondrion; Biological process=protein folding
  Homolog annotation: Hit_ID=Q6ZCV7; Match level="QueryCoverage=78%, HitCoverage=14%, E-value=2e-43, Identity=74%"; Hit description =Putative heat-shock protein
MNKDVPLCFPFLTELLDVLRSDSSGMIFLVAIGSDTGVCMTKYELLKDCLGSIAQSGTSKFLKALKVHHHTFLYNCIYEYGIWKTKTLGADNGLIGQFGVGFYSAFLVAGKVVVSTKSPKSDKQYVWEAVADSSSYVIKEETDPKKMLIRGTQITLFVRPDEY

SEQ ID NO: 62650 - protein, 99 aa, Zea mays
  Coding DNA Sequence Number=SeqID_20871
MVLLLAMVVHLHGAYPETHPGSSSQVGDLEARVVGQAVGSCLEINGKEEIRIVRMGVDAVKENMRFGLQWRGGVGGGKGGGDGEWDRRGGGCGKDEFRF

SEQ ID NO: 62651 - protein, 197 aa, Zea mays
  Coding DNA Sequence Number=SeqID_20872
  Pfam annotation: Domain name=Tryp_alpha_amyl; Domain location=32-119; Score=67.9; E_value=3.3e-17; Accession=PF00234.12; Description =Protease inhibitorseed storageLTP f
MSGARRAPALAAALLLLLVASPPASAAATLQCAQVAQLMAPCTPYLTGAPGMTPYGVCCNSLAVLSQLAAARADRVAACACAKAAAAGLPAAADFARAAGLPAACGLSISFTISPDMDCNQNLGSGSVGRYNDSELSRICDPSFYVLASSGGSGVAGLPLQSVAGVGPSRLFLPVRGLVPDGGDDWATVGWPLGGVG

SEQ ID NO: 62652 - protein, 131 aa, Zea mays
  Coding DNA Sequence Number=SeqID_20873
  Homolog annotation: Hit_ID=Q9SQZ0; Match level="QueryCoverage=33%, HitCoverage=8%, E-value=3e-09, Identity=83%"; Hit description =Putative amino acid transporter; 33388-30195
MESPRRRLDSRFIWCSSAAEPAPHPHPHPPPRAPTMHAAAPAPASISRSHAPNNRPRPAPTPAAMRTATPGHARSLVGLRLGGMVGAGMFVTTGRVARLYAGPGSTPLPASARCSPPSAYESVDMGNGELV

SEQ ID NO: 62653 - protein, 147 aa, Zea mays
  Coding DNA Sequence Number=SeqID_20874
  Homolog annotation: Hit_ID=Q9SQZ0; Match level="QueryCoverage=29%, HitCoverage=8%, E-value=3e-09, Identity=83%"; Hit description =Putative amino acid transporter; 33388-30195
TRHNHTPISISTVRLSHQSRLHPNRPIASLSLLLPLLQPHPHPHPPPRAPTMHAAAPAPASISRSHAPNNRPRPAPTPAAMRTATPGHARSLVGLRLGGMVGAGMFVTTGRVARLYAGPGSTPLPASARCSPPSAYESVDMGNGELV

SEQ ID NO: 62654 - protein, 153 aa, Zea mays
  Coding DNA Sequence Number=SeqID_20875
MGKSKKGGSSSHHSGDKRKREPTPPSEDFGDSEYSEEEFSSESEGSPAPASPPVSSDDSDDSQGIAAEVWTYIQSVERAGLAGSDKSEYSSDEENSSEEGGGDGDGGDGNGDGSGDGGEGNGDGGGKGGSGDGDDGSKGGSRGSNKGSNKTSG

SEQ ID NO: 62655 - protein, 111 aa, Zea mays
  Coding DNA Sequence Number=SeqID_20876
MEKEGVADKAIRIMQKSAKRLIRICKEKLPLDKPLNSFDVRVLREALEFTAKVLDQDSLFLQIELDDAKKVDVEDDFNSISGFTWQESPCVPHPEDFMFGEHYEKFWGVSD

SEQ ID NO: 62656 - protein, 218 aa, Zea mays
  Coding DNA Sequence Number=SeqID_20877
  Gene Ontology: Mol. function=transferase activity; Biological process= paclitaxel biosynthetic process
  Homolog annotation: Hit_ID=Q9LGF6; Match level="QueryCoverage=78%, HitCoverage=40%, E-value=3e-53, Identity=65%"; Hit description=3'-N -debenzoyltaxol N-benzoyltransferase-like
MAGGGGAVVLVRRVSEASSEESPLAAPCPYSLQPWGHRWSPPPPALTACSGWTGYPTQMALIESLHVFKPDPARDGASPSETIERALARALVDYYPLAGRLAVSEGARGLHVDCSAEGVWFIEADVWCRLEDVDYLEYPLQIPNDDLLPHPLPRPTHEEESKLILLVQVTTFECGGFVVGFRFSHAVADGLGAAKFMGAVGELARGADRVSVAPTSLL

SEQ ID NO: 62657 - protein, 111 aa, Zea mays
  Coding DNA Sequence Number=SeqID_20878
MPYSEQVVPPPVARSRIDADLVPHVGVAKYPCDQYNMQEKEERIEEEVVELPIQDEIPLATIEHEAKLKSGPKLKPAHKGTPQKSKRMTNILKAIQKPEEPSQPRPAPSSS

SEQ ID NO: 62658 - protein, 62 aa, Zea mays
  Coding DNA Sequence Number=SeqID_20879
MALRSCSGPRPLSPLLRGRGCTKPGSWLRGQRRPDSQPPDDQSVERDCARDLSGRFVQHSSL

SEQ ID NO: 62659 - protein, 131 aa, Zea mays
  Coding DNA Sequence Number=SeqID_20880
  Subcellular localization annotation: CTP_CleavageSite=54; ConfidenceScore=5.27e-01
MASAQLHPSLLSAPVASPNLPRRDHRALTHPTPWRPSRLLLLSPPTPCEIQEPMEDLLAEAESNPSRIPYKQHPSLAGELAADTIIDPVMEYHELDAEVDSSGDLSKRKPPSMVDDTVADGHKYKHSQPAN

SEQ ID NO: 62660 - protein, 77 aa, Zea mays
  Coding DNA Sequence Number=SeqID_20881
MSVNYSGERLRIPEAAKFQSRVLLEHRTLSSVHRTVRISPNQDEESDQFATSFITPFACTATYYASFEDAVRQYKGA

SEQ ID NO: 62661 - protein, 98 aa, Zea mays
  Coding DNA Sequence Number=SeqID_20882
MTTEFVSRPPSCTGGNKAQGISAGSSLMETAGSVQEEPKAEHQLRMEKARDSLWSYSTELGDADIVRKIISLLPQQKYGSIITILYNMEDLSQMILPL

SEQ ID NO: 62662 - protein, 50 aa, Zea mays
  Coding DNA Sequence Number=SeqID_20883
MAKNMGFLKLEAGLSAMSKDDLAESLAYNSLKGLILSNSSLPESPPLPSA

SEQ ID NO: 62663 - protein, 58 aa, Zea mays
  Coding DNA Sequence Number=SeqID_20884
MEDHLAYKFTALSPPSSKSTEHYSSSLSYEANGSLAILFCPPSSEIIGFPWDRSLPPP

SEQ ID NO: 62664 - protein, 60 aa, Zea mays
  Coding DNA Sequence Number=SeqID_20885
MAVGVSEALYAKAVSPDLLPGNRWGRLMFSGGHGCWSDLVIHLATGLDSRVGPYLGRGGA

SEQ ID NO: 62665 - protein, 47 aa, Zea mays
  Coding DNA Sequence Number=SeqID_20886
MEYTYAIMHHTAAGELTCDHSPLSGEGRGDHGVPFTERVERATKLEG

SEQ ID NO: 62666 - protein, 55 aa, Zea mays
  Coding DNA Sequence Number=SeqID_20887
MGNSQFSNWVERKGRLLKDKFKGVKVGIKKYDSMRDFKEMSIPIPRDKKLLKDSD

SEQ ID NO: 62667 - protein, 86 aa, Zea mays
  Coding DNA Sequence Number=SeqID_20888
  Gene Ontology: Mol. function=24-methylenesterol C-methyltransferase activity; Cellular component=integral to membrane; Biological process=steroid biosynthetic process
  Homolog annotation: Hit_ID=O82427; Match level="QueryCoverage=76%, HitCoverage=25%, E-value=9e-19, Identity=74%"; Hit description=24 -methylenesterol C-methyltransferase 2
  Subcellular localization annotation: CTP_CleavageSite=49; ConfidenceScore=5.21e-01
MAFLSLSIFFAWLIWLPCWKATASSTSVVALVGPHAQPQGLVSPQCKVVCGNFLSMPFADASFDGAYSIEAFYHALRLQDVYGEVF

SEQ ID NO: 62668 - protein, 172 aa, Zea mays
  Coding DNA Sequence Number=SeqID_20889
  Subcellular localization annotation: CTP_CleavageSite=42; ConfidenceScore=5.06e-01
MDEWRCRRHPPSAGGGVCPHCLRDRLLRLCPDCACPRPCACSCASSSPSSSSSGASALGRVHSLIERERRVERSRSVAAHGAVGDQRRPRSGVWAWVSFRKPPPPPPPAAGCRDVEQEYDEAVALARSRSVTTTAPASERRPRWGRLIAGKIKALRSRKPRPGGDWRDSVRP

SEQ ID NO: 62669 - protein, 192 aa, Zea mays
  Coding DNA Sequence Number=SeqID_20890
MHYVASLPFNDLILSAIEEHKDADTQSRVWNDLEPLMDYLKVNLNDSHLEAVNAGLSHRSFVLIQESERHKLFLDPLVSFSILLLTRLCFHASALKWHPDKHQGPSQICVILLKLSGYFNSYLQGMDETGSDRYSSKADLVQSGDRSQQAAKVELGRLQLQPGPDEDSEAILEDPFRTGNTILVGIASFSTV

SEQ ID NO: 62670 - protein, 41 aa, Zea mays
  Coding DNA Sequence Number=SeqID_20891
MRPRGERQNAVAVHAYNTHLISSRDFGGPVQRPSSTPQNRI

SEQ ID NO: 62671 - protein, 58 aa, Zea mays
  Coding DNA Sequence Number=SeqID_20892
MGGSLSTGGVRSSSMGGVVEQLIVSRLTNRVVFIPDNACVTPFDWIKKTFFEKPQPEA

SEQ ID NO: 62672 - protein, 98 aa, Zea mays
  Coding DNA Sequence Number=SeqID_20893
MAGTKILAQCGSPITFPVFKSETNRVRALNMGILVSAIFFSAVDKLEDEIDAIEAYPAVIETMLGDTVYRCNNYYNFIRLDAGQKDIRTGSSAYPNEN

SEQ ID NO: 62673 - protein, 37 aa, Zea mays
  Coding DNA Sequence Number=SeqID_20894
MEWLTSGGSTLAGSSVRSGRFNSYVRKLNHSEPIQLF

SEQ ID NO: 62674 - protein, 245 aa, Zea mays
  Coding DNA Sequence Number=SeqID_20895
MSLAVDYVILKGLMRDVVSEGYLALLLNENGHLRCIFDGSGHYSVIRYNTDEQTINSTHTLAYKWDQAAQGGFTQARRFNNARVATEAFVLREPSLRQSVRPSLFLALAGTCKAFCHTRFWKANRMRNMGLRVKSKDGGFYSQKTEGVLSKSTTSKGQSGGGNGGDLTSGVTERSAPLVSDGGHAHARHRGRALTDGALQAVTQNEGKGGEMSEAGGGGGERLKEGEKDWQAGPTEQRHRHANTR

SEQ ID NO: 62675 - protein, 117 aa, Zea mays
  Coding DNA Sequence Number=SeqID_20896
MGSGEAETIVPERGNLGRDEDSPEYVPCPKAGSGKAELWLTIKKGLGQSAVYALLTLRNVSDDSLGVKHVFRDTIQEAGSEVVTANSESTTNNRDNMAKLHIVTNEIKGLRASRHSL

SEQ ID NO: 62676 - protein, 170 aa, Zea mays
  Coding DNA Sequence Number=SeqID_20897
MEEQSTVGVGKSNAIECGEEHGCSCRGGHPHYGHMGGETRPRTMLKVLAAVGVGTEGDKTKRGLACETATGREADVGSWSVARVPAQMKPGLGAVHLGTATRKEAGGTMPSATMDAHEREERVGNGREVGAIGVLHGWRGRAQTDGKLGESRYSHLTVSFESYHLEVVKA

SEQ ID NO: 62677 - protein, 116 aa, Zea mays
  Coding DNA Sequence Number=SeqID_20898
  Gene Ontology: Mol. function=nucleic acid binding
  Homolog annotation: Hit_ID=Q2R4J4; Match level="QueryCoverage=64%, HitCoverage=17%, E-value=8e-24, Identity=65%"; Hit description=Zinc finger CCCH type domain containing protein ZFN, putative, expressed
  Pfam annotation: Domain name=zf-CCCH; Domain location=77-103; Score =34.9; E_value=2.8e-07; Accession=PF00642.15; Description=Zinc finger C-x8-C-x5-C-x3-H type (and similar)
MAAPSGGGGGGAGEGSSSAAAAMTIGAHGVDQEPGNAEAPGCRRRVGGVINLRVVTEAMWQMNLGDAMELGPYPERVGDPDCSYYMRTGMCRFGMTCKFNHPADRKLVKSILLPFF

SEQ ID NO: 62678 - protein, 35 aa, Zea mays
  Coding DNA Sequence Number=SeqID_20899
MAGHLLHAAPAGSPWQTELCSIAALAHQWLSAMPL

SEQ ID NO: 62679 - protein, 109 aa, Zea mays
  Coding DNA Sequence Number=SeqID_20900
MEGSGRRPPSSSIDGRNDDGGFRFELNGERKWGREKIKRTAVSVPGLNVRDQGARTPRRRHGLQCQPSGGDAVPAHARDARPGKRNRPGRSRLQVRGGEGKMGGWPVGP

SEQ ID NO: 62680 - protein, 153 aa, Zea mays
  Coding DNA Sequence Number=SeqID_20901
MATPARLLLQGPRRALAAGGWPGRLGWGRPPRAPRWLCRQAAAPTGRRGLDHGNAERGMEEREKKGIPHLRTTNDGPSAQGRRRFWTDAPGSPDTGSYCTDVDGETRVLLDAANGEPVAGRCLRPIDAIPKDPLDLWVMGPHTIPLRLFDLIG

SEQ ID NO: 62681 - protein, 486 aa, Zea mays
  Coding DNA Sequence Number=SeqID_20902
MQRLGYFGNGVGRASGPEDVPEPEDSLADTESYGSIGEVCLGGDFIWWESSVEVFAKNYCLNWQKKKISELIAQFGSCTFTPRIGKTSAEAVEIIPCAKNKWGNWWWGLGEVTLHLMPFLDDQMVQSPAFAIDLRGQDAAAFVREGDFADAGDDRGKQVKTRSKEGTSKGKNVIAATRKRKIEAKGMERETAGPKASRLFVEELTRTCAGPGEVTGGRWHKKDPIPWATGDDYFMSCMARELKIFPYGRNIGDVVSAVMDKDRQEALTEEGTKNGQLVVAPARPSADMGASARGAAGTSLDPWAHFWAAADGGGEIAVAAAVTRQLRYLHSERNRLEGKIERFRMQHTEAIRDKSAAENKSQNLLDKVTALEKENEDLFCELNDEKDAAAEAKTEAESARKHAAELELEVKRMHACREKTESATRAGVDQAHTLFVDAYRDLGAQTTPFNKSGGEVGTHFLGWLQEELESHPSNMMGLMSYASLMS

SEQ ID NO: 62682 - protein, 409 aa, Zea mays
  Coding DNA Sequence Number=SeqID_20903
  Subcellular localization annotation: CTP_CleavageSite=52; ConfidenceScore=5.44e-01
MAASRRDHQQNASLNRGIQNIFPGLKPSESGQGLRRASSASSSHSKTLYSASSMAAGARQGNTVRRKAERPGATSVWPPALAVPSTSSKDITRATKSPSTMQKSNNLSTRPGIEKAAAASSVKLKSQKTVVGPEKTQAAASTRAPGAITKKRMGAENYVSIQRTTSVPVRQTETPKMVERDVELLIEFDETESISTSSIEEHLHERLPDPVDMKSADLNSKTSSCPEEHKNRDNTGGILGEKQGGKDNEDLSTGDSASAGNRNSDTNIPKEAVDESELEEAVDGPGSNKDACASELNETVGRTELNEAVSETEPKEAKDEAKLIQVDCEIVLKEAASGTELRDDFIEHELIAQENTKTKENITMELAQKWRKDERRSNEATEEGRGKPIHERKNKVMALVGRFETAMSG

SEQ ID NO: 62683 - protein, 448 aa, Zea mays
  Coding DNA Sequence Number=SeqID_20904
  Gene Ontology: Cellular component=nucleus
  Homolog annotation: Hit_ID=Q2QN39; Match level="QueryCoverage=77%, HitCoverage=93%, E-value=8e-23, Identity=28%"; Hit description =Expressed protein
MPSSIPPPPQNFLPLPSPGVGQSTRINLGEIKLKLVKRIGLERAKRYFEHLQRFLSLKLSKSLFDKFCLTILGDDNIQLHNHLVCSILHNACQASGPSTVSTPKSIGVAKNSNHVLSPTVPFSDIGDVLHHHVKDHYPRSRNAHVVQENGVVRLSKLKRFPQPHSELVELLSKRSRVENAYSNLSDPINSNCPGVSGREYVEAVAQHARGPIIAPLGVAFCSGHFGGNSKTLTLPSGASSDDSICCYDLGQLCDTSSLRQRMGRIAETEGLDAVSLECANSLNNGVDFYLKYLIGSCIELVRARSQHDRINHMALKQQLSQKLINGVQLQNQVHGQSATTCPQISSVSLQDFKALSETIPQLLGVNASLEHFVNVDSCLSNMSWTNEDVDVADMAKEKLEREATTTKLEAETKHAMETVRRAFLRKRQRDQHPRASLRSWKNLEVPNA

SEQ ID NO: 62684 - protein, 89 aa, Zea mays
  Coding DNA Sequence Number=SeqID_20905
MDTLPQEGDSRIVRLKTHQRHLRSLRDHPLIKILARVSSLMVGAQQVGEIMQVNKVQIEMQMENPLALLESVMWVLLERVWFVYLTVNF

SEQ ID NO: 62685 - protein, 155 aa, Zea mays
  Coding DNA Sequence Number=SeqID_20906
MEGEYEGGSAHYWRVAVQSEVAGAAHGCKQNDGGHGRELARMGGTTLGAWRRNGEHWGVLWRRLYRWGRQRRVRQEGAMAGTEKGDISKGILLREGSGPRALLLIRGLKAGPSEGFDSRPRALGLQALLLIRGSKAGPSEGFDIRPREPGLRAHY

SEQ ID NO: 62686 - protein, 46 aa, Zea mays
  Coding DNA Sequence Number=SeqID_20907
  Gene Ontology: Mol. function=nucleic acid binding
  Homolog annotation: Hit_ID=Q6IVD3; Match level="QueryCoverage=76%, HitCoverage=72%, E-value=2e-14, Identity=100%"; Hit description =Arginine/serine-rich splicing factor 1 variant 2
MRPVFVGNLDYDTRHSELDHLFYRYGRVERIDMKSGKKVREFPHSV

SEQ ID NO: 62687 - protein, 690 aa, Zea mays
  Coding DNA Sequence Number=SeqID_20908
  Gene Ontology: Mol. function=protein binding; Biological process =protein metabolic process
  Homolog annotation: Hit_ID=Q2RBP2; Match level="QueryCoverage=99%, HitCoverage=63%, E-value=0.0, Identity=58%"; Hit description =Expressed protein
MKQIVSQQISALRLYDVNIATIDMSKKLPLSLEEVALQLMLTKKVRDDQMVLSTKILNLEKKWNEYCVRLHQGCNRINRDPCQLFPHHIGVRVDRERCANPNQSAQTIALQRDIIKPCALSSPYTNITAKSISAPDQINADLVLNLQVRQSRSNEPLQSGVVPFQHINSSNYNKPEESSAAPVTTDLVLATPRGSSFKDSSSALCKRVEDIEETIQLMPNKVDDLNLKPPHLSIQPYTCSKSSSSNWEQTSPSALHSTSLGGTSAFGQWQRPSPLATQSFDLSNYKLLMEHLFKVVGRQEEALSAICASIVRCRSMERRRGANKKNDIWFSFYGPDSIAKRRVGVALAELMHGSSGNLIYLDLSLNDWGNPSFRGKRATDCIFEELRKKRRSVIFLDNIDKADCLVQESLIHAMETGRYKDLHGGRVTDLNDSIVVLSTRMIQGCQDASLGVEEGNAFSEEKAVAARGHQLKIIVEPGTTNIGGGNVVVSSRHSLGSSEASSYSSKRKLHISDGQEKTEESASTSKRLHRTSSIPFDLNLPGDDEEAHDDGDDDKSSGSHENYLEGSVGNLLRWVDGSINFKPFDFGKLCEDILQEFSNTTSKILGTRGCRLEIDAGAMEQVVAAAWASDSHENEKRPVRTWVEQVFGRSLEQVKMRCENLSSCTLRLVSCEVKEDGFGALLPSRIILDW

SEQ ID NO: 62688 - protein, 242 aa, Zea mays
  Coding DNA Sequence Number=SeqID_20909
MAMRRILIVFLSGHRIKAQNEEISMVQHAVMNDVVLELTNNEGVIYTSEGLMDHNLAIQTSSVQQAAKNDVAIDGAKLIASSTYNLVLSNQPGPEDAQLDTKSPKSHVLNTLCGEAASSAFCSSKTLDKKLDLETRNFVSTMLGTSKKNPKGTGSYSLDPNFNSVDGLHCSIRNNVNFVDGTSLANDDMLCKAMKLTARCNLDASWDDKMMVAHAEASPLPSVMSSLELGVNLSMKTLKGLD

SEQ ID NO: 62689 - protein, 147 aa, Zea mays
  Coding DNA Sequence Number=SeqID_20910
  Subcellular localization annotation: CTP_CleavageSite=62; ConfidenceScore=5.52e-01
MALDASFPDRRASISVRPVSHGLNVPPPRSTSPWRVSFPATLHFPPAMDAQEQQLLQLPMARCSRRRGAPPGISPAMARDSASSLLACCCAVTRGACKVLGKMRSSPDVCARCRLAVLGSQVDSTPSTLAGCLLFLHSPVVVVVHPR

SEQ ID NO: 62690 - protein, 58 aa, Zea mays
  Coding DNA Sequence Number=SeqID_20911
  Homolog annotation: Hit_ID=Q7FN01; Match level="QueryCoverage=59%, HitCoverage=9%, E-value=2e-07, Identity=71%"; Hit description=Beta 1, 3-glycosyltransferase-like protein II
MPLPLPLAGSLSRLAWLCVVGRVIGKKIVEVEMDLTKAKSKGYLWGNSTAAVNTDKKQ

SEQ ID NO: 62691 - protein, 268 aa, Zea mays
  Coding DNA Sequence Number=SeqID_20912
MEDEAIKRNEEESHLASEEARKAEEAADRERRIGMHNTLGVTSRVRIQHVKSYSGTKTLSKYQAIIRHLLNLLMIITKPARQITLEYARSSQLVSKTRRPPNLISSLDYKQKSVYGDFAKIRLGQAKIRLGDWPDEHMPGVRPRLIEAERVLSACPRTNPHACPRLCHDQGDAASRTPVPISTSTPSISPSTTLPVVLRRSSLQPRMPPLVLPAESRPPWPDRHNLQTTEQPTPGASLNPSEPPRQAQFVCTPHRSSAIGHRTALMRR

SEQ ID NO: 62692 - protein, 149 aa, Zea mays
  Coding DNA Sequence Number=SeqID_20913
  Subcellular localization annotation: CTP_CleavageSite=67; ConfidenceScore=5.03e-01
MGQTGFDGVVVTVLALGSDDWTMVVVLDIGTATTLSGRGNRRASRELGNEVAASRAKGRMARCTRARAVSVSGVQAGVEAGSWAAGVTAQGLGVVDGRARVVGFWRGGLVLGAARGRLRAEGRREREERGRKRLLAAAGSREREQGAAG

SEQ ID NO: 62693 - protein, 242 aa, Zea mays
  Coding DNA Sequence Number=SeqID_20914
  Gene Ontology: Mol. function=acyl-[acyl-carrier-protein] desaturase activity; Cellular component=chloroplast; Biological process=fatty acid metabolic process
  Homolog annotation: Hit_ID=Q677G4; Match level="QueryCoverage=76%, HitCoverage=88%, E-value=2e-89, Identity=85%"; Hit description=Fatty acid desaturase
  Pfam annotation: Domain name=FA_desaturase_2; Domain location=4-240; Score=292.3; E_value=9.1e-85; Accession=PF03405.5; Description=Fatty acid desaturase
  Subcellular localization annotation: CTP_CleavageSite=34; ConfidenceScore=5.65e-01
MALRLNDVALCLSPPLAARRRRSRSRSSGRFVAVASMTSAVSTKVENKKPFAPPREDPRTENNPYLGFIYTSFQERATFISHGNTARHAKDFGDLKLAQICGIIASDEKRHETAYTKIVEKLFEIDPDGTVVALADMMRKKISMPAHLMFDGQDDKLFEHFSMVAQRLGVYTARDYADILEFLVDRWKVVNLTGLSGEGNKAQDYLCTLASRIRRLEERAQSRAKKAGTLPFSWVYGRDVQL

SEQ ID NO: 62694 - protein, 249 aa, Zea mays
  Coding DNA Sequence Number=SeqID_20915
  Gene Ontology: Mol. function=transporter activity; Cellular component= integral to membrane; Biological process=auxin mediated signaling pathway
  Homolog annotation: Hit_ID=Q5JLM1; Match level="QueryCoverage=96%, HitCoverage=72%, E-value=6e-81, Identity=63%"; Hit description =Probable auxin efflux carrier component 6
  Pfam annotation: Domain name=Mem_trans; Domain location=9-249; Score=- 86.8; E_value=0.0011; Accession=PF03547.8; Description=Membrane transport protein
MIGWGDVYKVVAATVPLYFALFLGYGSVNYRAVAADVISKAVIVGVIGCWAGSRVGSAGKGKGAVGWSITGFSLSTLTNSLVVGVPMARAMYGEWAQQLVVQLSVFQAIVWLTLLLFVLETRKAAIGMYVVPGGAADSDGGVPDSPVKDKDVEAAAGDRRPAAGPAAAATVVVVVPVKPSLWALIKVVAHKLSRNPNTYASFVGITWACVANRLHIELPSAFEGSVLIMSKSGTGMAMFSMGESDFPVS

SEQ ID NO: 62695 - protein, 107 aa, Zea mays
  Coding DNA Sequence Number=SeqID_20916
MWDPAHRTFSFPTVKICSKILLRSDPPHAPAGGILRAVEFAQGINPKASYPYFVGPKPSLAEQCRVMGGLCTVRRAERDWGDTAIGQTGNQMIVVAVKLLGGSTRRR

SEQ ID NO: 62696 - protein, 80 aa, Zea mays
  Coding DNA Sequence Number=SeqID_20917
MSGERSKREMVTGEKLEASRRKNDEKTSSKEAGGKHKEEFAGSIKSHRKGDEKKNKMKKVVYYEIDSSSPSTSSAESTSS

SEQ ID NO: 62697 - protein, 79 aa, Zea mays
  Coding DNA Sequence Number=SeqID_20918
MDNIDEVIDKRMVALREIEKDKIIVANAYNKKLFQKVGGMCLAPYVPPWMDTERVIPPLVSGGYGYPVPEHPVIVSSVQ

SEQ ID NO: 62698 - protein, 608 aa, Zea mays
  Coding DNA Sequence Number=SeqID_20919
  Gene Ontology: Mol. function=RNA-directed DNA polymerase activity; Cellular component=mitochondrion; Biological process=RNA-dependent DNA replication
  Homolog annotation: Hit_ID=Q8S463; Match level="QueryCoverage=99%, HitCoverage=35%, E-value=0.0, Identity=79%"; Hit description =Putative prpol
  Pfam annotation: Domain name=RnaseH; Domain location=200-328; Score =14.8; E_value=2.4e-06; Accession=PF00075.14; Description=RNase H
  Pfam annotation: Domain name=rve; Domain location=470-601; Score =53.1; E_value=9.4e-13; Accession=PF00665.16; Description=Integrase core domain
  Pfam module annotation: Pfam domain module=RnaseH::rve; Domain location=200-328::470-601
MGCLVALSHFISRLGKRGLPLYHLLRKTERFTWTPEAEEALGNLKALLTSAPILVPPAAGEALLIYVAATTQVVSAAIVVERREEGNALPVQKLVYFISEVLSETKIRYPQIQKLLYAVILTRRKLRHYLESHPVTVVSSFPLGEIIQCREASGRITKWAVEIMGETISFAPRKAIKSQVLADFVAEWVDTQLPAAPIQPELWTMFFDGSLMKTGAGAGLLFISPLGKHLRYVLRLHFPASNNVAEYEALVNGLRITIELGVRRLDARGDSQLVINQVMKNSHCRDPKMEAYCDEVRRLEDKFYGLEVNHVARRYNETADELAKIASTRTTVPPNVFSRDLRQPSVKTNNTPEPEKVLALPEVPSAQPEAPSAPEGEALRIEEERNGVTPNRNWQTPYLQYLHRGELPLDRAKARRLARRAKSFVLLGDGKELYHHSPSGILQRCISIAEGQELLQEIHSGACGHHAAPRALVGNAFRQGFYWPTAKAPGGYTHLLVAIDKFSKWIEVRPLNSIRSEQAVAFFTNIIHRFGVSKSIITDNGTQFTGRKFLDFCEDHHIRVDWAAVAHPMTNGQVERANDMILQGLKPRIYNDLNKFGKRWMKELPSVV

SEQ ID NO: 62699 - protein, 151 aa, Zea mays
  Coding DNA Sequence Number=SeqID_20920
  Pfam annotation: Domain name=RNase_H1_sml; Domain location=27-107; Score=76.5; E_value=8.6e-20; Accession=PF08615.1; Description =Ribonuclease H1 small subunit
MEPATPPAPAAGVTATVDLSSVAADLGGAHLLPCGIRQNGGAPVSDYFKPRDTGYVLEKSRGQNSDAEVSNFTSRAEFQSITYWNHDTAPSAEDSLPRCFHWLTVANAMHRAVTAEDLTNMGSNAESGQVDSFYNEAMQFRFGEPSRQRIL

SEQ ID NO: 62700 - protein, 375 aa, Zea mays
  Coding DNA Sequence Number=SeqID_20921
  Gene Ontology: Mol. function=hydroxymethylbilane synthase activity; Cellular component=chloroplast; Biological process=tetrapyrrole biosynthetic process
  Homolog annotation: Hit_ID=Q1EPC9; Match level="QueryCoverage=92%, HitCoverage=76%, E-value=1e-165, Identity=93%"; Hit description =Porphobilinogen deaminase, chloroplast (Hydroxymethylbilane synthase) ...
  Homolog annotation: Hit description=(Pre-uroporphyrinogen synthase), putative
  Pfam annotation: Domain name=Porphobil_deam; Domain location=71-282; Score=416.5; E_value=3.7e-122; Accession=PF01379.11; Description =Porphobilinogen deaminase, dipyromethane cofactor binding domain
  Pfam annotation: Domain name=Porphobil_deamC; Domain location=290 -366; Score=103.4; E_value=6.5e-28; Accession=PF03900.6; Description =Porphobilinogen deaminase, C-terminal domain
  Pfam module annotation: Pfam domain module=Porphobil_deam::Porphobil _deamC; Domain location=71-282::290-366
  Subcellular localization annotation: CTP_CleavageSite=16; ConfidenceScore=5.03e-01
MHHRAPLPPRLADLPRAPAAAAVPRRARCRRRGGRRSGQGLTHPDWDAWEVIEFDPFCGFFVWDDDEFVVMLDSPLALAQAHETREKLKAAHSELAEEGAIEIVIIKTTGDMILDKPLADIGGKGLFTKEIDDALLQGRIDIAVHSMKDVPTYLPEGTILPCNLPREDVRDAFICLTANSLAELPAGSVVGSASLRRQSQILYRYPSLKVVNFRGNVQTRLRKLKEGDVSATLLALAGLRRLKMAENATAVLSVEEMLPAVAQGAIGIACRSNDDKMMEYLSSLNHEDTRLAVTCEREFLAVLDGNCRTPIAAYAYRDKDGNCSFRGLLSSPDGSKVFETARSGPYSFDDMVEMGKDAGHELKAKAGPGFFDSLQ

SEQ ID NO: 62701 - protein, 134 aa, Zea mays
  Coding DNA Sequence Number=SeqID_20922
  Gene Ontology: Mol. function=translation initiation factor activity; Cellular component=cytoplasm; Biological process=translational initiation
  Homolog annotation: Hit_ID=P56330; Match level="QueryCoverage=65%, HitCoverage=76%, E-value=1e-38, Identity=89%"; Hit description =Protein translation factor SUI1 homolog
  Pfam annotation: Domain name=SUI1; Domain location=60-134; Score =124.9; E_value=2.2e-34; Accession=PF01253.13; Description =Translation initiation factor SUI1
MAPRVLHDDGDSQPPYGSKEMSRVRSSLSAFAGEGLPWFIPSPDPPPALEANAEDSSAGAGSKDYVHVRIQQRNGRKSLTTVQGLKKEYSYNKILKDLKKEFCCNGTVVQDPELGQVIQLQGDQRKNVATFLVQ

SEQ ID NO: 62702 - protein, 89 aa, Zea mays
  Coding DNA Sequence Number=SeqID_20923
MASLLTLDPEPEYELGESLALSPGPVQLCSVTLMMIDVDHTIAEILWCSASLHGPHARRRLLLHLHPPATTPVGPSPWLGPLTRESLEW

SEQ ID NO: 62703 - protein, 239 aa, Zea mays
  Coding DNA Sequence Number=SeqID_20924
  Homolog annotation: Hit_ID=Q6QP51; Match level="QueryCoverage=25%, HitCoverage=30%, E-value=2e-12, Identity=57%"; Hit description =Putative growth-regulating factor 1
MRAACNRTKGAHPFGFDASSMEAQAHTSWIGKGDTPKRILLREGSGPRAPLLIRGSKAGPSEGFNSRLRALGLRSHYWSEVQRLAPRKGSTAASGHSGSAPTTDQRFVGWPLKGSTAASDARRGMTLAKSGLGRHRKLRLARPQGSAPVSASDDELRFARPQGSDSASAPEDDELRLARPQGSDSTSASDDGLRLARPGARTRPQPRKTDSTSTSEEPPPRPTQGSDRHVTGGPSLPYP

SEQ ID NO: 62704 - protein, 132 aa, Zea mays
  Coding DNA Sequence Number=SeqID_20925
MGKSKKGGSSSHHSGDKWKREPTPPSEDFGDSEYSEEDRGVLLRVRGLTEVWTYIQTIERAGLEGSDESEYSSNSSEEGGGDGDGGDDDNDGGNGDGGEGDDKGGDGGGKGGSGDGGDGSKGSSRGSNKASG

SEQ ID NO: 62705 - protein, 68 aa, Zea mays
  Coding DNA Sequence Number=SeqID_20926
MGSHLLGTFFSAKGPLSKNTFSKAICKQAQHEGEQYPHTVHTDLYSLARHSWILIFGQDEDINVIQYR

SEQ ID NO: 62706 - protein, 438 aa, Zea mays
  Coding DNA Sequence Number=SeqID_20927
  Gene Ontology: Mol. function=transferase activity, transferring glycosyl groups; Cellular component=membrane; Biological process =protein amino acid glycosylation
  Homolog annotation: Hit_ID=Q6F2F5; Match level="QueryCoverage=94%, HitCoverage=96%, E-value=0.0, Identity=79%"; Hit description =Putative glycosyltransferase
  Pfam annotation: Domain name=Galactosyl_T; Domain location=161-381; Score=204.2; E_value=3e-58; Accession=PF01762.12; Description =Galactosyltransferase
MKMSFNKSSGSRGWGQGAAAGGGGDELVLRGSISKKWTFLLCFGSFCIGLLFTNRMWTVPEPKEIIRRSTLEVEKMSLVDGDCAPKSAGDARDVPGEVPRTQDVIQTLDRTISNLEMELASAKATQESMLHGAAGAPVPEPTGKRKHFMVVGVNTAFSSRKRRDSVRATWMPQETSLVLRTLKLALTVGWVRSTAGEKRRTMEEEKGIVIRFVIGHSATPGGILDRAIDAEDRKHGDFMRLDHVEGYLELAAKTKAYFVAAVSTWDAEYYVKVDDDVHVNIATLGNTLARHRSKPRAYVGCMKSGPVLAQKGVRYHEPEYWKFGEWGNRYFRHASGQLYAISKDLASYIALNQHVLHKYANEDVSLGSWFIGLDVEHVDDRRLCCGTPPDCEWKAQAGNACVASFDWSCSGICKSADRIKEVHQRCGESENAIWNAEF

SEQ ID NO: 62707 - protein, 151 aa, Zea mays
  Coding DNA Sequence Number=SeqID_20928
  Subcellular localization annotation: CTP_CleavageSite=45; ConfidenceScore=5.27e-01
MNFNASNRQRVGVRPVGRERSHCFRKSRRIRTRGVLLLPCFFSFRVSHGRREKRQERAPPRRWEEQAPPSPPSEDSRDSEYSEEVSSEYDHSPAPASLVASSDDSDDSMGLSTVERAYIQSVERAGLGGSDDSEEVSSEDVEGLLRLRGGQ

SEQ ID NO: 62708 - protein, 195 aa, Zea mays
  Coding DNA Sequence Number=SeqID_20929
  Homolog annotation: Hit_ID=Q6H444; Match level="QueryCoverage=25%, HitCoverage=20%, E-value=9e-16, Identity=80%"; Hit description =Rhodanese family protein-like
  Pfam annotation: Domain name=Tim17; Domain location=4-115; Score=5.2; E_value=0.003; Accession=PF02466.9; Description=Tim17Tim22Tim23 family
MEGSNLKGLVDDEIVVKTGKAAGIGLAFGSVYGALHSMLFDGPQVGNNVKYPQLIRTTKALARYRMKKDIINGAVAGFAAGASLGFSAGSFRAAFFSGSAVALTSVVLDRFLDSRKDQAGWPTCRDQLVSISKEQEELRGSGSGGGTIVKRQLHNNFAGLFFGLPFTKLNPDFALTVKDKFSPESKLLVVCQEGL

SEQ ID NO: 62709 - protein, 363 aa, Zea mays
  Coding DNA Sequence Number=SeqID_20930
MEERPSPEASAGNSRAEDDFRSCCGDEEELEDTEESFTAGVAKGELDEASIEANCLGQLRHPKLVELIVYCCEDDHRKVAVFCCCWFLRSITAIHLACSALCAYPFIEALWVSAKELLGIKSDRDEEQPSTMTKGPTPIHQLSRTSCATNLYPSSEWEQMRKDNYKTVNVEESLHKKCFSEYTIQLILQTEGGAGGAKFSQFGADLSRQFLFAVALLLHTPPPIRVGGPKSRSAPDDQRMAVNWELQGCCHRDQRIFIAAVGVSTVVILLLRTFLLKPFKLITVFLHETSHALACKLTCGDKLCREGRNEKSHGLSASHFALKKKIFSVVHLTVLFSYGINGLKNHSISVTYGMVTVGFQTFL

SEQ ID NO: 62710 - protein, 116 aa, Zea mays
  Coding DNA Sequence Number=SeqID_20931
MPRPTPRCLSVAEEPELEESVGLPKILSLPPEPELPKVSKVPVITPKRRRMASVLDVVLESTRVPTPASAEVPSMSEENIKEAAEAVTILVEAEVGPSVLAETRPVETELGPSMPH

SEQ ID NO: 62711 - protein, 124 aa, Zea mays
  Coding DNA Sequence Number=SeqID_20932
MERGIKGGKTAPLNSKETDAGLRLAGAVGIGQGRSGLRLAKRRAVQGRGSRLHGTRPGAQAKGRMVARLLASVGAPGRARRGRMPRRGSWRRGSRAGRGWGGVGRRAAKPASWRRLLGRKGGAE

SEQ ID NO: 62712 - protein, 445 aa, Zea mays
  Coding DNA Sequence Number=SeqID_20933
  Gene Ontology: Mol. function=serine carboxypeptidase activity; Cellular component=cellulose and pectin-containing cell wall; Biological process=proteolysis
  Homolog annotation: Hit_ID=Q69ME0; Match level="QueryCoverage=88%, HitCoverage=87%, E-value=1e-145, Identity=59%"; Hit description =Putative serine carboxypeptidase
  Pfam annotation: Domain name=Peptidase_S10; Domain location=92-445; Score=443.9; E_value=2.1e-130; Accession=PF00450.12; Description =Serine carboxypeptidase
  Subcellular localization annotation: CTP_CleavageSite=84; ConfidenceScore=5.02e-01
MRTDACLTHLTLLLLVSVPVLHSHASQQAQLEKFILSRQGRAASGSSKSSAHEPGVGVTSSSLLQRLQARSYLGSESDQSALKAADKIAALPGQPDDGVGFDQYAGYVTVDEEKGRALFYYLVEAPPEDAPSKPLLLWLNGGPGCSSFGYGAMLELGPFRVNNDNTTLRVNEYAWNKGTHARFPEYKTRAFYISGESYAGHYVPQLAATILSHNLYSNRTIVGNPYLDRYKNQKGRFEYLWNHGVLSDEDMANITHHCSFSPSDDKLCSDLYGWYDFGPIDPYDIYAPICVDEPDGSYNSSSYLPGYNACDYYPTVTYLNDPVVQEAFHARKTEWSGCSGLDWKDAPDSMVPTLQWLIKHGLPVWLFSGDFDAICPLTATRYSIQDLGLSVTTPWRPWTAKMEVGGYVQQYAGGFTFITVRAAGHMVPSFQPERALILLNYFLKG

SEQ ID NO: 62713 - protein, 55 aa, Zea mays
  Coding DNA Sequence Number=SeqID_20934
VAVLEEEVVRLEEQVVSFRQGIYQGGDRLLLRQRTPNSPDDRRQGWPSGFALNGS

SEQ ID NO: 62714 - protein, 152 aa, Zea mays
  Coding DNA Sequence Number=SeqID_20935
MEKIQNFLWCSELGQIPMLRVWQMTYLGLWAEQVQGGPQRLGMGWNLCGVPRLLDIRERRLAYRCRSSTPVRISSGHPAEPASSLSGVWVGGGSTWARADLVEALGVDGGTAGQRRWPRATKLRGSVAPCAEAQRGGVALAARGTTGWVMWN

SEQ ID NO: 62715 - protein, 340 aa, Zea mays
  Coding DNA Sequence Number=SeqID_20936
  Gene Ontology: Mol. function=cysteine-type endopeptidase activity; Cellular component=endoplasmic reticulum; Biological process =proteolysis
  Homolog annotation: Hit_ID=Q6RCL9; Match level="QueryCoverage=97%, HitCoverage=96%, E-value=1e-128, Identity=66%"; Hit description =Putative cysteine protease 1
  Pfam annotation: Domain name=Inhibitor_I29; Domain location=37-94; Score=101.9; E_value=1.8e-27; Accession=PF08246.2; Description =Cathepsin propeptide inhibitor domain (
  Pfam annotation: Domain name=Peptidase_C1; Domain location=124-339; Score=444.3; E_value=1.7e-130; Accession=PF00112.13; Description =Papain family cysteine protease
  Pfam module annotation: Pfam domain module=Inhibitor_I29::Peptidase _C1; Domain location=37-94::124-339
MATLQASILAVLSFAFFCGAALAARDLNEDSAMVARHEQWMAQYSRVYKDAAEKARRFEVFKANVKFIESFNTGGNRKFWLGINQFADLTNDEFRTTKTNKGFKPSLDKVSTGFRYENVSVDAIPATIDWRTNGAVTPIKDQGQCGCCWAFSAVAATEGIVKISTGKLISLSEQELVDCDVHGEDQGCEGGLMDDAFKFIIKNGGLTTESNYPYTAADGKCKSGSNSAANIKGYEDVPTNDEAALMKAVANQPVSVAVDGGDMTFQFYSGGVMTGSCGTDLDHGIAAIGYGKTSDGTKYWLMKNSWGTTWGENGYLRMEKDISDKKGMCGLAMEPSYPTE

SEQ ID NO: 62716 - protein, 256 aa, Zea mays
  Coding DNA Sequence Number=SeqID_20937
  Gene Ontology: Cellular component=integral to membrane
  Homolog annotation: Hit_ID=Q6YWS4; Match level="QueryCoverage=49%, HitCoverage=39%, E-value=2e-31, Identity=42%"; Hit description =Putative senescence-associated protein 5
  Pfam annotation: Domain name=Tetraspannin; Domain location=4-228; Score=147.9; E_value=2.7e-41; Accession=PF00335.10; Description =Tetraspanin family
MARLSHGLLGALNLVTLLLSLPVLCAGVYIVTRATTACERGLQIPVVAFGCGLLLLSLVGLAGACGRRGAARPFLWVYVAFMFLLAVLVFAFAVFAFVVTHRGRGRRRVRARARIAEPETWRRVESCLSEARVCGGREFYRQHLSPIQSGCCKPPTWCRFRYVNATFWEAPRSGLSAAAASDGDCRAWSNDQQVLCFECDTCKAGVLETAKKKWKTVAIVNVSLLAFIVIVYTVGCFALRSKGGGRYFNGGGPDQT

SEQ ID NO: 62717 - protein, 151 aa, Zea mays
  Coding DNA Sequence Number=SeqID_20938
  Pfam annotation: Domain name=SoxD; Domain location=29-81; Score= -33.5; E_value=0.082; Accession=PF04267.3; Description=Sarcosine oxidase, delta subunit family
MGKSKKGGSSSHHFGDKRKREPTPPSEDFGGSEYSEEEFSSESEGSPVPASPPASSDDSDNSQGIAAEVWTYIRAVGRAGLEGSDESVVSSDEENSSDSSEEGGGDGGDGDGDDGGGGDGDDDGEGGGEGGGRGGSGDGRDGSKGSNKASG

SEQ ID NO: 62718 - protein, 46 aa, Zea mays
  Coding DNA Sequence Number=SeqID_20939
  Homolog annotation: Hit_ID=Q6YZW2; Match level="QueryCoverage=67%, HitCoverage=6%, E-value=1e-09, Identity=90%"; Hit description =Putative oligouridylate binding protein
MDASQDARSKENPENNPDCTTVYVGNLGHEVELVAEVGDCNWRTKQ

SEQ ID NO: 62719 - protein, 178 aa, Zea mays
  Coding DNA Sequence Number=SeqID_20940
  Homolog annotation: Hit_ID=Q8H6R3; Match level="QueryCoverage=54%, HitCoverage=17%, E-value=1e-25, Identity=52%"; Hit description =Nodulin-like protein
  Pfam annotation: Domain name=Nodulin-like; Domain location=69-178; Score=-55.5; E_value=1.4e-07; Accession=PF06813.4; Description =Nodulin-like
  Subcellular localization annotation: CTP_CleavageSite=38; ConfidenceScore=5.46e-01
MPMPLTLAATTLLPLPSHRHSFSLPLSLSSLSHAPDLSAASGGGPAQGSATTWLVVVEGRGWGGEPHAVAAGSAYGFPLYSHAVKEALGYNQQALTMLGVGNDIGENVGLVTGLLANRLPPWLILVIGSACAFFGFGRLWLAVTKTVAMPYWVIFSTIYVINISNDRQLKKRIDLFYG

SEQ ID NO: 62720 - protein, 185 aa, Zea mays
  Coding DNA Sequence Number=SeqID_20941
MDELFSKLKSKDEHYNRGDPDHFIASCPYKGKQETEPRDHHSGRCKGKREHTTSKHKSSGRFDKEALKKKYLQKAKIEERAFLASLSDLNHDSDEAMSSSSDEEFKRRVEDKFNGLCFIADTTGGLCTMALGDDAVGDIDEVEEPMAALANLAKLLRLVARERKDFISKYESTLRELESARASVM

SEQ ID NO: 62721 - protein, 48 aa, Zea mays
  Coding DNA Sequence Number=SeqID_20942
MRRERRAERSCFRDRATAHRRLTDAENGDEPRSPRGKEWHYCVQATDV

SEQ ID NO: 62722 - protein, 181 aa, Zea mays
  Coding DNA Sequence Number=SeqID_20943
  Subcellular localization annotation: CTP_CleavageSite=87; ConfidenceScore=5.63e-01
MRVRLGPGGAAPRPPSRVAPRPSPARCPLAPTRAAPRPPGGAAVPASYARPRGPRRRGSSAPVRVAPPARCARPLAPLRTAPRPPVRADPRPPARGRPSPSACGSRCAAPAFSSVVPRRGPCVRPGAARVASRPRSPNVFPRAQPHARGGDENDGLGIDYGTGEDEAVEEDFQEFQEYDEF

SEQ ID NO: 62723 - protein, 73 aa, Zea mays
  Coding DNA Sequence Number=SeqID_20944
MEVLTLMLSAILPQPFRCGLLVPPSSISHAPSSISICLLNGVATVESSALLPDPAATGSGCKSHARPTAQQIS

SEQ ID NO: 62724 - protein, 215 aa, Zea mays
  Coding DNA Sequence Number=SeqID_20945
  Gene Ontology: Mol. function=transferase activity, transferring glycosyl groups
  Homolog annotation: Hit_ID=Q5N8W6; Match level="QueryCoverage=89%, HitCoverage=98%, E-value=1e-49, Identity=52%"; Hit description =Galactosyltransferase-like protein
  Pfam annotation: Domain name=RRM_1; Domain location=9-81; Score=62.0; E_value=1.9e-15; Accession=PF00076.12; Description=RNA recognition motif. (a.k.a. RRM, RBD, or
MARNPGRTVFIGNLDEKVSERVLYEILIQAGHVVGLHVPSNKESNSRKGYAFAEYETEDIAQYAVRLFSGLVRINGKTLKFVIAGHDKPSSNDNKSVLLNHVPSSNGNNPVMPKLNPIPLPKPTQIMRCSDMPVSHIPAYPVLYRVDQYTAMARFSNSTYAYNRQEFGSVLNIAQRGPVMNAFAHEAANQPIMYVENVGAEERSMLRVGRFHIGS

SEQ ID NO: 62725 - protein, 337 aa, Zea mays
  Coding DNA Sequence Number=SeqID_20946
  Gene Ontology: Mol. function=catalytic activity; Biological process =nucleoside metabolic process
  Homolog annotation: Hit_ID=Q9LWK9; Match level="QueryCoverage=92%, HitCoverage=94%, E-value=1e-107, Identity=63%"; Hit description =Putative bark storage protein
  Pfam annotation: Domain name=PNP_UDP_1; Domain location=48-321; Score= -19.2; E_value=1.2e-07; Accession=PF01048.10; Description =Phosphorylase family
MAGGGTQHLLQVAAVLAAAVVLMATASEGFISKKTWSAIRRADRDGPFVGLVVPNAYEMVPVLNSPDFKPSSNIPILDVQGRRFRFGTIGSQNVVMVMTGLSMLNAGLTTQLLLSLFRVKGIVHWGIAGNANEDLQIGDVTIPESWAHLSLWNWQRHGDGPENELPLENAGDYTREYGFLNFSDYTVGQDAGNPELAANTLNSRYYALAGKLEGLELPACVNATTCLPRAPRVTRVPRGCSANIYTDNASYRQFIRSHFGCTPVEMESAAVALVAHQHGVPFITIRSLSDLAGGGSSISNEAATFLDIAAQNAVDVMLKFVPLIARRGGEQEHAADM

SEQ ID NO: 62726 - protein, 390 aa, Zea mays
  Coding DNA Sequence Number=SeqID_20947
  Gene Ontology: Mol. function=transcription regulator activity; Cellular component=nucleus; Biological process=regulation of transcription
  Homolog annotation: Hit_ID=Q1SP86; Match level="QueryCoverage=76%, HitCoverage=93%, E-value=2e-37, Identity=36%"; Hit description=Helix- loop-helix DNA-binding
MGGEFRSSLMQQMVWSSSGGGTDSKNMMSSSLMPCAEEQEEEGSNKMPPLSSPSMLLLPQHHLQIFSGLPLPLPPEVLNDSSATSDLHDGRESSMPESWSQLLLGGLVGDHERYNAATALLSKGLEERPAAYNCYDPGHGGGEEIQTSGTNIRSHQVSQALLASSSPRSCITTSLGSNMLDFSNTTVPPAPDLKNHHSDNSSEGNSAGSGSAPKKARVQTSSSAQSTLKVRKERLGDRITALHQIVSPFGKTDTASVLQETIGYIRFLLSQIECWKALRISAALSFPYLGHDNGDSMQQHNTNNLLLNHSTSDAMVQVQGPPMTNQEGEVYGNGIEEGSRKDLRSRGLCLVPVSCTSHLADDNGPSDFWAVSAAPSPPPPPPPFAGIIWR

SEQ ID NO: 62727 - protein, 185 aa, Zea mays
  Coding DNA Sequence Number=SeqID_20948
  Gene Ontology: Mol. function=DNA-directed RNA polymerase activity; Cellular component=nucleus; Biological process=transcription
  Homolog annotation: Hit_ID=Q5JJW0; Match level="QueryCoverage=94%, HitCoverage=10%, E-value=4e-40, Identity=53%"; Hit description =Putative DNA-directed RNA polymerase II largest subunit
MAQLVENPILITHCSQLHDNPSLGLPLQVGGSCESYCCSATQLDNCEGHFGFIKLPVPIYHPSHITELGRYSTSSASASRNPRYKNPKDTGKECRFTSCSYCQDLPPLCVSQVKKFNGARSLELKAPLKQEVAVRFWSFLDQFGFHTSGTSHRRPLHPKEDIMKKITEETRARLAAMGTIFRMDM

SEQ ID NO: 62728 - protein, 1321 aa, Zea mays
  Coding DNA Sequence Number=SeqID_20949
  Gene Ontology: Mol. function=ubiquitin-protein ligase activity; Cellular component=ubiquitin ligase complex; Biological process =protein ubiquitination
  Homolog annotation: Hit_ID=Q6H6D6; Match level="QueryCoverage=38%, HitCoverage=52%, E-value=1e-30, Identity=24%"; Hit description =Transducin-like
  Pfam annotation: Domain name=U-box; Domain location=404-477; Score =48.2; E_value=2.8e-11; Accession=PF04564.6; Description=U-box domain
  Pfam annotation: Domain name=WD40; Domain location=1067-1103; Score =18.7; E_value=0.021; Accession=PF00400.22; Description=WD domain, G -beta repeat
  Pfam annotation: Domain name=WD40; Domain location=1109-1149; Score =22.1; E_value=0.002; Accession=PF00400.22; Description=WD domain, G -beta repeat
  Pfam annotation: Domain name=WD40; Domain location=1193-1228; Score =5.3; E_value=8.8; Accession=PF00400.22; Description=WD domain, G -beta repeat
  Pfam module annotation: Pfam domain module=U-box::WD40::WD40::WD40; Domain location=404-477::1067-1103::1109-1149::1193-1228
MAGPTPTCSAIVSHTAAFLAELVADPLLRRHLLSAAAAAGGGQQHPAATLQALSLVSDALDTAASCSPSPSSLRAAERLLRSLPAATPLSCLLLALARAARRGAGAAAAVLDLFALDPALARHELAPAAFEALFAPRLLPVMRHFAARRAAAAARTKGEEGGSDEATPMRVLSLMSGAQAQEMRALEREYDKVLDANCRAYALYLKRILEAGEPSSPAVSSPLPQPLPPPELVFGVEDDDDSRGDEDTAPENDESAASSQSELRDNPMWAETEEQPGDLYPRRQGSVKGRRDLLRPPSLYPQRVPPHLIVQQQQALPVGRGSPASRLRAEHSRSRSPATPSDDSMEESSSELCAAKEEKIAASPLSSKQPRPRADAGQLSPEPASFPVRCDAAAVDPLQPLPTPKDFVCPITSQVFDDPVTLETGQTYERRAIQEWLDRGNATCPITRQRLHGAQLPKTNYVLKRLIGAWRDQRRTPSPSSSPSPSPPPATPPPAPATAMAGDSPAPPFPLPVKAAAASSPSPDANTSASAPSPTSVIAQASLESAVAELRAAVSCLCTSEDLAQSERPAVLNGFVEILFNSVSAQVLRVAVFLLAELASRDDAVVQTLTRVDSDVDCLAALFKKGLAEAAVLICLLSPAPEQLVEMDLAEALVATIRRGGGDEDPLKMCVSPKAASVILLSQILVEDAAAAADDDSSSTPPVPRSALMSERFIRSLAASLEAEPVEERLAAMRILLRCIWEDGHCRRSIAEKASLGAVLDAFHAVGDADKIDIVRFLYELLKLKKRSAAERLLRTIKEGGSFSMMHTLLVYLQSAPPEHSPVVAGLLLQLDLLVEPRKISMYREEALDCLIQCLKNADFPRCQLLAAETIMCLPGRFSSSGRPLARSTLLKLARVKERYRQSQDLSAARADGEDEMEEGKAASEWERKAAYAVVSHEFGLVFEALSECLRTKNAELFTTSLVCAAWLVHMLSLLPDTGVLGAARVCLLRQFVVVLRSAKHGSDRVLAMVALRSFMNDREGMHDITTYIKDVLRTLRELKKSSGLAFEMLKLLSDGQESSVDMWSHKEINQVDCSANGEVTSVVYLNNYIFSGHSDGTLKVWQGSENILALVHEAQEHSKAITSLSVLHSESEEKLYSGSLDRSIRAWQLRDGVLRCVEVHDTRDPVQSLAVASAVACFVPQGAGVKVLSWGSGSSRVVNANKYVRSMALVHGKLFCGCSDGSVQEIDLASGTLGVIQPGSKRILGKASPVYALQAHGGLLYTGGTPSSSSAASADGGGGAAVKVWSCANYGLVGSMATAAEARSLVVSADLVYVASRAAA

SEQ ID NO: 62729 - protein, 92 aa, Zea mays
  Coding DNA Sequence Number=SeqID_20950
MTDARLRLASASEVSNLGEGEAEPRRRLRGDGMDASACFAIACLTCCDEDVFDPDAGHPLRPEFPELKAAIAELGGAALPKRNWSAPKDATF

SEQ ID NO: 62730 - protein, 899 aa, Zea mays
  Coding DNA Sequence Number=SeqID_20951
  Gene Ontology: Mol. function=DNA binding; Cellular component=nucleus; Biological process=regulation of transcription, DNA-dependent
  Homolog annotation: Hit_ID=Q5QT32; Match level="QueryCoverage=99%, HitCoverage=100%, E-value=0.0, Identity=51%"; Hit description =Transcription factor myb
  Pfam annotation: Domain name=Myb_DNA-binding; Domain location=103 -149; Score=58.8; E_value=1.8e-14; Accession=PF00249.21; Description =Myb-like DNA-binding domain
  Pfam annotation: Domain name=Myb_DNA-binding; Domain location=155 -200; Score=31.7; E_value=2.6e-06; Accession=PF00249.21; Description =Myb-like DNA-binding domain
  Pfam annotation: Domain name=Myb_DNA-binding; Domain location=51-97; Score=61.5; E_value=2.8e-15; Accession=PF00249.21; Description=Myb -like DNA-binding domain
  Pfam annotation: Domain name=PDR_CDR; Domain location=737-861; Score=- 70.6; E_value=0.069; Accession=PF06422.3; Description=CDR ABC transporter
  Pfam module annotation: Pfam domain module=Myb_DNA-binding::Myb_DNA -binding::Myb_DNA-binding::PDR_CDR; Domain location=103-149::155 -200::51-97::737-861
MPSDKAKAPKKKGEEDPGIPPAPCEGEISHEPHRQRSLNGRTTGPTRRSTKGNWTPEEDAILSRAVQTYQGKNWKKIAESFPDRTDVQCLHRWQKVLNPELVKGPWSKEEDEIIVQMVNKYGPKKWSAIAQALPGRIGKQCRERWHNHLNPAINKEAWTQEEEITLIHAHRMYGNKWAELTKFLPGKGAKNTQYYLLMLYYQLITQRTDNAIKNHWNSSVKKKVDSYISSGLLSQVPCLSLIECPAQCDSLSAMDQQNNGGTDCNDQNTSVVLSSDLQVNVDANKKEAHDSHSSLCQGVCYPSTETVGSVLPDDLEMDMDEGSGNSIFADDQTLCSTSNQEQSMVPFVVAQEMPVSVLSSVSSAEQKRHLISDAKSLKSELWKDVCLQTLITGDTDDPDASSRLNNPDSSKMDTNFLKEAYPLHTPNPSSVIETVYEPMALVTISPPFICSDGLSFAPENRSKPGEMSDCEAEMVTCSNNFFGNAEQSAKLASSDDRPEAFTMTESTTNCGGEQLTDAKEPVASTAKERLSKDIETMPDKKKGEGALFYEPPRFPGLDVPFISCDLVTSADLQEFSPLGIRQWMRSTMNVPTPLRLWGSPTHDESPDALKTAAESFPCTSSIMKKRQRSLLSPTPDERIEKKSGIAKGVTDISYMITATCSMNATNDEDIVTESAVCAKQPSLKHLDKKLEFSDINKENSDGASEQAKDAQNTQLVDEQHSSPNVVNPNTDLQDNIQPVQILVEQSSNNLISSDHGAKPSCFSVYEAKLWQVLFVNISYELLLLLDWLIPQGFVSPADRTYDALGLVNRLSKHSAAAAVEACEMLASGNTTSDKENKDNTDGKELVTRKSQIKIMAEARVLDFDESPAPARTADKKLGSCHRRSVSSPILPSPNLRSFR

SEQ ID NO: 62731 - protein, 158 aa, Zea mays
  Coding DNA Sequence Number=SeqID_20952
MNKPLFVHDATISVLTGEGGGHAARIRERRPVYCLPAQISLLSSRRTPATATVASAHRGGGAAIPVWSCSNYGLFGSMATVAEARSLVVSADLVYFCSRAAAVEIWSREKLAKIGTLQAGGRVQCMAVDADGDFLRRRGRVGIDLTRRRRTIGCREEA

SEQ ID NO: 62732 - protein, 471 aa, Zea mays
  Coding DNA Sequence Number=SeqID_20953
  Gene Ontology: Mol. function=protein serine/threonine kinase activity; Cellular component=membrane; Biological process=protein amino acid phosphorylation
  Homolog annotation: Hit_ID=Q8W0B8; Match level="QueryCoverage=85%, HitCoverage=66%, E-value=1e-174, Identity=75%"; Hit description =Putative brassinosteroid insensitive 1-associated receptor kinase 1
  Pfam annotation: Domain name=Pkinase; Domain location=95-375; Score =105.0; E_value=2.2e-28; Accession=PF00069.15; Description=Protein kinase domain
  Pfam annotation: Domain name=Pkinase_Tyr; Domain location=95-375; Score=141.7; E_value=2e-39; Accession=PF07714.7; Description=Protein tyrosine kinase
  Pfam module annotation: Pfam domain module=Pkinase::Pkinase_Tyr; Domain location=95-375::95-375
  Subcellular localization annotation: CTP_CleavageSite=90; ConfidenceScore=5.02e-01
MSTSPPPATSPPGAPPNGDQHQSWQHNAPPPPPDHVIKINSHPTLPPPPHNVHSSGSASNHSGGESRPALSPGTALSFSRSTFTYEQLMTATNGFSDANLLGQGGFGFVHKGVLPDGTEVAVKQLRDGSGQGEREFQAEVEIISRVHHKHLVSLVGYCISGAHRLLVYEFVPNNTLEFHLHGRGRPTLDWPTRLKIALGSAKGLAYLHEDCHPKIIHRDIKASNILLDLRFEAKVADFGLAKFTSDANTHVSTRVMGTFGYLAPEYAASGKLTEKSDVFSFGVMLLELITGRRPVNSRQADDNLVDWISLLLSTIEARPLMIKAFEDGNHDALVDPRLGSEYNDNEMARMIACAAACVRHSSRRRPRMGQVVRALEGDVSLDDLNEGVRPGHSRFVGSYGSSTSDYDTSQYKEDLKKFRKMALGGSGLQSSSAQTPTSEHGENPSVSVSSSDGDGGGGTGEEREDRRQAAS

SEQ ID NO: 62733 - protein, 316 aa, Zea mays
  Coding DNA Sequence Number=SeqID_20954
  Homolog annotation: Hit_ID=Q2QXC0; Match level="QueryCoverage=64%, HitCoverage=27%, E-value=1e-20, Identity=29%"; Hit description =Expressed protein
  Pfam annotation: Domain name=DUF1618; Domain location=83-221; Score =78.2; E_value=2.6e-20; Accession=PF07762.4; Description=Protein of unknown function (DUF1618)
TASPQPQHRPHRRPRPVPPRPLVHYLVAQLYPRDSVLLGDKLLCCSTATFQWFVKPLLTSATTRMRNPSADTGVVAHAGRLYWLALAYGVFVCDPFADTAHLRFLALPADCDLGEKPYRINRAYVAQCRRVAPSEGQLRYVEIRGLSYEAYVAPAVAPPPVHPTVWMWTLVDPEATEPWRFEYEAPFAEVWAHESYAAAGLPHGEVPHVALVDPDDHGIVYFFQGSKSKLFGLDVRARRVVSCEECSVRDDLKMKDWNSRPIVDAWEVPPPSPPCSELSSPSPQGSDELAPVAKRVIEILRLMSDTDDDDGGYATI

SEQ ID NO: 62734 - protein, 127 aa, Zea mays
  Coding DNA Sequence Number=SeqID_20955
  Subcellular localization annotation: CTP_CleavageSite=56; ConfidenceScore=5.59e-01
MNYGGGSRSSSRLRDRLARMFRPSALLRSTCNTAAAASSCSSSSPASTAKPPPPPVAAAASACSSSRALLGAVVDGDSSFLASSRRDLAVAGRAESFSAALDRCRRNSNNWCCVLSTTPVLDYIFEK

SEQ ID NO: 62735 - protein, 142 aa, Zea mays
  Coding DNA Sequence Number=SeqID_20956
  Homolog annotation: Hit_ID=Q5SMJ0; Match level="QueryCoverage=32%, HitCoverage=3%, E-value=1e-15, Identity=76%"; Hit description =Putative salt-inducible protein kinase
GIVNNTLRPPIPEKCDPDWQKLMEQCWSANPDARPSFTEVTDRLRAMPPRMSSSMVPKNPPPPTGYDGEGGVEAAPVTSCLYLRPGAGALDRDAVLRRIRHRRRHSRLRDTLRPMVLQAQPAEPDGAEWRLPWPLDDAFSAP

SEQ ID NO: 62736 - protein, 364 aa, Zea mays
  Coding DNA Sequence Number=SeqID_20957
  Gene Ontology: Mol. function=receptor activity; Cellular component =integral to membrane
  Homolog annotation: Hit_ID=Q2HVJ5; Match level="QueryCoverage=99%, HitCoverage=100%, E-value=1e-113, Identity=52%"; Hit description=EXS, C-terminal
  Pfam annotation: Domain name=EXS; Domain location=217-335; Score =29.0; E_value=6.9e-10; Accession=PF03124.5; Description=EXS family
MKGSTIPSVAIMPSPLFLWRFKVVLFLLWGLCCCKIGWDSVMRMSVDLRDLFLYEAFLYYNPLLLVALMIWLWGVNLWVFAQSSVNYAKVFDLAQTHLSHREIWRKNLSGSLYKVIILLKICDDLSLSKEMTQNNSVKYSKVLLYAILLMILLSPFDMFYLSSRFYFLRTVWRIILPLQAITFPDFFLADIFTSMSKVFSDLERSVATIAWFEADSICGSHSVAIPLVLVFPYLWRFFQCLRQYKDTKEKTCLFNGNLYVYFYTCLWNNLSFLYPEFSSQVFYWVLGSNLVLRCTWTYKLSAHLRHNYLTVFTIAALEILRRWQWVFFRVENEWNKMTAKQNLEMSSDMPSEGDRLLDSSNHTV

SEQ ID NO: 62737 - protein, 110 aa, Zea mays
  Coding DNA Sequence Number=SeqID_20958
MDGGAVAPANLYRPGYAMTGALEQLTPNSTPNNYFPSINCANPVSQSGGSQFGHGVLAVGEREEHWRNSYVSFTVAGLPATSQQYRMAYCDMVKLQGLFEIGTSFPLPPT

SEQ ID NO: 62738 - protein, 79 aa, Zea mays
  Coding DNA Sequence Number=SeqID_20959
  Gene Ontology: Mol. function=nucleic acid binding
  Homolog annotation: Hit_ID=Q5R1J2; Match level="QueryCoverage=61%, HitCoverage=4%, E-value=2e-10, Identity=58%"; Hit description =Integrase core domain, putative
  Pfam annotation: Domain name=zf-CCHC; Domain location=41-58; Score =26.8; E_value=3.8e-05; Accession=PF00098.13; Description=Zinc knuckle
MAVQNKPNFKKKGKSQKKKGKAKDTVSKPNQKPKAGPVVDAECFYCKELGHWKRNCKQYLASIKNRDGKGTAAAGNDKK

SEQ ID NO: 62739 - protein, 150 aa, Zea mays
  Coding DNA Sequence Number=SeqID_20960
MGKSKKGGGSSHHSDDKRKREPTPPSEDFGDSEYSEEEFSSESEGSPAPASPPTSSDDSDDSQGIVAEVWTYIRAVKRAELEGSDESEYSSNEENSPDPSEEGSDGDDDGGDGDGGKGGDGSGKGDSGDGGGGSKGSSKGSNKGSNKASG

SEQ ID NO: 62740 - protein, 128 aa, Zea mays
  Coding DNA Sequence Number=SeqID_20961
MAGGLRLHGENTDERGPGETERLGANQMVSHVAGEEVELTKAMDAKRARGARDMARKRAVVGVSTTESADGRLGKVEVADRRGSHTSEGERANGRSVLTGRSHRVASESGRVRGWVGADRPVPPSSGR

SEQ ID NO: 62741 - protein, 74 aa, Zea mays
  Coding DNA Sequence Number=SeqID_20962
MDVLQMMRRSPMGWFPRPEQGVWIQDGAIEMLRRHRPRRISTTRRELSGEKGLTTGAAENARAHSSAEAVPPLR

SEQ ID NO: 62742 - protein, 154 aa, Zea mays
  Coding DNA Sequence Number=SeqID_20963
MEEGEVRLGIEAATLVDPFRRGHGCPPDDVAKPHGLVTEAGARSKKVAARFLIIGAWIQDGAMELLRRWRLRRISTTRCELSGEERTDNRGRRVSIGCSRAVTDHEGPAEAVPARRGSGVGDWTGEATCRRLDTMRVRVGLRLEVSWAQSGQLA

SEQ ID NO: 62743 - protein, 107 aa, Zea mays
  Coding DNA Sequence Number=SeqID_20964
MSSNEWQRDREACLKAEVGNLLTAVKTLKQWGLSGTRLVRTFMHRWIQPLMSCRKPRHQYSGVNDSDRYSFMSLALSEIEARVRVVKTLSLESFMDEDLPLPCPKTS

SEQ ID NO: 62744 - protein, 111 aa, Zea mays
  Coding DNA Sequence Number=SeqID_20965
MARTNSGDGMDEQESEERGETDVGGSAVARMARSGAQAARSRGSWRAGRGMVLGATGGVGCRGIEAGLCSVGPGAAPGGSRGGVRGARRGSRLLAARTVGERKGKGRRRRS

SEQ ID NO: 62745 - protein, 69 aa, Zea mays
  Coding DNA Sequence Number=SeqID_20966
MAKVTACRRWSNEFTGEKMSQEKKVVAKTKLTEEAKLFEEKSVDPYCWGPSSSEGPQKRDLTISSKCDT

SEQ ID NO: 62746 - protein, 182 aa, Zea mays
  Coding DNA Sequence Number=SeqID_20967
  Subcellular localization annotation: CTP_CleavageSite=53; ConfidenceScore=5.09e-01
MCGGSHGFASGLSGYNVALSCHRGLYFVLPRAWIRPFGMAPRHVASTIPTTMEAPMLRSPWTGAASSHQTTWYAYYMKGRLLPKVFFSRGGPSSFDLVGAGRETIKLQEDYPSEIRSPSGSVIPLGVLNPLGHLIESFLIQSRSSPLVGMAYQRGPCGHPICRVSMGEFEVRPWMWCRANDL

SEQ ID NO: 62747 - protein, 281 aa, Zea mays
  Coding DNA Sequence Number=SeqID_20968
  Pfam annotation: Domain name=DUF1645; Domain location=85-259; Score =5.9; E_value=2.3e-05; Accession=PF07816.2; Description=Protein of unknown function (DUF1645)
  Subcellular localization annotation: CTP_CleavageSite=19; ConfidenceScore=5.43e-01
MPPSAAYKNKPRPAPRSVPATAPSRLCMGTKRCCVVGVRARGPDASSSDDMREPRSATMLDDGDDDFTFAAAHPPPRLLPAGAGGGFVGPPLLYPVFGRPRSPPRVADPAEPEPEPDTATARVPLGRHLAVDRRRDPAPAPLPAPADDDDDSVPAETFCPWSPGWSAAAASPARCKKSGSTGSVLRWRPRLAVGRSQSDGKEKFVFLSAGGGSSGRRSQNGRGVAAPGGGATAGAPHAWSCYVNDNKSGGGARRRSFLPYKRDLVGLFANAAVFRRSYLPF

SEQ ID NO: 62748 - protein, 141 aa, Zea mays
  Coding DNA Sequence Number=SeqID_20969
  Subcellular localization annotation: CTP_CleavageSite=29; ConfidenceScore=5.31e-01
PIKRSSFGFNKGAKRQPKAPLVWGHRTVRCTPDSVRCTRGLQLKLATFGNFQRHVAIIHRTVRCTPDMSGAPRKGGLRNSPASGIHFSCSAIIHRTVRCAPDYPVYQRGNGYNGANGYLQRIKCARCARRRQARPYWRTGQ

SEQ ID NO: 62749 - protein, 387 aa, Zea mays
  Coding DNA Sequence Number=SeqID_20970
  Subcellular localization annotation: CTP_CleavageSite=42; ConfidenceScore=5.89e-01
MAYLPPHKRQPSTTASTPIPAPNPPPPSLSSSLRSLSLSSPRGRGRGAVGRHPLASTKIFRAAGCISRWFPLPPFSPAGDGEEYTLRLEPFPCSPIEHRTGAKPLALVVASTPGQGSSGSTAAAVTSIAEQFLPDLLAAAERAKAEGAPKDELVKLSLVARLGTVLFECQPGGSPVSLDELRQAAKAGEDGSRSQLRKTFYTSLSSECLDDMERTMVKRIGLDFDSSKKHYHVKVSDKNRSDSTISCKCTVEEDGSLAIHKVELNQSEVENAVKSLVSTAIIDPNVKGGVRWPLGKESIGERFSIVGVWHTGYKAFRNETMRLKLRHADRFDHRTSTGGVSDEVTFKLTAISCKLEEDDLAESAVKEMLESAVQMLWDNALNYRVVP

SEQ ID NO: 62750 - protein, 57 aa, Zea mays
  Coding DNA Sequence Number=SeqID_20971
MAGSAELAGVGVSARGVKQGSCHVANLGVSGCFVPRQSYAKIVSIGLGLSSNFARVF

SEQ ID NO: 62751 - protein, 142 aa, Zea mays
  Coding DNA Sequence Number=SeqID_20972
  Gene Ontology: Mol. function=nucleic acid binding; Cellular component= intracellular; Biological process=translation
  Homolog annotation: Hit_ID=Q8H6I0; Match level="QueryCoverage=99%, HitCoverage=9%, E-value=1e-47, Identity=61%"; Hit description =Putative gag-pol polyprotein
MSGAHAKKEMVTGEKPATSHGKAPSGESGNKKREESPPRVKSHRSGDKKKMKKVVYYETDSSLPSTSGCDTPSVTSKRHERKKFSKIPLRYPRISKHTPLLSVPLGKPSGFYSEDYCMWSDKMRHHLTSLHTSIWDIVEFGA

SEQ ID NO: 62752 - protein, 512 aa, Zea mays
  Coding DNA Sequence Number=SeqID_20973
  Gene Ontology: Mol. function=transferase activity; Biological process= Mo-molybdopterin cofactor biosynthetic process
  Homolog annotation: Hit_ID=Q8R123; Match level="QueryCoverage=68%, HitCoverage=96%, E-value=6e-22, Identity=34%"; Hit description=RFad1, flavin adenine dinucleotide synthetase, homolog
  Pfam annotation: Domain name=MoCF_biosynth; Domain location=269-402; Score=58.8; E_value=1.7e-14; Accession=PF00994.14; Description =Probable molybdopterin binding domain
  Pfam annotation: Domain name=PAPS_reduct; Domain location=62-208; Score=5.2; E_value=1.7e-07; Accession=PF01507.9; Description =Phosphoadenosine phosphosulfate reductase family
  Pfam module annotation: Pfam domain module=MoCF_biosynth::PAPS _reduct; Domain location=269-402::62-208
MEIDQAVRGCSDRRMRTKYSNAVYVVQRAFALYPALKIIAFLFGSILSMGNRFLAMQTGFEEVAFSFNGGKDSTVLLHLIRAGYYLYKKDSGDVAQTDAVKNCPLRTIYFESPCAFPEINSFTYEIVSTYGLPLETIHSDFKSGLEGLLKEKPTKAIFIGTRIGDPNAVGQEQFSPSSPGWPPFMRVNPILDWSYRYTSIGSIHDTVPNALLSDSSSEKSFRPAYMLTDGRLERAGRTKKINPKVEMNSAASNGINDTEGGRMISRAASIIVVGDEILFGTTEDNLGAALCKKLHAIGWRVSHVAVVRNEIDSVAEEVERCKSTDDMVFIFGGLGPLHSDVSLAGVAKAFGVRLAPDEEFEDYLSQLMGNNYTGDRNEMAQLPEGITELLHHKTLPLPLIKCRNVIALAATNMDELDTEWDCLLGTQESGLMPSKPFVSKHLSTTLSDVQIASVLAKLCLEFSDVYIGCHRISRAGPLVVNLTGKDNQRVDAAAEKLTSSFEGQFSQLNSCK

SEQ ID NO: 62753 - protein, 41 aa, Zea mays
  Coding DNA Sequence Number=SeqID_20974
MTFKGLKFQFDSIEEIDISMDDVEGIFSLEICFYWIHTGRR

SEQ ID NO: 62754 - protein, 198 aa, Zea mays
  Coding DNA Sequence Number=SeqID_20975
  Gene Ontology: Mol. function=phosphoenolpyruvate carboxykinase (ATP) activity; Cellular component=cytosol; Biological process =gluconeogenesis
  Homolog annotation: Hit_ID=Q10NX2; Match level="QueryCoverage=93%, HitCoverage=13%, E-value=7e-45, Identity=95%"; Hit description =Phosphoenolpyruvate carboxykinase, putative, expressed
  Pfam annotation: Domain name=PEPCK_ATP; Domain location=1-174; Score=- 254.5; E_value=1.9e-07; Accession=PF01293.11; Description =Phosphoenolpyruvate carboxykinase
GSPNIEMDEHTFLTNRERAVDYLNSLDKVFVNDQFLNWDPENRIKVRIISARVYHSLFMHNMCIRPTDEELESFGTPDFTIYNAGQFPYDIGYGAEPCRGSPNIEMDEHTFLTNRERAVDYLNSLDKVFVNDQFLNWDPENRIKVRIISARAYHSLFMHNMCIRPTDEELESFGTPDFTIYNAGQFPSRARNNGMQTI

SEQ ID NO: 62755 - protein, 373 aa, Zea mays
  Coding DNA Sequence Number=SeqID_20976
  Homolog annotation: Hit_ID=Q10C31; Match level="QueryCoverage=72%, HitCoverage=69%, E-value=1e-41, Identity=38%"; Hit description =Uncharacterized plant-specific domain TIGR01615 family protein, expressed
  Pfam annotation: Domain name=DUF506; Domain location=56-277; Score =259.2; E_value=8.3e-75; Accession=PF04720.3; Description=Protein of unknown function (DUF506)
MRAAQIDPSPAAPPKSRLKRLFERQLLRVSPAERLPSAPPGGGDKDELPEPSSLCLDGMVRSFLEDGGGGGGAERAAAAARCCNCFHAGDTSDDEDGPAAADAAAADIAETIKGLVHCASLRERNLLADVSTLVERHRASGARKRDLLRLLAGSLRAAGHDAAVCLSRWDRSPSHPAGDHAYLDVLLPAASERAGRERVLVDVDFRSAFEVARPTKAYRAVLQRLPPVFVGRDDRLRLLVAAAADAARASLKKRGLHLPPWRKPEYMRARWLSPYDREAPQPEASTGELAGDGEGGGIKWGSGQQSARGGIASGRAILSDSTRSFCPRYYENSPLAGINSFCVRRLLERKTCDGHTCQQLVEYIAKSSLTRGS

SEQ ID NO: 62756 - protein, 78 aa, Zea mays
  Coding DNA Sequence Number=SeqID_20977
MDPEVIFGDGELPNAKPSLVLAPGSGCGPETRRNARARRRAGDSGKGIRDVYTDCLRGQSLRQGVVKSEGKGAKLGTI

SEQ ID NO: 62757 - protein, 286 aa, Zea mays
  Coding DNA Sequence Number=SeqID_20978
  Homolog annotation: Hit_ID=UPI0000DA43ED; Match level="QueryCoverage =44%, HitCoverage=91%, E-value=2e-10, Identity=33%"; Hit description =PREDICTED: similar to keratinocytes proline-rich protein
MQGDIITCLPGRARWDAGLAPLRSRSSLSSKAEVESEPLGRARRRPSAEARAESEPWGWAKRSSSSSGAEPESEPWGRAKRSSSSSGAEPESEPWGRAKRSSSSSGAEPKSEPWGRAKRSSSSSGAEPESESWGQAKRSSSSSGAEPESEPGVGRSGVRRLPGLSPSPSPAGGAEFPMAPEAGLGCCQPHSIEWHSSRSGAGGAVLLSGRSVERRSDCGHFGSIDWRARVRIRCQATFALNAPAIRSVGVATWPRLLLGEDWASGEPKEFYSEHDMKSGLPPPTMP

SEQ ID NO: 62758 - protein, 299 aa, Zea mays
  Coding DNA Sequence Number=SeqID_20979
  Gene Ontology: Mol. function=acyltransferase activity; Cellular component=integral to membrane
  Homolog annotation: Hit_ID=Q7XEM4; Match level="QueryCoverage=89%, HitCoverage=51%, E-value=3e-99, Identity=69%"; Hit description=Fatty acid elongase, putative, expressed
  Pfam annotation: Domain name=ACP_syn_III_C; Domain location=171-253; Score=7.8; E_value=2.2e-06; Accession=PF08541.1; Description=3 -Oxoacyl-[acyl-carrier-protein (ACP)
  Pfam annotation: Domain name=Chal_sti_synt_C; Domain location=114 -255; Score=0.1; E_value=0.0018; Accession=PF02797.6; Description =Chalcone and stilbene synthases, C-te
  Pfam annotation: Domain name=FAE1_CUT1_RppA; Domain location=8-157; Score=111.7; E_value=2.2e-30; Accession=PF08392.2; Description =FAE1Type III polyketide synthase-lik
  Pfam module annotation: Pfam domain module=ACP_syn_III_C::Chal_sti _synt_C::FAE1_CUT1_RppA; Domain location=171-253::114-255::8-157
MDGPVCTALLSCRRVAHLTDPLPFTQVHPETYALVVSTENITLNAYLGNHRPMLVTNTLFRMGGAAVLLSNRRADRARARYRLVHTVRTHRGGASDESYACVTQEEDAEGNVGVSLSRGLMSVAGDALRSNITALGPLVLPLSEQLRFLAAALLRRVAAVKPYVPDFKLALEHFCIHAGGRGVLDELERSLGLSAWHMEPSRMTLYRFGNTSSSSLWYELAYCEAKGRIKRGDRVWQIAFGSGFKCNSAVWKALRTVDDAGRRDTNPWADDIHDLPVHVPKVSPFASSDQAPPTNAQHA

SEQ ID NO: 62759 - protein, 97 aa, Zea mays
  Coding DNA Sequence Number=SeqID_20980
  Gene Ontology: Mol. function=binding
  Homolog annotation: Hit_ID=Q10RD7; Match level="QueryCoverage=98%, HitCoverage=11%, E-value=1e-39, Identity=78%"; Hit description =Pentatricopeptide, putative, expressed
  Pfam annotation: Domain name=PPR; Domain location=58-92; Score=28.0; E_value=3.4e-05; Accession=PF01535.11; Description=PPR repeat
MLETLEDVRDVGEALWAWKDTLSNREKTIILKEQKDWRRAVEIFDWFRREQGHELNVIHYNVVLNTVGKARRWDLVLRLWYEMHSFGVAPDNSTYGT

SEQ ID NO: 62760 - protein, 86 aa, Zea mays
  Coding DNA Sequence Number=SeqID_20981
MVLPSCPGARRHGSLRAGEGRRELSPARLRLTWARRASWRCHASDSRQAEQQRREATMRSEQKPKEQNRRSMRMWALGGMDDEPEG

SEQ ID NO: 62761 - protein, 876 aa, Zea mays
  Coding DNA Sequence Number=SeqID_20982
  Gene Ontology: Mol. function=ion channel activity; Cellular component= integral to membrane; Biological process=ion transport
  Homolog annotation: Hit_ID=Q10RD6; Match level="QueryCoverage=94%, HitCoverage=98%, E-value=0.0, Identity=68%"; Hit description =Expressed protein
  Pfam annotation: Domain name=DUF1012; Domain location=398-606; Score =254.3; E_value=2.4e-73; Accession=PF06241.3; Description=Protein of unknown function (DUF1012)
  Pfam annotation: Domain name=TrkA_N; Domain location=314-458; Score= -10.6; E_value=0.096; Accession=PF02254.8; Description=TrkA-N domain
  Pfam module annotation: Pfam domain module=DUF1012::TrkA_N; Domain location=398-606::314-458
  Subcellular localization annotation: CTP_CleavageSite=97; ConfidenceScore=5.40e-01
MRSQLNASFSPPPSLRRALPSATPRALRYGERTASIGSAFLLRRATEAGRLLNTALPGSRFHAFPWRFRAPQHHGRGAGARCATNLPAPGSHGVGVLASERRADDGDTTVKNADAPSTSTATQGNLNMAAIVSIAFCFLHRIVSGRMQSMMNLFPWMSNGIASLPFACISDPTRKPMPLKLDLTLPPLPDFGWNFSRLYYRFNSQLDRNIALSIITLLITCFSFVIVGGLLFHKFRKQQQSLEDCFWEAWACLCSSSTHLRQKTRVERVIGFFLAIWGILFYSRLLSAMTEQFRNQMHKVREGAQVQVIEDDHIIICGVNSHLMSILNQLNKYHESSIRLGLATARKQKILLLSDLPRKQIDKLADSLAKDLNHIDVFTKSCSLSMSTSFERAAAHKAKSIIILPAQHERYEVDTDAFVSLLALQPCKQIAPVPIIVEASNATTCELLKSITGLNVQPVEMVASKLFVQCSRQKDLLKIYKHLLNQHKNVFNLFRRPELEGMKYMDAVVCGIFRSGKIHFHPSEEELLKETDKLLLIAPVRGMKRPQYRALSVRKETQTLSRNSEPREGQGSFNMATTMDNETRLNNIVKRPLKSLSKSSDYMLGPKECVLIVGWRPKVTEMIREYDNYLGPGSTVEILSETPIKERSSIINPLLQSQLKNVKVTHRVGCPLNYDTLKETIINVRESAKSDKEVPLSIVVISDRDWFVGADAAQADKQLAYTLLLAENICQKHGVMVENLVSEIVDMGLGKQISKIRPSLSFIGAEEIMSRVTAQVAESSELNEVWKDILNAEGDEIYIKEIGLYMKEGEKISFLELSERAVLRREVAIGYIKDGKQHINPINKSEPLSLEMNDSLIVISEFEGEQPIMMGGETSG

SEQ ID NO: 62762 - protein, 119 aa, Zea mays
  Coding DNA Sequence Number=SeqID_20983
MGGARRTRWRWKYGGHRGAAARVRGGRTEQHSGGVDAYAPLLSSRDVLASARAPPPVLNSRLDHMALRVRNALGLDRGMFFEAFAAAVDISFARMLHLTANGDHEVKGAITRRQRRRLL

SEQ ID NO: 62763 - protein, 122 aa, Zea mays
  Coding DNA Sequence Number=SeqID_20984
MNKTPALKVPLQTELRFNLRGYEQPPTLEDPRGDKAPRSSPYDPRAGSHASCKLAQGRRSQTATRGVKGSHLANKKTKYWVQQKSKEITEGTSEALRYNSPNFRCSKEERLWNLPASGIRNG

SEQ ID NO: 62764 - protein, 310 aa, Zea mays
  Coding DNA Sequence Number=SeqID_20985
  Gene Ontology: Mol. function=threonine-tRNA ligase activity; Cellular component=mitochondrion; Biological process=tRNA aminoacylation for protein translation
  Homolog annotation: Hit_ID=Q8LPC9; Match level="QueryCoverage=63%, HitCoverage=37%, E-value=1e-100, Identity=85%"; Hit description =Threonyl-tRNA synthetase
  Pfam annotation: Domain name=tRNA-synt_2b; Domain location=136-309; Score=42.4; E_value=1.5e-09; Accession=PF00587.15; Description=tRNA synthetase class II core domain (G, H, P, S and T)
  Pfam annotation: Domain name=tRNA_SAD; Domain location=33-82; Score =72.2; E_value=1.6e-18; Accession=PF07973.4; Description=Threonyl and Alanyl tRNA synthetase s
  Pfam module annotation: Pfam domain module=tRNA-synt_2b::tRNA_SAD; Domain location=136-309::33-82
LHSLTRSTAAVSVPPNANHKVEIMNELPEDKSITVYRCGPLVDLCRGPHIPNTSFVKAFACLKASSSYWRGKVDRESLKRVYGISFPDSRRLTEYKHFLEEAKKRDHQILGKAHELFFFHELGPGSCFFLPRGARIYNKLMDFMRQQYRDRGYQEVLSPNIYNMQLWETSGHVANYKENMFVFEKQEFGLKPMNCPGHCLMFANRVRSYRVISSRLCPSQRKDVKPHYYQATKPELCDTIITKESSPISTLKLAHTENAPAKWDHLNIVQQRADTLESILELYAKLLEERLDELADIFRPFVRESCHPER

SEQ ID NO: 62765 - protein, 144 aa, Zea mays
  Coding DNA Sequence Number=SeqID_20986
  Gene Ontology: Cellular component=plastoglobule
  Homolog annotation: Hit_ID=Q2HUB7; Match level="QueryCoverage=53%, HitCoverage=63%, E-value=3e-23, Identity=51%"; Hit description =Putative thiol-disulphide oxidoreductase DCC
  Pfam annotation: Domain name=DUF393; Domain location=63-144; Score =6.6; E_value=3.9e-05; Accession=PF04134.3; Description=Protein of unknown function, DUF393
  Subcellular localization annotation: CTP_CleavageSite=53; ConfidenceScore=5.33e-01
MAIAGQCSSCYYTSPTLQLHRRHSHLPRQPQAARRARRPRLQVAAAADSGPIRAATDAEFFQPSDTRPIMLFDGVCNLCNGGVRFVREHDPNRSFIKSEAVLRIMEYLNLPFPQLAVFLKFVPLFLRDFAYDNVANNSAVSDRH

SEQ ID NO: 62766 - protein, 486 aa, Zea mays
  Coding DNA Sequence Number=SeqID_20987
  Gene Ontology: Mol. function=sulfotransferase activity; Cellular component=integral to membrane; Biological process=biological_process
  Homolog annotation: Hit_ID=Q67VR8; Match level="QueryCoverage=70%, HitCoverage=91%, E-value=1e-103, Identity=55%"; Hit description =Putative steroid sulfotransferase
  Pfam annotation: Domain name=Sulfotransfer_1; Domain location=76-346; Score=264.5; E_value=2.1e-76; Accession=PF00685.17; Description =Sulfotransferase domain
MSSSSVQQTAFPEQEADAEGETNPELYQHFANLVSSLPSSKGLSNNKFYRHGQGWHCSEVGIVGAMVTDACFSARPSDVIIATLPKSGTTWMKSLLYATVHRRERPVVGAAAADQHPLNSWGPHDLIKFFEYQLYTRDRVPDLDRLPDPRLFATHVPFVSLPSSVVATPGCKIVYVCRDPKDHLVSLWDFVNKYFRVKDGLEPLSVEAAAELFCAGLTPFGPYWDHVLGYWRAHRADPDKVLFFRYEEMQRDPAAHVRRLAEFVGLPFSSEEEDGGVVDAVVGLCSFERMRGMAPTKGGRTEFPIGVVPNSSFFRQGVVGDWVNHLSPEMARRIDAITADKFRASTIETLDKLCRVNRGERVTAGEVARAAGDVASAGLAIALGACRDGNGALGLRAPAVRRFGSGLQASSAACCGGGPAAALRGSGRPAVWLRPPGEQRCVLRRRAGSGAPASRLAALRAAAAGRRRWVPGWLLHGWRATAAGLG

SEQ ID NO: 62767 - protein, 434 aa, Zea mays
  Coding DNA Sequence Number=SeqID_20988
  Gene Ontology: Mol. function=hydrolase activity, acting on glycosyl bonds; Cellular component=cellulose and pectin-containing cell wall; Biological process=carbohydrate metabolic process
  Homolog annotation: Hit_ID=Q5VR14; Match level="QueryCoverage=76%, HitCoverage=73%, E-value=1e-116, Identity=61%"; Hit description =Putative polygalacturonase
  Pfam annotation: Domain name=Glyco_hydro_28; Domain location=98-429; Score=260.4; E_value=3.6e-75; Accession=PF00295.8; Description =Glycosyl hydrolases family 28
  Subcellular localization annotation: CTP_CleavageSite=36; ConfidenceScore=5.52e-01
MAIIVSSSARSTLFILSSITNHVYRRQVVSALKTTAAAARRHTAFAMLLAFVTLLLVLATRPAQCHQQSYDVVRNFHAAADGKTDDAKAFLAAWKAACSDEARPVVVVPGGRTFLLSQVTFQGPCKSPITIQDRSAEPHLDDSASQPPGLPRRRQLDSGRERRDRRAEGPSGGDCYNHKRCNARPILLAFSFCDHLRVTRIRLTNSADKHMTLFRCSQALVDGVSIAAPPDSPNTDGITVASSNHTVISNCSIRSGDDCVSILSQTRNVTVTRSTCGPGHGISVGSLGRSESAVVEQIVVTNCSFVGTMNGVRIKSWQGGKGYAKGFLFAGLNMTGVQYPIVIDQFYCPQGNCPVKPGGVAITDARFIDIQGTSSRQEAIRLLCSQSVHCHGIYLSNVNLSWVNHTAPSNATILNAHGTTEGVVVPKIQFLQPL

SEQ ID NO: 62768 - protein, 256 aa, Zea mays
  Coding DNA Sequence Number=SeqID_20989
  Homolog annotation: Hit_ID=Q6QP51; Match level="QueryCoverage=19%, HitCoverage=22%, E-value=1e-14, Identity=73%"; Hit description =Putative growth-regulating factor 1
MQAACNRTKGAHPFDFDASSMEAQAHTSWTGKGDTTKGILLREGNGPRAPLLIRGSKAGPSEGFNSRLRALGLRAHYWSEVRRSAPRKGSTAAPGHSGSAPITDQGFVGWPPKGSTAASDAERGMTLGLGLGLGPGRRRAPPRPTPGLGLGLSPLRKQGDVSKDSTAPTAVLPPGSSAPPTATISHEQGLSPPPTRTLVTPYCKRTRPGCGTNTKAAGTPRGRNADKRLISTSTSREIFASPELAFGQLLAGEHAH

SEQ ID NO: 62769 - protein, 316 aa, Zea mays
  Coding DNA Sequence Number=SeqID_20990
  Pfam annotation: Domain name=AT_hook; Domain location=202-214; Score =4.6; E_value=3.7; Accession=PF02178.9; Description=AT hook motif
  Pfam annotation: Domain name=AT_hook; Domain location=221-233; Score =4.6; E_value=3.7; Accession=PF02178.9; Description=AT hook motif
  Pfam annotation: Domain name=AT_hook; Domain location=240-252; Score =5.6; E_value=2.5; Accession=PF02178.9; Description=AT hook motif
  Pfam module annotation: Pfam domain module=AT_hook::AT_hook::AT_hook; Domain location=202-214::221-233::240-252
MSKRTGHALGTTGQVKRPRADTQPRNERKDGSCASQRSNGCLPPPFPAEDDESRATANSGEWNGADLSEALAAEPLVKHHWLEQSEGQGRAEQDYRFQSSSEGKVTVIDDDGDGELESRRLRAAACGVEKEAKSWEVKPIRSGERDYYMAGSTPTEWCAGAAPSRTRRAATGSEIRAWDGMGPRLSPASGAIGSSASPDPRARTRPRPRKTTSSASPDPRARTRPRPRKTTSSASPDPRARTRPRPRKTTTSTSPDPRARTQPWPQQTVSASPDPGLGLDLDHGRQTRPRPRRSLRLARPRARTDHVTWGPSLPYP

SEQ ID NO: 62770 - protein, 170 aa, Zea mays
  Coding DNA Sequence Number=SeqID_20991
MAALQAKLEDDEIEAFRRDVGDQVVSQVAAMEAVALERIETIAANTTTCGAVLENVNSIYESRRSWIEGYIESLQTSVESDRSDLHRLTGVLKHGSHSALDNQAPEMERPTALQNFTNGLVGHGDAHRPREYGGGASFFPIHLPNNGRSWNPSEEEAISVAGFFHGNEAL

SEQ ID NO: 62771 - protein, 71 aa, Zea mays
  Coding DNA Sequence Number=SeqID_20992
MSGSGAPAIRVFLVKYRGVVRPKPVSPISNVRDRLPHNDGRPAQRGLKDLEAASTQEMHATSYHSRSHPKP

SEQ ID NO: 62772 - protein, 249 aa, Zea mays
  Coding DNA Sequence Number=SeqID_20993
  Gene Ontology: Mol. function=protein phosphatase type 2C activity; Cellular component=protein serine/threonine phosphatase complex; Biological process=protein amino acid dephosphorylation
  Homolog annotation: Hit_ID=Q9FQY2; Match level="QueryCoverage=94%, HitCoverage=64%, E-value=1e-129, Identity=93%"; Hit description =Protein phosphatase type-2C
  Pfam annotation: Domain name=PP2C; Domain location=1-249; Score =123.4; E_value=6.5e-34; Accession=PF00481.12; Description=Protein phosphatase 2C
YPMQFLSLYAIFQHSALLDLDNDTAFFGVFDGHGGKVVAKFCAKYLHREVLRSEAYAAGDLGAAVHRAYFRMDEMMRGQRGWRELQALGDKINQFSGIIEGLIWSPKASDSNDRHDDWAFEEGPHSDFTGPNCGSTACVALIRNKQLVVANAGDSRCVISRNGQAYNLSRDHKPELEAERERIRSAGGFVLMGRVNGNLNLSRAIGDMKFKQNKFLPPDKQILTANPDINIVELCDDDEFIVLACDGIW

SEQ ID NO: 62773 - protein, 109 aa, Zea mays
  Coding DNA Sequence Number=SeqID_20994
  Homolog annotation: Hit_ID=Q9FQY2; Match level="QueryCoverage=46%, HitCoverage=13%, E-value=4e-14, Identity=74%"; Hit description =Protein phosphatase type-2C
MGVYLSTPKTEKVSEDGENDKLKFGVSSMQGWRTTMEDAPYASYLDTDTPTQVMESDSDSDIQLSMILLNFPIVTWNPIGCEESDSPKINVLSMSQVTGCAYMETCRMS

SEQ ID NO: 62774 - protein, 242 aa, Zea mays
  Coding DNA Sequence Number=SeqID_20995
  Subcellular localization annotation: CTP_CleavageSite=21; ConfidenceScore=5.20e-01
MVNPVQQYSGLSTQPLETVCRVNMGGPKITPDKVESRFARNPARQSLKTPPRSSPSSGESSAREKSSFRARAPLHGMAVSISPEPISDRRTAPSPTSVKCHRNRGDVHIKCDDSSRSQTGSDGTTVPSTFTNYDDARPRITNIVPPLRSLFPNNSGWDMHVSEPSLTLGREFRLSRRWPQPQEKTLPRLSSTSVNRTGNNSPQTQHEATPTTVLTPRCTAACPAGSTKASGGTSVRPSLASA

SEQ ID NO: 62775 - protein, 148 aa, Zea mays
  Coding DNA Sequence Number=SeqID_20996
  Gene Ontology: Mol. function=oligopeptide transporter activity; Cellular component=integral to membrane; Biological process =oligopeptide transport
  Homolog annotation: Hit_ID=Q8S2I4; Match level="QueryCoverage=85%, HitCoverage=15%, E-value=4e-44, Identity=70%"; Hit description=Isp4 protein-like
MGEIGMDQLGLAEAAAAVKEEGILDDDEETSPIEQVRLTVPTTDDSSLPVWMFRMWSIGLLSCALMSFLNQFFSYRTEPLVVTQFTVQRAANFLEPLTPVGHFMARVLPHTRFRAPALLGSRAWSLNPGPFNIKEHMLIYIFANADFT

SEQ ID NO: 62776 - protein, 49 aa, Zea mays
  Coding DNA Sequence Number=SeqID_20997
MAPTRGARGRVRLSVMNALEILRETVRVLRGDPHAFTSILFCCSARRPG

SEQ ID NO: 62777 - protein, 38 aa, Zea mays
  Coding DNA Sequence Number=SeqID_20998
MAGIAGIAHRRRTPPRIRGRANRRKSSGGAYRFPVVPM

SEQ ID NO: 62778 - protein, 547 aa, Zea mays
  Coding DNA Sequence Number=SeqID_20999
  Gene Ontology: Mol. function=transmembrane receptor activity; Cellular component=integral to membrane; Biological process=transport
  Homolog annotation: Hit_ID=Q1SI21; Match level="QueryCoverage=99%, HitCoverage=100%, E-value=1e-157, Identity=66%"; Hit description =Nonaspanin
  Pfam annotation: Domain name=EMP70; Domain location=54-505; Score =803.7; E_value=1.1e-238; Accession=PF02990.7; Description =Endomembrane protein 70
MATTAHPALPLLIVLACAGAASGFYLPGVAPADFRKNDLLAVKVNQLSSIKTQLPYSYYSLPFCRPDTIVNSAENLGQVLRGDRIENSPYVFEMMEPKLCQIACKVVLTEQGAKDIMEKIHDEYRVNMILDNLPMVVPIERLDRDAPPFYQQGVHVGVKGHYAGESSIQWSSRWDTYLRTPDDHWFSIVNSLTTVLFLSVMVAMIMLRTLYRDISKYNQLEDQEEAQEESGWKLLHGDVFRPPANADLLCVYVGTGVQFFGMLLVTLLIAILGLLSPSNRGGFMTAMILLWVFMGLLAGYSIARLHKMFGGLEWEKVAIKTVLVFPGVVFVIFFALNRLLWGVKSSGAVPFTTMLALVFLWLGISMPLIFVGSYLGFRKPAIQGPVRTNKIPRLIPQQPWYMNPAVSVLVGGILPFGAVFMELFFILTTIWMHQFYYIFGFLFLVFVILIVTCAEITIVLCYFQLCSEDYQWWWRSYLTPGSSALYLFLYAAFYFFTKLQITKAVSGVLYFGYMLIAAYAFFVLTGTIGFYACFWFTRLIYSSVKID

SEQ ID NO: 62779 - protein, 76 aa, Zea mays
  Coding DNA Sequence Number=SeqID_21000
VFRDGISSIDELWLVPFGNGRVSADRTVTCQVSSMPDTVSFSLFLELGMSVCAFLKKSNCKFERFGLLYWKLKQTD

SEQ ID NO: 62780 - protein, 137 aa, Zea mays
  Coding DNA Sequence Number=SeqID_21001
MAGGVRADMWRSRRTWGSRLAGVRSGWQAVRAGGRVVAAGFVERALRLAGGRAGGIQHRQGSSSSIARPRTPRRHDVPVVADLHTIVPLQGGRGGKQTTPAASTGGVDVQMALALALSNSGKRLRVLRRAVQDAGVR

SEQ ID NO: 62781 - protein, 154 aa, Zea mays
  Coding DNA Sequence Number=SeqID_21002
  Gene Ontology: Mol. function=GDP-L-fucose synthase activity; Biological process=cellular metabolic process
  Homolog annotation: Hit_ID=Q67WR2; Match level="QueryCoverage=93%, HitCoverage=52%, E-value=1e-44, Identity=57%"; Hit description =Probable GDP-L-fucose synthase 1
MDTTICFPRRHLEGVGGLGLVEVTDERGQDVGVLRVEVVVRAIEVGGHGGDGIEAMLDVVGLAHLDADDLGTAYHPLRKLGVDARGAEEEELVNGALVQRSVQGDEVSGQGGVGVDAAELGDHLHHVAQALRSEEGLQVGRPGQVKLRTGVDHD

SEQ ID NO: 62782 - protein, 522 aa, Zea mays
  Coding DNA Sequence Number=SeqID_21003
MKIVGKYVPKTETLRSWDMRGSNVRLNRVFELNHLSYGGYPKGDYADIASRRGKQARPLVDEGLSRDKALGAAVRKRKLGTAAEDLGLRASDHFVGDLLETRNVGAVVSVVMEKGRQDAQRKKRRAHVRLADLRREVKVAWPSAKPTALDAGMPPPAVPASGRRPPSPSRIAETTLVGPEGVSMELSVDDYLVGGVSMFDAQTGLPLAESGQLAVVPAASSTGPVVTATGTKGDTGTSAEPWARFCASDEIASTAAATGVAASVAQQLKYATAFTERIALGVLTLEFSTERQRLEGRIERLRTQHTEAVRDKSATENKSRNLLDKLSAAEKEKEDLSRRLAEEKEGTEKARTEAQAARVEADIARVEAGLALKRAADAESEMKSLCSYTEKTEASPPRRMWVPHSRGTVQERADRALAQVPTSGSAQANPDDVDTNVLTTANATPFNGNVFEGSELGSWSSDGDEFGIPFSWVEESFEDLDYFVALDLVASECPLRPSTHKALAASAEARAEDPQRRRVVSK

SEQ ID NO: 62783 - protein, 188 aa, Zea mays
  Coding DNA Sequence Number=SeqID_21004
  Homolog annotation: Hit_ID=Q2RBM1; Match level="QueryCoverage=49%, HitCoverage=51%, E-value=7e-36, Identity=80%"; Hit description =Expressed protein
MAKWASAARATTTTTIDRLDALNSCLAMRYEALLLRDAKYCNDLHLQVSCQEWLTFATDCLDNGFYTIASKAFANALVHIHPSHLGHLDSANSIEEKDKIIEITGLQNLAKSLSAQHCGRETEFTLTFQIKSTKYMERRASSVHEKYNLQSGKPKLTRSSMFRLGIKTRNIKKLLRSQERNLGDLTQS

SEQ ID NO: 62784 - protein, 127 aa, Zea mays
  Coding DNA Sequence Number=SeqID_21005
  Subcellular localization annotation: CTP_CleavageSite=53; ConfidenceScore=5.44e-01
MAQTTGDVGGISSSLPSSSRFSRFCFAGGCGRLGTAFWEFGQGGTTDRRETSMDSASWAHRTWEKEITGPWTHTSVTRKQECVVMKGLSKEPHSQWCAHGETSGVQGPPSSARISHEQGWSARPTGM

SEQ ID NO: 62785 - protein, 97 aa, Zea mays
  Coding DNA Sequence Number=SeqID_21006
MPLHAIDEAWELLTLEDGVETVLEQTRQFMRALSLSPVAWEGTNTGTAMRLSCWSSAILANWGTHHKAYSPAIVPHTVLDDEAASLGIANNHTIRNH

SEQ ID NO: 62786 - protein, 122 aa, Zea mays
  Coding DNA Sequence Number=SeqID_21007
MTIVVVLCYDTAPVQTFPEEAATAESPGKFEDATSENASNSELPTGSGASFADFVDNAKKKVMDVVHNITDFFRDLFNDSAEAQTGAGPSAEKGFSATEMAVGGSFMALTIAVILVVLFKRA

SEQ ID NO: 62787 - protein, 196 aa, Zea mays
  Coding DNA Sequence Number=SeqID_21008
  Gene Ontology: Mol. function=histone deacetylase activity; Cellular component=nucleus; Biological process=histone deacetylation
  Homolog annotation: Hit_ID=Q9ZTP8; Match level="QueryCoverage=85%, HitCoverage=39%, E-value=5e-35, Identity=50%"; Hit description =Histone deacetylase
  Pfam annotation: Domain name=Hist_deacetyl; Domain location=10-194; Score=-139.9; E_value=0.043; Accession=PF00850.10; Description =Histone deacetylase family
MAASSEGMLLPSLVNEEDVHRRSARSPDEALSHPHGALAGSPLCPPPPPRSSPTPYPASKVDIRCFHFDDYVTFLASTTGKPGVLNSCAIKRFNIGEDCPMFDSFFISLLPVLYWGSIDAAINLNHVDANITVNWAASLHRAKKSEASRFCYVNNIVLAVLELLMFHRARMLIYLLLLTFNIWTLVFIFGGASLLY

SEQ ID NO: 62788 - protein, 176 aa, Zea mays
  Coding DNA Sequence Number=SeqID_21009
MCITPFLQARVRLLLRSSALFLLLQPRMPPHTTPMVHHRASNPLLATAHLAVQTHFLISWFILLPFSFLQISPSLIVSGKKGVPGGRIETVDLVEHPTREGEALHPFDVAARGRWTQWEVVVSNDRGSRRGEAATGGGARVEPTSHVVPRARGFLRELAVIAEAVSFIVTVARGGY

SEQ ID NO: 62789 - protein, 94 aa, Zea mays
  Coding DNA Sequence Number=SeqID_21010
MDVVVITLSRELSKLQPACLTTSWSSAPRLLPRVPIPSPVVPSMHASWPHRATPHAGKSDVQGICKEVFEDLSYNNIGLLDINSLLVATLMFYK

SEQ ID NO: 62790 - protein, 49 aa, Zea mays
  Coding DNA Sequence Number=SeqID_21011
MAGGRELAGAKEGRLASEGFADWIKRQRGEKSGIELGIKVNTLGLWLKG

SEQ ID NO: 62791 - protein, 114 aa, Zea mays
  Coding DNA Sequence Number=SeqID_21012
MEEVWLGSANQHQPVVHRTLSGAQAGPAVNWLLSGFGGGDVDINHRTVWWCTEMSGESSAPSPKTPATNSSLLGNGRGAAAKNHQTVWWCTGLSGEPKAPTANGRLRDQWATRG

SEQ ID NO: 62792 - protein, 77 aa, Zea mays
  Coding DNA Sequence Number=SeqID_21013
MAFTEARLPVMDGLPITVHCDVVMLLGRWRRYEDGELRRGHRGTNRSTDEDRGAGSSAARYTASTDLCQALYHQNSH

SEQ ID NO: 62793 - protein, 84 aa, Zea mays
  Coding DNA Sequence Number=SeqID_21014
MEEVWLGSANQHQPVAHRTVSGAQAGPAANWLLLGFGGGDVAINHRMVRWCTGLSGESSAPVPKTSAMNSSLSGIGGGATAKNH

SEQ ID NO: 62794 - protein, 443 aa, Zea mays
  Coding DNA Sequence Number=SeqID_21015
  Gene Ontology: Mol. function=structural molecule activity
  Homolog annotation: Hit_ID=Q6H7R1; Match level="QueryCoverage=37%, HitCoverage=64%, E-value=1e-52, Identity=62%"; Hit description =Putative vesicle-associated membrane protein-associated protein
  Pfam annotation: Domain name=Motile_Sperm; Domain location=8-115; Score=138.8; E_value=1.4e-38; Accession=PF00635.16; Description=MSP (Major sperm protein) domain
MSTESGELLGIDPVELRFPFELNKQISCTLQLTNKTDKQVAFKVKTTSPKKYCVRPNNGMVAPRSKADVVVTMQAQRDVPPDMQCKDKFLVQSATVAKEVVPKEVTGDMFTKDSGNVVEEVKLKVVYVAPSSSQSERFEDGNLGSLSYQEETKEPKESEKIITEILSSSLNPTVPTFFVLAAPSRTVAANIWYQRPPIAEPGGCSSLHSPHKDGGATDPIIATALEDQARALKMKAKTLDSTQKLLQRICERFDEQNVRWRELEHTVATSASDLSALQAKVDAADLERIVEDHVGAHVEAFERTAWHRLDDLAATTTTRVAALENVHQVFDAWRPRIDSSMDAMRAELAKVSRFLERGARPDYDVPTGVLGPHESAAAGPSAPATFADSQFSNRIDSATREGGLGFVYTQNHPPANGHLPKLNLPVFDGDSPKLWQSTCEDYF

SEQ ID NO: 62795 - protein, 77 aa, Zea mays
  Coding DNA Sequence Number=SeqID_21016
MARLADDGRLLRLSSGGQRERAATAEDLCVTVFLLLLCASRDRALLRCELRDAGLQGSMGEGVARRRISLKLRVRPG

SEQ ID NO: 62796 - protein, 616 aa, Zea mays
  Coding DNA Sequence Number=SeqID_21017
  Gene Ontology: Mol. function=RNA-directed DNA polymerase activity; Cellular component=intracellular; Biological process=RNA-dependent DNA replication
  Homolog annotation: Hit_ID=UPI00004C1733; Match level="QueryCoverage =99%, HitCoverage=48%, E-value=0.0, Identity=86%"; Hit description =UPI00004C1733 related cluster
  Pfam annotation: Domain name=RnaseH; Domain location=312-439; Score =1.2; E_value=4.4e-05; Accession=PF00075.14; Description=RNase H
  Pfam annotation: Domain name=rve; Domain location=487-615; Score =69.5; E_value=1.1e-17; Accession=PF00665.16; Description=Integrase core domain
  Pfam module annotation: Pfam domain module=RnaseH::rve; Domain location=312-439::487-615
MPFGLRNAGATYQRCMNHVFGEHIGRTVEAYVDDIIVKTRKASDLLSDLEVTFRCLKAKGVKLNPEKCVFGVPRGMLLGFIVSERGIKANPEKIAASVSMGPIKDLKGVQRVMGCLAALSRFISRLGERGLPLYRLLRKAECFTWTPEAEEALRNLKALLTNVPILVPPAAGEALLIYVAATTQVVSAAIVVERQEEGHALPVQRPVYFISEVLSETKIRYPQVQKLLYAVILTWRKLRHYFESHPVTVVSSFPLGEIIQCREASGRIAKWAVEIMGEAISFAPRKAIKSQVLADFVAEWVDTQLPIAPIQPELWTMFFDGSLMKTGAGAGLLFISPLGKHLCYVLRLHFPASNNVAEYEALVNGLWIAIELGVRRLDAHGDSQLVINQVMKNSHCRDPKMEAYCDEVRRLEDKFYGLELNHIARRYNETADELAKIASGRTTVPPDVFSRDLHQPSVKIDDTPEPEAPSAHPEVPSARPEALQTIPIIWSFAVWGLDLVGPLHKAPGGYTHLLVAIDKFSKWIEVRPLNSIRSEQAVAFFTNIIHRFGVPNSIITDNGTQFTGRKFLDFCENHHIQVDWAAVAHPMTNGQVERANGMILQGLKPQIYNDLNKFGK

SEQ ID NO: 62797 - protein, 218 aa, Zea mays
  Coding DNA Sequence Number=SeqID_21018
MPWHEEAAFPAVDVTAVDAREGRSNPRRWSQSRGAPRQMRCQQAGCLVPSPPKQRHYHPATQHGQRRLARWRLGGNYREAELFVRARERRADADSERMLYDLATGYAIKKNLIQFSKNIFEFGKIIYITTTNLNTTSPVQPLDGGGQFVDRVYYVEVRDIATLRDMTAVTTTVSHCILDIPCVIVPKAATVMSLRISPLTSMLLNSKDEETGQRQKDE

SEQ ID NO: 62798 - protein, 128 aa, Zea mays
  Coding DNA Sequence Number=SeqID_21019
EAKILFVGLDNAGKTTLLHMLKDEHSGAFLSLLLPPQAIDDFFSCRPGDGACDHVGLLPEVELEVVKLLLVVDERRQCERLLLVVFVRGFQDECPSGQGVTLHKIVTAIEGGVSVAKAQRLWKAVVGP

SEQ ID NO: 62799 - protein, 199 aa, Zea mays
  Coding DNA Sequence Number=SeqID_21020
  Homolog annotation: Hit_ID=Q7XDP6; Match level="QueryCoverage=36%, HitCoverage=20%, E-value=5e-20, Identity=65%"; Hit description =Splicing factor 3B subunit 4, putative, expressed
MEESHTVEEFLQPPLATLASTGRIMWSWTRSTSLAEVDSLQGDSTRARKVLKWKPKIMRDSKTGNSIGFGFVSYESFKLSDQVIKAMNNQHICNHPIIVSYAYKKDTKGDTMAHQQVSNLIRFMRQEEVVKAMNLFEGAQEHNRVSKRSLKNWVEIMGAYHHWIFHLWSKTQQFTKAYCIVFPSLTHLWNCLPVMQEIK

SEQ ID NO: 62800 - protein, 106 aa, Zea mays
  Coding DNA Sequence Number=SeqID_21021
MATSPRYDPQERQPTARDMVSIYVSISIERLPNSPHLGMAGYVGIYSALPKIEPLEKADFSALHLTGLVLPCQVFYKSLRVFFEVLHSESLGLIHFASHELQNINT

SEQ ID NO: 62801 - protein, 194 aa, Zea mays
  Coding DNA Sequence Number=SeqID_21022
  Gene Ontology: Mol. function=nucleotide binding; Cellular component =endoplasmic reticulum; Biological process=small GTPase mediated signal transduction
  Homolog annotation: Hit_ID=P52884; Match level="QueryCoverage=98%, HitCoverage=99%, E-value=5e-59, Identity=62%"; Hit description=GTP -binding protein SAR2
  Pfam annotation: Domain name=Arf; Domain location=6-193; Score=313.2; E_value=4.6e-91; Accession=PF00025.11; Description=ADP-ribosylation factor family
  Pfam annotation: Domain name=MMR_HSR1; Domain location=22-133; Score =26.1; E_value=4e-06; Accession=PF01926.13; Description=GTPase of unknown function
  Pfam annotation: Domain name=Miro; Domain location=23-133; Score =14.3; E_value=0.00022; Accession=PF08477.3; Description=Miro-like protein
  Pfam module annotation: Pfam domain module=Arf::MMR_HSR1::Miro; Domain location=6-193::22-133::23-133
MFLVDWLCDLFVSLRRLWQKEAKILFLGLDNAGKTTLLHMLKDERLSQHAPTQLPTSEELSIGRIKFKAFDLGGHRIARRVWKDYYAKVDAVVYMVDAADGGRFDESKTELGALLSDDALAGVPFLVLGNKIDIPQAAPEHALAYYLGLTGCTTGKGTVDLAGTGVRPVEVFMCSVVRKMGYGEGFKWMSQYIN

SEQ ID NO: 62802 - protein, 106 aa, Zea mays
  Coding DNA Sequence Number=SeqID_21023
  Gene Ontology: Mol. function=transcription factor activity; Cellular component=nucleus; Biological process=regulation of transcription, DNA-dependent
  Homolog annotation: Hit_ID=Q6J832; Match level="QueryCoverage=96%, HitCoverage=45%, E-value=3e-21, Identity=55%"; Hit description =Ethylene-responsive element binding factor
MPLPSSLELDLFHRAADAGTGTAAVRFPFGNIPITHPYYFFGQAAAAVEAGCRVLKLAPAVTVAQSDSDCSLVVDLSSSPPATVSARKPAVFDLDLNCSPLTEAGA

SEQ ID NO: 62803 - protein, 173 aa, Zea mays
  Coding DNA Sequence Number=SeqID_21024
  Gene Ontology: Mol. function=transferase activity, transferring glycosyl groups; Cellular component=ribosome; Biological process =queuosine biosynthetic process
  Homolog annotation: Hit_ID=Q6K4A3; Match level="QueryCoverage=96%, HitCoverage=39%, E-value=5e-78, Identity=85%"; Hit description =Putative queuine tRNA-ribosyltransferase
  Pfam annotation: Domain name=TGT; Domain location=1-173; Score=119.2; E_value=1.1e-32; Accession=PF01702.8; Description=Queuine tRNA -ribosyltransferase
MALDDVVKTTITGPRIKEAMYRTIRWIDRCIAAHKKPDVQNLFGIVQGGLDPVLRRVHLAYYMYYIYPFPRYAIGGLAGGEDKDSFWRVVAQCTAGLPENKPRYVMGVGYPLDIVVCSALGADMYDCVYPTRTARFGTALVPEGVLKLKHNSMATDERPIDHTCSCMIRARDS

SEQ ID NO: 62804 - protein, 194 aa, Zea mays
  Coding DNA Sequence Number=SeqID_21025
MSEATHNEDDTGRGSIAGSLGDAAAPAVCGGVRGLTRPRPGLHSVVRDGGPRPGARWLLCGGRARIRRWLEAGHARERPSRQPWAAPANVPASGRVGRRCRGTALGRRASTVAQGTTGFEDGDRCCSSIDLSVGIGRREDERAAYLVTAAREIRIQGRSSYLCRGKESYINRGGVWRSEEEVARTSVARRDEAR

SEQ ID NO: 62805 - protein, 75 aa, Zea mays
  Coding DNA Sequence Number=SeqID_21026
  Subcellular localization annotation: CTP_CleavageSite=39; ConfidenceScore=5.09e-01
MLLSAPDSPSQRMGFLTGVTPIRLKLSLRRSLAPGLGLMADNEQPVVPECVVEDLPEQQPGEGKCPLTYYVLFTL

SEQ ID NO: 62806 - protein, 245 aa, Zea mays
  Coding DNA Sequence Number=SeqID_21027
  Gene Ontology: Mol. function=small conjugating protein ligase activity; Cellular component=membrane; Biological process=protein modification process
  Homolog annotation: Hit_ID=Q5NAY5; Match level="QueryCoverage=99%, HitCoverage=52%, E-value=3e-89, Identity=63%"; Hit description =Ubiquitin-conjugating enzyme-like
  Pfam annotation: Domain name=UQ_con; Domain location=1-120; Score =66.0; E_value=1.2e-16; Accession=PF00179.16; Description=Ubiquitin -conjugating enzyme
MDLLRAAIIGPKGTPYHDGLFFFDVHIPSAYPSGPPLVYYHSGGLRINPNLYENGRVCLSLLGTWDGRGCEKWNPAQSTMLQVLVSIQALILNEKPYYNEPGYESFATTPNGQLLALKYNDDTFLYSCRTMLYSLRRPPEHFADLVAGHFRVHGHTILAACKHYMAGNDIGSVVPEEEEESASRSAPKAKPGVIRTIPLNRRYAGSFDTSLKVLYEDLLMEFNVKGADTRKFMIEKLKKDQPAGT

SEQ ID NO: 62807 - protein, 60 aa, Zea mays
  Coding DNA Sequence Number=SeqID_21028
MVSSDLEQNRSVGSTKNTKVDTEPKLCVRDLRHDSRKGNRLKREKAIWTSVDHYRVINKC

SEQ ID NO: 62808 - protein, 318 aa, Zea mays
  Coding DNA Sequence Number=SeqID_21029
  Gene Ontology: Mol. function=nucleic acid binding; Cellular component= intracellular; Biological process=DNA integration
  Homolog annotation: Hit_ID=Q8H6I0; Match level="QueryCoverage=96%, HitCoverage=18%, E-value=1e-116, Identity=71%"; Hit description =Putative gag-pol polyprotein
MSARSLVPSVGDEDYDEDEVAQIEHFNSQATIILLASLSREEYNKLQGLKSAKEVWDVLKTAHEGDELTKITKRETIEGELGRFRLRKGEEPQDMYNRLKTLVNQVRNLGSKKWDDHEMVKVILRSLIFLNPTQVQLICGNPRYTLMTPEEVIGNFVSFEYMIKGSKKINELDDPSTSEAQPVAFKATEEKKEESTPSRQPNHALKARQRGKWRSSSRAFCQILKQRRGKDYKPRSKKVLLQVCDRGDDKKGRRKEKKKYYKKKGGDAHVCREWDSDESSSDSSSDEDAANIAINKGLLFPNVGHKCLMAKDGKKKKK

SEQ ID NO: 62809 - protein, 95 aa, Zea mays
  Coding DNA Sequence Number=SeqID_21030
MAALSPLTEARGRQQGLDSPDSCPSARLQRSSDGHDTTRTGCQDLSGCHDGISETTDQAKDRGKKSFEVPSAWEKVKKAEEPKAKGEEEGLKSQG

SEQ ID NO: 62810 - protein, 197 aa, Zea mays
  Coding DNA Sequence Number=SeqID_21031
  Gene Ontology: Mol. function=transcription regulator activity; Cellular component=nucleus; Biological process=regulation of transcription
  Homolog annotation: Hit_ID=Q8S3D1; Match level="QueryCoverage=59%, HitCoverage=31%, E-value=7e-30, Identity=58%"; Hit description =Putative bHLH transcription factor
MPLYSLYGGGSHSHSHLAAAGDHEMPPAPAAAAAGANKSQLSQMLLASSPRSCVTTSLGSNMLDFSNNGVPPAPDQLKSHHHHQSDNSSECNSTVTGSAIKKPRVQASSSAQSTLKVRKERLGDRITALHQIVSPFGKTDTASVLQETIGYIRFLLGQIEALSYPYMGHGNGTSIQNGPTTGERNHAGLLPDQYPGQ

SEQ ID NO: 62811 - protein, 137 aa, Zea mays
  Coding DNA Sequence Number=SeqID_21032
MPHPFPPPIALGCLAGDLAASSTCHRAVDRLPQAPSGRTEPTPEIPYPRPCLATTPPSQNQAPGGEPPRDFTSGRTSAGSLPPSPFHAISPPSSGMWARATALSPRHPHWLSKWAACPRGRALARARLGQKLLPRPS

SEQ ID NO: 62812 - protein, 70 aa, Zea mays
  Coding DNA Sequence Number=SeqID_21033
MANDDHVEGSRPALRLTDALGATGAGAYGFRIVHTFSILLPPHPVSQGRSQDPKTEGAGLAFKQPNQDTI

SEQ ID NO: 62813 - protein, 214 aa, Zea mays
  Coding DNA Sequence Number=SeqID_21034
  Gene Ontology: Mol. function=phosphoribosylformylglycinamidine cyclo -ligase activity; Cellular component=cytoplasm; Biological process =purine nucleotide biosynthetic process
  Homolog annotation: Hit_ID=Q6T7F2; Match level="QueryCoverage=59%, HitCoverage=31%, E-value=5e-58, Identity=86%"; Hit description=5' -aminoimidazole ribonucleotide synthetase
  Pfam annotation: Domain name=AIRS; Domain location=60-204; Score =134.0; E_value=4e-37; Accession=PF00586.14; Description=AIR synthase related protein, N-terminal domain
  Subcellular localization annotation: CTP_CleavageSite=50; ConfidenceScore=5.34e-01
MATDRLLHLLRAPTGSPAAATTRAAGWGRPRTQRVDVWQVAAGIRRASVSCSSTSSGGQGGLTYKDAGVDIDAGAELVRRIARMAPGIGGFGGLFPYNDDYLVASTDGVGTKLKLAFETGIHDTIGIDLVAMSVNDIVTLGAKPLFFLDYYATSKLDVDLAEKVIKGIRDGCEQSDCALLGGEAGNIDDAEMRRTFNMGIGMVLVFCTTTPARK

SEQ ID NO: 62814 - protein, 433 aa, Zea mays
  Coding DNA Sequence Number=SeqID_21035
  Gene Ontology: Mol. function=RNA-directed DNA polymerase activity; Cellular component=intracellular; Biological process=RNA-dependent DNA replication
  Homolog annotation: Hit_ID=UPI00004C1733; Match level="QueryCoverage =99%, HitCoverage=31%, E-value=0.0, Identity=94%"; Hit description =UPI00004C1733 related cluster
  Pfam annotation: Domain name=RVT_1; Domain location=56-225; Score =122.4; E_value=1.3e-33; Accession=PF00078.17; Description=Reverse transcriptase (RNA-dependent
MPGIPRDVAEHSLDIRAGARPVKQPLCRFDEEKRRAIGEEIHKLMAAGFIKEVFHPEWLANPVLVRKKGGKWRMYVDYIGLNKACTKVPYPLPRIDQIVDSTAGCETLSLLDAYSGYHQIRMKESDQLATSFIAPFGMYCYVTMLFGLRNAGATYQRCMNHVFGQHIGRTVEAYVDDIVVKTRKASDLLSDLEVTFRCLKAKGVKLNPEKCVFGVPRGMLLGFIVSERGIEANPEKIAAITSMGPIKDLKGVQRVMGCLAALSRFISRLGERGLPLYRLLRKAESFTWTPKAEEALGNLKALLTNAPILVPLAAREALLIYVAATTQVVSAAIVVERQEEGHALPVQRPVCFVSEVLSETKIRYPQVQKLLYAVILTRRKLRHYFESHPITMVSSFPLGEIIQCREASGRIAKWAVEIMGEAISFAPRKAIKS

SEQ ID NO: 62815 - protein, 67 aa, Zea mays
  Coding DNA Sequence Number=SeqID_21036
MTVLVKRLKWTCAVVSGVSSSLGEAADEEGSTQGGEQRMRRRGGDGSDEATRGARVGLTPPNGCRGP

SEQ ID NO: 62816 - protein, 456 aa, Zea mays
  Coding DNA Sequence Number=SeqID_21037
  Gene Ontology: Mol. function=protein binding; Biological process =ubiquitin cycle
  Homolog annotation: Hit_ID=Q6EP91; Match level="QueryCoverage=99%, HitCoverage=99%, E-value=3e-55, Identity=64%"; Hit description=F-box protein-like
MGTGSSILGADGEWGETSLGDMPESCVDGGTPLPRPRRRSARWPVSTAPSAAPPRRTASGPPKLPANYRYLAALAAAADDEGCGDGDASGKRLTKKEIYARLCRSTFFDAGRKEFWILKNKGALCMSISSKAMTITGIDDRRYWSHLATEESRQQGRTTSSGDDVIELGGDEAVNPRKDVEIHVNPVGNNRECRITLDVVGESILAESQEETAPLGEGCDTGCISIDDVSTAGSSIGDVVVGGLLEAAALCIGQGALVSSDVILEPTTFGSRGGSCVTLRLEGGGCFGIAASCSIGLFPLKATSLGSTELSGIGLGCGTSGVHGGAMDGELEFCFPAGAYSLFFHLHLGRPYRRMGRWLCGTEHVHGWDVTPTRFQLTTSDEQQATSEYYLHLHEQGGWKLYHVGDFVISNSDEPMKLKFSMMQIDCTHMKGGLCVDSVFIYPKGYKPEKANIVCT

SEQ ID NO: 62817 - protein, 105 aa, Zea mays
  Coding DNA Sequence Number=SeqID_21038
MGHRPLTSNLPLDGSPIKIALIHDSGLVLAHGGGPVLTRVAAEVPVRWSGPGPCSGDDRASRWLEKEGLSEPSMEEEEVPPSLVGAVARDMKVDVVSQTKGDHRS

SEQ ID NO: 62818 - protein, 234 aa, Zea mays
  Coding DNA Sequence Number=SeqID_21039
  Gene Ontology: Mol. function=RNA-directed DNA polymerase activity; Cellular component=integral to membrane; Biological process=RNA -dependent DNA replication
  Homolog annotation: Hit_ID=Q7FS87; Match level="QueryCoverage=94%, HitCoverage=20%, E-value=5e-55, Identity=49%"; Hit description =Putative glycerol 3-phosphate permease
MDPLDLIDSRTGTSQVLLNAKPVGSFWWKDILKIQDVFKEIAQVEIGNGKSTLLWRDRWDGLRKSIKFPELWSFASIKDININQARLASPNEMFHTPLSVEAFEQLLSLQDILANLQLHDHNDKWCCNASSNLFSSQKVYSHLIGNHQSHPLFSWLWRSKCQPKHKIEEMVIHLFFRCKFCSEMLVTSGHPPAENNRSSTYLNEDSKEIARLMEVGKYHHYDVVHLEEQKQLDF

SEQ ID NO: 62819 - protein, 214 aa, Zea mays
  Coding DNA Sequence Number=SeqID_21040
  Subcellular localization annotation: CTP_CleavageSite=38; ConfidenceScore=5.03e-01
MFAECLTLGTTVFAECLAMPSARRSLNNRFTERRTLPRAALGKVGFAECPIKSTRQSRRHSAKGRIPVVSTSCASIHYHHGSRVLLNLVSFGPGDALALLASLVDEQVALAPTDPSDSASMADVASSPTLGGPVDAPALPDALVTELVAPVSALLLVDDQASSKHLLGDCSALEICPLRLSASVSPKFFPLNVTMQPRQQESIPYIQSSRNCSP

SEQ ID NO: 62820 - protein, 597 aa, Zea mays
  Coding DNA Sequence Number=SeqID_21041
  Gene Ontology: Mol. function=protein serine/threonine kinase activity; Cellular component=membrane; Biological process=protein amino acid phosphorylation
  Homolog annotation: Hit_ID=Q6ZK06; Match level="QueryCoverage=53%, HitCoverage=42%, E-value=3e-31, Identity=34%"; Hit description =Putative wall-associated serine/threonine kinase
MQTVEWRPGADSVNFSPAGCPTGDWRVPTTVAVLAGDEDDITLPGCRSRCGNMSIPYPFGVEAGCYLPGFNVTCRRRNGDGPAAAADELLFLGDGTVQVLEISIPNATVLINSSAGYFDGDKYVSLSSPGTWSGALGSGDGDGVGVYSLAWGRNKLFAMGYNVQVRLEADNETSSVCVSLFFEGNFAAPTDDCAGFLCCQSPIWDQRTSYRFKALSLNGSAASLESDTYAWILDSELRFQYGAPQKDALTLPALLDWRINHTTCHANASSPACRSRHSFCHDGSLEVCRRNDSLCHNSTAGFGRAHICRWPPHTVPSIQMSTNATIQTPTLVMASAPTLTEDTSANAFLASRAMLLYQLDAKALHSPALGLDVEHLEGMSAAIAIECAGEHHLLPGTDVDDAPVLRPDRCVPNLVPTIVSAHPLYDGVALDSPYTAVDDDVCGACTLELAPRPQCSKKHQACTPLVDGAQVKESTLARMHPEIRCTNRSHLAVMHALGVSLLLSCPLGSVAAAAATLSSCATHGAAAACVPSGSDAAAAPTSLPRAPQGDNHRALASRIRRHERVPQIHRRERVPQIRHRALAPRIRRRARLSRVGA

SEQ ID NO: 62821 - protein, 370 aa, Zea mays
  Coding DNA Sequence Number=SeqID_21042
  Gene Ontology: Mol. function=protein serine/threonine kinase activity; Cellular component=membrane; Biological process=protein amino acid phosphorylation
  Homolog annotation: Hit_ID=Q6ZK06; Match level="QueryCoverage=91%, HitCoverage=45%, E-value=1e-123, Identity=66%"; Hit description =Putative wall-associated serine/threonine kinase
  Pfam annotation: Domain name=Pkinase; Domain location=49-317; Score =133.7; E_value=5.1e-37; Accession=PF00069.15; Description=Protein kinase domain
  Pfam annotation: Domain name=Pkinase_Tyr; Domain location=49-314; Score=116.1; E_value=9.8e-32; Accession=PF07714.7; Description =Protein tyrosine kinase
  Pfam module annotation: Pfam domain module=Pkinase::Pkinase_Tyr; Domain location=49-317::49-314
MATTVWEMGLAIGGGTGFLLLALGAPIISHISERMIITIGELEKATNNFHPSHEVGGGGHGVVYKGLLDLQVVAIKKSKIIVKREIDDFINEVAILSQINHRNIVKLLGCCLEAEVPLLVYEFISNGTLSHHLHVEGTISLSWDDRLRIALEISKALAYLHSSATTPILHRDIKSSNILLDDNLTAKVSDFGASKYIPIDRTGVTTDVQGTFGYLDPMYYYTSRLTDKSDVFSFGVLLIELLTRKKPYAYRSDDGDGLVSEFSSLLDQGTLVDIIDPQIMEEDKQVDEVAKLAAKCTKLSGEDRPTMREVEMALQNLRATEKHAHNNTTSTNKYEKGKTSQYMPFGGLAIETSRQYTMEEEMLLSARYPR

SEQ ID NO: 62822 - protein, 80 aa, Zea mays
  Coding DNA Sequence Number=SeqID_21043
MEGGSWRDGPMAVFALAFNAEKLVKTTDQAKDGGKKSFEIPSAREKVKETRNPKPGVKKKTCKVKVDRVKKSYGASRITT

SEQ ID NO: 62823 - protein, 109 aa, Zea mays
  Coding DNA Sequence Number=SeqID_21044
MAVLEDEWEKLPPWKKRVTGNGSEDDAPARGLRATDVMGARGEPSLPVTGRLLLRPKLRLGAVVTPPEAEPGAKAQGRARRRSSSEAGVEAEAQGRARRRPSPEAEAEA

SEQ ID NO: 62824 - protein, 681 aa, Zea mays
  Coding DNA Sequence Number=SeqID_21045
  Gene Ontology: Mol. function=cellulose synthase (UDP-forming) activity; Cellular component=membrane; Biological process=cellulose biosynthetic process
  Homolog annotation: Hit_ID=Q7E0V9; Match level="QueryCoverage=95%, HitCoverage=74%, E-value=0.0, Identity=64%"; Hit description =Cellulose synthase-like F7
  Pfam annotation: Domain name=Cellulose_synt; Domain location=34-681; Score=609.5; E_value=2.9e-180; Accession=PF03552.5; Description =Cellulose synthase
  Subcellular localization annotation: CTP_CleavageSite=37; ConfidenceScore=5.11e-01
MSTTYTTKSNGTTSDDNKWPKDHVKKSASVDRPPLVRTTKLSTITIKLYRLMIILRMGIFVLFFKWRIGTALVMISSTGTDDKSTVLGMWMVSMAGELWFALMWVLDQVPKMQPVRRVVYLAALDEPMLPAMDVFVTTVDTEKEPPLVTVNTILSILAADYPAEKLTCYVSDDGGALLTRDAVAEAARFSALWVPFCRKHAVEPRNPEAYFSPGASNGFKAWRADYKGTAWPELARDRRRVRREYEELRLRIDALQAGGRAAVDAVAADRSCWRRGAAEDHAGAVELLVDNPGPGSTPRLGVSGTVDGVSNLLDLSSVDVRVPALVYMCREKRRGRVNHGKAGALNALLRASAVLSNAPFILNLDCDHYVNNSQALRAGVCHMLDGEGGNGNDVAFVQFPQRFDGVDPADRYANHNRVFFDCTELGLDGLQGPIYVGTGCVFRRSALYGVDPPLWRPQGDDAGKGAANGIETGKLGVSTPFLRSVYAVLTNQSDQWDTVSISSPPCSFDAAAIGEATALVSCGYEDRTAWGRDIGWIYGTVTEDVATGFCMHRRGWRSSYCATAPDAFRGTAPINLTDRLYQVLRWAAGSLEIFFSRNNALLAGRRLHPLQRLAYLNTTVYPFTSIFLIAYCGLFPAIPLVTGNGATTGAFFSIIIRPPSATYIAFVAALMLTLAVVAVLE

SEQ ID NO: 62825 - protein, 60 aa, Zea mays
  Coding DNA Sequence Number=SeqID_21046
MVLEEPSCAEDRLRALDAEHFGQSTTIDLVCGHLRVPRSGELSAQISRMTLIVGCICELE

SEQ ID NO: 62826 - protein, 100 aa, Zea mays
  Coding DNA Sequence Number=SeqID_21047
  Subcellular localization annotation: CTP_CleavageSite=31; ConfidenceScore=5.10e-01
MPTHAPSSLLRGPPVPCARPLPHFTHLHPISCSAHAASRRRRPAPAFPAIQLAGDCSKPHRAPPRGETLVPVPNFPYCALCSANFAFAGARPWKSTVLAQ

SEQ ID NO: 62827 - protein, 52 aa, Zea mays
  Coding DNA Sequence Number=SeqID_21048
DDDDDPHLKRNAGTAIKETASLFSSPHCLMVKGDGKDLWRRSMPPTVAPSRC

SEQ ID NO: 62828 - protein, 154 aa, Zea mays
  Coding DNA Sequence Number=SeqID_21049
MGKRKKGGSSSHHSGDKRKREPSPPSEDFDDSEYSEEEFSSESEGSPSTDEIAMAPKRKNQNSAAAPQPPPYVWAREQRRSPAPFAQPLGPPVSGAQPTVLLPHRNNRPFGVHVVHPRSCKPLANFPPSCLLSQGHHLAPPFRALLLPLAPCRA

SEQ ID NO: 62829 - protein, 135 aa, Zea mays
  Coding DNA Sequence Number=SeqID_21050
MASGETSTSPEHGLDLNNIDKRTPDATNPSIKITDNGMAIGTTGLVSSLLYAIRDELPCAFHLIIVSTTMAPTTHPQDRLGYTSETPILALTLYLVKMRDIGVERPSLIRDKHKDRSHSDGHAAIGARAHHLSSL

SEQ ID NO: 62830 - protein, 67 aa, Zea mays
  Coding DNA Sequence Number=SeqID_21051
MAVNLNDRTGRKDINLDGHDWAVWHVNAIVCAQVYGFWKATGAATGSRTRGPREASGGWPTGPGLLK

SEQ ID NO: 62831 - protein, 117 aa, Zea mays
  Coding DNA Sequence Number=SeqID_21052
MKNCIEKMSGWCQAVELEALVIEGWRLKQPSRHGLTLRVRPTSLGFTRWPEKIPENNRYGKCQVKFGSSSFEQEVKEYVRAYRFPNGCGPVPACDMTRHQPAPNIKESVPVQGERSE

SEQ ID NO: 62832 - protein, 310 aa, Zea mays
  Coding DNA Sequence Number=SeqID_21053
  Gene Ontology: Mol. function=sugar porter activity; Cellular component=membrane; Biological process=transport
  Homolog annotation: Hit_ID=Q8GZZ6; Match level="QueryCoverage=99%, HitCoverage=81%, E-value=1e-129, Identity=81%"; Hit description =Putative phosphate/phosphoenolpyruvate translocator protein
  Pfam annotation: Domain name=DUF6; Domain location=167-302; Score =6.7; E_value=0.027; Accession=PF00892.11; Description=Integral membrane protein DUF6
  Pfam annotation: Domain name=TPT; Domain location=158-302; Score =169.1; E_value=1.1e-47; Accession=PF03151.7; Description=Triose -phosphate Transporter family
  Pfam annotation: Domain name=UAA; Domain location=3-308; Score=-87.7; E_value=4.9e-06; Accession=PF08449.2; Description=UAA transporter family
  Pfam module annotation: Pfam domain module=DUF6::TPT::UAA; Domain location=167-302::158-302::3-308
  Subcellular localization annotation: CTP_CleavageSite=59; ConfidenceScore=5.32e-01
MCHMSACALLSYAAIAWLRVVPMQLVRSRVQLAKIAALSLVFCGSVVSGNVSLRYLPVSFNQAVGATTPFFTAVFAYIMTVKRESWVTYLTLVPVVTGVIIASGVSYSAASVSCFLSRSVGVGIGSESGRSGMELTKQQVDLSSTASVSGEPSFHLFGFIMCIGATAARALKTVLQGILLSSDGEKLNSMNLLLYMAPIAVIFLLPATIFMEDNVVGVTIELAKKDFTIVWLLLFNSCLSYFVNLTNFLVTKHTSALTLQVLGNAKGAVAVVVSIMIFRNPVSITGMLGYTLTVFGVILYSESKKRSNKP

SEQ ID NO: 62833 - protein, 65 aa, Zea mays
  Coding DNA Sequence Number=SeqID_21054
MGYPKPEYPMGFTRYKGGYGMISLPTGKKKASTPSSSSEEEEEEESDDEEHNQPSTSSSKDKETI

SEQ ID NO: 62834 - protein, 212 aa, Zea mays
  Coding DNA Sequence Number=SeqID_21055
  Gene Ontology: Mol. function=nucleic acid binding
  Homolog annotation: Hit_ID=Q10N14; Match level="QueryCoverage=80%, HitCoverage=57%, E-value=4e-40, Identity=55%"; Hit description=RNA recognition motif family protein, expressed
  Pfam annotation: Domain name=RRM_1; Domain location=28-98; Score =73.4; E_value=7.3e-19; Accession=PF00076.12; Description=RNA recognition motif. (a.k.a. RRM, RBD, or
MTMMAPHPQPLPLPQPPAPFGDTTLTKVFVGGLAWETHKDALREHFERYGDILEAVIISDKLTGRSKGYGFVTFKEADAAKKACEDATPVINGRRANCNLAALGAKPRPPPHILRPSPPATPAPHAPALPSQHQPTPAIAVGSRGVSPVPWYYHPSTTPPPPAAHHYAHGAHQQYHGVLPFYPAAAATYGYVHARRSQLRIPIPRPRQGTFR

SEQ ID NO: 62835 - protein, 154 aa, Zea mays
  Coding DNA Sequence Number=SeqID_21056
  Gene Ontology: Mol. function=structural molecule activity; Cellular component=protein storage vacuole; Biological process=lipid transport
  Homolog annotation: Hit_ID=Q949F3; Match level="QueryCoverage=90%, HitCoverage=54%, E-value=4e-40, Identity=67%"; Hit description =Putative vesicle-associated membrane protein
  Pfam annotation: Domain name=Motile_Sperm; Domain location=1-80; Score=12.6; E_value=0.0011; Accession=PF00635.16; Description=MSP (Major sperm protein) domain
MMQISPVPIFAAFQSKQHRRGSISSGRNASIVQPWDSCTITITLQAQKDYPPDMQCKDKFLIQSTKVATGTEMDEIPLIRHTLYTVTLHVRSSTRKADKVIEEMKLKVVYTLPSYGGSNDSSVSFLGSRSFKAASDDLMMLKNASLEEHFPKNI

SEQ ID NO: 62836 - protein, 350 aa, Zea mays
  Coding DNA Sequence Number=SeqID_21057
  Gene Ontology: Mol. function=protein serine/threonine kinase activity; Cellular component=nucleus; Biological process=protein amino acid phosphorylation
  Homolog annotation: Hit_ID=Q9ZWJ6; Match level="QueryCoverage=99%, HitCoverage=98%, E-value=0.0, Identity=81%"; Hit description=MAP kinase 4
  Pfam annotation: Domain name=Pkinase; Domain location=36-303; Score =229.7; E_value=6.4e-66; Accession=PF00069.15; Description=Protein kinase domain
  Pfam annotation: Domain name=Pkinase_Tyr; Domain location=30-303; Score=-48.3; E_value=1.7e-09; Accession=PF07714.7; Description =Protein tyrosine kinase
  Pfam module annotation: Pfam domain module=Pkinase::Pkinase_Tyr; Domain location=36-303::30-303
MDGSPPVAEFQPTVTHGGRFLRYNIFGNLFEITRKYQPPVMPIGRGAYGIVCSVMNFETREMVAIKKIANAFDNHMDAKRTLREIKLMRHLDHENIIGIRDVIPPPIPRAFNDVYIGMEFMETDLHQIIRSGQELSEEHCQYFLYQILRGLNANCDLKICDFGLARPSSDSDMMTEYVVTRWYRAPELLLNSTDYSAAIDVWSVGCIFMELIDRRPLFPGRDHMHQMRLITEVIGTPTDDELGFTRNEDARKYMRHLPQFPRRPFASLFPRVQPLALDLIERMLTFNPLQRITVAEALAHPYLERLHDVDDEPVCTEPFSFDFERQALTEDQMKQLIFNEAIELNPSFRY

SEQ ID NO: 62837 - protein, 120 aa, Zea mays
  Coding DNA Sequence Number=SeqID_21058
MGAVRVRTTEDRDAVLRQWAIVSGSRRTGERVGNWPIAFEASRRRRRRRRVVLLALALAPDWTATGTGRGGRSAAAFVTVGPGLMTIRFACVRDRPRLARWFLTAHVVVLSGDVWKWNDD

SEQ ID NO: 62838 - protein, 67 aa, Zea mays
  Coding DNA Sequence Number=SeqID_21059
MGGWERDNVLAVGVPLANGDQGVEVGVPGGERKGGDGVAEGRGTVGWRRQGRRPPSVTQIQGTDEEL

SEQ ID NO: 62839 - protein, 63 aa, Zea mays
  Coding DNA Sequence Number=SeqID_21060
MTLTAPQTQRLNWIDFLERLHGKRMLLMDNSMNWNQFESMLYARLYGTRPDVRDALALSGNIL

SEQ ID NO: 62840 - protein, 223 aa, Zea mays
  Coding DNA Sequence Number=SeqID_21061
  Gene Ontology: Mol. function=unfolded protein binding; Cellular component=chloroplast; Biological process=cellular protein metabolic process
  Homolog annotation: Hit_ID=Q43831; Match level="QueryCoverage=63%, HitCoverage=30%, E-value=2e-50, Identity=74%"; Hit description =RuBisCO large subunit-binding protein subunit beta, chloroplast
MSASIVGDIGSVGIWMNEKEIKLGLLKIAAIKAPGFGERKTQYLDDIAILTGATVIRDEVGLSLDKADKSVLGTAAKVVLTKESTTIVGDGSTQEEVTKRVAQIKNLIEAAEQEYEKEKLNERIVKLAGGVAVIQLVLGDAMGGGQASVEQCSGLRRPVGGSSTLSARWEQHFQKLVLGGAMGGGQASVEQCSGLRRPVGGSSALSARWEQHFQKCASLPVRN

SEQ ID NO: 62841 - protein, 130 aa, Zea mays
  Coding DNA Sequence Number=SeqID_21062
  Subcellular localization annotation: CTP_CleavageSite=51; ConfidenceScore=5.65e-01
MTAASAGHTATHPTARVFIPRASLAPRAIPPARRDARPTTPPTIPARRTSRARRPRQAPCPTTPPARAPPPAIPGHPALARHPRRGQHPACVARARHPASHPPPPTRRDDRRGGRMLSHELVNNILGVTE

SEQ ID NO: 62842 - protein, 756 aa, Zea mays
  Coding DNA Sequence Number=SeqID_21063
  Gene Ontology: Mol. function=DNA binding; Cellular component=nucleus; Biological process=porphyrin biosynthetic process
  Homolog annotation: Hit_ID=Q7XCT3; Match level="QueryCoverage=79%, HitCoverage=90%, E-value=1e-61, Identity=47%"; Hit description =Expressed protein
MKVCQTVGVSGGTNRKGDKDKRKKGFNGVQNRGIPGPKNKGRCAPQGRGVGERGVAQAVGGASVFMGDSPVCPPCVVACTVEICGGWWWRYAIDKAIKVLVFVAKLLIDAVVGRKLAEKGYNRSAKKCKEKFENVHKYYKRTKESRAGRNDGKTYRFFTQLEALHGTGAAPASVASQVGPAISGGVSGAARPSSAVRVPAEPLPAVSAGVGMPMTTTVGYPSISTSNTEDDYTDEDDSDDEGTEELVGGGADDQRRKRKRVSDGSGKMMRFFEGLMKHVMDRQEAMQQRFLEAIEKREQDRMIREEAWRRQEMTRLAREQEILAQERSMAASRDAAVLSFIQKITGQTIPMPSIAAPTINAMPPPSHPKPPPPPQPHPTPIASVSPAPPPPQPPASQTPPPQQQKSPMPATPQTPAPQRQSTDIVMTPAETTPHADTQGHEGSGGGATSSRWPKAEVHALIQLRSTLDTRYQETGPKGPLWEEISAGMRGMGYNRNAKRCKEKWENINKYFKKVKESNKKRPEDSKTCPYFHQLDALYRNKAAITSSSGAGAMVHANASSAPQEMVTVTAATPISQTPPPPTQPSQSHHAAKNGGSSNSAGTGTGNGSYASEHGSRGMQTQASNGSAAASMFVGLGGGAASAAKKPEEIMKEMIEQRQPQQPQAVVGGYNRMDGAGSNNMDDDDDDDEDDYDENDNDEDDAGNKMQYEIQFQHHHQHPNVVRSNAGAGGGNPPGTTAPSTAAAPTTTAGSFLGMVQ

SEQ ID NO: 62843 - protein, 209 aa, Zea mays
  Coding DNA Sequence Number=SeqID_21064
  Gene Ontology: Mol. function=phosphoric monoester hydrolase activity; Cellular component=chromosome, pericentric region; Biological process= biological_process
  Homolog annotation: Hit_ID=Q84K83; Match level="QueryCoverage=97%, HitCoverage=39%, E-value=1e-72, Identity=68%"; Hit description =Putative NLI interacting factor
  Pfam annotation: Domain name=NIF; Domain location=1-189; Score=169.8; E_value=7e-48; Accession=PF03031.8; Description=NLI interacting factor-like phosphatase
TLVHSTLEHCEDADFTFPVHFNFREHTIYVRCRPYLKEFLDRVASVFETIIFTASQSIYAEQLLNVLDPKRKLFRHRVYRESCVYVEGNYMKDLTVLGRDLTRVMIVDNSPQLEHAMNKDVLVWNSCMSWFMDLNVKPLSSLQAFGFQLDNGIPIESWFDDPNDMELLKLLPFLESLVGVEDVRPYIARKFNLREKVATASSLTIDMQM

SEQ ID NO: 62844 - protein, 471 aa, Zea mays
  Coding DNA Sequence Number=SeqID_21065
  Gene Ontology: Mol. function=oxidoreductase activity; Cellular component=membrane; Biological process=electron transport
  Homolog annotation: Hit_ID=O48957; Match level="QueryCoverage=99%, HitCoverage=87%, E-value=0.0, Identity=78%"; Hit description =Cytochrome P450 CYP99A1
  Pfam annotation: Domain name=p450; Domain location=1-462; Score =159.7; E_value=7.5e-45; Accession=PF00067.12; Description=Cytochrome P450
MYLRLGQIDAVVISSPAAAQEVLRDKDVAFASRPNLLVADIILYGSMDMSFAPYGAYWRMLRKLCMSELLSTHKVRQLLAVRDSETISLVRKVRAAGGQSGEPVNLGRLVLSCSMAITGRATFGQLCGDELMSVVDVAVLYGGGFCAGDLFPSLSFVDVVTGLTRRLWRARRHLDGIFDKIIAECEARQRQAKTTTGTTNGDGDGLLSVLLRIRDEGETGISMTSIKAILFVSAVKYIYGAAESCLSSSKSQFLLIDHQDMLAGGTETTSSAAEWIMSELMRNPEAMAKAQAEVRRVLDGKSPQDHEGQMDKLSYTRMVVKEGLRLHPVFPLLLPRLCRETCDVGGFEVAQGTKVIVNAWALARSPEHWKHPEEFWPERFADDTSVAAAADYVGSQFEYIPFGSGRRMCPGNTFGLAALELMVARLLYYFDWSLPDGMRPDELDMDTVVGSTMRRRNHLHLVASPCKEIES

SEQ ID NO: 62845 - protein, 125 aa, Zea mays
  Coding DNA Sequence Number=SeqID_21066
MVKSKKGGSSSHHSGDKQKCEPSPPSEDFGDSEYSEEEFSSESEGSPAYASPPVSSDDSDDSQGIAAEVWTYIRAVERPGLEGSDELEISSNEEDSSDSSEEGSGGDGGKGDGGSGRASGKAPLA

SEQ ID NO: 62846 - protein, 203 aa, Zea mays
  Coding DNA Sequence Number=SeqID_21067
MGCLVVWVTCWLSFFVKVGLFIKRQKPPSALIAGGKIPEPQLLCRLIAGLASNLEKPDHDSAIKRCVSFTLKAIRVAVIKNRMNMDSSARGEALHAIWCCFMDQGLRRIQRDSNMVRLWTVQDQLSAVKIICTFFRLSPDFHLPLQEPIAICLQQCHHNHHLRLKQVSTTMVHHPGFSDLAVDVLAALPNCNLAVRKNLLNLM

SEQ ID NO: 62847 - protein, 48 aa, Zea mays
  Coding DNA Sequence Number=SeqID_21068
MGVLRRREGLREVGDSVASTSVGMAPVQRHRRVAVHGGVAWRQRDLTQ

SEQ ID NO: 62848 - protein, 81 aa, Zea mays
  Coding DNA Sequence Number=SeqID_21069
MASGHPVTVYRDESVPNFTGERVIARRQGGRWPATIAPTPFTGEDERADRVARLPEEERARESGVGAADERGQAVSGGGGK

SEQ ID NO: 62849 - protein, 555 aa, Zea mays
  Coding DNA Sequence Number=SeqID_21070
  Gene Ontology: Mol. function=polynucleotide adenylyltransferase activity; Cellular component=nucleus; Biological process=RNA polyadenylation
  Homolog annotation: Hit_ID=Q5G7J8; Match level="QueryCoverage=99%, HitCoverage=90%, E-value=0.0, Identity=62%"; Hit description =Putative polynucleotide adenylyltransferase
  Pfam annotation: Domain name=NTP_transf_2; Domain location=9-106; Score=36.6; E_value=8.6e-08; Accession=PF01909.13; Description =Nucleotidyltransferase domain
  Pfam annotation: Domain name=PAP_RNA-bind; Domain location=273-377; Score=29.0; E_value=2e-09; Accession=PF04926.5; Description=Poly(A) polymerase predicted RNA binding domain
  Pfam annotation: Domain name=PAP_central; Domain location=50-292; Score=396.6; E_value=3.6e-116; Accession=PF04928.8; Description =Poly(A) polymerase central domain
  Pfam module annotation: Pfam domain module=NTP_transf_2::PAP_RNA -bind::PAP_central; Domain location=9-106::273-377::50-292
IVKEWVKQLTRKKGYAEQLVEQANAILFTFGSYRLGVHGPGADIDTLCVGPSYVNREEDFFVTLHGILAEKEEVAELQPVPDAHVPVLKFKFRGISIDLLYASISLSVIPADFDISQGSVLCDVDEATVRSLNGCRVADQILRLVPNVENFRTTLRCLKYWAKRRGVYSNITGFLGGVNWALLVARVCQLYPNAVPSMLVSRFFRVFTQWQWPNPVMLCAIENNDLGFSIWDPRKNPRDRNHLMPIITPAYPCMNSSYNVSTSTLRVIMEQFQFGNKVCQIERDTKGILQCHPYPCEYSDPTIECAHCAFYMGLSRKEGLKKRGQQFDIRGTVDEFMREIGMYSLWKPGMDLAVTHVHREQVPSYVFEQGYKKPCPTMHANQQEQSDGDGTFSPYLESQLKRKYISDGDGHVDLCKSVKRASVSPPGVGTPPHLGNSVSNVVCDSPVKFVSSVVCSGAHASSSHDDINIEQAQLTTSPYGSEDTSASGTSCAAVGAVILADESSKLGNLTSDLEVDTIQTMPLHTSLECVAQKGETKLEEIRRLASNNCAEFLES

SEQ ID NO: 62850 - protein, 109 aa, Zea mays
  Coding DNA Sequence Number=SeqID_21071
MEARKASRYQVHGRRSRRLRNPKPRVKKKACKVKAKTQLGLDTGLSGGAPDSVRCARLNSGEQATLGRSPVAYGYNSPDCPVDILRQDLRFRYNLLEGSSHSTAYEVFE

SEQ ID NO: 62851 - protein, 45 aa, Zea mays
  Coding DNA Sequence Number=SeqID_21072
MAGSVGKARAALRSSPKRYSGTDPPLSLAGPTLADLQRTAELEKL

SEQ ID NO: 62852 - protein, 164 aa, Zea mays
  Coding DNA Sequence Number=SeqID_21073
  Subcellular localization annotation: CTP_CleavageSite=47; ConfidenceScore=5.16e-01
MDKGIHGLLTEKQTSRYNMGHGTAAGLQPRPPAARPSAAPPSAARPPASAARRAPVLLPASTELHGAWRPLLPASQQPGVAAVEFHTPACMRGCARSCSCPHRGATLGAACAPARLPTPPGRQRPLGEAAGHQQAAAARGLLLHGGCCCCCTGAGTGRRDLWSE

SEQ ID NO: 62853 - protein, 145 aa, Zea mays
  Coding DNA Sequence Number=SeqID_21074
  Pfam annotation: Domain name=zf-CCHC; Domain location=88-105; Score =8.9; E_value=0.033; Accession=PF00098.13; Description=Zinc knuckle
MLANKVHMPYDDHERALKLLHALDWRVWEVKVSTIIELPNYETPTVDERFGKLKSSKIHHQTWANIENPCAPTTALVSRSDVVAGSNDGFFNCGDLDHFIANCSKLKGKIDTDKRGHHSDQRKGKHEYTSDKHTYKGGSIRRRSR

SEQ ID NO: 62854 - protein, 40 aa, Zea mays
  Coding DNA Sequence Number=SeqID_21075
MDWGLCFNRDNKEAVDAAPRRNHGKRSRNFPPEHCRPPRL

SEQ ID NO: 62855 - protein, 46 aa, Zea mays
  Coding DNA Sequence Number=SeqID_21076
MHADRPTLTTAADDPYLEVIARDPRTSPDPSSEQPRRRREHRKLIS

SEQ ID NO: 62856 - protein, 57 aa, Zea mays
  Coding DNA Sequence Number=SeqID_21077
MELELEVDIGVESKEVSAIQGQCSTAKVKIMRFGVDGSGAVKDERCVLIEGLEKSGE

SEQ ID NO: 62857 - protein, 32 aa, Zea mays
  Coding DNA Sequence Number=SeqID_21078
  Homolog annotation: Hit_ID=Q94IZ7; Match level="QueryCoverage=87%, HitCoverage=12%, E-value=5e-07, Identity=68%"; Hit description=Ring -H2 zinc finger protein-like
  Pfam annotation: Domain name=zf-C3HC4; Domain location=1-30; Score =15.0; E_value=0.0044; Accession=PF00097.15; Description=Zinc finger, C3HC4 type (RING finger)
MVRSLPECRHLFHVACIDAWLQMQVTCPLCSD

SEQ ID NO: 62858 - protein, 132 aa, Zea mays
  Coding DNA Sequence Number=SeqID_21079
  Subcellular localization annotation: CTP_CleavageSite=62; ConfidenceScore=5.65e-01
MLPPAACLVARRLLGIASASASEAAGRRVASSPIASAVNFAAASRGSVSSTRPFSMALNYVSAAEYAAVALRPTDCDGCSGLLGTRRDSRKDWEGASVVGRAGAKIPEVGRAEAGAVYALLLIVSRDFDGTQ

SEQ ID NO: 62859 - protein, 81 aa, Zea mays
  Coding DNA Sequence Number=SeqID_21080
MAPDCPVCTGHVRCANGSQAANGRLRYLRKEIGHRTVSGVHRTVRVPQSYVVNNNYYAYGSKMLLDGLQVLEAASSFGQLG

SEQ ID NO: 62860 - protein, 115 aa, Zea mays
  Coding DNA Sequence Number=SeqID_21081
  Subcellular localization annotation: CTP_CleavageSite=54; ConfidenceScore=5.43e-01
MNLASVVPCAQAFLALMTPAAGSHRRVHTHAAASKSGLACRVARSGGTRWLPVSCAAGGGAGKSFLGCYISRSIQNNPAVKTIIVSLVLCPIAIIIFFIGINLNRWDGLYKFVNL

SEQ ID NO: 62861 - protein, 82 aa, Zea mays
  Coding DNA Sequence Number=SeqID_21082
MYEQFRLPKTGSTWPKELDDVYTQTPTHMGEACGAPSLPSLDTPHARQLRFFTNELEAIAPSTGSKQMPGATKAQTPPRQAE

SEQ ID NO: 62862 - protein, 232 aa, Zea mays
  Coding DNA Sequence Number=SeqID_21083
  Gene Ontology: Mol. function=metal ion binding; Cellular component =integral to membrane; Biological process=ubiquitin cycle
  Homolog annotation: Hit_ID=Q2QSD5; Match level="QueryCoverage=72%, HitCoverage=83%, E-value=7e-14, Identity=31%"; Hit description=Zinc finger, C3HC4 type family protein, expressed
  Pfam annotation: Domain name=zf-C3HC4; Domain location=153-194; Score= 33.0; E_value=1e-06; Accession=PF00097.15; Description=Zinc finger, C3HC4 type (RING finger)
MDWCLCCIRVYTLSIANSLYLGVTGILVYVLARSHSRTTSGIVVASVFLVLWVSIGAVIYASLCFAFFPWAALENARLCCVRCTAGWLRRPSGGGGSALPQYAVRSRSHAMNELPGEPTVRAGEARVAAAADIPAYELRDDAWQGQPDGSSDCAVCLGEMETGDMVKRLPVCLHMFHQQCVDKWLNNNSTCPVCRLSFMKKSLSRTHGLGHEPKDLAIKTEREPKPRKILEA

SEQ ID NO: 62863 - protein, 260 aa, Zea mays
  Coding DNA Sequence Number=SeqID_21084
  Gene Ontology: Mol. function=transcription regulator activity; Cellular component=integral to membrane; Biological process =regulation of transcription, DNA-dependent
  Homolog annotation: Hit_ID=Q5Z5F8; Match level="QueryCoverage=38%, HitCoverage=74%, E-value=3e-26, Identity=50%"; Hit description=RING finger-like
  Pfam annotation: Domain name=Herpes_US9; Domain location=19-76; Score= -9.5; E_value=0.097; Accession=PF06072.2; Description=Alphaherpesvirus tegument protein US9
  Pfam annotation: Domain name=zf-C3HC4; Domain location=164-205; Score= 27.0; E_value=6.8e-05; Accession=PF00097.15; Description=Zinc finger, C3HC4 type (RING finger)
  Pfam module annotation: Pfam domain module=Herpes_US9::zf-C3HC4; Domain location=19-76::164-205
MALFTEFGPQNSAVRFRQESETARGVIVKVLILEIRRQHRQRQPPSVRPNGCSLVCYGIVVATASLLLLAILAATVSIVKACALAGAVAVVFSAAGYVSRWCAAEDGAAHALALPTTMATPAARGRAVCGLVDAAIDALPAFAYARPATCGAESSSKSGRLALCPVCLEEVEAGEMVRQLPACGHLFHVECIDMWLHSHASCPLCRCDVSPQAVAMTVTEAADPPHDAARMFVRVDKLDLKVPKRFLESFRRVFRSKDQF

SEQ ID NO: 62864 - protein, 928 aa, Zea mays
  Coding DNA Sequence Number=SeqID_21085
  Gene Ontology: Mol. function=protein binding; Biological process =protein metabolic process
  Homolog annotation: Hit_ID=Q6ER93; Match level="QueryCoverage=93%, HitCoverage=99%, E-value=1e-178, Identity=46%"; Hit description=Heat shock protein-related-like
MASWQPPAALHLRTHLRDLFSLATATKSVLAGCCAKSAGLGRLLRQIGRSWQVALATHRLAGEMRAGGCTVQQSLTAEAAAVVKQAVSLARRRGNAQVTPLHVASAMLAAAPAGQLLRAACLRSHSHPLQCKALELCFNVALNRLPASASSPLLGGNHHCYHPPSLSNALVAAFKRAQAHQRRGGSVESQHQQPVVAAVKIELDQLVVSILDDPSVSRVMRDAGFSSTQVKANVEQAVCSSSTMATAAAAPSKNPNPSSSATTTSPPPKEAKAKPPLALHHQARDEDVAAVLDCLASRSKRRVVVIAESAAAAEAMAHAAVDKIKRGEVKHEHDALRGAQVVSLRVSSFREMPREEAERRLGELRCLVKQGRRQRVVLVVEDLKWAAEFWAGHDGQSGRRGGYYYCAVEHVVNELRALASGGSLCWLLGFGTYQAYTKCRVGQPSLESLWGLQTLTVPAGSLALSLTCAFDDSALGTVNQSLKAGSDADGNGPASCWPLLGGSQLSLSSRCCGDGDCSAARIDTKAALPRPSVSSSNLPSWLQHCRDHQEPTTSHLTDLSKSKTWSSICSRPSQRMTLHFSAPVSPASSISSYEHGGDQSSQTPPQHSWLLAGLDAAHHRWEPKRETSGNKAASRSHDSGASNGGSVEVECRARFKELSAENLKLLCGALEKEVPWQKEIIPEVASAVLQCRSGIAKRRDKSRSADAKEETWMLFLGGDADGKERVARELASLVFGSRDSFLAIRPGASSSSPPRSGSSEGHRSNKRPRMSPPPPGEESAPACLERLHDAVSENPHRVIFMEGVEQAGRDCQLGIKEAIESGVVRNRAGVEVGVGDAIVVLSCEGFGSTGRSRACSPPSKKVKVEMEEAKEERTGDIEHNGDGGSSSSPSCIDLNVDMESDQADEGSLDDDVCLLTAVDRTLFFRRQG

SEQ ID NO: 62865 - protein, 95 aa, Zea mays
  Coding DNA Sequence Number=SeqID_21086
MVGYSDAADTTPRVRSFPNKPARTIRISGSWREILGSGPTTILEPRPRKNQVEIKDGFVQPKSAQSRCTGLSGGAPDSVRCARQTHANLMLSRSN

SEQ ID NO: 62866 - protein, 77 aa, Zea mays
  Coding DNA Sequence Number=SeqID_21087
MEAERVLGVRPFCGGRFYAGGVPVGLRRGVARKEEIEEIDEGTRLSGEYDRQTAVNTLYGNGVLLTKSKLIDGVSEG

SEQ ID NO: 62867 - protein, 188 aa, Zea mays
  Coding DNA Sequence Number=SeqID_21088
MAWRGMTDCPHAPETRIAAQAWENALASGPRVEVKRKRAQRTRAAARRCATVPDCQCLPLAASLPPLADAAVPVQPSTAVPVRRRLDAEPLSACPAGACLYPSVAPPLCLRPPRLRRRAAVRLRAAGLWPVPVPPCSVRRGRAAVPSGFAVRGARRLRAPRQSPASESVGEDATGCSWRDSSDNGRPR

SEQ ID NO: 62868 - protein, 120 aa, Zea mays
  Coding DNA Sequence Number=SeqID_21089
  Subcellular localization annotation: CTP_CleavageSite=76; ConfidenceScore=5.53e-01
MYAFVSLALGSTERFDGSAAGRSSQQASQSRRCGACARSSACTKLIPPSPIIVSRRVFPSPSLHPTPNRLLGPCPLGQAARSARGHGEGEAPTQRPGQSPLRVGPSVPSQPSPLAGVASL

SEQ ID NO: 62869 - protein, 237 aa, Zea mays
  Coding DNA Sequence Number=SeqID_21090
MWRGNSPMVTIGKGDHGSVRGFGFGGLMGGGLLICTWGEDRQWAGMRILLGGVRMNGEIHGQRNNPNPAPSLLRSDVEDAPDTMGPRRGESKASRSTRSSRPDCQRLQGVVDGDARSTRAGGKRRTATSTTVLGASPSSSEGLRVLGSAAKQGRCSVWTVVDEGKRGHDLSSHRPWRRGVGVEEESEGESGCERVRREQKEARVAGCSVKWSRRVCWLAHPRGQRTARSRAQRPRVL

SEQ ID NO: 62870 - protein, 34 aa, Zea mays
  Coding DNA Sequence Number=SeqID_21091
MTHQAKDAVEFTVDRRYSPTLASFASSPVKLLIP

SEQ ID NO: 62871 - protein, 81 aa, Zea mays
  Coding DNA Sequence Number=SeqID_21092
MKVVVIPQIKLPGDLTTAYGRNSRILDDNEQLVLSVTIKRAPEHENRQRLHIDDLGLHSEGVRVVTTKFTVAARYSDLTGS

SEQ ID NO: 62872 - protein, 61 aa, Zea mays
  Coding DNA Sequence Number=SeqID_21093
MGGNKAQACLMAFNTVGNYIGTRDLVQEHIAFKAKDEAMNTAFGAHGKRRLNRVFDVIGFV

SEQ ID NO: 62873 - protein, 216 aa, Zea mays
  Coding DNA Sequence Number=SeqID_21094
  Homolog annotation: Hit_ID=Q2RAQ8; Match level="QueryCoverage=35%, HitCoverage=8%, E-value=2e-09, Identity=47%"; Hit description=GRAS family transcription factor containing protein, expressed
MGYGRGLVDTNVRDITSTPNSKQAGAYDKAHAECGRSRNVAGAGELPACGAGADAKDHGGGRVEGEPQHAHVPGAVLRVDVRLHGECVNGSCTPVCGVVGVHQAAGARGGDSWCGGMGRLSLPDYMLEWKVLLGQHIEYSSCTCADSCSLRTFNYDGYLPMRYLSLHNFNKFWTCRMAVPTYELMFGKLSSRNVFEDYFDQAQNMNSRIMVMLIKV

SEQ ID NO: 62874 - protein, 87 aa, Zea mays
  Coding DNA Sequence Number=SeqID_21095
  Pfam annotation: Domain name=Tbf5; Domain location=23-87; Score=91.1; E_value=3.4e-24; Accession=PF06331.3; Description=Transcription factor TFIIH complex subunit T
MGKLRGALSVLQSSTVHHEDSKMVNVIKGLLFISCDVPMAQLIVNLNASMPPSEKFIVHMLVHPRVAEMIRSKISEFRDQNIYEKPQ

SEQ ID NO: 62875 - protein, 130 aa, Zea mays
  Coding DNA Sequence Number=SeqID_21096
MEMRQYMECMNLEAKKHCLKRNPDAEDDEDEEEDDDEDKDDRVGEEVREEWEKEKLQVIEEDALCRKAARRILDYDPKQEGLYYTRIFYVNHHTFDLDEECEYNLTASHLSVLPPLAKLPRCNIQPTILK

SEQ ID NO: 62876 - protein, 68 aa, Zea mays
  Coding DNA Sequence Number=SeqID_21097
  Homolog annotation: Hit_ID=Q2R1C4; Match level="QueryCoverage=76%, HitCoverage=15%, E-value=6e-14, Identity=65%"; Hit description=St12p protein, putative, expressed
MLVCSWAVSFSGEGSILAIGGEDGHLRVFNWPTMGSVLTEIGTKTSIKDLTIRSSGPLKGKCAFGPFL

SEQ ID NO: 62877 - protein, 70 aa, Zea mays
  Coding DNA Sequence Number=SeqID_21098
MPREGYSDPAPASSTRDAMVRASWLNGRAAPAARWCTCRRDAVALCEDNLVAALLMVHMLYSLGSFAFAP

SEQ ID NO: 62878 - protein, 456 aa, Zea mays
  Coding DNA Sequence Number=SeqID_21099
  Gene Ontology: Mol. function=nucleic acid binding; Cellular component= intracellular; Biological process=chromatin modification
  Homolog annotation: Hit_ID=Q2QX40; Match level="QueryCoverage=87%, HitCoverage=86%, E-value=1e-111, Identity=54%"; Hit description=Zinc finger, C2H2 type family protein, expressed
  Pfam annotation: Domain name=zf-C2H2; Domain location=207-229; Score =30.5; E_value=5.7e-06; Accession=PF00096.16; Description=Zinc finger, C2H2 type
  Pfam annotation: Domain name=zf-C2H2; Domain location=284-307; Score =5.6; E_value=2.6; Accession=PF00096.16; Description=Zinc finger, C2H2 type
  Pfam annotation: Domain name=zf-C2H2; Domain location=313-337; Score =13.5; E_value=0.36; Accession=PF00096.16; Description=Zinc finger, C2H2 type
  Pfam module annotation: Pfam domain module=zf-C2H2::zf-C2H2::zf-C2H2; Domain location=207-229::284-307::313-337
MDNHIHSQPAANLYYQFGMGTEQQYPPPFASPPSTNIPHMDWNPATMLDNLTFIEEKIQQVKDVIRTMVDNAGQVQVQCHHQAGELLAQKQKQQVVNADLTCLIVQLISTAGSLLPSLKNSSFLSHPHPAGHVDMANHVGPSSSLVPNAMTVSEDYEELFKGWTDGGIEVDDDGVLVEEQEITKDGDSLSYELLQLEEDEILAPHTHFCTICGKGFKRDANLRMHMRGHGDEYKSPAALAKPPRDPGAEQEPAKRRYSCPFAGPLKTILCVKNHYRRSHCEKSHTCGRCHAKKFSIVADLRTHEKHCGRRDRWVCSCGTSFSRKDKLFAHVALFQGHTPALSSPLEEEPPKACSDQHQTGRAGSRREPAKVPAGSVGGGSGSSFVWGASSSGENSALDIKGFVDGCSGDFLSTANFGSFNLSFGPADGFTGEPSSGGSFSMLPPEHFQSAQKKGQN

SEQ ID NO: 62879 - protein, 122 aa, Zea mays
  Coding DNA Sequence Number=SeqID_21100
  Subcellular localization annotation: CTP_CleavageSite=64; ConfidenceScore=5.42e-01
MAPCPTQLAAQPWLLGPGAAQSAPSAAPRPAWCGRPPARPRRSCSEFSPGAAPLLARGAQRDVRAARPWRGSFAARQCGLARASARMVRVESWRGCPRCNHYSGEDEAVEEDFQEFQDYDEF

SEQ ID NO: 62880 - protein, 51 aa, Zea mays
  Coding DNA Sequence Number=SeqID_21101
MAPIWLVMIWNDSGLQQDPQGRGKGLALPHPDSAGLLSGTAAAQPASRKTP

SEQ ID NO: 62881 - protein, 84 aa, Zea mays
  Coding DNA Sequence Number=SeqID_21102
MRGGARVRSGDDGAGDTRQQVRQGEGGPVAGDDGGGCAAKGGVGGGSALQRGCGVVVVRMEAGRKTGGTKKTFLKKEENTQAQQ

SEQ ID NO: 62882 - protein, 96 aa, Zea mays
  Coding DNA Sequence Number=SeqID_21103
MASHKQLVVVDPGSVAPPSLLVLGIGTSVLPGWRQQPLAWPAMPVVGHTKFDVHPEMPWKSGSEELCLLVRWWHGLRVAKESQESILIVLHRGAEG

SEQ ID NO: 62883 - protein, 75 aa, Zea mays
  Coding DNA Sequence Number=SeqID_21104
MASGRAAEARLCRGTLGCGWAHASWAPRRVISSQARLPEDVESRGSYGGCRSKMSSSPVVALKLTDHWGSPHQTP

SEQ ID NO: 62884 - protein, 115 aa, Zea mays
  Coding DNA Sequence Number=SeqID_21105
MASMCGALHKSTSLASKAARRSPLAWVLVAEGFDVEDFDDAVEEGGLGSLDDDGTSDWVGEGSARCGMVAGGSGGVISMCDNSLVVSWLISGHPIFGGLSFRAIPGGVCTIFAMK

SEQ ID NO: 62885 - protein, 218 aa, Zea mays
  Coding DNA Sequence Number=SeqID_21106
MQRKPARRLRSPALMLRPPARRPETARKCTTDMELELRNICSHHEKTESSTSVGVERAHTLFVDAYRELGAQTVPFDESGEEVMNEEEVDDLADLESLVTRVGALVEVGAEGHTMPLGGVAEDPMAAADSAQLKGFNRGWVPVSEPTQVNPDDVKINDGLMDASTTFLSGNMSEGSDFGSWSLEDGELESPFSWVDESSEDDLDYFVALDLAASESPL

SEQ ID NO: 62886 - protein, 112 aa, Zea mays
  Coding DNA Sequence Number=SeqID_21107
MAPVERTRRERDRAAGAAGSGGAAASSKVSGEVAGEYARSIVARQPGSEGLGVIIPRWGFHSARLADELWMGAVGILPNRAFIAKSNQASGILVRITTLAVSALFFCADSSS

SEQ ID NO: 62887 - protein, 104 aa, Zea mays
  Coding DNA Sequence Number=SeqID_21108
MKALKVELHKRSAQGRRPPRRLRHYLRPGKPERRPLKTSELGQSRPRRPYVAIFRIVKRGLCIVRSMLQGPPVGRHADRGTKKNIVAQVNYVYSHQTIFHSPTV

SEQ ID NO: 62888 - protein, 159 aa, Zea mays
  Coding DNA Sequence Number=SeqID_21109
  Gene Ontology: Mol. function=protein disulfide oxidoreductase activity; Biological process=cell redox homeostasis
  Homolog annotation: Hit_ID=Q7XIZ1; Match level="QueryCoverage=68%, HitCoverage=54%, E-value=6e-22, Identity=54%"; Hit description =Glutaredoxin-like protein
  Pfam annotation: Domain name=Glutaredoxin; Domain location=64-132; Score=56.5; E_value=9e-14; Accession=PF00462.14; Description =Glutaredoxin
MLRMEVQQQQQESGVSGGVVADAAAASGADAAPTTTTMVAAAPHSASALAVYERVARMAGGNAVVVFSASGCCMCHVVKRLLLGLGVGPTVYELDQMAAGGGGGREIQAALAQLLPPGQPPLPVVFVGGRLLGGVEKVMACHINGTLVPLLKQAGALWL

SEQ ID NO: 62889 - protein, 585 aa, Zea mays
  Coding DNA Sequence Number=SeqID_21110
  Gene Ontology: Mol. function=sugar porter activity; Cellular component=integral to membrane; Biological process=carbohydrate transport
  Homolog annotation: Hit_ID=Q7XIZ0; Match level="QueryCoverage=99%, HitCoverage=99%, E-value=0.0, Identity=71%"; Hit description =Putative proton myo-inositol transporter
  Pfam annotation: Domain name=MFS_1; Domain location=33-516; Score =65.2; E_value=2.1e-16; Accession=PF07690.6; Description=Major Facilitator Superfamily
  Pfam annotation: Domain name=Sugar_tr; Domain location=29-557; Score =420.7; E_value=2e-123; Accession=PF00083.14; Description=Sugar (and other) transporter
  Pfam module annotation: Pfam domain module=MFS_1::Sugar_tr; Domain location=33-516::29-557
MEGGAHEFDGSTFKECFSLSWRNPYVLRLAFSAGIGGLLFGYDTGVISGALLYIRDDFVSVDRNTWLQEMIVSMAVAGAIIGAAIGGWTTDRFGRRASILVADSLFFAGAAVMASATRPAQLVVGRVFVGLGVGMASMTSPLYISEASPARIRGALVSTNGFLITGGQFLAYLINLAFTKAPGTWRWMLGVAALPAVVQFGLMLALPESPRWLYRQGRAEEAEAILRRIYSAEEVEREIEELKESVAAERGSSEKLSLVALVRTATVRRGLVAGVGLQVFQQLVGINTVMYYSPTIVQLAGFASNQTALALSLVTSGLNALGSVVSIYFIDRTGRRKLLVISLVGVILSLGVLTAVFHETASHSPAVSATETARFDASLTCPSYRPSSPASGGASWDCTRCLKAAAGSSECGFCASGAGRLLPGACLVSNNTVRDACHGEGRLWYTRGCPSRYGWLALLGLALYIIFFSPGMGTVPWIVNSEIYPLRYRGVCGGAAATANWVSNLAVAQSFLSLTEAIGTSWTFLIFGGLSVAALAFVLVCVPETKGLPIEEVEKMLERRELRLRFWAPRHTQDNGKESGKNAGV

SEQ ID NO: 62890 - protein, 262 aa, Zea mays
  Coding DNA Sequence Number=SeqID_21111
  Gene Ontology: Mol. function=protein binding; Cellular component =nucleus; Biological process=regulation of transcription, DNA -dependent
  Homolog annotation: Hit_ID=Q7XIY9; Match level="QueryCoverage=85%, HitCoverage=96%, E-value=3e-98, Identity=80%"; Hit description =Putative MAGE
  Pfam annotation: Domain name=MAGE; Domain location=24-217; Score =206.8; E_value=5e-59; Accession=PF01454.9; Description=MAGE family
MATSDELAQIDISKEEKDKLVAEVMRYVLFKTHQSSDCPIKREELTGIITKNYRQRALPTLVINEAKERLAATFGYEMRELQRTRAPATRSGRPAQRQFNADAKSYVLVSMLDPEVYSKYVEDKAAAHLSGFAFAVIGIIHLAGGKMPEEDLWHQLKRVGLNETDEAHLVLGNNKQALEHLVQQRYLLKEKIAGPEGHFVMYELAERALDESISVKIKDHISQVICLAVGLADSYQAGKLHIILHGYEARTLHADFVQEMCA

SEQ ID NO: 62891 - protein, 212 aa, Zea mays
  Coding DNA Sequence Number=SeqID_21112
  Gene Ontology: Mol. function=binding
  Homolog annotation: Hit_ID=Q9T041; Match level="QueryCoverage=46%, HitCoverage=11%, E-value=2e-10, Identity=39%"; Hit description =Microtubule-associated protein TORTIFOLIA1
  Pfam annotation: Domain name=HEAT; Domain location=99-135; Score =19.5; E_value=0.012; Accession=PF02985.12; Description=HEAT repeat
  Subcellular localization annotation: CTP_CleavageSite=25; ConfidenceScore=5.19e-01
MSIRGRRALDLLRFSSDPPPQPRSRASLVSFVSEAGQQAWAVGRESLVGFVSEAGQQAWAVGMMLVRAVKLLKNLHFMAKPAAIDLIRSIIQAEGASTEQALSSALTSIMDALNSTDWNTRKAVSLALSSIAISSGYLVTSFRNSCLRSLECSKFDKVKPVRDTIIYMQFSCEKLFQGLILLNHEAGSSTKDNEVKICCENQKITLMVMRRM

SEQ ID NO: 62892 - protein, 106 aa, Zea mays
  Coding DNA Sequence Number=SeqID_21113
MKGLIPLVYRTIVEYRKARHQVAIASRVLYGDHQQQPCGSSALFRVVDPAASSSSWHAASSSMSPATSPAAARASGSLASPLLRSASRRQLAGSQQLSLSFNCTYT

SEQ ID NO: 62893 - protein, 48 aa, Zea mays
  Coding DNA Sequence Number=SeqID_21114
MAYVHLDEKRVRTFCRIEGGRAPCVHSTNHADDRCGPVQSSKFRFLNT

SEQ ID NO: 62894 - protein, 292 aa, Zea mays
  Coding DNA Sequence Number=SeqID_21115
  Gene Ontology: Mol. function=DNA binding; Cellular component=nucleus; Biological process=regulation of transcription, DNA-dependent
  Homolog annotation: Hit_ID=Q8S417; Match level="QueryCoverage=39%, HitCoverage=90%, E-value=5e-65, Identity=98%"; Hit description=P -type R2R3 Myb protein
  Pfam annotation: Domain name=Myb_DNA-binding; Domain location=14-61; Score=40.9; E_value=4.3e-09; Accession=PF00249.21; Description=Myb -like DNA-binding domain
  Pfam annotation: Domain name=Myb_DNA-binding; Domain location=67-112; Score=50.1; E_value=7.5e-12; Accession=PF00249.21; Description=Myb -like DNA-binding domain
  Pfam module annotation: Pfam domain module=Myb_DNA-binding::Myb_DNA -binding; Domain location=14-61::67-112
MGRTPCCHSNGIKKGQWALEEDKLLVDYVQANGAGNWRMLPKLAGLNRCGKSCRLRWTNYLRPDIKRGHFTPEEHNSILQLHAIIGNRWSTIAAQLPGRTDNEIKNYWNTHMKQQLRQEALAVAVAGEGAGAQLAKAAAASCPVARHMAQWETARLEAEARLSLLSSTSATTIVTSATASSSSSTVAPEHAAPDIFLRLWNSEVGDSFRGTAVKGHGPASSGVPAALPAELGDDDSSAASTYGTEAAASDDYQSFLDLAAMEEFGLLQGRLDAFSVLPHVDVFAEAPCCLFE

SEQ ID NO: 62895 - protein, 180 aa, Zea mays
  Coding DNA Sequence Number=SeqID_21116
  Subcellular localization annotation: CTP_CleavageSite=67; ConfidenceScore=5.63e-01
MEAIIKQSNSIFSPIIVSWSAHGGGSSPSPPASSWTARFSSRQSSCPPPVSAHQAVTTYVDFKNQPAAATAETNAFAEHATAGAYAASLLSGGAVDRETKIVLANGMHFKATWAQSTPSDTVRDIVRDYFYRSDGRPMRVPFLSDAAMQYAESFDTLAWAFTSTILSTTLLLGFIYHIAL

SEQ ID NO: 62896 - protein, 346 aa, Zea mays
  Coding DNA Sequence Number=SeqID_21117
  Gene Ontology: Mol. function=metal ion binding; Cellular component =integral to membrane; Biological process=electron transport
  Homolog annotation: Hit_ID=Q6H7R7; Match level="QueryCoverage=98%, HitCoverage=99%, E-value=3e-77, Identity=49%"; Hit description =Putative cytochrome
  Pfam annotation: Domain name=Cytochrom_B561; Domain location=14-340; Score=109.8; E_value=8.2e-30; Accession=PF03188.6; Description =Cytochrome b561
MAAAGLGVKATPFTYAAHALAAVAAALVLVWCVHFRGGLALEAQNKNLIFNPRQRCGAALAIYGPTDRSVCSSHCSRKLGFYLEIVRFVSYFERLISWELYGRFDLEVHPVLMLIGYIILGSEALNVGFSRIPIHCMAAIMIYKVFPNLNHDTAKLTHLILHAVATVLGAFGIYCAFKYHNDSGIANLYSLHSWLGIGTIALYAIQVLGAFVSQRAPVLFCSVLFASVLAGGLANRLQSMLCSQWVFGFVTFFLPGAAPGVRRGALPWHALFGLFVYVLALATAELGFLEKLTFLESGGLDKYGAEAFLVNFTALVVVLLGAFVVVAAVTPAHAEEPRGYAPIPVS

SEQ ID NO: 62897 - protein, 90 aa, Zea mays
  Coding DNA Sequence Number=SeqID_21118
MGTSHGKAPSKESGAKGREESPPRVKLHRSGNKKKKMKKVVYYETDSLSPSTSSSDVASVTSKRHERKKFSKTPYAIPAFLNALLYFPSH

SEQ ID NO: 62898 - protein, 98 aa, Zea mays
  Coding DNA Sequence Number=SeqID_21119
MVQEDKVIIEAHLGGKSSLYNLTCMGADQPAGLMRADLTGLACTPLLGFVLVVGLGLDLELPTMHGPLVPFLHRSIKRMDPWGVQKGFRGKAGFGPVD

SEQ ID NO: 62899 - protein, 504 aa, Zea mays
  Coding DNA Sequence Number=SeqID_21120
  Gene Ontology: Mol. function=RNA-directed DNA polymerase activity; Cellular component=mitochondrion; Biological process=RNA-dependent DNA replication
  Homolog annotation: Hit_ID=UPI00004C1733; Match level="QueryCoverage =99%, HitCoverage=40%, E-value=0.0, Identity=81%"; Hit description =UPI00004C1733 related cluster
  Pfam annotation: Domain name=RnaseH; Domain location=213-340; Score= -2.1; E_value=9.2e-05; Accession=PF00075.14; Description=RNase H
  Pfam annotation: Domain name=rve; Domain location=387-503; Score =43.5; E_value=7.1e-10; Accession=PF00665.16; Description=Integrase core domain
  Pfam module annotation: Pfam domain module=RnaseH::rve; Domain location=213-340::387-503
MGPIKDLKGVQRVMGCLAALSRFISRLGERGLPLYRLLRKAECFTWTPEAEEALRNLKALLTKAPILVPPAVGEALLVYVAATTQVVSDAIVVERQEEGHALPVQRPVYFVSEVLSETMIRYPQVQKLLYAVILTRRKLRHYFESHPVTVVSSFPLGEIIQCREASGRIAKWAVEIMGEAISFAPRKAIKSQVLADFVAEWVDTQLPTAPIQPELWTMFFDESLMKTGAGAGLLFISPLGKHLRYVLRLHFPASNNVAEYEALVNGLRIAIELGVRRLDARGDSQLVIDQVMKNSHCRDPKMEAYCDEVRRVEDKFYGLELNHIARRYNETADELAKIASGRTTVPPDVFSRDPHQPSVKIDDTPEPEAPSAQSEVPSVQPEVPSAQPEAPSARPEAPSVQPEKAPGGYTHLLVAIDKFSKWIEVRPLNSIRSEQAVAFFTNIIHRFGVPNSIITDNGTQFTSRKFLDFCEDHHIRVDWAAVAHPMSNGQVERANGMILQGLKP

SEQ ID NO: 62900 - protein, 520 aa, Zea mays
  Coding DNA Sequence Number=SeqID_21121
  Gene Ontology: Mol. function=protein-tyrosine kinase activity; Cellular component=integral to membrane; Biological process=protein amino acid phosphorylation
  Homolog annotation: Hit_ID=Q8GY10; Match level="QueryCoverage=91%, HitCoverage=81%, E-value=7e-88, Identity=36%"; Hit description =Putative receptor protein kinase
  Pfam annotation: Domain name=LRR_1; Domain location=123-142; Score =11.1; E_value=2.4; Accession=PF00560.23; Description=Leucine Rich Repeat
  Pfam annotation: Domain name=LRR_1; Domain location=60-82; Score =13.5; E_value=0.79; Accession=PF00560.23; Description=Leucine Rich Repeat
  Pfam annotation: Domain name=LRR_1; Domain location=84-107; Score =9.5; E_value=4.7; Accession=PF00560.23; Description=Leucine Rich Repeat
  Pfam annotation: Domain name=Pkinase; Domain location=256-496; Score=- 53.1; E_value=2.1e-05; Accession=PF00069.15; Description=Protein kinase domain
  Pfam annotation: Domain name=Pkinase_Tyr; Domain location=257-493; Score=-101.2; E_value=2.9e-06; Accession=PF07714.7; Description =Protein tyrosine kinase
  Pfam module annotation: Pfam domain module=LRR_1::LRR_1::LRR _1::Pkinase::Pkinase_Tyr; Domain location=123-142::60-82::84-107::256- 496::257-493
MWYAGLLKANSTQMEIMHRGWKYALAGGRNLFSNSTIAERDLSNSSLQGFLAPEIGSLRSLQTLDLHANRLDGTIPPELGKLGSLLELRLSNNCLTGIVPASNDSDVESASTSDQTGLCQLSQLTNIDLSYNFLVGDVPACLQQIQSEQVYYIITGETNQDRGKDNDADENVQKGLPEPLWLLILEVIAAVSLLCFLTLCTMTGLRRCRARSSGSETSVPWTRAVSWKENTVISIDDDLLVNVPKISRQELAEACEDFSNIIGSSQETVVYKGTLKDGREIAVVSLSVPVIEMSRPSHENVAKMVGYCKESDPFSRMLVFQYPPNGTLYEHLHDGDGWQLSWPRRMKLALAISRALRYLHTELQPPFAVAALTSSSVYLTEDFSPKIIDFERWRYLATKPGFGSLNGGSVNSVTDSRHKRFMDVQANTYAFGVILLELARKHLEHPEEFGKLVDPRLQSVNQESLGIVCNVVNLCIDLEPSRRPSMSMIAAILEEGIEASAATLLRNSSLAWAEAELAIS

SEQ ID NO: 62901 - protein, 226 aa, Zea mays
  Coding DNA Sequence Number=SeqID_21122
  Gene Ontology: Cellular component=peroxisomal membrane; Biological process=peroxisome fission
  Homolog annotation: Hit_ID=Q10MN2; Match level="QueryCoverage=93%, HitCoverage=88%, E-value=1e-17, Identity=30%"; Hit description =Peroxisomal biogenesis factor 11 family protein, expressed
  Pfam annotation: Domain name=PEX11; Domain location=16-224; Score =130.1; E_value=6.3e-36; Accession=PF05648.4; Description=Peroxisomal biogenesis factor 11 (PEX11)
MPKRRSGVVLVIAGHLQIILSLASCYDWTQYLAHWGAESSLPELAQRAKSWETASGLSRKAFRSGRFLAGFNALRRGPVPVPGELGALAVLANAGEMVYFFFDHFTWLSRAGVLEPWLARRASFVSAFGEAVGYVFFIAMDFIMIRRGLRQERELLREGAKDAAEKEVRRIRVDRVMRLMATAANAADLIIAVAETDPNPFCNHAVTLGISGLVSAWAGWYRNWPS

SEQ ID NO: 62902 - protein, 101 aa, Zea mays
  Coding DNA Sequence Number=SeqID_21123
MARKRILQLCAAAEQSDSRIGGRAEGRQLMAGSGTALANLMNTQFPTLEMVMVLVYERCAVPKSLSRHHSGYVDPWLHSLRLGTTRHVVPCGKSAQSGLVR

SEQ ID NO: 62903 - protein, 52 aa, Zea mays
  Coding DNA Sequence Number=SeqID_21124
MKDASGSAVGEESKTGGSWCSGTDVYHIYILFTTLTTLNDLKLKHLISRKDA

SEQ ID NO: 62904 - protein, 93 aa, Zea mays
  Coding DNA Sequence Number=SeqID_21125
MPHAPLTLVHYSDGPIVVKGGEEGWECGTKGLFGSEPANLAWECSARKVDPAAALKINVLGELPGPGSLCLILLSSSHMFNKTNHLSEQQFLF

SEQ ID NO: 62905 - protein, 112 aa, Zea mays
  Coding DNA Sequence Number=SeqID_21126
MVPVEKIPEPWPPITSGPSPPTLRNGPVGGWRAGLISGAAAILGRFLLYVWLTEAAARAAEAIGKLWFHRLSDAPIASSHPKMESISFGEFSLALEKALGKHGSQPKQVIKF

SEQ ID NO: 62906 - protein, 58 aa, Zea mays
  Coding DNA Sequence Number=SeqID_21127
  Gene Ontology: Mol. function=oxidoreductase activity; Cellular component=mitochondrion; Biological process=fatty acid biosynthetic process
  Homolog annotation: Hit_ID=Q2QYY6; Match level="QueryCoverage=89%, HitCoverage=14%, E-value=4e-19, Identity=84%"; Hit description=Trans- 2-enoyl-CoA reductase, mitochondrial, putative
MENEQGALPEPALGFNCVGGNAASLILKLLKQGGTMVTYGGMSKRPVTVPTSYFIFKE

SEQ ID NO: 62907 - protein, 257 aa, Zea mays
  Coding DNA Sequence Number=SeqID_21128
  Gene Ontology: Mol. function=oxidoreductase activity; Cellular component=mitochondrion; Biological process=fatty acid biosynthetic process
  Homolog annotation: Hit_ID=Q2QYY6; Match level="QueryCoverage=88%, HitCoverage=61%, E-value=8e-97, Identity=75%"; Hit description=Trans- 2-enoyl-CoA reductase, mitochondrial, putative
  Pfam annotation: Domain name=ADH_N; Domain location=63-146; Score =30.3; E_value=8.3e-07; Accession=PF08240.2; Description=Alcohol dehydrogenase GroES-like domain
  Subcellular localization annotation: CTP_CleavageSite=35; ConfidenceScore=5.03e-01
MAPQSRLLPPLLQVLRRCRASRSHFSTAPSLVSPPSKAVVYDEHGLPEQVLRLVDVPPAEIGDRDVCVRMMAAPINPSDINRIEGVYPVRPPLPAAVGGYEGVGQVHALGPAVTARLSPGDWVIPSPPSFGTWQTYITKHENVWHKVRSDVPMEYAATITVNPLTALRMLQDFVKLNPGDAIVQNGATSIVGQCVIQLAKVHGIHTINIIRDRPGSEEAKNKLKQLGADEVFTETQLDMKNVKSLLEGCDLTLTNAV

SEQ ID NO: 62908 - protein, 392 aa, Zea mays
  Coding DNA Sequence Number=SeqID_21129
  Gene Ontology: Mol. function=methionyl aminopeptidase activity; Cellular component=chloroplast; Biological process=proteolysis
  Homolog annotation: Hit_ID=Q9FV52; Match level="QueryCoverage=68%, HitCoverage=73%, E-value=1e-109, Identity=67%"; Hit description =Methionine aminopeptidase 1B, chloroplast precursor
  Pfam annotation: Domain name=Peptidase_M24; Domain location=154-390; Score=233.1; E_value=6.2e-67; Accession=PF00557.14; Description =metallopeptidase family M24
MAARVPAADLNQHLSSPFIARRCHGPGEAALEAPLSVRIKSRTPRRRAESTTTRILCRCSRSLLSYPRCAVPICAQNQTRSSNSLTIARALTRSNRRGAEAQPGSGGGRRREPLRRGAVSARLPVPDHIRRPPYVGTAAVPEVCPDRQVHDGESIMRMLDACELAARVLHHAGAMVKPSVTTDEIDRAVHQMIVDAGAYPSPLGYGGFPKSVCTSVNECTCHGIPDSRELQDGDIINIDVTVYLNGYHGDTSRTYLCGEVDDATKQLVKVTEECMMRGISACRHGASFKEIGQRISEHAEKYGYGIDPFVGHGVGRMFHCEPIIWHTYDYEPGFMVAGQTFTVEPTLSMGSTQCVVWDDGWTAVAADGSLSAQFEHTVLVTGDGAEVLTGFP

SEQ ID NO: 62909 - protein, 101 aa, Zea mays
  Coding DNA Sequence Number=SeqID_21130
  Subcellular localization annotation: CTP_CleavageSite=75; ConfidenceScore=5.19e-01
MVRLTTTKSSLRRNRKLRFARPWASASEGGLRLARPQGSAPASASEGGLRLARPHGSASISTSGKNRVLARPRPRPQEESPPRPTLGSGRPRHGGTSLPYP

SEQ ID NO: 62910 - protein, 129 aa, Zea mays
  Coding DNA Sequence Number=SeqID_21131
MWVEGGDEGGTTSAMGAGTDRKHMPSTLTSACMMLTSRSSAEGDDGGGQRESEQRACSFPLTISISIGSPRHEQRTPRSALQFTLVSVAYYNLPGLQGTSSGWSRTTSWPRFMSRVHVSSFSIRVTQAS

SEQ ID NO: 62911 - protein, 175 aa, Zea mays
  Coding DNA Sequence Number=SeqID_21132
  Gene Ontology: Mol. function=calcium ion binding; Cellular component =membrane; Biological process=homophilic cell adhesion
  Homolog annotation: Hit_ID=Q3E0G9; Match level="QueryCoverage=57%, HitCoverage=23%, E-value=4e-11, Identity=38%"; Hit description=Ig -like, group 1
MRVRLTAAKSSLGRHRKLRLARPPGLGLNLDAGRWTLPRLTPGLGHNLGLGRRSPPRPTLGLGLNLDAGRRSPPRPTPGLGLNLDAGQQTPPRPTPGLGLNLDAGQQTPPRPTPELGHSLGLGRRSPPRPTQGSDSASTSEDGLDLDLDLGGASASPDLGLGPTTSQGEPSLPYP

SEQ ID NO: 62912 - protein, 186 aa, Zea mays
  Coding DNA Sequence Number=SeqID_21133
  Gene Ontology: Mol. function=DNA binding; Cellular component =mitochondrion; Biological process=DNA integration
  Homolog annotation: Hit_ID=UPI00004C1731; Match level="QueryCoverage =62%, HitCoverage=8%, E-value=2e-62, Identity=94%"; Hit description =UPI00004C1731 related cluster
  Pfam annotation: Domain name=rve; Domain location=1-117; Score=3.6; E_ value=0.003; Accession=PF00665.16; Description=Integrase core domain
MARRRRAALSTAVSKGEGFGVPNSIITDNGTQFTGKKFLDFCEDHHIRVDWVVVAHPMTNGQVERANGMLLQGLKPRIYNDLNKFGKRWMKELPSVVWSLRTTPSRATGFSPFFLVYGAEAILPTNLEYGSPRTRDARGRHKLTPPWEGPFIIAKILKPGTYKLANDQGEVYGNAWNIRQLRRFYP

SEQ ID NO: 62913 - protein, 179 aa, Zea mays
  Coding DNA Sequence Number=SeqID_21134
  Homolog annotation: Hit_ID=UPI0000DA43ED; Match level="QueryCoverage =44%, HitCoverage=80%, E-value=4e-08, Identity=38%"; Hit description =PREDICTED: similar to keratinocytes proline-rich protein
MAPPCDVVGPSLGSGEAEAPPRSRSSLYSEVEVESEPRVGRGGDHRLRPRLSLSPGVGRGGVHHLPEPRPSPSPGVVRGGVRRLPEPRPSPSPGVERGGVRRLPEPRPSPSPRVGRGGVRRLPELRPRRGPSPRVGRGGASYGARGRTWLLSASLCRVAQQSERRRRRCLLVRPVRPYE

SEQ ID NO: 62914 - protein, 493 aa, Zea mays
  Coding DNA Sequence Number=SeqID_21135
  Subcellular localization annotation: CTP_CleavageSite=57; ConfidenceScore=5.54e-01
MTPTPTPKLAPARRQIADRASGSAGAAVSPPRFGSGLGFFASAFAALRLAACSFPTQATQTAAKFQDPPYLALALLYMWAAAEKRWIKNNFSNLSAQPPLSSSLSTPLDCLSGAVHSRNANKFYLEALPHVHSHVGTRLPYRAADPPLFCSPPSPLIRPHLPSPANLGVCALSPSLRARPCPASIAPFIGARSAFASASASDPYGAMRGNGPCPTPRPVHMNAPACPRLPPTAIAAVTCPHPLPACTAPIPVPLPSSVLTTIDGAQPTLALAPASASPSMPSSPTRLSAGLRPPLLLPPTPSLRILRGQEGHVGVAAAAVLGMAGRVEATGKVSCVGKERLVVPCTNSLESRSTAWAKFMAMWVEYFLCVVFSTFVPSPRQSMCAVFPESSPRPPLKQAILAAIAVATTLSVLFILSFTDTLTLTDTLSFLGFRTRDDDNRDSNRRYLYWGSHEDCPGKHCGSCAGLTEIMLPLCLLAGILCYALKVALFLDR

SEQ ID NO: 62915 - protein, 207 aa, Zea mays
  Coding DNA Sequence Number=SeqID_21136
MEQARHRELHSARTLGNRDHGLGLAGNQGGRSKLGKRAAMGKGEELGATLGDQAGRQEEDRAGAPRSERHGQAERAGASSRGTGERESSASYGDDHEEARHGEARIERATEIKDNDTRHGEAEMKDEHMKGNDDAVAHSAKVNDNDMDSAGHGRIRSELQNDGNQIDIGTRRHCNTTTRQRRTRNDGLERVRRLTASNSAMGSEARR

SEQ ID NO: 62916 - protein, 202 aa, Zea mays
  Coding DNA Sequence Number=SeqID_21137
MATGERLRNKGGKGNKGVQGPHMYLVQEDDRELGAYARISAIGGGGLSQSAETRDPSAKLTRAVELGSAKKTQQNGGDKTDVMAPRVSGAACEHEGAWRLGEPSLKERRPWDRAQQGNLAQRRNTLWEQRSARAGTKLEEDEQRRERLVQQPWRSWETPTRWEMGGKRSGAREQGTALEEDGAGIEKSSSGRWLEDGGKTRA

SEQ ID NO: 62917 - protein, 114 aa, Zea mays
  Coding DNA Sequence Number=SeqID_21138
MDGNVGSRDGNGGELIVAGATKVESAPARWVESSIGGTGWGSHDHGLAPWQKEGLDPMPKADQGRASVKPCRPPVHCWAPPAPMGSSCRARTPGKLGFEGKQGESGPGAAERVS

SEQ ID NO: 62918 - protein, 120 aa, Zea mays
  Coding DNA Sequence Number=SeqID_21139
MTRAFIVQNSTSANFNGEVREHDQNRDMGVATIIGAGNPRQGKTAYRDHRDDKQNQADEVVSMLVTSQARCTVHGKGACRDILRIKIFSDKQRVDILYGKRLHTLFSESRNGESEVYDFD

SEQ ID NO: 62919 - protein, 101 aa, Zea mays
  Coding DNA Sequence Number=SeqID_21140
MGSKLNAAQLGLERNWAARSDRTVALGGDGTAGGRGTTTYAGSEMVGPTYHGHDDDAPARSRLPPPDQTRAPWPDHLALSSKFQARLGRIRDGIHAKDRAD

SEQ ID NO: 62920 - protein, 254 aa, Zea mays
  Coding DNA Sequence Number=SeqID_21141
  Homolog annotation: Hit_ID=Q10F28; Match level="QueryCoverage=66%, HitCoverage=13%, E-value=5e-14, Identity=29%"; Hit description =Expressed protein
MASGRALSESLTSSDESVDELFTIFDDVRMTAVKITDVILNFIVRLTSVLIRSTFRYMVLDQDGLIWVLLDGGPSRAFFETDVDLMQQDLAILKDLFIAEGQGLPIDIVEKEARQTHQILDLYMLKKTSAVTNLIRSPPTGFQADAVIDMLINASDQMPHDPEATNARRRYVHDANTLLRVLCHKKDKIASTFLRIQYHLPRCSDYDDVPVKDVSSKVPIFSDMLKRGTSFNWSETGQQSFRIMKKKLQEATWQ

SEQ ID NO: 62921 - protein, 93 aa, Zea mays
  Coding DNA Sequence Number=SeqID_21142
MGLRLHSKRPCQQLRGAKIRTRVSHALLFKARETTTREASWRSDGVARLPACEAGGELADDEEHEVGYSSGSGGRGAGSSEKELSERRVDTCV

SEQ ID NO: 62922 - protein, 683 aa, Zea mays
  Coding DNA Sequence Number=SeqID_21143
  Gene Ontology: Mol. function=protein phosphatase type 2A regulator activity; Cellular component=protein phosphatase type 2A complex; Biological process=signal transduction
  Homolog annotation: Hit_ID=Q10SP2; Match level="QueryCoverage=74%, HitCoverage=69%, E-value=1e-151, Identity=53%"; Hit description =Expressed protein
  Pfam annotation: Domain name=WD40; Domain location=207-245; Score =41.8; E_value=2.3e-09; Accession=PF00400.22; Description=WD domain, G-beta repeat
  Pfam annotation: Domain name=WD40; Domain location=308-345; Score =44.4; E_value=3.8e-10; Accession=PF00400.22; Description=WD domain, G-beta repeat
  Pfam annotation: Domain name=WD40; Domain location=349-387; Score =39.3; E_value=1.3e-08; Accession=PF00400.22; Description=WD domain, G-beta repeat
  Pfam annotation: Domain name=WD40; Domain location=390-428; Score =1.4; E_value=25; Accession=PF00400.22; Description=WD domain, G-beta repeat
  Pfam annotation: Domain name=WD40; Domain location=440-479; Score =4.7; E_value=10; Accession=PF00400.22; Description=WD domain, G-beta repeat
  Pfam annotation: Domain name=WD40; Domain location=482-521; Score =13.2; E_value=0.94; Accession=PF00400.22; Description=WD domain, G -beta repeat
  Pfam annotation: Domain name=WD40; Domain location=633-675; Score =2.0; E_value=21; Accession=PF00400.22; Description=WD domain, G-beta repeat
  Pfam module annotation: Pfam domain module=WD40::WD40::WD40::WD40::WD4 0::WD40::WD40; Domain location=207-245::308-345::349-387::390 -428::440-479::482-521::633-675
MEEEAFFDSREELTASPAPSPGPALPWSGSLDSVCQRRERFMRSMGLECCPAPLQADAVATVGDVDKEEEAVPEFGRSWSQSDENDCSMSSWSTEETKSLEDGVSDDNSVSGSSRDDASSKVSRSFSSLSFIQRLMSRSGKLSGVPKAVERRRNGWLRRLGLRSGILDHGGDEASTSSSESEQNRGGRYERVKVRSYRKRSKELSAVYQGQVIKGHDGAILAMKFSPDGQFLATGGEDGVVRVWGVAQSEDCKIPMDDPSCVYLKAHRQSGLGPVDADNEKKCKVKGVKQSADSACVVIPTVVFQISKQPLHEFRGHSGDVLSLSWSNNKHLLSASTDKSVRLWEIGSANCITVFPHSNFVTCVQLNPTNENQFISGSIDGKIRVWDIPRCSVIDWVDIRDIITAVCYRPDGKGAVVGTITGNCRFYDASDNLLRFETQVALSGKKKSSLKRITAFEFSPSNPSKLMVTSADSKVKILEGTTVTQNYSGLRTGSCQSLATFTPDGQHIVCASEDSNIYVWNHENQDEASLKHAKTIWSSERFYSNNAAIAIPWNGPKPRNPVSLASQILSPQGDNLWCMSKAVKCSSSQSEDSAINSFVSRFAPGIFNLNQEFSSESTCRSSATWPEEILPSRSIRAILDESQYKFLRNCFQSTPNSWGQVIVTAGWDGKIRSFQNYGLPAHQ

SEQ ID NO: 62923 - protein, 255 aa, Zea mays
  Coding DNA Sequence Number=SeqID_21144
MHVARLLVRGGRGAGDQGSGGRQLGRGGAVSEPRSRWMSRMEGPMPARLAVVVLLARWQLAPTHGTLVVRVCDYARREGKGVVSGWDGSHPREGRMSLPGQQRGTVAAGPGRGGGGCGLWEGWDDVRAKEPVDVEGPMPLATTHETLAVRVCDYARGEVDAAPWRKEATTSSTPARTGRAVAGEGGGRGRLRRGDRLVGELARGPDGREVVGRVGAGRRAPWTNATSACAWSGVTCNARATVIGLDLSGRNLSNL

SEQ ID NO: 62924 - protein, 71 aa, Zea mays
  Coding DNA Sequence Number=SeqID_21145
MLELYRRDRRRLLSFLLSAGGGGGRALDLSRVDLDAVSADYALECVASGAHFNASEATRRYFDERRYPIML

SEQ ID NO: 62925 - protein, 132 aa, Zea mays
  Coding DNA Sequence Number=SeqID_21146
MAHRAQVLVEAEGLGAELGLLAGSRETERVKTEETGPATASAGCAQISGGTETAGPGVPDRDFGAVNKAGRVRQRRGITDRVGAPRRSKTGLPVRFLLSKFISSGGAQILLVNVMVGSRDSYSYVLRRATYH

SEQ ID NO: 62926 - protein, 138 aa, Zea mays
  Coding DNA Sequence Number=SeqID_21147
  Gene Ontology: Mol. function=carboxyl- and carbamoyltransferase activity; Cellular component=ornithine carbamoyltransferase complex; Biological process=amino acid metabolic process
  Homolog annotation: Hit_ID=Q8SA97; Match level="QueryCoverage=61%, HitCoverage=11%, E-value=2e-10, Identity=63%"; Hit description =Ornithine carbamoyltransferase
  Subcellular localization annotation: CTP_CleavageSite=19; ConfidenceScore=5.24e-01
MGSFQRTGVLSSSPHFVPLDETDNAFLSVQFFNVFPIGKLRPDLRRHRKLRSARPRARTWAQPLKTANSAPPDPGLGLGLSPGRRRTPLRPTQGSDLGSVPEDGELRSARPRARTWAQPLKTTNSAPPDPGLGLGLSP

SEQ ID NO: 62927 - protein, 81 aa, Zea mays
  Coding DNA Sequence Number=SeqID_21148
MDEVDQAALTNTKKSKVAFADNIPQSSTKTSLLITEPDGENYQPHNQELPPSLEACIYTCISETQDVEPFNPRSHPYKAKI

SEQ ID NO: 62928 - protein, 745 aa, Zea mays
  Coding DNA Sequence Number=SeqID_21149
  Gene Ontology: Mol. function=hydrolase activity, hydrolyzing O -glycosyl compounds; Cellular component=integral to membrane; Biological process=polysaccharide catabolic process
  Homolog annotation: Hit_ID=Q7XUK4; Match level="QueryCoverage=78%, HitCoverage=98%, E-value=0.0, Identity=77%"; Hit description =Endoglucanase 12
  Pfam annotation: Domain name=Glyco_hydro_9; Domain location=110-557; Score=576.7; E_value=2.3e-170; Accession=PF00759.9; Description =Glycosyl hydrolase family 9
MYSANHWGGSFEIADGAAEDDHSRNMDLDRGALSARQHHELDETQQSWLLGPPEAKKKDKYVDLGCIVVKRKMLWWALWCVVAAFVLIGLPIIIAKSIPHKKPGPPPPDQYTDALHKALLFFNAQKSGHLPKNNGIKWRGNSGLSDGSDAKDVKGGLVGGYYDAGDNIKFHFPMAFSMTLLSWSVIEYSAKYKAMGEYDHVRELIKWGTDYLLLTFNSSASTIDKLYAQVGTAKINGSRPDDHYCWNRPEDMAYPRPSLSVSSAPDLGGEVAAALAAASIVFRDNATYSKKLSQGAATVYKFARQSGRRTPYSLRQPDIEYYYNSTSYWDEYMWSAAWMYYATGNNSYLTFATDPRLPKNAKAFFNILDFSESLAGYHNATSLNMCMYFPRFAAFNFTKGGMALFNHGRGQPLQYVVANSFIAALYADYMEAVNVPGWYCGPNFMTTNDLREFARSQINYILGDNPKKMSYVVGFGSKYPRHVHHRGASTPHNGVKYSCTGGYKWRDSKKADPNLLGGAMVGGPDKNDGFKDSRNTFGQNEPTLVGNAGLVAALVALTSSGRGVGVTAVDKNTMFSAVPPNVPRRAATTVIMEAMTTVNIHGHTIFCDRSLPARGPTGSCATQLPGVGADVWALVSAPTQPLQYIVPISPHADMWAQLANPLLHCHVHEADFTVTIVRGAWAQASVTTISPNRPLATIKGWSRVLFSHFSSPRSNRRQVSHLDLRNSGANINNICAGTKSYTYDE

SEQ ID NO: 62929 - protein, 452 aa, Zea mays
  Coding DNA Sequence Number=SeqID_21150
  Gene Ontology: Mol. function=glutamyl-tRNA reductase activity; Biological process=tetrapyrrole biosynthetic process
  Homolog annotation: Hit_ID=Q6AVG1; Match level="QueryCoverage=64%, HitCoverage=73%, E-value=2e-84, Identity=57%"; Hit description =Expressed protein
  Pfam annotation: Domain name=DUF266; Domain location=204-315; Score =189.6; E_value=7.6e-54; Accession=PF03267.4; Description=Arabidopsis protein of unknown function, DUF266
MKPGGTLKSRRGSAGDEEEAYIVGFPVTPRKDYCWSSWLLKAVVVLVMLMAGVFIGLSANVNVSRYYYYSSIGSSSPLLSSSSSLQAGSSGNNNGDVVAASTASRSCRNNNTKKKRIQQKVTAAVLLDFRGFVDPGPTWGHSMSDPELFWRASMAPRVEEYPFQRVPKVAFLFLTRGPLPFAPLWERFFHGHEGLYSVYVHALPGYAGRYRPSSPFHGRQIPSGEVSWGSITLVDAEKRLLANALLDWSNQRFVLVSESCVPVFNFRTVYEYLVNSAMSYVESYNIDVPQCAGRYNPQMAPEVLEEHWRKGSEWFEMSRDLAVDVVADQRYYALFRRHCTPSCYPDEHYIPTFLHLRHGARNANRTVTWVDWSRGGAAPGALRQGCHHGRPHGRHPEQRHAVPLQRQAHHGLLPLRQEVRAQRAAHAAQLQQHAARLLNFLILFFFPFLLSV

SEQ ID NO: 62930 - protein, 115 aa, Zea mays
  Coding DNA Sequence Number=SeqID_21151
  Subcellular localization annotation: CTP_CleavageSite=45; ConfidenceScore=5.26e-01
MAVAARYRTWPAADCFHVRATRSVAGRWNKQTATEMQGCRPVGTSSATRRRGKGTLGRLDTTPFTFKPGTQDDVVNDDNSSRDRKKPDCLGDPKLKGDTYKGAEPQHMGPGAKRK

SEQ ID NO: 62931 - protein, 156 aa, Zea mays
  Coding DNA Sequence Number=SeqID_21152
MVGEGDLGDDLRGAGDGRRCSVHTRRREPKHDNVDDGLSWFLRAQAWAPGSRLTTEKQGLGTVWTMWNGGSVTMSSSRVGHGGFSWRGGDEEDEWRSTKQVQSESRGRRVRWRARSNEAGAAVRLPMRGDKARRVAGHDDHASGISSGDYFLVKNA

SEQ ID NO: 62932 - protein, 100 aa, Zea mays
  Coding DNA Sequence Number=SeqID_21153
MAKDAKVTITDQEDLVVDLSTELVEKDPQTKQMSAQIRELEEQVEERNHTIEEIHQDMEEDEDMDIEGEDPEPASSLDTTSIARSGGPPCPESSIASHAR

SEQ ID NO: 62933 - protein, 90 aa, Zea mays
  Coding DNA Sequence Number=SeqID_21154
MWGAYDDDFEEVGFLGRERGPHGYDRVSAAARTLGRGKEGEGGRVLESQGGRWAVVGVATSNTMEFIASMWSQKRPNTCKSQERCIVFGS

SEQ ID NO: 62934 - protein, 110 aa, Zea mays
  Coding DNA Sequence Number=SeqID_21155
MDVDEVPERIYPKNACRVEVNVNAYFSFKDGKKKDSQLIDLLRASQLVKFLMIVSSEHDVEDIPSATNVVEDMQIGEFKWAEVAEYGETTAGPLMVEEDEKEHFMTVGCD

SEQ ID NO: 62935 - protein, 53 aa, Zea mays
  Coding DNA Sequence Number=SeqID_21156
MERVRFPGFVGHTPKRARKYYLGDSDYPNRKGYLAPYKDTSTTLQNGNMAEIL

SEQ ID NO: 62936 - protein, 225 aa, Zea mays
  Coding DNA Sequence Number=SeqID_21157
  Pfam annotation: Domain name=zf-Dof; Domain location=70-125; Score =14.2; E_value=0.046; Accession=PF02701.6; Description=Dof domain, zinc finger
  Subcellular localization annotation: CTP_CleavageSite=22; ConfidenceScore=5.28e-01
MAPFAPLPHQYNNTCKHLNTTMAATSGNNNSNGSTATAAGGAAADGMAAYLQHLQQAGAEAAAKSGGGGGAARGEQCPRCASRDTKFCYYYNYKHGQGQGQGQSGGLLGSLFALGAAGAGPPLLEGRGAGSSFDFDLGLGLPTGALHLGAAGQMQGLGLMGGGGASAAGSSSFLWPAAGLLVDNDSVDTWKMPGAAAGSMWPDFSFPAAAAPQTAGLLHGGGHLM

SEQ ID NO: 62937 - protein, 47 aa, Zea mays
  Coding DNA Sequence Number=SeqID_21158
MAVAPGPWPPCPAFCMAMPTDSTRHYGGVWLPLLKFSLGHIKRLTFK

SEQ ID NO: 62938 - protein, 798 aa, Zea mays
  Coding DNA Sequence Number=SeqID_21159
  Gene Ontology: Mol. function=DNA binding; Biological process =regulation of transcription, DNA-dependent
  Homolog annotation: Hit_ID=Q6AV22; Match level="QueryCoverage=51%, HitCoverage=77%, E-value=7e-93, Identity=48%"; Hit description =Putative transcirption factor
  Pfam annotation: Domain name=B3; Domain location=500-603; Score=10.2; E_value=0.0053; Accession=PF02362.12; Description=B3 DNA binding domain
  Pfam annotation: Domain name=B3; Domain location=697-796; Score=49.1; E_value=1.5e-11; Accession=PF02362.12; Description=B3 DNA binding domain
  Pfam annotation: Domain name=PHD; Domain location=4-53; Score=26.7; E_ value=8.2e-05; Accession=PF00628.19; Description=PHD-finger
  Pfam module annotation: Pfam domain module=B3::B3::PHD; Domain location=500-603::697-796::4-53
MNTVCEVCGDIGYRQLLLCCRDCKRCAVHQYCLDKVVYEASLIKWFCYECLQRRGEVTRISSLEKLSSERPLSQVHSRSPVQQLITKSVESVRDAGPWRDRKNESIATKYPSLNRTYPSIKKHTKKKPIVKPMGNCTNRKVRMAKVTTHTSAEASRSCETIGTESSKSNHGKNQQVDHANPVALNTEQSFPLIVNSLGTLGDNHQYHLLETTEGLACKFKKVPQSLAAPLKRLEKRDNVVLGSNNLGSSCFTADLGSSVLGKSGDKSNRMKDIGANLSSKHNDHGNQANQHTLVGSKNMEGKSVKAKHTVVDAHKNTSWTVDSLINVKDKSEVYGDSNRDILNDVTVQLDHRASNELLPRSTATNIPQLATLENDVVDTVMPYSPNGGCEESFSCPGIKNTPSVRERSVDPINISSDSHDTIEASESSERFMECQKASLCRRRKTVKMAMVSSSSEESGEDTISENVSLGYVLACRSSLSKAQKKRVTKLIQEIQPEFTVFISIMRMSNVKLPGPLLGITKEYAIAHFPDKTTNVTLETPGKSKKWHPKFYKRDESRKNLLMGQWLDFVRDNHVQEGDICLFLPTKDEIRHTFMVYILHETTHSRCGAGFQRVGPCLGGASSAKMASEVHIEDEPTAGEHVSSDSDMPENSHEPLESGDSDDPFEPPYFVPCRSPLSKSQKRMVEQRVRAIRSEVPICVAVMKNNNVGIAQRWMLELCSRYASVYLPTKGQNILLQCKGKTWEAKMMFHNGRRWFLNGGWPDFARGNGLRVGDMCLFELKKKKSTLTMAVHIIRKEQF

SEQ ID NO: 62939 - protein, 348 aa, Zea mays
  Coding DNA Sequence Number=SeqID_21160
  Gene Ontology: Mol. function=oxidoreductase activity; Cellular component=cytoplasm; Biological process=flavonoid biosynthetic process
  Homolog annotation: Hit_ID=Q6AV32; Match level="QueryCoverage=99%, HitCoverage=98%, E-value=1e-119, Identity=61%"; Hit description =Putative oxidoreductase
  Pfam annotation: Domain name=2OG-FeII_Oxy; Domain location=191-293; Score=157.6; E_value=3.3e-44; Accession=PF03171.10; Description=2OG -Fe(II) oxygenase superfamily
MDDAFVQAIEYRPVSPIPQATGIPVVDLSPLARMPPSPGAMNALAAGVGAACRDWGFFLAVGHGVPDATVARAVEAGRAFFALPPERKAAVRRTEQAPLGYYDAEHTKNVRDWKEVFDVFPHEPRSLAGAADDELVFVNKWPDDSELPGFRAALEEYAAAMEELALKLLELIARSLHLRPDRLHGFFGDDQTTYMRVNRYPPCPRPDLALGLGRHKDSGALTILLQDDDVGGLEVRRRTDGEWVRVEPVRGSFVVNVGDIVQVWSNDRYESVEHRASVNSEKERFSIPYFFNPAMATLVEPLEEMVSEENPARYASYSWGDFFRTRRRSNFRKLDVDNIQIAQLRKDK

SEQ ID NO: 62940 - protein, 244 aa, Zea mays
  Coding DNA Sequence Number=SeqID_21161
  Gene Ontology: Mol. function=3'-5' exonuclease activity; Cellular component=intracellular; Biological process=mRNA catabolic process, nonsense-mediated decay
  Homolog annotation: Hit_ID=Q8LMQ9; Match level="QueryCoverage=54%, HitCoverage=25%, E-value=6e-65, Identity=87%"; Hit description =Putative nucleolar protein
  Pfam annotation: Domain name=3_5_exonuc; Domain location=125-244; Score=18.1; E_value=2.9e-06; Accession=PF01612.11; Description=3'-5' exonuclease
MDEPEKVRGREDAASGHEAGGAEEAGDGFQLVIHGKKKKEGGQRPGLRDCWLWLWRRASAGVDQGEGSRAGAGGQVNHRHVDMGELVCMLVFSKLKENLPVEQFVDRNVPDREPVKPADLEDTPFTLVQDHKGLTELAKKLKSVTEFAVDLEHNQYRSFQGFTCLMQISTRTEDFIVDTLKLRLYIGLYLQEPFKDPTKRKVMHGADRDIMWLQRDFHIYVCNLFDTGQLYISGFTSAQSSGNV

SEQ ID NO: 62941 - protein, 340 aa, Zea mays
  Coding DNA Sequence Number=SeqID_21162
  Gene Ontology: Mol. function=oxidoreductase activity, acting on the aldehyde or oxo group of donors, NAD or NADP as acceptor; Cellular component=chloroplast; Biological process=amino acid biosynthetic process
  Homolog annotation: Hit_ID=Q6AV34; Match level="QueryCoverage=99%, HitCoverage=100%, E-value=1e-150, Identity=68%"; Hit description =Probable N-acetyl-gamma-glutamyl-phosphate reductase, chloroplast precursor
  Pfam annotation: Domain name=Semialdhyde_dh; Domain location=40-136; Score=47.4; E_value=5e-11; Accession=PF01118.15; Description =Semialdehyde dehydrogenase, NAD binding domain
  Pfam annotation: Domain name=Semialdhyde_dhC; Domain location=153 -311; Score=67.4; E_value=4.6e-17; Accession=PF02774.9; Description =Semialdehyde dehydrogenase, dimerisation domain
  Pfam module annotation: Pfam domain module=Semialdhyde_dh::Semialdhyde _dhC; Domain location=40-136::153-311
MAFTTLGGCGAQASVRLAPQNGILGSNSKPFAGIILKKPQQIVRILANHPQFHIKVMTADRKAGEQFGSVFPHLITQEIIKSLPRHLKIVDLSADFRLRDINEYAEWYGHSHRAPELQGEAVYGLTELKRDDIRNARLVANPGCYPTSIQLPLVPLVKAKLIKLTNIIIDAKSGVSGAGRGAKEANLYTEIAEGIHAYGITSHRHVPEIEQGLTDAAESKVTISFTPHLMCMKRGMQSTVYVELASGVTPRDLYEHLKSTYENEEFVKLLHGSNVPCTSHVVGSNYCFMNVYEDRIPGRAIIISVIDNLVKGASGQALQNLNLMMGLPENMGLQYQPLFP

SEQ ID NO: 62942 - protein, 154 aa, Zea mays
  Coding DNA Sequence Number=SeqID_21163
  Subcellular localization annotation: CTP_CleavageSite=55; ConfidenceScore=5.39e-01
MDILQTFIVQSNKGSTGQSGDRPTVLATLGLGQVSSAKNHRTVWREDNHRLSTTTATTNVQMVHQIVRCPHGTVRCPPEMESDQSGIFWQLHCAVSGAPPDNMVHLQTRKAGSFQMKLQWLLGPLGLEKDPLGVMEQYPSILELQTSATTLLIC

SEQ ID NO: 62943 - protein, 150 aa, Zea mays
  Coding DNA Sequence Number=SeqID_21164
  Subcellular localization annotation: CTP_CleavageSite=54; ConfidenceScore=5.64e-01
MDMPLMALMAADRLSLSPSFSTKGQPSPPLFLSLAHRRSHSGPSTATVRVLPCSAQARRDPARLAGRFKPCPDCLRPRRVPPSHVEPSPRNAHPPGLSVVCARLGRALFATAPHRTVRPVRRTIRHCSPPSTTIRSSKVEDNPNLDLFLS

SEQ ID NO: 62944 - protein, 143 aa, Zea mays
  Coding DNA Sequence Number=SeqID_21165
  Homolog annotation: Hit_ID=Q5VPS3; Match level="QueryCoverage=34%, HitCoverage=11%, E-value=6e-11, Identity=60%"; Hit description =Ribosomal protein-like
MALGAARHGARGLWFARRRELAAAADSDLHRGEVERGPGRGVEERGSHREFPMHKAQAKLTMAMALAEAQRQRRNGGATVVAALQAGVIEDERGVDLPTMHTSEWPGPPNPHVGQNRDILEIEKLIDAYSFIQSKETCPFATT

SEQ ID NO: 62945 - protein, 76 aa, Zea mays
  Coding DNA Sequence Number=SeqID_21166
MARIRSGGRARRRERLTGGPEVGQGTDTRDPWVSGALRARGALATRSQINGPSSTNHANRYSYIQAIRLTLDECIH

SEQ ID NO: 62946 - protein, 196 aa, Zea mays
  Coding DNA Sequence Number=SeqID_21167
  Homolog annotation: Hit_ID=Q9MAX8; Match level="QueryCoverage=37%, HitCoverage=25%, E-value=2e-19, Identity=65%"; Hit description =Epsilon1-COP
MGNFEDAEGLLLESLNKDAKDTETLANLTVCSLNLGKPATRYLNQLKLAHPDLVKRMSSAAESFDRACQAMGSSGRSEAAASDPGHHDAGERTCAQGGCRSEDVWETKGRRRTDLSRHHLCQPKWSTSSLGARRGSSAAAYTPGCRRPPHHVDGVTAMVEAALGEHAGLEEGCRLSDGDLRGRARAAAIPPSPWRD

SEQ ID NO: 62947 - protein, 108 aa, Zea mays
  Coding DNA Sequence Number=SeqID_21168
MTVGTLGRGSAIVLRYAFHFDGPIINIRQRHTRTKVVEAPSFTLAAVVDRQPTSILGLLEDDSSHGSTRVNSDAEEALERACFVAMAPLYKNGRRDKEAPNQEEEYQR

SEQ ID NO: 62948 - protein, 242 aa, Zea mays
  Coding DNA Sequence Number=SeqID_21169
MANSTVGTTPAQEHQRARDMARQANGGADQLRAYQGNRCDRDSTAVAKQWRSSGVALVQKLDHIYDDVEWRHLEAKRPRPRKVSEQLAESIDDTKYFLNPAQNMVVAMMLRSILELGEPEAKTMYMNLRNLVERAVVQQAEIDRQFTLNTKSHGPANGLILEHEGTTHPVHMDERPHGGHLGDIHHARRILNNRRLQQEEVEQPRERWCEHSPSSSGWAKRFQEGNKKSAVPPEGACASQHF

SEQ ID NO: 62949 - protein, 233 aa, Zea mays
  Coding DNA Sequence Number=SeqID_21170
  Homolog annotation: Hit_ID=UPI00004C1733; Match level="QueryCoverage =48%, HitCoverage=9%, E-value=5e-12, Identity=34%"; Hit description =UPI00004C1733 related cluster
MERTKGDRSGVVFVGVASYVERVVAESAFHGSGLALGQMISSFDEIDAIGIIEDTGFEAPNRLGPTFLTKTICYVFPHEPSLAFLLPSYASIHTRFAMSVALDNTFVLMPCSSEWCSERPTIMQHLGEVLRAYDWLDDERVHLAMWDAIEVSWNYQLYCMDFSMSGRDAALIAIGLGPTEDHEAPCWFREIFSGELLLCWFCRLLQPCLLGGRFGDKALQELALSKLVPDGEA

SEQ ID NO: 62950 - protein, 248 aa, Zea mays
  Coding DNA Sequence Number=SeqID_21171
MDGFGDDGLRDLFPRSDQIVGLGGYDFFSQSESSIPHGDPHGFQALDLNSQVQEFPDMSMYTCIIEGSGARVTGGGRAFSAAGLRAPRQGTRGGGRTVIAIGLRVPRNSTRGGGRGRSMPARADSGGARAGTMAVGAAGGTSSCGSMVFGVVGRGSRSMSASAASVGVVGRGGRRVASGRAQDVAGQETINLDGEQEGADEGFAPDPKTPEWKKLKYGSPDYIDELDRGNVPGYCCRWVQLLHSRARI

SEQ ID NO: 62951 - protein, 135 aa, Zea mays
  Coding DNA Sequence Number=SeqID_21172
MGKNNKRKREPTPPSEDFSDSEYSEEEFSSESEGSPTPIPLRESSDDSDDSQGLAAEVWTYIRAVERSGLEGSDESEYSSDEEDSSEGSGGDGDDDDDDDDEGGGGNGDGGGRGGSGGSKDGDGGSSRGSNRASG

SEQ ID NO: 62952 - protein, 99 aa, Zea mays
  Coding DNA Sequence Number=SeqID_21173
MATRAGRLANPGMERVFNVCTDARGPATEILRAHCGTCREKDPVFLRFIGQREHRRKTSRLPGTSDQREGKRIVYPVSSDSYQRGRSSKDTKVDTAPKL

SEQ ID NO: 62953 - protein, 480 aa, Zea mays
  Coding DNA Sequence Number=SeqID_21174
  Gene Ontology: Mol. function=metal ion binding; Cellular component =nucleus; Biological process=multicellular organismal development
  Homolog annotation: Hit_ID=O04003; Match level="QueryCoverage=93%, HitCoverage=92%, E-value=2e-69, Identity=69%"; Hit description =LIGULELESS1 protein
  Pfam annotation: Domain name=SBP; Domain location=176-240; Score =68.5; E_value=2.1e-17; Accession=PF03110.5; Description=SBP domain
  Pfam annotation: Domain name=SBP; Domain location=270-339; Score =38.8; E_value=1.8e-08; Accession=PF03110.5; Description=SBP domain
  Pfam module annotation: Pfam domain module=SBP::SBP; Domain location =176-240::270-339
MMNLSAAAAAAANACDEFPYAPPNAAAPPSLFPIMEQESSIHREHQQQQLGLGYNPEPNSLALLPPSDAAHHTTIAAGPHDILQFYPASASHYLAASNPYGHFAGSSSFHQSSSSSSSYYYPPPPQAAPEYYFPTLVSSAEENMASFAATQLGLNLGYRTYFPPRGGYTYGHHPPRCQAEGCKADLSGAKRYHRRHKVCDHHSKAPVVVTAGGMHQRFCQQCSSLFLPRHYSFSLTSSLPLLVSIYFLDFCDPLAFSIEQLAITSNSEVAVQCKGIQGPLPRMIHHIETHHMSQLQNSKLSALQGRTVFHLLDEFDDAKKSCRKRLADHNRRRRKSKPSDADAGDKKRAHANKAAPAKDKAGSSSKHMHIAGLGTQILGSTLLSKEQDQAMDLGEVVKEAVDPKGKASMLQHHGIHQQQHHGIHQQHHGFPFHSSSAGSSDTTSNIAQVQEPSLGFHHQHHQHSNVLQLGQAMFDLDFDH

SEQ ID NO: 62954 - protein, 123 aa, Zea mays
  Coding DNA Sequence Number=SeqID_21175
MGPRGSVETPRQKGLNFQGPDHFPFTIKDEVKVPKMVGTRWGSAAGSFLEKELLCYGKTDCHIVRMRLGHLVVSTRARYAGQHGRCGLMALSLLPLRQSTLSIRSLGLGVAHRVTNFADCLRI

SEQ ID NO: 62955 - protein, 44 aa, Zea mays
  Coding DNA Sequence Number=SeqID_21176
MDEYPAVASYRRKRRNPGTVDRKGNGGDHIWDIDSAKVNPSRQF

SEQ ID NO: 62956 - protein, 1251 aa, Zea mays
  Coding DNA Sequence Number=SeqID_21177
  Gene Ontology: Mol. function=nucleic acid binding; Cellular component= nucleus; Biological process=regulation of transcription, DNA-dependent
  Homolog annotation: Hit_ID=Q10LF6; Match level="QueryCoverage=95%, HitCoverage=80%, E-value=0.0, Identity=71%"; Hit description =Transcriptional activator, putative, expressed
  Pfam annotation: Domain name=DEAD; Domain location=597-767; Score= -19.7; E_value=0.00026; Accession=PF00270.19; Description=DEADDEAH box helicase
  Pfam annotation: Domain name=ResIII; Domain location=593-761; Score= -1.3; E_value=5.9e-05; Accession=PF04851.6; Description=Type III restriction enzyme, res subunit
  Pfam annotation: Domain name=SNF2_N; Domain location=599-896; Score =348.4; E_value=1.2e-101; Accession=PF00176.13; Description=SNF2 family N-terminal domain
  Pfam module annotation: Pfam domain module=DEAD::ResIII::SNF2_N; Domain location=597-767::593-761::599-896
MGECGGASAKRRCRPLSRSSNIVGNTWHRGGEGGWSEIGAKHLPLVAGGHEIVTREPLLNFRVPVPEDLARYENSSSNGSPSSEGQGSLLDQYNGVNDASHGLHRKRKRHLDGASDDDEADAYSNKITEEQYRAMLSEHVQKYRRSKFKEGAFSSDPPRVATPQLKHKNGGKKNMKRISDFSDDVALDGIEASHEYNGIECIKTHGGFNKLVATLDSTYLDMGDSTRYLVPEGYDKLASSLNLPVSSDIRVEEHFLKGMLDLRTLAAMLGTDQRFEASNRGGISEPLPQFESLKERVKVQEFSLQVTKDPFAIPEGSAGRIRRYIISEAGDLQVHYVRVMEKGDTYEIIERSLPKKQIVKKEPSVIMKEESEKTYKLWQSLATKSIPKHHKNFTALIKKRQVDAKRFSDSCQREVKLKVSRSLKLMRCAAVRTRKFVKDMQMFWKRVDKEQYELRKKEEKEAAEALKREEELREAKRQQHRLNFLLSQTELYSHFMQNKTGGSAPPDEEDVPDEEDPEEAQLKREALRAAQHAVSQQKMKTNAFDSEIVRLRQTSDSALPTDDSSSMDPSKIDLLHPSTMPETSSVQTPELFKGVLKEYQLKGLQWLVNCYEQGLNGILADEMGLGKTVQAMAFLSHLAEDKNIWGPFLVVAPASVVNNWAEELIRFCPDLKILPYWGPERMILRKNINPKRLYRRDASFHILITNYQILVNEEKLLRRVKWQYMVLDEAQAIKSSSSQRWKTLLSFNCRNRLLLTGTPIQNNMAELWALLHFIMPTLFDSHEQFNEWFSKGIEGHAEHGGALNEHQLSRLHAILKPFMLRRVKIDVIAEMTKKKEEIVPCKLSSRQQVFYQAIKNKISLNELLAGSRGSLNDKKLLSLMNIVMQLRKVCNHPELFERNEGSSYFNFAEIPNSLLSPPFGELQDVHYAGKRNPIIFEIPKLVYEGIISNMENSGNICGFQNGYLNRLFNIFLPSNIYRSAIPEVSSSKESLLSSGAFGFTRLSNLCPVEASFLATASLFERLVFSVMQWNMNYTAEILDEFLDSEDTGIQSSHNDSTKVRAVARLLLSSTKVKPSLLRTKIGTGPIDGPYEALVLSHRDRLASNIRLLRSAYAFIPPARAPPPFPLHQINVWCADRNFAYKFTDEMYDPWAKKLFLGFARTSEFNGPRQPIAPHPLIQELNTDLPIIEPMLQLPYRIFGSSPPMSNFDPAKMLTDYMNFRKFKYFRLDGSSAISDRRDMVRDFQNRPVSSL

SEQ ID NO: 62957 - protein, 214 aa, Zea mays
  Coding DNA Sequence Number=SeqID_21178
  Gene Ontology: Mol. function=transferase activity, transferring glycosyl groups
  Homolog annotation: Hit_ID=Q575Z8; Match level="QueryCoverage=65%, HitCoverage=22%, E-value=4e-37, Identity=53%"; Hit description =Alkaline alpha galactosidase 1
MRPHLIIFGALKMINIIAPSWRVIRATDMIDKIRKDPQLKEEICFNPYMYTGNLALQIGCKLLSVGLDIKKSLHERTRVHDTSPGALTTTVRADNVNAIACVAGDSGRVFPVFSLHVTAPEVLFAPVGLLDMFNADDVVKECVVTSGAGGRAMALRSMGRGCGLFSAYYSQEPVRCLLDMVEVEFSYDVDIDLVFVDLPVLEQERYQWTLEIVV

SEQ ID NO: 62958 - protein, 53 aa, Zea mays
  Coding DNA Sequence Number=SeqID_21179
MNSREWPVRQRPAWRTGHCPSRSAQFWVCAADIYTIYELRAGFFKDDGEEEAM

SEQ ID NO: 62959 - protein, 42 aa, Zea mays
  Coding DNA Sequence Number=SeqID_21180
MSVALKNILNSKMCVHNLNGLGSTVAVSSSSNLRLRLPPVLN

SEQ ID NO: 62960 - protein, 68 aa, Zea mays
  Coding DNA Sequence Number=SeqID_21181
MGLWLISPGGALGPCWEPLALASAMDEYPGVASYRRKRRNPSTVDRKGNNGDRIWDDIGSARVNPVFI

SEQ ID NO: 62961 - protein, 133 aa, Zea mays
  Coding DNA Sequence Number=SeqID_21182
MADDMDSLLRDLANVSIAPEALPATPAPTHLAPSPPVWGTPVPHAIEQVVPAAPVLPPVGQEEPVAPWRDMTGAGGEPSVFNPIPFAPSFDTSSVSNTYVGLPFPSGCLDSEEEDGPSFALDLSELRDPESML

SEQ ID NO: 62962 - protein, 367 aa, Zea mays
  Coding DNA Sequence Number=SeqID_21183
MELKSLRMPIECAKTNSKRRANALIFTATKAVKRGVGEPSQQGAEVAVPAPGAPVEPDMAAAEVAPPCPMSLAGATFISFKDEAEATPRVMPPTVPDLLCHPRHFEVAPSSEAGHTKGASTSEEPWRIVYGPLHGDEMIIEPPIMGSTGYLIRSGPDTSFQARPPLAWMLTEGDSYFILDDVKERDMWAKFRALGLKAPQRHRTVLLRSNKQLAQRSAEVANLTSRCEGLKEEGTTDREEEGLQAVTEERNSLTKSVEDEHSMGRALNARIEERSGGHDLDRGATRGELREVSKAVVDLFRDLDVVGVPRGGPRGLTCKPWVTSYGRLIDAVEGPRTLLACHFEVEVSPLPPSPTATEPPAGPPPTA

SEQ ID NO: 62963 - protein, 70 aa, Zea mays
  Coding DNA Sequence Number=SeqID_21184
MADKGKGKSIVISDPRTSNISQGGIARKALDKKTNKSRGAEGYAQWSNQARLPDSSIEDGPMVMAEKDAI

SEQ ID NO: 62964 - protein, 87 aa, Zea mays
  Coding DNA Sequence Number=SeqID_21185
MRRIKEIVYYDDSDESSSSQKDDDNDYEKKKTGYPDSRERNEMELPDIGILAILCSQHPTTCSLFCFPIRRHIPPKGQSLSAYSVKL

SEQ ID NO: 62965 - protein, 54 aa, Zea mays
  Coding DNA Sequence Number=SeqID_21186
MAIVESARPPGAHPSHFPSLRSPAVAGPLVSDNEQLVIPECVVEDPSEQQPGEG

SEQ ID NO: 62966 - protein, 124 aa, Zea mays
  Coding DNA Sequence Number=SeqID_21187
MGREVSELEALNTKKDKRIASLEAELKRAKEEYEAETMKIMQASAELPKQQLTLTPLSTRVLLRMDRRPKHCFSFAESRVQSSEAEAATVRAVKKAIDDVVLKMCEQIYGEVMQVNKGKSCETQ

SEQ ID NO: 62967 - protein, 238 aa, Zea mays
  Coding DNA Sequence Number=SeqID_21188
  Homolog annotation: Hit_ID=Q6K335; Match level="QueryCoverage=19%, HitCoverage=26%, E-value=8e-16, Identity=87%"; Hit description =Putative trafficking protein particle complex 6B
MAIAESCVDAVVMEMVAVYCGGLYAAKPELAARRIEAIGFQVGHQLSERTRTGMGCGTGAVKEESPEAKPEGRRVGQRTRLKYQRVAFDWSSGWLPAQGWWTGNGSEAPWRVGKKEESLAAMVFVGADSRCGWGALTTEGKAAAGVQGNSGRRRVWWRHRGRATWGGEGGPWTRAHGMGAHSPMAAAPAGQDAGGGGGVAGVEATPARRGGCDREASGQWGGGVPAANVYKSGDQLVE

SEQ ID NO: 62968 - protein, 175 aa, Zea mays
  Coding DNA Sequence Number=SeqID_21189
MGGVAVAGRFVFVEVKESRGPCVDACRGGAIRSRNKGLHVWRGKTKYMEREEKKTEVLSEVSKTLKIPRFSVEKGKLVHEWSVEPPPMHIGVETGLVPGDLDASLQVLHKVFQLEVLDLYIRFTWDKHCSHRSTERPRDGGKTYNRNCGDLMSQATASRFEKPPTPTGWAGCQGS

SEQ ID NO: 62969 - protein, 394 aa, Zea mays
  Coding DNA Sequence Number=SeqID_21190
  Pfam annotation: Domain name=AUX_IAA; Domain location=88-210; Score= -101.7; E_value=0.034; Accession=PF02309.7; Description=AUXIAA family
MAKVPDLGSDFAQKLLRDLRRRRERLGFDSTAAAPRARGELHQLDLQGAPATLAMADLHFSLGRRCPPLVRARAGELAPWPRLLASRLGYEDTTLALTLRLPGSDSGRSSSLAAPSAAPSPKARVVGWPPVRSYRKNALADSSKANRAANFVKVVVSRRSSASAPPAPGSHRRSLPQRVFFPSRAVSSCFLRTRRAELAPDLCSSLARRVLPCTCPWRPSSQPARPPVLCVARCSSSHGAQPPSRLTGSPSAAPSFFLPQLPRFSLHLPPFSVACPAELPCAPGFSPSLLEFGQARAAPWRPASSVLSLDAHSVPSNSCAVPCSGSMAAPNSLRALAYNSTAHLPTCHGHRALLPDFCSPRALISLFASAHNSPSSMAGSLLAGDAPAPAQPRL

SEQ ID NO: 62970 - protein, 647 aa, Zea mays
  Coding DNA Sequence Number=SeqID_21191
  Gene Ontology: Mol. function=RNA-directed DNA polymerase activity; Cellular component=intracellular; Biological process=RNA-dependent DNA replication
  Homolog annotation: Hit_ID=UPI00004C1731; Match level="QueryCoverage =99%, HitCoverage=48%, E-value=0.0, Identity=82%"; Hit description =UPI00004C1731 related cluster
  Pfam annotation: Domain name=RnaseH; Domain location=334-461; Score =8.8; E_value=8.8e-06; Accession=PF00075.14; Description=RNase H
  Pfam annotation: Domain name=rve; Domain location=463-638; Score =81.5; E_value=2.6e-21; Accession=PF00665.16; Description=Integrase core domain
  Pfam module annotation: Pfam domain module=RnaseH::rve; Domain location=334-461::463-638
MKESDQLVTSFITPFGMYCYVTMPFGLRNAGATYQWCMNHVFGEHIGRTVEAYVDDIIVKTRKASDLLSDLEVTFRCLKAKGVKLNPEKCVFGVPRGMLLGFIVSERGIEANPEKFAAITSMGPIKDLKGIQRVMGCLAALSRFISRLGERGLPLYRLLRKAECFTWTPEAEEALGNLKALLTNAPILVPPAAGEALLIYVVATTQVVSAAIVVERQEEGHALPVQRPVYFVSEVLSETKIRYPQVQKLLYAVILTRRKLRHYFESHPVTVVSSFPLGEIIQCREASGRIAKWAVEIMGEAISFAPRKAIKSQVLADFVAEWVDTQLPTAPIQPELWTMFFDGSLMKTGAGAGLLFISPLGKHLLYVLRLHFPASNNVAEYEALVNGLQIAIELGVRRLDARGDSQLVIDQVMKNSHCCDPKMEAYCDEVRRLEDKFYGLELNHIARRYNETADELAKIASGRTTVPPDVFSRDLHRPSIKIDDTPEPEAPSAQPEKAPGGYTHLLVAIDKFSKWIEVRPLNSIRSEQAVVFFTNIIHRFGVPNSIITHNGTQFTGRKFLDFCEDHHIRVDWADVAHPMTNGQVERDNGMILQGLKPRIYNDLNKFGKRWMKELPSVVWSLRTTPSRATGFTPFFLVYGLRPSCPQT

SEQ ID NO: 62971 - protein, 292 aa, Zea mays
  Coding DNA Sequence Number=SeqID_21192
MAQHPVPSAPDYQAEPRGCRAFQRRCIRVGRPPQTNCAIKSAPKIGIYGSRCSAFGDRRVADRRRGRARRGARPCLGRRGWRDGLVADGHRHRRRVQTLPRAALTSRCAPGDSARWEIGSAAGRLHCAVRDGGDVLVFRLDDRRGGWELATVVSVCEILQRPWQPETTFELSDSEDDDDDEAAAGQAELERVGAVIAVANRYSRSRVRVPRDDVRLLPFQGADVEVVLLSGWRVVAFETVTRRRREAVLPVPGQPTTKDWGVVEYIAHTNTLALVGPVVFMEPPDDQEEVSS

SEQ ID NO: 62972 - protein, 550 aa, Zea mays
  Coding DNA Sequence Number=SeqID_21193
  Homolog annotation: Hit_ID=Q8H8M9; Match level="QueryCoverage=97%, HitCoverage=91%, E-value=2e-64, Identity=55%"; Hit description =Putative glutamic acid-rich protein
MESKSRPDAHRQGSSSSSIARPGTPRRHDAPAIADSHATVPLQGGRGGKQTAPAANAGGVDVQMALALALSNSGKLQNVHLVARQGGSGGSAFFGEPCRMASQARRLLAPGAHVGKVAIGVQNLNDILVAYSSGGAAGARRGSVEIGKQLLRGAMDLEESLNMLMMLQDATDYMEMGSSGNDGKVLLLEGTESWKRSAPRSTSSASARLVEIVDDDSGTEQADDAKSSSDTFMQIVPHGMSQSYRRNHISPSQLAGAATNCKSNASSGEKDGSKVRMPGLIAKLMGLENLPSAKTAAERKETESAFCISYYESITVHCSDGIFFAGPNMQDDSTVRLDHLMNPSNPNDLRNHNMDVVSCDSFTENQLLLAEMLLKDPYLLETTKAITGFHVPASAAQVNTGKWLDEGNRVLSDIGREVIRRKGKRMEAMVDVSATRAANLKLRTLDDLVRELDSDIQSLHVPRKIQQRGDDHSTAENLRMVLRYDMESTHSDANSVWDFGWNRAWDLPVEKNEVVRDLEKNILGGIITDVARELIDVSMRQRHGPWVLCL

SEQ ID NO: 62973 - protein, 272 aa, Zea mays
  Coding DNA Sequence Number=SeqID_21194
MDGGKLDDEVIILDSTIWELCLMDCASEGAWPLSGWDGDVLVPSFTWLLKLLLLPTPVVDDVSGVANVLEAILQENICSCGGKDRFWYIALASSSSGSGMDQSIMVVGHVLSEVEEVLCLIVALNELVTHLPRPRFLGFEASPLDVAVNSVELLDESVELLLVGKDSELGSIEARLKSSSSMSRMDASLCVLVEASLKGGSAPLEASLLCLALGGMHGSCAYNDRYVRAGKLEFARGGGEEVEGAKHDGLLGVKVSPPVNAEELAIRVEDVY

SEQ ID NO: 62974 - protein, 66 aa, Zea mays
  Coding DNA Sequence Number=SeqID_21195
MDCLCEEGSQLQWVLRETRARAEEAESTLKGANARLKVTKLELLKEHNADIRKAEEEAKAVAKGKT

SEQ ID NO: 62975 - protein, 216 aa, Zea mays
  Coding DNA Sequence Number=SeqID_21196
MEVLVSEGALSYHRDTEVRSNVLAQGEELASDPITIVKNATTRKRSSRPCDKGGASVSQALTFPTLTVMTPLAIAAALPSGAAATPLVAGASTSLTSQESVSTAIPEVALPNAPALTSGLEGVSVTRMIVLSEAPTVEAVIVTLPLTCLALPPLSTAAVGGQSGATALSMDVIGYQVQPPPATIASTFAGVVLPTVPEEVHWGLTPLPFKDWRSVG

SEQ ID NO: 62976 - protein, 185 aa, Zea mays
  Coding DNA Sequence Number=SeqID_21197
  Gene Ontology: Mol. function=protein serine/threonine kinase activity; Cellular component=membrane; Biological process=protein amino acid phosphorylation
  Homolog annotation: Hit_ID=Q9LUI6; Match level="QueryCoverage=98%, HitCoverage=48%, E-value=8e-85, Identity=77%"; Hit description =Kinase-like protein
  Pfam annotation: Domain name=Pkinase; Domain location=1-156; Score =2.6; E_value=1e-08; Accession=PF00069.15; Description=Protein kinase domain
  Pfam annotation: Domain name=Pkinase_Tyr; Domain location=1-156; Score=15.3; E_value=2.1e-13; Accession=PF07714.7; Description =Protein tyrosine kinase
  Pfam module annotation: Pfam domain module=Pkinase::Pkinase_Tyr; Domain location=1-156::1-156
MEVPPEALVEPASGLNYLHSRKIVHRDVKTENMLLDTQRNLKIADFGVARVEAQNPKDMTGATGTLGYMAPEVLEGKPYNRKCDVYSFGICLWEIYCCDMPYPDLSFADVSSAVVHQNLRPDIPRCCPSPMANIMRKCWDANPDKRPDMDDVVRFLEALDTSKGGGMIPEGQAGGCLCFFRARGP

SEQ ID NO: 62977 - protein, 39 aa, Zea mays
  Coding DNA Sequence Number=SeqID_21198
MAAAAVATAPPLGLRWGAWAQDRWLGCVDWFGSNQSHPK

SEQ ID NO: 62978 - protein, 128 aa, Zea mays
  Coding DNA Sequence Number=SeqID_21199
MYTYTHVRGCRVLRSPSRAHLLLRSFTADPVVQIARNCAPIGEQSPTSSPTTPAKTGGSRARVTEISIITVSSSGVPCLTFGTWNASFLLEVPLGVTVSLFDEGHSGGRTVDSGVVIEERLNLVIHAR

SEQ ID NO: 62979 - protein, 1028 aa, Zea mays
  Coding DNA Sequence Number=SeqID_21200
  Gene Ontology: Mol. function=RNA-directed DNA polymerase activity; Cellular component=intracellular; Biological process=RNA-dependent DNA replication
  Homolog annotation: Hit_ID=UPI00005A975E; Match level="QueryCoverage =99%, HitCoverage=59%, E-value=0.0, Identity=89%"; Hit description =PREDICTED: similar to Retrovirus-related Pol polyprotein from transposon 297
  Pfam annotation: Domain name=RVT_1; Domain location=56-225; Score =149.1; E_value=1.2e-41; Accession=PF00078.17; Description=Reverse transcriptase (RNA-dependent
  Pfam annotation: Domain name=RnaseH; Domain location=455-582; Score =4.2; E_value=2.4e-05; Accession=PF00075.14; Description=RNase H
  Pfam annotation: Domain name=rve; Domain location=780-939; Score =124.8; E_value=2.4e-34; Accession=PF00665.16; Description=Integrase core domain
  Pfam module annotation: Pfam domain module=RVT_1::RnaseH::rve; Domain location=56-225::455-582::780-939
MPGISRDVAEHSLDIRAGARPVKQPLRRFDEEKRRAIGEEIHKLMAAGFTKEVFHPEWLANPVLVRKKGGKWRMCVDYTGLNKACPKVPYPLPRIDQIVDSTAGCETLSFLDAYSGYHQIRMKESDQLATSFITPFGMYCYVTMPFGLRNAGATYQRCMNHVFGEHIGRTVEAYVDDIVVKMRKASDLLSDLEVTFRCLKAKGVKLNPEKCVFGVPRGLLLGFIVSERGIEANPEKIAAITSMGPIKDLKGVQRVMGCLAALSRFISRLGERGLPLYRLLRKTECFAWTPEVEEALGNLKALLTKAPILVPPADGEALLVYVAATTQVVSAAIVVERQGEGHALPVQRPVYFVSEVLSETKIRYPQVQKLLYAVILTRRKLRHYFESHPVTVVSSFPLGEIIQCREASGRIAKWAVEIMGETISFAPRKAIKSQVLADFVAEWVDTQLPTAPIQPELWTMFFDGSLMKTGAGAGLLFISPLGKHLRYVLRLHFPASNNVAEYEALVNGLWIAIELGVRRLDARDDSQLVIDQVMKNSHCRDPKMEAYCDEVRRLEDKFYGLELNHIARRYNETADELAKIASGRTTVPPDVFSRDLHQPSVKIDDAPEPEAPSVQPKVPSAQPEASSVQPEVPSAPEGETLHVEEEQSGATPDRNWQTPYLQYLRQGELPLDQAEARRVARRAKSFVLLGDEKELYHRSPSGILQRCISIAEGQELLQEIHSGACGHHAAPRALVGNAFRQGFYWPTAVADATRIVRTCEGCQFYAKQTHLPAQALQTIPITWPFAVWGLDLVGPLQKAPGGYTHLLVAIDKFSKWIEVRPLNSIRSEQAVAFFTNIIHRFGVPNSIITDNGTQFTGRKFLDFCEDHHIRVDWAAVAHPMSNGQVERANGMILQGLKPRIYNDLNKFGKRWMKELPSVIWSLRTTPSRATGFTPFFLVYGAEAILPTNLEYGSPRTRAYNDQSNQASREESLDQLEEARDKALLHSARYQQSLRRYHARGVRPRDLQVGDLVLRLRQDARGRHKLTPP

SEQ ID NO: 62980 - protein, 417 aa, Zea mays
  Coding DNA Sequence Number=SeqID_21201
  Gene Ontology: Mol. function=DNA binding; Cellular component =mitochondrion; Biological process=DNA integration
  Homolog annotation: Hit_ID=UPI00004C1731; Match level="QueryCoverage =99%, HitCoverage=30%, E-value=1e-176, Identity=75%"; Hit description= UPI00004C1731 related cluster
  Pfam annotation: Domain name=RnaseH; Domain location=1-123; Score= -7.1; E_value=0.00026; Accession=PF00075.14; Description=RNase H
  Pfam annotation: Domain name=rve; Domain location=170-328; Score =94.6; E_value=2.9e-25; Accession=PF00665.16; Description=Integrase core domain
  Pfam module annotation: Pfam domain module=RnaseH::rve; Domain location=1-123::170-328
MFFDGSLVKTGAGAGLLFISPLGKHLRYVLRLHFPASNNVAEYEALVNGLRIAIELGVRRLDTRGDSQLVIDQVMKNSHCRDPKMEAYCDEVRRLEDKFYGLELNHIARRYNETADELAKIASGRTTVPPDVFSRDLHQPSIKTDDTPEPEKASAEPEAPSTQPEAPSAQPEAPSAQPEAPSVRLEKAPEGYTHLLVAIDKFSKWIEVRPLNSIRSEQAVAFFTNIIHRFGVPNSIITDNGTQFTGRKFQDFCEDHHIRVDWAAVAHPMMNGQVEHANGMILQGLKPRIYNDLNKFGKRWMKELPSVVWSLRTTPSRATGFTPFFLVYGAEAILPTDLEYGSPRTRAYADQSNQANREDSLDQLEEAQDMALLHSTRYQQSLRRYHARGVRSRDLQVGDLVLRLRQDARGRHKLMPP

SEQ ID NO: 62981 - protein, 230 aa, Zea mays
  Coding DNA Sequence Number=SeqID_21202
  Gene Ontology: Mol. function=catalytic activity; Cellular component =peroxisome; Biological process=metabolic process
  Homolog annotation: Hit_ID=Q69RG7; Match level="QueryCoverage=97%, HitCoverage=37%, E-value=3e-85, Identity=71%"; Hit description =Putative 4-coumarate--CoA ligase 1
MDDGKGYGSTEAGGISLMIQREECGRICSAGRVSENVEVKIVDHVTGEALSVGQKGELLLDDSGFLLSFSSFSAQQDVRSELAGYVGDEEANASSFDSEGWLRTGDLCYIDQDGFLFVVDRLKELIKYKGYQVPPAELELVLQSLPEVIDAAVMPYPHEEAGQIPVALVVRQPGSKVTEAQVMDHVAQRVAPYKKIRKVLFVDSIPKSPAGKILRRQLTNHVQAGAVSRM

SEQ ID NO: 62982 - protein, 283 aa, Zea mays
  Coding DNA Sequence Number=SeqID_21203
  Subcellular localization annotation: CTP_CleavageSite=52; ConfidenceScore=5.33e-01
MPLGVVRVALCNEAAAAAAAATAILNSGSTRTSGPRRGTPARRRRLLVVLVRVAELTQWRLPVHHPPQASGTGGDALLSAEEKFATGEVVAALRAVEREMEAAARPVPAGVVAGVVAAVREPATARLAAKVLLVVLLEEGNRETAVEAGAASAAVEAVAASGPAGATAERALAALELLCTAPGGAPAVRREALAAPVLARAVEAMAGRGRECAIGVLAAVYGGAAGGEDGASSSPPPPAVVKAVVAAMQGECSARGRRKGAQLLRALQEGGRLGLAWDGIGDQ

SEQ ID NO: 62983 - protein, 124 aa, Zea mays
  Coding DNA Sequence Number=SeqID_21204
MLKHEKRVVAKKNLDGPEGISLGASKRLVQNSVDHLKILEKERIKESSVKISQDNHVELGESDVEDDDLYTLGDLSGDLSEEIMEYLTDSNRKGYSKAELSTFCGSRGFLGNGALLEADREVFY

SEQ ID NO: 62984 - protein, 177 aa, Zea mays
  Coding DNA Sequence Number=SeqID_21205
  Gene Ontology: Mol. function=carboxyl- and carbamoyltransferase activity; Cellular component=ornithine carbamoyltransferase complex; Biological process=amino acid metabolic process
  Homolog annotation: Hit_ID=Q8SA97; Match level="QueryCoverage=73%, HitCoverage=21%, E-value=4e-22, Identity=76%"; Hit description =Ornithine carbamoyltransferase
MAPPVDVAGLRPRLVDVEAPPKPRSSLSSVVEAESEPWVGRGGGRRLRPGRSPSPGVGRSGVRHLLGLSPSPSPGSGGAEFAVFRDLARVRALGRAERSSPSSGAEPESEPWVGRSGVRRLPGLSPSPSPGSGGAEFPVAPSAGPDCLSVSLCQVALQSVRRRRRCPSVRPVSGAAK

SEQ ID NO: 62985 - protein, 423 aa, Zea mays
  Coding DNA Sequence Number=SeqID_21206
  Homolog annotation: Hit_ID=Q6AT33; Match level="QueryCoverage=22%, HitCoverage=29%, E-value=5e-25, Identity=64%"; Hit description=Auxin- responsive protein IAA19
  Pfam annotation: Domain name=AUX_IAA; Domain location=34-226; Score =39.3; E_value=3.1e-12; Accession=PF02309.7; Description=AUXIAA family
MPPPLLQARDYMGAGATPLSCSSSGEGTGPHLALRLGLPGSDSPGRDAGPEPDHAHVDAALTLGPAPAPAPAPPRVGAKRGFADSRDRCAKRDATAADDAAGGVTGEEKRVGAAAAGAPPAANMDGAPYLRKVDLKTFSSYEDLSLALEKMFTCFITADGEVLLTDVHGHVECYTLQGTWSPLVTVTRMADALQDQEYVLTYEDKDADWMLVGDLPWDADGGRPWQLQPGAGAGAGGGDRITRRPVRPRGTQRHGGQWQWVTRTTAISTPHARLGLGTWGCGLDDQTQRPAAHESGSGTSQSNQHCLGSQPSARCRYAIGVRRATATEHGQLLARLDSQSQSQRRSARGHGRTSPSGWSHGRGPAPSPLCLRLRTPSPFRHAVARWSMGIRPSAREYLMHPILTSNDMLVTILIPPQAHPSKQ

SEQ ID NO: 62986 - protein, 156 aa, Zea mays
  Coding DNA Sequence Number=SeqID_21207
MSESRDVLSEQYKSCGHCVYRLELKTRNNIGFGFRDSVIFLYQGKLAKANHGKHLSHPVSLLPGTGSVAVRPRRHRSLSARGVRDEMTRHLVVRFMGDARRHQSASKRTGDEGRAQGYGDRCPAHATGMLAPYGLWGGSGTRIPAAALLIALPVPF

SEQ ID NO: 62987 - protein, 116 aa, Zea mays
  Coding DNA Sequence Number=SeqID_21208
MGVGSEIAERDTAIDWAVNSRSFAWDCEAKALARVVELSASLENLQVYCNTIHEEVHVLYDRLHPNVPPEVAAMGARPSGAANGGPDGELDLFEAPPSLNLADERSPKAGSGAAQD

SEQ ID NO: 62988 - protein, 100 aa, Zea mays
  Coding DNA Sequence Number=SeqID_21209
  Subcellular localization annotation: CTP_CleavageSite=80; ConfidenceScore=5.68e-01
MRAREVPSPSAVISGSFRGRRRAFAVSVAPVSSVSSLESQDTPRFAPSPSIPLCSRSPDSPPYNRVVVAVDPRLRCVLTVAQAPQSLLSRTFSDEADPQQ

SEQ ID NO: 62989 - protein, 96 aa, Zea mays
  Coding DNA Sequence Number=SeqID_21210
MATKSTREPPCMQFPYCPCPFGGDDESSGGSYRGSLGGGELDHVRMELCYNASEELTPDVPDFAPNTVKNLFCALQRTPLTGHEVAITTAMTSPAL

SEQ ID NO: 62990 - protein, 185 aa, Zea mays
  Coding DNA Sequence Number=SeqID_21211
  Homolog annotation: Hit_ID=Q6K7C2; Match level="QueryCoverage=13%, HitCoverage=12%, E-value=5e-07, Identity=88%"; Hit description =Putative OsCTTP
  Subcellular localization annotation: CTP_CleavageSite=45; ConfidenceScore=5.18e-01
MVHSDWDGGFLTLVSASVSAGESDMPQAARWCCACLGLGTPSLTRTSASTSSLVLSPTPAACIDHRGTAEHPARTCTLETDDEAICCSCCEDELSSFYCSIFACPPFYTVTQCYMGKVSMVQAYKEKVYPKNKVCLVHANPHLLPLLPSQPDDKYEFADFSVCVFPHIQVEEDEEPKEGEEANGC

SEQ ID NO: 62991 - protein, 117 aa, Zea mays
  Coding DNA Sequence Number=SeqID_21212
  Gene Ontology: Mol. function=fumarate hydratase activity; Cellular component=tricarboxylic acid cycle enzyme complex; Biological process=fumarate metabolic process
  Homolog annotation: Hit_ID=Q10LR5; Match level="QueryCoverage=87%, HitCoverage=20%, E-value=1e-41, Identity=78%"; Hit description =Fumarate hydratase 1, mitochondrial, putative, expressed
MMMNMKFRATVIVSSIAVVLNMDYGLDPTIGKAIIQAAEEVAEGKLDDHFPLVIWQTSSGTQSNMNANEVIANRASEILGHKGGQKYVHPNDHVNRSQSSNDTFPTMFIIHGVDISR

SEQ ID NO: 62992 - protein, 184 aa, Zea mays
  Coding DNA Sequence Number=SeqID_21213
  Gene Ontology: Mol. function=metalloendopeptidase activity; Cellular component=mitochondrial inner membrane; Biological process =proteolysis
  Homolog annotation: Hit_ID=Q10Q21; Match level="QueryCoverage=83%, HitCoverage=29%, E-value=2e-73, Identity=89%"; Hit description =Mitochondrial processing peptidase beta subunit, mitochondrial, putative, expressed
MGVYMPDPHFPYSVTDHIFAMLPCFTVYNSELVQKAAINDIAESVMSFNMNYKDTSLFGVYAVAKADCLDDLAFAIMHEMSKLSYRVTEEDVIRARNRLKSSIQLHLDGSTAVVDDIGRQLLTYGRRISTPELFARIDAVDASTVKRVANRFIFDQDVAIAAMGLIQGLPDYNWFRRRTYMLRY

SEQ ID NO: 62993 - protein, 36 aa, Zea mays
  Coding DNA Sequence Number=SeqID_21214
MANEVAATEARMIIIVRRVRRGPYGPSAESVPARRG

SEQ ID NO: 62994 - protein, 593 aa, Zea mays
  Coding DNA Sequence Number=SeqID_21215
  Homolog annotation: Hit_ID=Q8SA97; Match level="QueryCoverage=29%, HitCoverage=15%, E-value=3e-15, Identity=63%"; Hit description =Ornithine carbamoyltransferase
  Subcellular localization annotation: CTP_CleavageSite=37; ConfidenceScore=5.63e-01
MQAACNRAKWVHPSDFQRTQHGGPRPRVMQPARRSLRASNCTATRTVATPPRLRNQYRDSRRRLWQGKRVTLRLRHNDRVKKGNRLRASLLIRGSKAGPSGGFNSRLRARGLHTHYWSEVRRPAPRKGSTAASGHSGSAPTTDQGARTRAQPRKTANSAPPDPGLGLGLNPGRRRTPLRPTQGSDSGSAPEDDELRSARPRARTRAQPRKTTNSAPPDQGLGLGLGPGRRRTSLRLTQGSDSGSAPEDDELRSARPQGSDSGSAPENDELRSARPRARTRAQPRKTTNSAPPDPRARTRAQPRKTTNSAPPDPRARTRAQPLKTTNSASPDPRARTQPWPQPTVSASPDPGAQTRPRPRKDRLDLDLGGASTSPNLGHGPTTHAMMAPRTLYDDGGSQPPYGSKRTIEYKLFARHSKHGHISSLIKTRPTPIRSIIQISNAMQCKAPAPPTGDGDRHSHRTDHLGAPAAFLPVQHPAARTKQRAGGRARVNHRADATACRCRCGRYGGDGNRKATAHRPAGIAVPRPGSATKQWIVRRMDGGCLAWAHWGQSAASCVAPALYFSVAGSLVRLRRRHGSGKPCLARLLGVETGE

SEQ ID NO: 62995 - protein, 1333 aa, Zea mays
  Coding DNA Sequence Number=SeqID_21216
  Gene Ontology: Mol. function=ATP-dependent helicase activity; Cellular component=intracellular
  Homolog annotation: Hit_ID=Q7XI36; Match level="QueryCoverage=94%, HitCoverage=77%, E-value=0.0, Identity=62%"; Hit description =Putative DEAD/H (Asp-Glu-Ala-Asp/His) box polypeptide 8
  Pfam annotation: Domain name=DEAD; Domain location=380-540; Score= -7.2; E_value=2.3e-05; Accession=PF00270.19; Description=DEADDEAH box helicase
  Pfam annotation: Domain name=HA2; Domain location=775-871; Score =67.0; E_value=6e-17; Accession=PF04408.13; Description=Helicase associated domain (HA2)
  Pfam annotation: Domain name=Helicase_C; Domain location=622-715; Score=66.3; E_value=1e-16; Accession=PF00271.21; Description =Helicase conserved C-terminal domain
  Pfam module annotation: Pfam domain module=DEAD::HA2::Helicase_C; Domain location=380-540::775-871::622-715
MLRSQDRRPFRPPDRAPRPPHPHRDQHNHNEHRYQPLSHPHIDRRYSNEHRYQPRGQHQRGCHVQPPLRPSQFEVFLVRPGPDLSAPTAIEVEALLAGLPSPAPASISVQSSGRHAARLVFTSIPAAAAAARELWALRLEGLHLLTLDLPHPALAAHASPLIASLFASHASRLLDSDIMVLSAARSAELEASVRDLDLEKKTLESEKEFVDSKIAEYKEAMWSIQRAMLRGSGDKEEGVDLFAAVDDGEVDFVKVHMMLLRECRRLKEGLPIYAYRRRILNHIFANQYNPREVGSRVPLHATSVGHSCEVARHTNQECTYNCILLWIEVVWFLVQYYNTETFTGVFAKRLAVFPNLPSDQYNQRVEPLFVFFLNLFNHPRPPTEKLAVSAEKKGHDLIGETGSGKSTQLVQFLADSGVAGGGSIICTQPRKLAAISLAHRVDEESKGCYGDSSVLSYSTLLSSQGFGTKIIFTTDSCLLHYCMSDVNLDGISYIIIDEAHERSLNTDLLLAMIKKKLLDRLDLRLIIMSATADADRLAEYFYGCQIFHVRGRTFPVEIKYVPDVSAEASLNSVPSISSVASSTASYVTDVVQMVNIIHKNEEEGAILAFLTSQLEVEWACETFSDPNAVVLPMHGKLSSLEQNLVFKSYPGKRKIIFCTNIAETSLTIKDVKYVVDCGLAKEYRFVPTSGLNVLKVNWISQSSANQRAGRAGRTGAGKCYRLYPESDFGMMEVHQEPEIRKVHLGTAVLRILALGVTDVKCFEFIDAPDPEAIAMAVNNLEQLGAIECKRSGFELTDIGHDLVKLGIEPRLGKIMLDCFSYGLMKEGLVLASVMANASSIFCRVGTNEEKYKADRLKVPFCHPDGDLFTSLAVYKKWETGYGNKNTWCWQNSINAKTLRRCQETISELEKCLKHELNIIVPSYWSWNPEKPTMHDTSLKKIILSSLRGNLAMFSGHENLGYKVISAEILSAVNQYLVCVTAVGLNEVLTVHPMSFIKQLEESKLQRKVITGIGNKSLRRFCGKSGQNLQNIISLLRKDCRDDHIMVDLDFSSSEVLLFAKEHDMEKVFCKVNYALELEAKLLRDECDERRPGSSTIALFGSGAEIKHLELGKRYLTVEILHQNARVIDEKELVCLVDSLVPGIANFHKTGNFQTNLDETKWGRFTFLKPDYAEDAISKLNGIEFHGSLLKVSPVSIYSHSGLPFPAVRAKVSWPRKASRGVALVTCASGEAEFIVKDCFALGVGGRYVNCEIIQCEHVFHSTVSCPMRIYNVISQDVGALLESFRSQKVTTTTTITGAKQIQAEGKQIEQLTNNAMELMGKMFTCQVLAVVWL

SEQ ID NO: 62996 - protein, 382 aa, Zea mays
  Coding DNA Sequence Number=SeqID_21217
  Gene Ontology: Cellular component=nucleus; Biological process =regulation of progression through cell cycle
  Homolog annotation: Hit_ID=Q8LHA8; Match level="QueryCoverage=92%, HitCoverage=92%, E-value=1e-109, Identity=57%"; Hit description =Putative D-type cyclin
  Pfam annotation: Domain name=Cyclin_C; Domain location=188-349; Score= -0.5; E_value=0.042; Accession=PF02984.9; Description=Cyclin, C -terminal domain
  Pfam annotation: Domain name=Cyclin_N; Domain location=54-186; Score =115.8; E_value=1.3e-31; Accession=PF00134.13; Description=Cyclin, N -terminal domain
  Pfam module annotation: Pfam domain module=Cyclin_C::Cyclin_N; Domain location=188-349::54-186
MGILCLGASSTLLCGEDRNNVLGLGCGNELVEVGSGHDGLDSVVGAVFPVDTDEAVRALLEKETDHKPQDGYAERLERGGLEYSWRRDAMDWICKVHSYYRFGPLSLYLAVNYLDRFLSSYDLPHDKPWMRQLLSVACLALAVKMEETVLPLPVDLQVCDVKFEFEARTIGRMELLVLATLKWRMQAVTPFTFISYFLDKFNGGKPPSLALASRCTDIIIGTLKGSIGSFRAAHRLFNSLACIADGAMFGCAYGFTGSTFLSFRPSEIAAASALAAVSENQVVGSSSALSASEVPINKVMIARCYELLQEQALVRKTGHVNGSPSVPQSPIGVLDATCFSFRSEDARLVVSVDNHEFWFMGLVNYDSAVKNLQEAARGVHGA

SEQ ID NO: 62997 - protein, 175 aa, Zea mays
  Coding DNA Sequence Number=SeqID_21218
  Gene Ontology: Mol. function=GTP binding; Cellular component =membrane; Biological process=protein transport
  Homolog annotation: Hit_ID=Q6K912; Match level="QueryCoverage=96%, HitCoverage=96%, E-value=4e-72, Identity=70%"; Hit description=SNF7 -like protein
  Pfam annotation: Domain name=Snf7; Domain location=6-150; Score=37.7; E_value=4e-08; Accession=PF03357.11; Description=Snf7
MGNIFVKKPKITEVDRAILTLKTQRRKLAQFQQQLSDIELASKQKAVFESLKAGNAALKSIQNEINIDDVQKLMDDTAEAKAYQDEINAVLGEQLSAEDEEAVMAEFENLEAQLAVESLPDTPVTEVRPEEKMKAPADTEAVPEDIDEAIELPDVPMKAPERPEAPEKTKGFCLA

SEQ ID NO: 62998 - protein, 474 aa, Zea mays
  Coding DNA Sequence Number=SeqID_21219
  Homolog annotation: Hit_ID=Q9FI63; Match level="QueryCoverage=45%, HitCoverage=42%, E-value=2e-20, Identity=30%"; Hit description =Arabidopsis thaliana genomic DNA, chromosome 5, TAC clone:K21I16
  Subcellular localization annotation: CTP_CleavageSite=72; ConfidenceScore=5.33e-01
MDTALCDDLLQVVFGLLPPSAAPAVSLVSRRWLALLRAATSSLSLRLPASSAATLAALLSHYPFLAALTVVSAGTPVHDADAVLLAVAAAPAASRLSTLRLLPDWAVSPAALLTVCPALAGLTSLHLTAVRPLSFRWLKLLPRLKSFALVNSAATVDSAGSSSDDADGEAEDVAGHCRWRSCHFAASAPATAGLGAVAALRACDGTGDGPASLAFAGCHAGLLALELRACRAVADRVLLLAADHCRTLTSLLVYDGGGSEALHRFIQQRAAGLHTLDLRLPLDLHNDHLLAIGADSVHNATHGLASLRLQSCVLITGDGLRSLARTAAGAGIEELALVSCDVVEREPGLLTFLSQSMPRLRRLNLSYNETLNDKVIGAMLSSCRNLIDIRLRGCRGLTGGSLLSLLRHCGQSLEILDISRCPGIAVGNVELFAQRAARLNHVIIEESAMSEELKAIAQKKGMKVGSLPCEGGPF

SEQ ID NO: 62999 - protein, 132 aa, Zea mays
  Coding DNA Sequence Number=SeqID_21220
  Homolog annotation: Hit_ID=Q6QP51; Match level="QueryCoverage=66%, HitCoverage=37%, E-value=1e-07, Identity=43%"; Hit description =Putative growth-regulating factor 1
MAKLSLRRNSKLHLARPWALDLRRRSPPHPTLGLGPCLGLGRWSSPRPTPGLGLNLGLGRRNPPRPTPGLGLNLGLGRWSPPRPTQGSTSTSTSGRIASSLDPDLGLRRSLRLARSWARTDRTMGDTSLPYP

SEQ ID NO: 63000 - protein, 402 aa, Zea mays
  Coding DNA Sequence Number=SeqID_21221
  Gene Ontology: Mol. function=RNA-directed DNA polymerase activity; Cellular component=mitochondrion; Biological process=RNA-dependent DNA replication
  Homolog annotation: Hit_ID=Q8S463; Match level="QueryCoverage=95%, HitCoverage=20%, E-value=0.0, Identity=88%"; Hit description =Putative prpol
  Pfam annotation: Domain name=RnaseH; Domain location=198-325; Score= -1.5; E_value=7.9e-05; Accession=PF00075.14; Description=RNase H
MSCGSGRFISRLGERGLPPYRLLRKTECFTCTPEAEEALGNLKALLTNAPILVPPAAGEALLIYVAATTQVVSDAIVVERREEGHALPVQRPVYFISEVLSETKIRYPQIQKLLYAVILTRRKLRHYFESHPVTVVSSFPLGEIIQCREASGRIAKWAVEIMGEAISFAPQKAIKSQVLADFVAEWVDTQLPAAPIQPELWIMFFDGSLMKTGAGEGLLFISPLGKHLRYVLRLHFLTSNNVAEYEALVNGLRIAIELGVRCLDARGDSQLVIDQVMKNSHCRDPKMEAYCDEVRRLEDKFYGLELNHIARRYNETTDELAKIASGQTTVPPDVFSRDLHQPSVKTDNTPEPEKVSALPEAPSAQPEALSAPEGEALRVEEERNGVPPDRNWPPARGCSRAA

SEQ ID NO: 63001 - protein, 112 aa, Zea mays
  Coding DNA Sequence Number=SeqID_21222
MDPADAIAACLKERTLAERLATVWLMHRRHLELRRQSRLNHQDVVRRIFMCAYRVLSKRRRQRAVVGSSALTTASEVVSTLVHVEPVAPVIILSDDADGEIDWTTLMDDDDE

SEQ ID NO: 63002 - protein, 311 aa, Zea mays
  Coding DNA Sequence Number=SeqID_21223
  Homolog annotation: Hit_ID=Q8S237; Match level="QueryCoverage=94%, HitCoverage=54%, E-value=1e-79, Identity=54%"; Hit description =Lustrin A-like
  Subcellular localization annotation: CTP_CleavageSite=55; ConfidenceScore=5.23e-01
MSLAGRRKSSHAGAGAGAGAGALDASATKHATTSLRKGGRLPVYVASVFFFLCVVVMYGEDIRSLTIEPLTRVPAPAVPGTTGAGGRQVVVVPRRDISASEKPAAVLHRGEQEKPKKHAVTTTTTTTAPPVAVEKPQQKVVATAAAKSERNTAKKAAAKKKKKPRRQQRAAKKTVVPPALGVPETCDLSKGRWVFDNTSYPLYREEECEFLTSQVTCMKNGRRDDTYQKWRWQPKGCSMPRFDAKLFMERLRGKRFMFVGDSLNRNQWESMVCLVQSASPPGKKYVTWEGQRVVFHAWVRIVPAIVPFRLL

SEQ ID NO: 63003 - protein, 107 aa, Zea mays
  Coding DNA Sequence Number=SeqID_21224
  Subcellular localization annotation: CTP_CleavageSite=30; ConfidenceScore=5.00e-01
MQESLAGPPSQQNPPEGLPTLTTPLLPLPLSETAGSRVNAPDFKLPGPLTSVRSRSDDPELKKRKDMSDLISTAKREINGSRVVFYPRRMNTAAPPGSHGGDPAGDT

SEQ ID NO: 63004 - protein, 157 aa, Zea mays
  Coding DNA Sequence Number=SeqID_21225
  Homolog annotation: Hit_ID=Q69U93; Match level="QueryCoverage=32%, HitCoverage=13%, E-value=1e-13, Identity=73%"; Hit description =Putative biotin synthase
MGHFVNSMDPSNVGGVGDQGLEQHRLGRAPLAQGSFRAGEPVRRPGRLMEERPRRGSPLHQQQGSSLKKCPQIQKSATVYSSFNQDYWVQRRLFLLPSSIKIQHWIEEVMDKYVEASKKMNPASKSGARYNRSPGLPIVKGSPGRSSLQSGSTQRTD

SEQ ID NO: 63005 - protein, 528 aa, Zea mays
  Coding DNA Sequence Number=SeqID_21226
  Gene Ontology: Mol. function=protein binding; Cellular component =nucleus; Biological process=ubiquitin cycle
  Homolog annotation: Hit_ID=Q10C73; Match level="QueryCoverage=78%, HitCoverage=96%, E-value=0.0, Identity=86%"; Hit description=BTB/POZ domain containing protein, expressed
  Pfam annotation: Domain name=BTB; Domain location=305-434; Score =103.2; E_value=7.6e-28; Accession=PF00651.21; Description=BTBPOZ domain
  Pfam annotation: Domain name=MATH; Domain location=152-281; Score =65.2; E_value=2.1e-16; Accession=PF00917.16; Description=MATH domain
  Pfam module annotation: Pfam domain module=BTB::MATH; Domain location= 305-434::152-281
MFQPHNDQSNDNGDEEFIVALVALDIWGVRQVGFQEDPWRKLVSCFHPLPRFHFHPHLLALGKPSNPNPQSRPLLSPSPTLPRNLPLPNPSLSSLAAPLPMEDEDAGLGDGGEASPPHHAAASGDRARDLAASPTSSRSVTQTVNGSHRFVIQGYSLAKGMGVGKHIASDTFTVGGYQWAIYFYPDGKNPEDNSGYVSVFIALASDGTDVRALFELTLLDQSGKGKHKVHSHFDRSLESGPYTLKYRGSMWGYKRFFRRNALEQSDFLKDDCLKINCTVGVVVSTMDYSRPHSIEVPESDIGYHFGTLLDTLEGVDVIFSVAGEKFHAHKLVLAARSSFFRSEFFDHESDEEKNETGTGDEIKEIVIDDMDPVVFKAVLHFMYRDNLVNDDELMASSSDCSIFDSLAGKLMAAADKYELPRLRLLCESYLCKHVSVNSVATTLALADRYHAIELKSVCLKFAAENLSAVIRTEGFDYLKDNCPSLQSEILRTVAGCEEQCSSGVKSQSVWAQLSDGGDTSGRRVRPRV

SEQ ID NO: 63006 - protein, 325 aa, Zea mays
  Coding DNA Sequence Number=SeqID_21227
  Gene Ontology: Mol. function=electron carrier activity; Biological process=electron transport
  Homolog annotation: Hit_ID=Q84N07; Match level="QueryCoverage=25%, HitCoverage=23%, E-value=3e-35, Identity=84%"; Hit description =Replication factor C 38 kDa subunit
  Pfam annotation: Domain name=Chromo; Domain location=255-305; Score =42.4; E_value=1.6e-09; Accession=PF00385.14; Description='chromo' (CHRromatin Organisation MOd
  Pfam annotation: Domain name=Cu_bind_like; Domain location=27-108; Score=111.2; E_value=3e-30; Accession=PF02298.8; Description =Plastocyanin-like domain
  Pfam module annotation: Pfam domain module=Chromo::Cu_bind_like; Domain location=255-305::27-108
MAVIAAAALLPATASATTYMVGDESGWDVGPDYDAWASGKKFKVGDTLEFLYSEGSHNVVVVDAQSYEACAVPSNAPTLTSGDDSVELGQAGRWLFICGVEGHCDAGMKLAVDFSSSIGRNQAHGPPHFAAASRGGEDELAARMLWVDKYRPKTLDKVTVHDQVAQNLRKFVSEQDCPHLLFYGPSGSGKKTLILALIKQMFGAGAEKVKRENKTWKIDASIHDVFHVGTLKKFIGVPPIAPPALPHIHRGAVAPTPVRVERARLARDVRQLLVHWRGEPPESATWEDLDAFCEQFPDFQLEDELDLEEGIDVMWGHHYTRRRRA

SEQ ID NO: 63007 - protein, 67 aa, Zea mays
  Coding DNA Sequence Number=SeqID_21228
MDPKGKGKVTNEKEKEIPSNETPKGETIDSGSKTTDQAKDGGKKSFDVPSAREKVTEAEEPKARGEE

SEQ ID NO: 63008 - protein, 126 aa, Zea mays
  Coding DNA Sequence Number=SeqID_21229
MDSTNSIADKAIGRMQELSDKFFSVARETIRSGQGLTLFDATKLRVALEDIACILEQNSLVFQEYLDKVNNVNNHVDEYYVPSDLSSPPPPEADLGEDWDFADHFENLWGVEYDSDLMPSFSDNEF

SEQ ID NO: 63009 - protein, 138 aa, Zea mays
  Coding DNA Sequence Number=SeqID_21230
  Gene Ontology: Mol. function=phosphoric monoester hydrolase activity
  Homolog annotation: Hit_ID=Q6VEY3; Match level="QueryCoverage=91%, HitCoverage=28%, E-value=3e-26, Identity=51%"; Hit description=CTD -phosphatase-like protein
MVKLPALRMKRMFHGDDCANEFKIRTMKSMKVSHFHVSELEQSAMSNLSDKTPQDEPDPTIQLADQDIRVTEASGLHDLIGGKSMLEDLTSEVIDSPNSEGDSSANYDDNKSVLHAVNYVGKDSATLDLSEIQCCQGV

SEQ ID NO: 63010 - protein, 218 aa, Zea mays
  Coding DNA Sequence Number=SeqID_21231
  Homolog annotation: Hit_ID=Q5SN59; Match level="QueryCoverage=36%, HitCoverage=25%, E-value=6e-10, Identity=49%"; Hit description =Ribokinase-like
MRRKRSRGRERRLRSGRARGLRWAGGRISPVTAGGRAGGSRRSRLVGGRADLAGHIAAVLRIATVEACTERSRRGGWMADGRAARSRRFCGERADRAVAACTGGQARRLPSSAFISHRRRVFFSYTFRTAAENAPLPQIVVVGSADIYVEVHRSPLIGETAARAARAPTWPPAVRPTYLVARVGDDANGRLLEDALADAGGVAPTASRARPMRHRDTP

SEQ ID NO: 63011 - protein, 116 aa, Zea mays
  Coding DNA Sequence Number=SeqID_21232
  Subcellular localization annotation: CTP_CleavageSite=59; ConfidenceScore=5.35e-01
MALFNQSQLCLGAPDCPVVHRTVSDCPVSQRSAGPTVGCSIRARHVAKPTVGRGHKTVRCAPDNVWCANGSKAPTVGFAREGKKSAPDSVRWCTGLSGAPGDRRQELPSQIALNGS

SEQ ID NO: 63012 - protein, 171 aa, Zea mays
  Coding DNA Sequence Number=SeqID_21233
  Subcellular localization annotation: CTP_CleavageSite=42; ConfidenceScore=5.30e-01
MAPPWFLGGAAVPSWGVGGKPLAVRSTLCANDQRNNVFPMIRGGLVQSEGFGGTVKFELAGDQMRAILGGWVLDYPTELAVASIYRAQQRWPGIAVVTRGGRRRGSLLARVIGGKPRGIHSGDQRRAKAGCGDALEMPRHATQGRKAAVTGVHIRIHRGELCTVAGIFYWP

SEQ ID NO: 63013 - protein, 301 aa, Zea mays
  Coding DNA Sequence Number=SeqID_21234
MASRGSTRVVLCTRLGEQGVADAQGAGRSARGREEGSRARHQERAEEESERLSAPWGKEAGHGACAGWRARGGDLGWRERAAEQAAGREQEEDAREGESWGTGRRAAELEQSRLHGRGPGPLGEIRAGEERRESFPARSRPGMEFHGADYSARWRKVPARCGHGELGAPYRGRASSLGRRGAGRPGVEPEGRGYGKGEAPGRTSAAMGAGELAAGHSAIEQARLGVEERKSWATESSLPACRARRYGSGAQGMGDGIFHPRAAAGNIKRRDKERDGRCTYGIFEEELGVQAVEKSLGDLAR

SEQ ID NO: 63014 - protein, 71 aa, Zea mays
  Coding DNA Sequence Number=SeqID_21235
MAIHYQSITTQHRHSSDTSDQILLEEPESWKISCLTRNAYHPNVIYAKISCWDFTIALGYCYKEITSQHPV

SEQ ID NO: 63015 - protein, 102 aa, Zea mays
  Coding DNA Sequence Number=SeqID_21236
MALFSTVETCSVSTLNWCCLTVLLAGDPLILRLRSFHLFTLPLCHDSSVNQVLKSGEGDGVGVGMDGEASEASEAEVVAAAATAAEWRPESDRWLELPESAS

SEQ ID NO: 63016 - protein, 59 aa, Zea mays
  Coding DNA Sequence Number=SeqID_21237
MESKLRKMVNKFKTMSKLKMVAYIKGEMKKKIKRRKKASKSSKSKIAPSSAKRSTLRIF

SEQ ID NO: 63017 - protein, 153 aa, Zea mays
  Coding DNA Sequence Number=SeqID_21238
MGQKWAKCLHAKIAIIKFTLNDSHAKLNYTTFILEYEHRAEKHHELLLNNAQQRPPGYAPLPVYFNVHKSDNKKGFKKNFKNSTGPRKFNKRKFHKRGKGKGKGKPPPPKGNKVCTNVVNLTTVDNKLILPQDDETYDMIIEYLLKDPYGDLT

SEQ ID NO: 63018 - protein, 290 aa, Zea mays
  Coding DNA Sequence Number=SeqID_21239
MRSTREESSLPPMGLMRTDCHTIELGRKNGAVLLRSVEEDAPDKRVPPDSGSKRRPGASRVGRAWEIRYWAEARVRWDSLPTVRHGLEDPTSSSPRALHRFAREDPEEKLGGVVKLTGSSSCSEQQQGFGPMAAAQRWTNGGGCDKERRRVCVCAPTTNSRRPRTPDAELSDGGESPWRVGIRRAQLRTQRLMTMDRASPRAAAMRSTREESLPPMGLMRTDCHTIELGRKNGAVLLRSVEEDAPDKRVPPDSGSKRRPGASRVGRAWEIRYWAKARVRAQLLHVQFMKE

SEQ ID NO: 63019 - protein, 189 aa, Zea mays
  Coding DNA Sequence Number=SeqID_21240
MEDIIGQRTLAFTRWLLREGSEPFDQDRTEGGSEGVRGGSEPFDQDRTEGNQTGKDERLRVALTGGPGRVRRACAKQYPTVQAVRSRSDGGNQTGETDVCGVAPLLSTVVRSLESGQARARVALWSPELGREGEGATVNSMAGKGHESTGREGRTAVRRLRAGRRNSDRAKSVDHRVSTTDRCGRASAK

SEQ ID NO: 63020 - protein, 391 aa, Zea mays
  Coding DNA Sequence Number=SeqID_21241
  Gene Ontology: Mol. function=DNA binding; Cellular component=nucleus; Biological process=regulation of transcription
  Homolog annotation: Hit_ID=Q75HE5; Match level="QueryCoverage=79%, HitCoverage=98%, E-value=1e-131, Identity=74%"; Hit description =Putative NAC-domain protein
  Pfam annotation: Domain name=NAM; Domain location=96-222; Score =296.2; E_value=6e-86; Accession=PF02365.6; Description=No apical meristem (NAM) protein
MSVPAAATEKQVQCTGTRPQPALTPDSDGGTTRPRDGERSQSAKATHRFYPPIGVAAASIVGFSSIQIHRQQASKQAGAMGLPMRRERDAEAELNLPPGFRFHPTDDELVEHYLCRKAAGQRLPVPIIAEVDLYRFDPWDLPERALFGAREWYFFTPRDRKYPNGSRPNRAAGNGYWKATGADKPVAPRGRTLGIKKALVFYAGKAPRGVKTDWIMHEYRLADAGRAAAAKKGSLRLDDWVLCRLYNKKNEWEKMQLGKTAVAGVGATKEEAMDMATSHTHSHSQSHSHSWGETRTPESEIVDNDPFPELDSFPAFQDPAMMMTVPKEEQVDGCSAKSGNLFVDLSYDDIQGMYSGLDMLPPPGEDFYSSLFASPRVKGNQPAGAAGLGQF

SEQ ID NO: 63021 - protein, 610 aa, Zea mays
  Coding DNA Sequence Number=SeqID_21242
  Homolog annotation: Hit_ID=Q2QNL8; Match level="QueryCoverage=49%, HitCoverage=54%, E-value=2e-47, Identity=40%"; Hit description=PAPA -1-like conserved region family protein, expressed
  Pfam annotation: Domain name=PAPA-1; Domain location=445-530; Score =91.5; E_value=2.6e-24; Accession=PF04795.3; Description=PAPA-1-like conserved region
  Pfam annotation: Domain name=zf-HIT; Domain location=543-574; Score =49.3; E_value=1.3e-11; Accession=PF04438.6; Description=HIT zinc finger
  Pfam module annotation: Pfam domain module=PAPA-1::zf-HIT; Domain location=445-530::543-574
MEGRGNPPHTTTDAVIKKPRSVASRKPRSTEQLTYEYNGICPPSWSAPHDDDTGVGAGGHRRKELHLNSPEMKGSMAHRSDVPRKIRRDDRSGGDHDGHGRSSKAKDAAKHGSENVLALECTARNNGSPDNPQLVPRDDSMPCENRSRKVKLKVVSRTLHAKNGQDAGGSGIPATLDGSIHQYKQKGSLASLLWPPPCRHHPRERCHEARRAGAQEGAAEEIREGVALGERSQSNLNFGSILIMALQDSGGHTNKETHGNRVEGKHGNGHEIFPSSDLVRKSKRIPKKKTLDGDSDDEDGELRYLEKLKGAKVAPDPVNTSHKGYDFGDDALKKKKLSKLSRNKSTPYEVDDDFRMSRSGRDGRKKLNLGDDNEFIEEEESEMDETNGLKEPDSPQGVKIETPGLTTRQRALQGRGGNGESFIEFPDGLPAASSRKQKEKLSDMEIQAKKAEAALRRKMQVEKAEKEQQAEAMRKILGIDSEKKKEEKKLKEREEREKQARLEEYRKNCVQTVMGPTGTVITFPESMGLPSIFNSKPVSYPPPREKCAGPSCTNPYKYRHSKTLVPLCSLACYKAVEDRPPAQGSEGGGGQGSDAGQGTDAAQESAGKQA

SEQ ID NO: 63022 - protein, 108 aa, Zea mays
  Coding DNA Sequence Number=SeqID_21243
  Gene Ontology: Mol. function=oxidoreductase activity, acting on single donors with incorporation of molecular oxygen, incorporation of two atoms of oxygen; Cellular component=cytoplasm; Biological process=fatty acid biosynthetic
  Homolog annotation: Hit_ID=Q9LKL4; Match level="QueryCoverage=99%, HitCoverage=12%, E-value=5e-41, Identity=74%"; Hit description =Lipoxygenase
MAVPDPSSPYKVLLLLMEDYPYASDGLAVWHAIEQCVTEYLAIYYPNDGALQADVELQAWWKEAREVATPTSSLKDEPWWPKMRTTAELAKACATIVWIAENISSFTN

SEQ ID NO: 63023 - protein, 827 aa, Zea mays
  Coding DNA Sequence Number=SeqID_21244
  Gene Ontology: Mol. function=protein serine/threonine kinase activity; Cellular component=cell surface; Biological process =protein amino acid phosphorylation
  Homolog annotation: Hit_ID=Q8LQH1; Match level="QueryCoverage=96%, HitCoverage=95%, E-value=0.0, Identity=69%"; Hit description =Putative S-receptor kinase
  Pfam annotation: Domain name=B_lectin; Domain location=85-201; Score =137.3; E_value=4.1e-38; Accession=PF01453.15; Description=D-mannose binding lectin
  Pfam annotation: Domain name=PAN_1; Domain location=375-448; Score =10.0; E_value=0.016; Accession=PF00024.16; Description=PAN domain
  Pfam annotation: Domain name=PAN_2; Domain location=364-435; Score =92.0; E_value=1.8e-24; Accession=PF08276.2; Description=PAN-like domain
  Pfam annotation: Domain name=Pkinase; Domain location=522-792; Score =175.5; E_value=1.3e-49; Accession=PF00069.15; Description=Protein kinase domain
  Pfam annotation: Domain name=Pkinase_Tyr; Domain location=523-792; Score=109.5; E_value=1e-29; Accession=PF07714.7; Description=Protein tyrosine kinase
  Pfam annotation: Domain name=S_locus_glycop; Domain location=215-346; Score=155.9; E_value=1e-43; Accession=PF00954.11; Description=S-locus glycoprotein family
  Pfam module annotation: Pfam domain module=B_lectin::PAN_1::PAN _2::Pkinase::Pkinase_Tyr::S_locus_glycop; Domain location=85-201::375- 448::364-435::522-792::523-792::215-346
  Subcellular localization annotation: CTP_CleavageSite=4; ConfidenceScore=5.42e-01
MATRAGRLPTTPAPALLLLLAFPFLLQGVLPSRAGDTVAAGRPLSGGQSLVSKRGKFRLGFFRPGATDNSSQRWYLGIWYNQLSVHTTVWVANRGTPISDPESSQLSISKDGNMVVLDHSRSSTAVWSTNVTTGVSSTSTVGVIRDNGNLVLADASNTSAVLWQSFDHSGDTWLPGGKLGRNKRTGEVTRLVAWKGRDDPTPSLFALELDPRGSSQYLLNWNDSERYWTSGNWTGTAFAAVPEMTSTGASPVSDYTFGYVDGANESYFTYDVADESVVTRFQVDVTGQIQFLTWVAAAAQWVLFWSEPKRQCDVYAVCGPFGLCTENALPSCTCPRGFRERDLAEWMQDDHTAGCARNTALQPCGAGAAARDGQKRRRDDDRFYTMPDVRLPSDARSAAAASAHDCELACLRNCSCTAYSYSGGCSLWYGDLINLQDTTSAGSGTGGGSISIRLAASEFSSNGNTKKLVIGLVVAGSSFVAAVTAIVLATVLVLRNRRIKSLRTVQGSLVAFTYRDLQLVTNNFSEKLGGGAFGSVFKGVLPDATLVAVKKLEGVRQGEKQFRAEVSTIGTIQHVNLIRLLGFCSEGSRRLLVYEHMPSGSLDRHLFDRDQQPGVLSWDARYQIALGVARGLDYLHEKCRDCIIHCDIKPENILLDDAFVPRVADFGLAKLMGRDFSRVLTTMRGTVGYLAPEWIAGTAVTTKADVFSYGMMLFEIISGRRNVGQRADGTVDFFPSTAVNRLLDGDVRSAVDSQLGGNADVAEVERACKVACWCVQDAESLRPSMGMVVQVLEGLVDVNAPPVPRSLMVLADPSKYAVEFFSGLPST

SEQ ID NO: 63024 - protein, 86 aa, Zea mays
  Coding DNA Sequence Number=SeqID_21245
  Homolog annotation: Hit_ID=Q6YU42; Match level="QueryCoverage=60%, HitCoverage=8%, E-value=8e-10, Identity=61%"; Hit description =Calcineurin-related phosphoesterase-like protein
METRGKRLLFPVLLVLIAAAAAPSAMSRDEREVMEVSGAAPQLTDLHFSVHHAERAYDFRRYVGPAMAMVNPDLVPITGDLNWACQ

SEQ ID NO: 63025 - protein, 661 aa, Zea mays
  Coding DNA Sequence Number=SeqID_21246
  Homolog annotation: Hit_ID=Q6YVK6; Match level="QueryCoverage=45%, HitCoverage=83%, E-value=4e-86, Identity=48%"; Hit description =Putative pectin acetylesterase
  Pfam annotation: Domain name=PAE; Domain location=29-364; Score =498.8; E_value=6.1e-147; Accession=PF03283.4; Description =Pectinacetylesterase
  Subcellular localization annotation: CTP_CleavageSite=42; ConfidenceScore=5.08e-01
MATELLSPLIPHQQRRRALAVVVAAPLHALLLAAVAFSRSPVAAPASSSRLVDLTLLAGARGKGAVCLDGTPPGYHLRRGFGSGAHNWLVFLEGGGWCNTTQSCSERKMTNFGSSKYMGAVNFTGILSNDHTENPDFYNWNTVVIRYCDGASFAGDAEGGDLDGTKLFFRGLRIWKAVVDELMGKGMDAAKQALLTGCSAGSLAALLHCDNFHGRFPHEVSVKCLSDAGFFIDEKDLSGERSMRSLISGVVHLQCFFPAELIKGITTPTFILNSDYDSWQEWSSCKADIRNCSCAQLDVLHGFKKKLVSELKVAEDNKDWGLFIDSCFTHCQTPFDITWNSPISPRLGNKPSSRSFSASLLDAIYRSLDDGDGADVVVDVARGSVEEKAAAAATAQFWWTNKAAPKPCRQSSSTADRDRRRREAGVARPRHSGSGYASSSDSSAASYSSLSCSSASTVGIESTCRRHGPAPPRVSLSEESVATDTEEATPLPPKSKPKKKARPCFPVARIRPRASVPPPSSGPQPPSSPAKFACALKALFSSARLQRKPKAPAPARTTPPPKISQPPRMSTTSAAKAADAPQPSEPTTVRLHPEAEASVVRRRVEELVRGLEELEEDEEGSDASSDLFELESLRGAGADELPVYGTTSLVANCAIAQGPAR

SEQ ID NO: 63026 - protein, 204 aa, Zea mays
  Coding DNA Sequence Number=SeqID_21247
  Homolog annotation: Hit_ID=Q6XZ79; Match level="QueryCoverage=20%, HitCoverage=12%, E-value=1e-12, Identity=90%"; Hit description =Fructokinase-1
MCGEFDAATRRGQSVTVWLSADHGKARGSPSKGQGGLTYPPDEPDVELVGSEEHVGAGVAVEHELALAVGAQGDEGKRGAKYRMHVAKKCTCAHITSRSYILNRTLDGQLSASPWPNAKTLAPHSDTSAQLHVLTPRLQHSSQAPHSDGVKLIVGMSFESLEAVEEFYKSYAHGIGFSVRIGAQLKVLDVVERTRDFYVLGKDS

SEQ ID NO: 63027 - protein, 145 aa, Zea mays
  Coding DNA Sequence Number=SeqID_21248
  Homolog annotation: Hit_ID=Q5JLV3; Match level="QueryCoverage=19%, HitCoverage=14%, E-value=2e-08, Identity=89%"; Hit description=Zinc finger protein-like
VKASAEEAGRSILYDITLLVSSELKKSPPAFWLIVRLCHLLQESFLEMVRAEKLAGDGCSGGEGQVEVEVGMGMDGKGVTECRICQEEGKEAAMDSPCACTGAMDYHVVVPAETEMATLQFTGFFLPCYVIARSCYALQHRKRRQ

SEQ ID NO: 63028 - protein, 66 aa, Zea mays
  Coding DNA Sequence Number=SeqID_21249
MSQIRLVLLCNRIDLPASSAEALTSVEVLKRVFAVRVHVRCGKSAIPYSYLQKCSSCNSQLETVAV

SEQ ID NO: 63029 - protein, 212 aa, Zea mays
  Coding DNA Sequence Number=SeqID_21250
  Gene Ontology: Mol. function=fructokinase activity; Cellular component=cytoplasm; Biological process=carbohydrate metabolic process
  Homolog annotation: Hit_ID=Q6XZ79; Match level="QueryCoverage=88%, HitCoverage=58%, E-value=1e-100, Identity=97%"; Hit description =Fructokinase-1
HLPFALGVQAVQAVAKKASAAAVFHYGSISLIAEPCRTAHLRAMEIAKEAGALLSYDPNLREALWPSREEARTQILSIWDQADIVKVSEVELEFLTGINSVEDDVVMKLWRPTMKLLLVTLGDQGCKYYTRDFHGAVPSFKVQQVDTTGAGDAFVGALLRRIVKDPSSLQDEKKLVESIKFANACGAITATKKGAIPSLPTETEVLQLIEKA

SEQ ID NO: 63030 - protein, 75 aa, Zea mays
  Coding DNA Sequence Number=SeqID_21251
MTFTQSLMLGKALKIQQETKDAEYEAAISDLQGEVENIETPWRTRIYDYARKKLQRSRLRPKDNYVKQLWIKILV

SEQ ID NO: 63031 - protein, 83 aa, Zea mays
  Coding DNA Sequence Number=SeqID_21252
  Gene Ontology: Mol. function=enzyme inhibitor activity; Biological process=regulation of floral organ number
  Homolog annotation: Hit_ID=Q8GT95; Match level="QueryCoverage=70%, HitCoverage=17%, E-value=2e-10, Identity=45%"; Hit description =Polygalacturonase inhibitor 1 precursor
MASTTTTFLVVLLLVAASALLARSCSPHDLHKLLSVKQTLGNLVMSLTWTTLLPNCCAWDHLWCNDVEHVNNIFINNADDMRG

SEQ ID NO: 63032 - protein, 231 aa, Zea mays
  Coding DNA Sequence Number=SeqID_21253
  Gene Ontology: Mol. function=zinc ion binding; Cellular component =integral to membrane; Biological process=multicellular organismal development
  Homolog annotation: Hit_ID=Q6ZKF1; Match level="QueryCoverage=70%, HitCoverage=18%, E-value=4e-85, Identity=85%"; Hit description =Putative vacuolar protein sorting protein 18
  Pfam annotation: Domain name=Clathrin; Domain location=47-204; Score=- 16.1; E_value=0.078; Accession=PF00637.10; Description=Region in Clathrin and VPS
MIYGRVDELVYFAGLKEQYEIVVHHYIQYKFAPDLIMLDAYETVESWMMARNRLNPGKLIPAMMRYVSEPHAKNETHEVIKYLEFCVKDLNNVDPGVHNLLLSLYAKKEDESQLLQFLDTKFGKGQTNGPDFFYDPKYALRLCLQEKRMRACVRIYSMMSMHAEAVALALKVLCLCWKLRRRDNPAGCRRVPTSQTFIRKQTSYYKVIIRTAISPDLADWIRPYKTDPLPY

SEQ ID NO: 63033 - protein, 224 aa, Zea mays
  Coding DNA Sequence Number=SeqID_21254
  Gene Ontology: Mol. function=zinc ion binding; Cellular component =integral to membrane; Biological process=multicellular organismal development
  Homolog annotation: Hit_ID=Q6ZKF1; Match level="QueryCoverage=99%, HitCoverage=26%, E-value=1e-109, Identity=89%"; Hit description =Putative vacuolar protein sorting protein 18
MKSLGRSCGLRLLNMSSSKRKEEICKSLKDYNSQIEQLKQEMDDATRGADNIRSDIGALAQRYTVIDREQDCGVCRRKILTVGGLHQVGRSYTSVGHMAPFYVFPCGHAFHANCLIGHVTRCSNQVQAERILDLQKRLSLMDRKAAKDNGASVNGEPITSTTPVDKLRSQLDDAVASECPFCGDLMIKEISQPFILPQESDEKASWEIKPQPTPQKILPMTMSI

SEQ ID NO: 63034 - protein, 256 aa, Zea mays
  Coding DNA Sequence Number=SeqID_21255
  Gene Ontology: Mol. function=zinc ion binding; Cellular component =integral to membrane; Biological process=multicellular organismal development
  Homolog annotation: Hit_ID=Q6ZKF1; Match level="QueryCoverage=91%, HitCoverage=20%, E-value=4e-82, Identity=69%"; Hit description =Putative vacuolar protein sorting protein 18
  Pfam annotation: Domain name=Pep3_Vps18; Domain location=1-86; Score =18.6; E_value=1e-06; Accession=PF05131.5; Description=Pep3Vps18deep orange family
MVEELVVDDTPETSRGIIGLCSDPSTGLFYAYDESSIFQVSTSDEGCDMWQVYLDMNHYAAALSHCRNPFQRDQVYLVQADAAFAAKEYYIAASFYAKINYILSFEEISLKFISIGEQFMYSLSWHIRFYVAISKVNNRNYNNTKDALRTFLLRRLDNLTKEDKMQITMISTWATELYLDKINRLLLEDTTVTIINSVAEPNSSEYRSIVNEFRAFLSDSKDVLDEATTMKLLERVLFRTTGFVCNKSNANLNTCN

SEQ ID NO: 63035 - protein, 141 aa, Zea mays
  Coding DNA Sequence Number=SeqID_21256
MRRADLGSDRDEAIARGEHIVRGGVRGSGGAVALRVESGGEVGASEVGTVGEKENEWTTHQGGHGGDARSQEWRRRSWAWARTVEIDRRQNTQMAEPGEVGHAELATGGRFFYPRVGKVLVFDSLDYDLLSYTKFISILEL

SEQ ID NO: 63036 - protein, 82 aa, Zea mays
  Coding DNA Sequence Number=SeqID_21257
  Homolog annotation: Hit_ID=Q8H6I0; Match level="QueryCoverage=98%, HitCoverage=6%, E-value=8e-07, Identity=38%"; Hit description =Putative gag-pol polyprotein
MSGDDAKKMVIGGEKSATSHEKAPSGESANKVKGSPSHNKSRRSGDKKKKMRKVVYYETDSSSPSTSGSDTPSVTSKRHERK

SEQ ID NO: 63037 - protein, 86 aa, Zea mays
  Coding DNA Sequence Number=SeqID_21258
  Subcellular localization annotation: CTP_CleavageSite=27; ConfidenceScore=5.29e-01
MATLLRGAGGTSLPTALAVARSSSLARAVTAPPPDPPAQPLFSPSFLDAGGEARQIEGSAPGDAVASARRKEADVSARRELDPSRG

SEQ ID NO: 63038 - protein, 93 aa, Zea mays
  Coding DNA Sequence Number=SeqID_21259
  Subcellular localization annotation: CTP_CleavageSite=33; ConfidenceScore=5.14e-01
FPVLAPILFASRIDWLASRKFACDGFFPNRRARASADGSRVGGGERNFSGAVRDHAFARRDPPRRPDLNKHAPNAIVCSPPGMPLPCLRPVIA

SEQ ID NO: 63039 - protein, 418 aa, Zea mays
  Coding DNA Sequence Number=SeqID_21260
  Gene Ontology: Mol. function=sequence-specific DNA binding; Cellular component=nucleus; Biological process=regulation of transcription, DNA-dependent
  Homolog annotation: Hit_ID=Q6VBB5; Match level="QueryCoverage=94%, HitCoverage=58%, E-value=5e-83, Identity=46%"; Hit description=Heat shock factor RHSF2
  Pfam annotation: Domain name=HSF_DNA-bind; Domain location=35-289; Score=86.4; E_value=8.9e-23; Accession=PF00447.8; Description=HSF -type DNA-binding
MAAEHATAAVGEPPPATSQPAEGVTAAAGQRSVPTPFLSKTYQLVDDPAVDDIISWNDDGSAFIVWRPAEFARDLLPKYFKHNNFSSFVRQLNTYVSAPSRCIHRFVSVSYSLSVLCMSVSITLSAWRSLFVVIRGIPIPRVQGFRKIVPDRWEFANDCFRRGEKRLLCDIHRRKVSPATGAVTVAAAAAAIPMALPVGSPVYSGEEQVLSSSSPEPPSLQQHPPAPSGSGSGGVVSGDVGEENERLRRENARLARELGQMKKLCNNILLLMSKYAATQQPDAAKEAAAGNCTGESSDAAAAPPLPSILELLPSCRADPAPAAAGTDHEDDEKAGARLFGVSIGRKRMRDESDHHAGVCAAEVKAEPVDARPDQQRQRNATEPQSWPIYRPRPVYHPLRACNGSGSAGSDHDGSNDSR

SEQ ID NO: 63040 - protein, 254 aa, Zea mays
  Coding DNA Sequence Number=SeqID_21261
  Homolog annotation: Hit_ID=UPI0000DA43ED; Match level="QueryCoverage =46%, HitCoverage=94%, E-value=2e-08, Identity=34%"; Hit description =PREDICTED: similar to keratinocytes proline-rich protein
MAAPRATRPVALTLRQDRRHLWQAKQATLHLRHDDRVKKGTGKGDTPKGILLREGSGPRAPLLIRGSKTGPSEGFNSRLRVLGLRAHYWSEETPPRPTPGLGLSLGSGRRRTPPRPTPGLGLSLGSGRRRTPPHPTPGLGLSLGLRKTTNSASLDPRARTQARPRETTNSASPDPRARTQARPRKTTNSASPDPRARTQPWPRTTVSASPDPGLRLDLDLGRQSRPRPRRSLRLARPRAQTNHVTGGHHYPTPS

SEQ ID NO: 63041 - protein, 71 aa, Zea mays
  Coding DNA Sequence Number=SeqID_21262
  Homolog annotation: Hit_ID=Q1SDJ3; Match level="QueryCoverage=76%, HitCoverage=42%, E-value=6e-08, Identity=43%"; Hit description=GINS complex, Psf3 component
MDATIPFLFRQVSDKSIGLFLRYAFTSRYKEVLMFESARESMTGFKKWRAGGMRLQKASILGRKRKTKLPE

SEQ ID NO: 63042 - protein, 390 aa, Zea mays
  Coding DNA Sequence Number=SeqID_21263
  Gene Ontology: Mol. function=DNA binding; Cellular component =mitochondrion; Biological process=DNA integration
  Homolog annotation: Hit_ID=UPI00004C1731; Match level="QueryCoverage =96%, HitCoverage=29%, E-value=1e-165, Identity=72%"; Hit description= UPI00004C1731 related cluster
  Pfam annotation: Domain name=RnaseH; Domain location=8-124; Score= -20.3; E_value=0.0045; Accession=PF00075.14; Description=RNase H
  Pfam annotation: Domain name=rve; Domain location=115-301; Score =91.1; E_value=3.4e-24; Accession=PF00665.16; Description=Integrase core domain
  Pfam module annotation: Pfam domain module=RnaseH::rve; Domain location=8-124::115-301
MGEIIQCREASGAGAGLLFISPLGKHLRYVLRLHFPASNNVAEYEALVNGWRIAIELGVRRLDARGDSQLIIDQVMKNSHCRDLKMEAYCDEVRRLEDKFYGLELNHIARRYNETVDELAKIASGRTTVPPDVSSRDIHQPSVKIDDTSEPKETSAQPEKAPGGFSHLLVAIDKFSKWIEIRPLTSIRSEQAVAFFTNIIHRFGVPNSIITDNGMQFTRKKFLDFCENHHIRVDWTAVAHPMTNGQVERANGMILQGLKPRIYNDLNKFGKRWMKELPSVVWSLRTTPSRATGFSPFFLVYGAEAILPTDLEYGSPRTKAYDDRSNQTSREDSLDQLEEARDVALLHSVRYQQSLRRYHARGVRPRGFQVGDLVLRLRQDARGRHKLTPP

SEQ ID NO: 63043 - protein, 206 aa, Zea mays
  Coding DNA Sequence Number=SeqID_21264
  Gene Ontology: Mol. function=hydrogen ion transporting ATP synthase activity, rotational mechanism; Cellular component=proton -transporting two-sector ATPase complex; Biological process=ATP synthesis coupled proton transport
  Homolog annotation: Hit_ID=Q5KQI7; Match level="QueryCoverage=74%, HitCoverage=71%, E-value=2e-20, Identity=42%"; Hit description =Putative YLP
  Pfam annotation: Domain name=vATP-synt_E; Domain location=12-201; Score=-26.4; E_value=3.8e-05; Accession=PF01991.8; Description=ATP synthase (E31 kDa) subunit
MATGGGCCVARDRHGGALCRATCLETSAFVATAERSAATTCRPLLCCGSALRETEYSTELNAAHIKLLQDDVVTGMKESAGDALLRVTRTPTPTRGSSRAGPVLKGGKRSRRTGPPIWEGPQDSFNVEGLVEAVLEAAKKDYAEEQPRRARAILVLNDITLHYMMLPPLRKDGRIVCDNTLDARLSVSFRQKLPEIRKKLFSYQVS

SEQ ID NO: 63044 - protein, 103 aa, Zea mays
  Coding DNA Sequence Number=SeqID_21265
MADCPALASGEPCRLQAAGLAAGGEWRLTSHQLQAGVADCPALASGASVLPCWLSSGRLDVDGGLVGGGRPAAAGHWWRAVAARRPGGEPVTQQDGKRAATLG

SEQ ID NO: 63045 - protein, 121 aa, Zea mays
  Coding DNA Sequence Number=SeqID_21266
  Homolog annotation: Hit_ID=Q5QLZ3; Match level="QueryCoverage=57%, HitCoverage=12%, E-value=1e-25, Identity=75%"; Hit description =Gastric mucin-like protein
MEDLLGSEIGKNDYDWCSSYNKPPERLLEYNKQIRVFLSSTGSPDRESIRTKETLIELDIYGSSRYEAMLLSEDLRNTSWLHGFDDKPDQSPLFDHRFEPLPEPFSPVMTAAACKVQYDHH

SEQ ID NO: 63046 - protein, 113 aa, Zea mays
  Coding DNA Sequence Number=SeqID_21267
  Gene Ontology: Mol. function=small conjugating protein ligase activity; Cellular component=proteasome complex (sensu Eukaryota); Biological process=protein modification process
  Homolog annotation: Hit_ID=P35132; Match level="QueryCoverage=99%, HitCoverage=100%, E-value=9e-54, Identity=70%"; Hit description=SUMO- conjugating enzyme UBC9
  Pfam annotation: Domain name=UQ_con; Domain location=5-107; Score =131.6; E_value=2.2e-36; Accession=PF00179.16; Description=Ubiquitin -conjugating enzyme
MASKRILKELKDLQKDPPTSCSAGPAGEDMFHWQATIMGPPDSPYAGGVFLVNIHFPPDYPFKPPKVLLSICSLLTDPNPDDPLVPEIAHMYKTDRPKYESTARSWTQKYAMG

SEQ ID NO: 63047 - protein, 228 aa, Zea mays
  Coding DNA Sequence Number=SeqID_21268
  Homolog annotation: Hit_ID=Q6QP51; Match level="QueryCoverage=77%, HitCoverage=82%, E-value=9e-10, Identity=45%"; Hit description =Putative growth-regulating factor 1
MQAACNRTKGARPFDFDASSVEAQAHMSWTGKGDTPKGILLREGNGPRAPLLIRGSKAGPSEGFNCRLRALGLRTRYWSEAGPRRGSNSRLQTQKRGMTLGVPPEGGIEPSDPVKRRPAKSGLGRHRKLRLARPQGSDSASAPEDDELRLARPQGSDSASASEDDELRLARSQGSDSASASEDDKLRLARSQGSDSASAPEDDELRLARPQGSDSALASDDGLRLARP

SEQ ID NO: 63048 - protein, 93 aa, Zea mays
  Coding DNA Sequence Number=SeqID_21269
  Subcellular localization annotation: CTP_CleavageSite=52; ConfidenceScore=5.66e-01
MACGTLKRGGAPPAARRARLVASAQPARRDRPQRPMARQPLAMASCAPTLVSASSLARRLVAMRLMVLGIDSGNGEDEAVEGDFQEFQDYDEF

SEQ ID NO: 63049 - protein, 507 aa, Zea mays
  Coding DNA Sequence Number=SeqID_21270
MGESELEDTGSKASSNSNIQQKASALQEVEDENEANKMQENSVVSNSDVAEQALNGEDNSNNDSSAGVEEAGTKHLPVSSGEKVSDGRLEHSGVLNDKVEDDSTLHEKSEDDTMSEEVSVMESNLPNDARNLLNYCSFARVPTRPRTVLANRNVGPGQREITVSEQLNLVTSEEISNMAMDGEANTNSITSIEEGSKVELVGQDQEHAEQSAICNQVAESVAFHEKETRGETEEKEEQKNIPQHYEVEDNNETNELCPTFASQNNFNLQVEKGIQIYNLDTPPQDELLIDPPDKGKTVDSELLPNIKAEDAVTVEEEKIGQSSSFKIRDLNLVGSPEVVDMRGDPRLGQSSTAGCPVDLQDNQQVEFETALGNNPNNTDTCAPFLLGNKSVQVIDIEDDIPIEAGACDTSKSKGEMVYSSMESMMNPPPVNTDALHGIQDGYSLAISDYLGADMSCYQSIQAELQDGMDAKRSEGITVMDDPIYSSLSDIGFMEVWDQQPQDYEKFF

SEQ ID NO: 63050 - protein, 307 aa, Zea mays
  Coding DNA Sequence Number=SeqID_21271
  Gene Ontology: Mol. function=adenyl-nucleotide exchange factor activity; Cellular component=mitochondrion; Biological process =protein folding
  Homolog annotation: Hit_ID=Q7XQP9; Match level="QueryCoverage=92%, HitCoverage=87%, E-value=3e-82, Identity=61%"; Hit description=GrpE protein homolog
  Pfam annotation: Domain name=GrpE; Domain location=121-298; Score =99.3; E_value=1.1e-26; Accession=PF01025.9; Description=GrpE
  Subcellular localization annotation: CTP_CleavageSite=60; ConfidenceScore=5.85e-01
MAATFCAGPAASAAVNPSSAGCRPQNLTRAAVLSACWRPSRPTPAFVSLRRPNAELRPLRVAAGSGVDPKVRYFRLTFAVSVCSMTAATEVLQRMTDAYMNFVVNGEDFPPMKDLIQLYRTAFLEGNEEVLGVVEKAITAVEKEKSTIASQFESITTEITSGKEKFIRLNADLENFRKQTEKDRAKLTSNIRVEVVQSLLPLVDSFEKTNLENTPETEKEQKISASYQGIYKQLVETLRYLGVGVVETVGKPFDPSVHEAISREASMQFKAGIVMHEVRRGFHLKERLLRPATVKVSTGSGKQSASS

SEQ ID NO: 63051 - protein, 51 aa, Zea mays
  Coding DNA Sequence Number=SeqID_21272
MDPPSDPKPIMPLDEIVSDFEGVLAADSCLTAPAQDVDNSWLDSPLKAEKQ

SEQ ID NO: 63052 - protein, 96 aa, Zea mays
  Coding DNA Sequence Number=SeqID_21273
  Subcellular localization annotation: CTP_CleavageSite=56; ConfidenceScore=5.09e-01
MARGGRGRGIGQGRGLLTSTGKQQLQSMDEPSTRHGSSATRRSRASSDYAEFTCPKAARSREQREDTGDGREGEDSPRTAMCRDICFCAIWIWGGR

SEQ ID NO: 63053 - protein, 90 aa, Zea mays
  Coding DNA Sequence Number=SeqID_21274
  Subcellular localization annotation: CTP_CleavageSite=49; ConfidenceScore=5.26e-01
MACGALKCGGAPPAARRDRPHRPRARQPLAAASCAPTPLSASSLAWRLVAMRLMVLGIDSGNGCPHCNHCSGEDEAVEGDFQEFHDYDEF

SEQ ID NO: 63054 - protein, 776 aa, Zea mays
  Coding DNA Sequence Number=SeqID_21275
  Gene Ontology: Mol. function=aminoacyl-tRNA ligase activity; Cellular component=mitochondrion; Biological process=tRNA aminoacylation for protein translation
  Homolog annotation: Hit_ID=Q5ZDS6; Match level="QueryCoverage=91%, HitCoverage=80%, E-value=0.0, Identity=74%"; Hit description =Putative leucyl-tRNA synthetase
  Pfam annotation: Domain name=Anticodon_1; Domain location=629-738; Score=7.6; E_value=5.3e-06; Accession=PF08264.3; Description =Anticodon-binding domain
  Pfam annotation: Domain name=tRNA-synt_1; Domain location=2-549; Score=-299.2; E_value=9e-07; Accession=PF00133.12; Description=tRNA synthetases class I (I, L, M and V)
  Pfam module annotation: Pfam domain module=Anticodon_1::tRNA-synt_1; Domain location=629-738::2-549
LKSLGFSYDWDREISTTEPGYYKWTQWIFLQLLKRGLAYQGSVFMFLVLHFWFSMIFRLALISYNQAEVPVNWCPALGTVLANEEVVDGVSERGGYPVIRKEGHDLGATLLVYTTRPDTIFGATYLVVAPEHVLLSSLTSEEQRAHKWQVEEYRELSARKSELERTELQKEKTGVFSGSYAKNPATGEIIPIWVADYVLGSYGTGAIMAVPAHDSRDHEFAVKYELPIIKVVSPPNGNCDPVEAYEDDGIMINSSSSSSGLNINGMLSQDAAKKVTEWIENNGFGKKKVNYKLRDWLFARQRYWGEPFPVSYLDDTNEMVPLTEDDLPLTLPELDDFTPTEEFEYGCGEWVRTIDPSSGKPARRETSTMPQWAGSCWYYLRFMDPKNCSILVDKAKERYWGPVDIYVGGAEHSVLHLLYARFWHKVLYDMGVVSTKEPFKCLINQGLILGEIEYTAYRDNEGRWVSADSDSSLIDCYQEKVAPDKVTKVGDHYVLKDNPNIRLNARAYKMSKSRGNVINPDDVVSEYGADSLRLYEMFMGPLRDSKTWSTGGIEGVHRFLGRTWRLIVGPQLSDGSYNDGTMTTEDEPTLDQLRVLHRCIARYALAITRVCYNFQVHNKRKAGPSYNIQVTEEIQETRFNTAISAMMEFVNAAYKWETQPKSVIESFVLLLSPFAPHLAEELWFRLGHPQSLAYEQFPEAKSEYLEESKLVLPVQINGKTRGTILVDKACSEDDVFQIAASDEKLSKYLDGKGIRKKIYVPGRILNVILDQQKSRT

SEQ ID NO: 63055 - protein, 264 aa, Zea mays
  Coding DNA Sequence Number=SeqID_21276
  Gene Ontology: Mol. function=alanine-tRNA ligase activity; Cellular component=integral to membrane; Biological process=alanyl-tRNA aminoacylation
  Homolog annotation: Hit_ID=O57734; Match level="QueryCoverage=89%, HitCoverage=55%, E-value=2e-20, Identity=33%"; Hit description=404aa long hypothetical alanyl-tRNA synthetase
MAQEAAPARPVGPTRLVYFDDMGALHHSSATVLSVHQEEGGRVAVVLDATVFHPQGGGQPADTGVISAGGARFLVEDVRAKDGVVFHYGRFEGTEQGCGTVFKEGGTVSLQVDAERRSFNSRLHSAGHLLDICVHNVGLFHLEPGKGYHFPDGPFVEYKGIIPPDQIPVKKNELEREANRLISEGAKVLASVFPYEEAAILCGGSLPSYISKDSNPRIVKFGDNPGGPCGGTHVADISIINSLKMALMPPNLAYTETVRTDKRI

SEQ ID NO: 63056 - protein, 106 aa, Zea mays
  Coding DNA Sequence Number=SeqID_21277
MEVNLKNELPYYGLIHLKMQSTEHIDLLSNRCWSGLHYWGKTVGARRRSHLSATGAARAPSRLVGLASVVVGHGWKGAKCSTNLGIERGAGAGMWRERSRTVAEPW

SEQ ID NO: 63057 - protein, 246 aa, Zea mays
  Coding DNA Sequence Number=SeqID_21278
  Gene Ontology: Mol. function=transferase activity
  Homolog annotation: Hit_ID=Q6Z0Z4; Match level="QueryCoverage=93%, HitCoverage=46%, E-value=1e-50, Identity=44%"; Hit description =Putative HGA1
  Pfam annotation: Domain name=DUF563; Domain location=2-107; Score= -95.9; E_value=0.0038; Accession=PF04577.5; Description=Protein of unknown function (DUF563)
MSRGSSSGGVLCYPHVILGLEFHKEMSVDAARTAGGGEYSMADFTLLARRSYGLPRDKAIRVHGRGGGGVRPRLLLISRKSTRAFTNAGSIARAAASLGYEVVVGEPARHADLASFARVVNSCDVLVGVHGAGLANLVFLPAGAVVVQVVPLGGLDAMAADDFGAPARDAGLRYVHYGIAEAESTLATRYPRDHRVLRDPAAVRSEGWMALRAAYLVGQNVTIDVRRFSGALRRAMELLRQTHDHE

SEQ ID NO: 63058 - protein, 183 aa, Zea mays
  Coding DNA Sequence Number=SeqID_21279
MACEKKPVSSFTVRLGLALLAGCVLVAMISLAAMFRHDAVPLQTLSLLFSVGPVSSVMWGEERLGSHRFGRNRVPVLCDFSSSRSDVCELRGDVRVLPNATIVLHHPLARRQSWRMKPHGRKNDRHALARVTEVTVTVATASASPHHTSGAAAAAAPRCTANHTAPAVVFSVGGYAGETCSTT

SEQ ID NO: 63059 - protein, 75 aa, Zea mays
  Coding DNA Sequence Number=SeqID_21280
MKLWKETSRSSKTSTSSRRGLAATPSRLPVKAAVIYVSFPHFDLLNKNDIILQVYLRLEGGKEYKRDAKANAKST

SEQ ID NO: 63060 - protein, 152 aa, Zea mays
  Coding DNA Sequence Number=SeqID_21281
GRLGDSRTASRAWQGRESTVAELRQRTGERGPSEPKELGTNWKMSHPAGDEAELTEATGATETQRRPWNKRWTTANGGGAPWARAQSEREGEGARLKAQLSGGGRVNEGGIKKRLGRVGAWPEITRSWARPRRRSRAVRGDSADRWTPRARE

SEQ ID NO: 63061 - protein, 79 aa, Zea mays
  Coding DNA Sequence Number=SeqID_21282
MVVLGAFFFRRSSKTWLTISYEHVIKYYMSFVTRKGVVRRSKLCYVDARRRRKKKVLFKLLSANDNIIPVTFVNLACNI

SEQ ID NO: 63062 - protein, 93 aa, Zea mays
  Coding DNA Sequence Number=SeqID_21283
MAGGRDVAGAKEGRLASKALGARPHVGRAGHAPGVGESAAREGCRAAAAAAQGHHAGAVVAQGCRAQEKEGWGKEGEGGIYQGHDERQQPQLL

SEQ ID NO: 63063 - protein, 247 aa, Zea mays
  Coding DNA Sequence Number=SeqID_21284
MVKTNNVTPSGEEMIRTLLALSDMTRARQYILSSRGQEKRQLDIATRATVAAAVAADQAEQGCSLRIASDQIAFRVHRLSSLARSTPARFDPSDPVTTPPSSTMSAPAPLEPSTTPNAPTFSTTLDSTSRAPASAPPIPPPRFCDRDETEATLDASRHQFGFYRPAPKDTAPALVDPPALDFKDEDDAIRQFEDQGATADISSDDEDLGILPPPPVPPRSHDHEASGSSAAPPAAPPAIDPALAAIL

SEQ ID NO: 63064 - protein, 240 aa, Zea mays
  Coding DNA Sequence Number=SeqID_21285
  Homolog annotation: Hit_ID=Q94KM3; Match level="QueryCoverage=34%, HitCoverage=40%, E-value=1e-26, Identity=66%"; Hit description=MURB -like protein hMURB17
  Pfam annotation: Domain name=Zea_mays_MuDR; Domain location=103-240; Score=104.3; E_value=3.5e-28; Accession=PF05928.2; Description=Zea mays MURB-like protein (MuDR)
  Subcellular localization annotation: CTP_CleavageSite=21; ConfidenceScore=5.42e-01
MAFSPLSRFLFPLLSRSYSARSFGAASSFVLTMLLTSCTTSIYIRRYLFTCYNWKTLLNHVFEDLRRTKAPNSDLAVTFLHPFSLLARSLFQHGETLATASSMDRVPLVEVVADVYDDTRAAAVATAEAHSTTIIAEKEAIAAVNDEALDNVDLKYHVSIKNSLRYAIQEMRRQSTLLHIIDSICSSILEVEGGKIGKFVGHLDHVCKMLEKNSIVCQQDLDNKCSSWDLFDPLRMLMNY

SEQ ID NO: 63065 - protein, 126 aa, Zea mays
  Coding DNA Sequence Number=SeqID_21286
  Homolog annotation: Hit_ID=Q5GAV3; Match level="QueryCoverage=76%, HitCoverage=6%, E-value=2e-10, Identity=42%"; Hit description =Putative integral membrane protein
MEEDTPASIREQQRGLGAPRMPGVGAEKGPGGSSKPDKDLHLGNFRTHTIYVRLEPFNGRIHAGTSIVEQLQCRLEGTDAGAHISLNLTQTTFHSGVRSSQMCFHIGTKGRQELKDRSGRVRRRGL

SEQ ID NO: 63066 - protein, 288 aa, Zea mays
  Coding DNA Sequence Number=SeqID_21287
  Gene Ontology: Mol. function=acyltransferase activity; Cellular component=integral to membrane; Biological process=metabolic process
  Homolog annotation: Hit_ID=Q75IG9; Match level="QueryCoverage=85%, HitCoverage=44%, E-value=2e-30, Identity=37%"; Hit description =Putative phospholipid/glycerol acyltransferase
  Subcellular localization annotation: CTP_CleavageSite=30; ConfidenceScore=5.10e-01
MAMKSSSLCNPFVSLFFFLLRKLAGHRYHRGRMAVPTKPSPPPPPLPTLDMLHGQTLVVDVEAWILRPPVSAFPYFMLVAVEAGGFLRGLLLLLLYPLMLLLLGDGARAKAMATVALVGLEEKEVARVGRAVLPKFFLEATAAEGVAAVQAAARVVAVTATFPRVMVDGFLREYVGVDAVVGPEVRSVGGVLAGLMDDEDADEVAAKTLRAVFGDDLEAARKKGAVGLVGPASSGRVHYLLCPYYCKREEPGRQYDGRKGSIRWYILTLYGAIYSGQSQTLVERPETF

SEQ ID NO: 63067 - protein, 45 aa, Zea mays
  Coding DNA Sequence Number=SeqID_21288
MTLGSSGAGSSVVVRIEFFHWLSLCLKADSGSIWHICAAMVLSSV

SEQ ID NO: 63068 - protein, 50 aa, Zea mays
  Coding DNA Sequence Number=SeqID_21289
  Subcellular localization annotation: CTP_CleavageSite=38; ConfidenceScore=5.15e-01
MSTPPVSTSLMGGSIRRLSTTSKRSKITPPKFATQAIRDGVFEEPLRVPP

SEQ ID NO: 63069 - protein, 108 aa, Zea mays
  Coding DNA Sequence Number=SeqID_21290
MVRIQITFKTGCDSGKGGSVGGIMPSDVLGVAKTLHGERACGSFLLCGRSSVAASSSCPEEGYHPKALLVVGEGRGFCGEGWAHNSISSRASVVEWSGSFGRHGRSSS

SEQ ID NO: 63070 - protein, 275 aa, Zea mays
  Coding DNA Sequence Number=SeqID_21291
MTEGGVQEVKSEARKMLRLCEAARRTAGRGPTPEMREASSPSKLAGRARGDGSTQHRGEDASGGLKTGDHRGEVKSRVVAVCGEEVGCACVNAGVEEGGGGRGLPSSGVSRHGVCSKVGTAADMTRLGARPTRSATVGRGLQGGVTDVGVGRGAVCTGAQPPGAAWSRGEFGWVEVAGAARSRSSSVGLREGVAVGRAPLPPRDAPPPREEGDSGARAKQARDGVAAVREEEEGRVRPGGGPRLGVVEAGGCGWEEKREKIGSGTKLENETLNPN

SEQ ID NO: 63071 - protein, 483 aa, Zea mays
  Coding DNA Sequence Number=SeqID_21292
  Homolog annotation: Hit_ID=Q33AP3; Match level="QueryCoverage=99%, HitCoverage=65%, E-value=1e-112, Identity=62%"; Hit description =Phosphatidylinositolglycan class O, putative, expressed
MGKRFASALCSSIGRVNPELYALSIGTWVNQRRGTNACTSQDDLEAWMGRYAEVLCVNCWQVKRYIDQYSATSVIGFPSEDLQHIMDLYSRAQENWSASLITSSSETCSQEKVEKGSVLLQQIDAYNDFLKSFAKLARSAWTEFDLWSMGIGLLLMMLSVIIQASMLNFVFLLLNIFTRFGIEVGMSKQLPAPTITKDHPVSVIYKILGANSCNILLELFPIISLAFVAYIMLKCLSRAICQRFLKFFLLCGTMVSYLSIAFHWASETTLFAHAGTVQEFGRSLAPRIVYTIGGLSLAISAFSRIFGSTVHLKLNKRIIILSAVMLCSWSPTILILLGRQGPFVALICMTGGHWCTFDGLRYGAAFIGFDHFHIIRQGLLLSIDTFGISHVLPILSLPLIAIVWYNTISKDNELKDVILNNINKVLLMYGLITTITATLTIICVAIQRRHLMVWGLFAPKYVFDAIGLLLTDLLICLASIYYS

SEQ ID NO: 63072 - protein, 412 aa, Zea mays
  Coding DNA Sequence Number=SeqID_21293
  Gene Ontology: Mol. function=GTP binding; Cellular component =intracellular
  Homolog annotation: Hit_ID=Q84TX8; Match level="QueryCoverage=93%, HitCoverage=81%, E-value=4e-78, Identity=42%"; Hit description =Putative GTP-binding protein
MTQAKPAPSGKRNWSSGGTAAGRKNKERGDDKAKGIRVAGWNKGDKKKEDKGRQVSAGSKRRWSEGVPRVGVKRAVSGFDRRKRKIDDDSWDDDGGKDVSSSKSKFTRKCSSTISRRKVSPGKGDRLKSQTLYEDDYRAGKRSISKVSDVSRGVKNRLVNSVASKGKKLGASEGVIRTKKGGAKEVDLDEEAVNSKKSDDLDLIIEEEKPRPRLTRVLDQTGKKIKPAKKVVVPDNEERAPPKKRKRMKLDPYDTSNKRIEDSSIQDEKVLVNCTPEEETEMSINAKFRAIQPSSSILSYVEDNLLGRRRLIEIKNAGYNVKISAPLDNVPFSTSTERERIEDITINFFQLASKLCLVDLPGYGFAYAKDEVKESWEELVKEYVSTRVGLERVPRYVNALTSPPPQALSASV

SEQ ID NO: 63073 - protein, 90 aa, Zea mays
  Coding DNA Sequence Number=SeqID_21294
MAGGDQSSQDSRSALSELFTCSIVYAAVICHQKFREQILVENLLVHGAIAALLSICKMKNKPVNLRKTLANLRVVDDECQKKGAVDAANV

SEQ ID NO: 63074 - protein, 122 aa, Zea mays
  Coding DNA Sequence Number=SeqID_21295
  Homolog annotation: Hit_ID=Q10BI2; Match level="QueryCoverage=98%, HitCoverage=99%, E-value=2e-23, Identity=62%"; Hit description =Expressed protein
  Pfam annotation: Domain name=DUF567; Domain location=9-114; Score= -5.7; E_value=0.00032; Accession=PF04525.3; Description=Protein of unknown function (DUF567)
  Subcellular localization annotation: CTP_CleavageSite=87; ConfidenceScore=5.06e-01
MDTEAVPALAVVDARFCAAGAATLAVAKALSMSGSDFAVTDAATGAPVLRVDGVLFSLRRRCVLVDADRRPVLTVQESIDRRFSVVSALLGKNSYSVTVNPGIDYAFVVALVVILDEMHYQR

SEQ ID NO: 63075 - protein, 55 aa, Zea mays
  Coding DNA Sequence Number=SeqID_21296
MGMAAPRAPLPLPQLLLLLVAALLAAAPLPRAARADEFDVRRHLSTVTRSLSANA

SEQ ID NO: 63076 - protein, 1954 aa, Zea mays
  Coding DNA Sequence Number=SeqID_21297
  Gene Ontology: Mol. function=actin binding; Cellular component =cytoskeleton
  Homolog annotation: Hit_ID=Q84TX2; Match level="QueryCoverage=95%, HitCoverage=90%, E-value=0.0, Identity=42%"; Hit description=SCAR -like protein 1
  Pfam annotation: Domain name=WH2; Domain location=1857-1875; Score =17.6; E_value=0.044; Accession=PF02205.10; Description=WH2 motif
MAVHRNRCGFDGDQLALGKLQQSFLQELSCWVLARARHLQGVEDDLRRKKAMRWRKGATLESLLTANSESQITPKDRTSRKVPPRTTKLKSRQPRSPDHKTTSRILREHLQEVILSQKKIISRYSVRHYYVKFGSPDSSETAPPFGEMDSFGALVQSSGKLDLTKVVPVNESDAVDTKSEPIDGSAYLELGDKRNLGKQHEPFQQNGMVHSSEKLPDCPYLDIGESNNRSHLTCEEKPRLAEVPADQKDVDGRRPDDIVSDQDNFIGASNDTDMENKEGLQMKTECDPSASVELVELNRHNKEGDKVLYAEPPEVGPAIDSSLGLDNASSGEEPTCVDLPLSSDSAPTVSATNGPNSGSQSGRQMNGVDWSTDEESSNDVDLIDEAIHSLSDDHAGAIHNSDEQSPNTSSNWDDMAIGCNNYTEKVHHPVEHVQDVVLDDISMILSKPNDVSEDEDKISSGNADDLSLHPTKLNQEEIQELKTESEEGRSLESGSSPSKASLPNKDHVSMNDVEADTVTIPKETVADTAPTGLDPDGIDERQDGVAPKYSSIHNSVLYESYDDKIAEDTHSLLDDGLSTTFDDDKHVAEDHQFVVLEQRTCPTSLNTCKDDSMQGCAVARDFTDAEKLPGVVSGVLASQLETESHVGETLASTSYAFSDDTEALEIGVPLAPGTSFLPNTSSSLVEKHELTETEEIAEVGEFVVAKESTTSVFAVDVVPPKEFIDANIHPEKVEVLATSLTEEATRLDLQLQSPSREVLETTEAIHRNFGAVDESREDISKKSMLQTDNSPLIVETTSEKCSDRDGDTQFLVKSDYQEELLKEGSHNAEDRSLCDLNKDGAVTLKSNAVEKQPVNAGQDLAWGMHAQDSSSTNPFLDPAYLMSHTQIYSSSSMSSQPCFPEEEDFLSELVIQHDNMGVTADALWEPATPPDDAPLPSEIMTEDDFRSFCQEYHEIDFSSVTNCSHSEPASDSNKIPNAFLIRESDFPCYNSALPVKLDQEACIHSKFCSECVEYSCAVERQGTTSMVVSGKEDRVGKDETPGVDFHLNFLEFSNDNRSPELNMLSVPVDLRQELHGLPEVDSRDSSPLLHKEKTSEECCFSLSNNVVEVKQELEIRADLVPHSSINEKVDGLDEAVPVEPEAHACALDEYDNQDVPHISTSEKNETLTLGKPVLVQGPEVCAFGGFECDPPIIPSPSVDETKDNLEVRMNMILQSFHHSLRTSFQAEQKSECYTSGEHDSQTVPFPLHDENINELDDPPLSNADELDRESKACVPHECDAQIAPCSTDEDIHELDHPPLSSPALVDLESEDHVSDDRDSEVTPCLVKDKIDESVDAQPNLLPGELEQETHAPPELDFRVAPQSAKESDCSTEFDSQAAPCSSNIPVLANTTVSTCISAMPSSEETYQLSPVPPPTVQFQNDSYKDPQALLADSYKDPQAPPPLPPLQWRLGKPRLGLLSRKGCMTEPARVIDPVLQISSQEMDIRPGLLDPTDRSIEPVSCQEIKEDRCESSLIDHNDQNVDFDRLSTRVAVTDVARTEHRLSLETSEDIKQQGHISSSATGVGEHLDAGFTSTMADEEHLDDSGMTHGTALYLSDPLFPLPTYELQDPQPDTRENSEHPSQTHGAASGDDKSMDAVGSMESTLTKGHVSGNRCYQQPQHGESSSETSDHKEHITNASEDGVKHQSGTSEAPSDTAKHSAPGTLLKGNVQESQILQEHNVGSSEDDQPGGLLYSLEPVAPQGENKNQVNNPGLLLEWPGDTSELVTGLEKSCYAHAEQPPVMGWTVGPQMLHPKYGILEEESQFEPNIADNHLIRKPISIKNIPRNPLVDAVAAHDRSSMRKVSELAPPTDKPKPNERNMLLEQIRNKTFSLKPVAPAQQTAMRSPARTSTRNLKVAAIIEKANAIRQYQRRLALETTELAPPVVVSYTFDSPRTKTLRVSAWVSLVPDRARRR

SEQ ID NO: 63077 - protein, 201 aa, Zea mays
  Coding DNA Sequence Number=SeqID_21298
  Gene Ontology: Mol. function=actin binding; Cellular component =cytoskeleton
  Homolog annotation: Hit_ID=Q84TX2; Match level="QueryCoverage=98%, HitCoverage=7%, E-value=9e-64, Identity=65%"; Hit description=SCAR -like protein 1
MAGLVGVLPPARGILAEVSGAAALPIRFNVLIKVLYRFAAEIFHDLHEEAMATASRGHGLMLRLQQLEAEFPAVEKAIISQTEHSNYPHDDGAEWHSNVQLKQNVITQGDMPRFIMDSYEECRGPPQLFTLDKYGAVVFCEHLLCAKGHLAELVRFDVAGAGASLKRYSDPSFFKTEHASNMIEADVLIENKPRRIKQFKI

SEQ ID NO: 63078 - protein, 89 aa, Zea mays
  Coding DNA Sequence Number=SeqID_21299
MARKSTQRLSFFVLKIDRCYTVRGLGQTRGEWYHRKLRGPAHPPTAQAAPRQTPNSGDQFLSPRPPILPKSMLPYVEEGEGLEENLTRL

SEQ ID NO: 63079 - protein, 71 aa, Zea mays
  Coding DNA Sequence Number=SeqID_21300
MRCLCVVHQFKRQFAHLEEHHSEKEKEVLHCKESMLLYQGTTAIKLNIIWLEPEMAETLRNHGATVHRSLV

SEQ ID NO: 63080 - protein, 231 aa, Zea mays
  Coding DNA Sequence Number=SeqID_21301
MTEHALVVYYDVQKRVKILANQPKSYYEERAAVLLVFGTYVEEVVTQTLPVAEPKIRSPVLTKEEKETKEEVVEVPTQDEVPLSSLEPKPEAQPKPEAHPKPKSSSDGTPQKGKRMTNILKVVLKPTKVLLPAAPKTIGPPHNTHVVESAKAELAAEVVDSPTINLNLDKAGASKTYIIADALNEKEREEAKGSKAEGSKEETTMMAVEVVPPRRHEYIIRHASRGKLTAT

SEQ ID NO: 63081 - protein, 115 aa, Zea mays
  Coding DNA Sequence Number=SeqID_21302
MARSRWPVTDDVGANGRSSRRGGEGGAGVGRSEKAAGGRPTGQVAPWAVAAMEAPAGWALARLHLYLRIYEVYMKKREVQLRRARVKALLWFWCLDDNSIKGLTRVLSVEQDVGS

SEQ ID NO: 63082 - protein, 249 aa, Zea mays
  Coding DNA Sequence Number=SeqID_21303
  Gene Ontology: Mol. function=transferase activity, transferring hexosyl groups; Cellular component=integral to membrane
  Homolog annotation: Hit_ID=Q6C4K9; Match level="QueryCoverage=43%, HitCoverage=31%, E-value=7e-07, Identity=28%"; Hit description =Similar to CA4367|CaMNN10 Candida albicans galactosyltransferase
  Pfam annotation: Domain name=Glyco_transf_34; Domain location=76-248; Score=-73.2; E_value=0.0041; Accession=PF05637.3; Description =galactosyl transferase GMA12MNN10 family
MAMRSRPRRSAGHLYHLRLPRLLFLLPFALLLILLARLPALLRRANAHGRQCMPAATDRPIPFPHPVPDPRLSLAIVTLADEDAGGPGRAPVLPRRAGGIRAEQTRLRGSARDTLVTNPEIPLERILFSVIGHNNFVESPDLVLTEDFGGVNAGVFFIRRSKWSEKFLDTWWNQTSFIQFGSTRSGDNAALKHLIDHLSAEEMQEHVRIVKMQCLFNSYPWILTLKSVHRLIFHLPTTWKGSTFSRSLY

SEQ ID NO: 63083 - protein, 127 aa, Zea mays
  Coding DNA Sequence Number=SeqID_21304
  Gene Ontology: Mol. function=hydrolase activity; Biological process =metabolic process
  Homolog annotation: Hit_ID=O82790; Match level="QueryCoverage=91%, HitCoverage=43%, E-value=1e-31, Identity=58%"; Hit description =Expressed protein
FCSVGNAECLSSTDHLLVVFQSRFAEALLKELAGIDFPSERIYGLGTGPKVKVLQQLQQMLQHQGLKLHFIEDRLATLKKVIKEPALDNWNLYLVKWGYNTQKEREETEAIPRIQLIDLPDFSRQLK

SEQ ID NO: 63084 - protein, 168 aa, Zea mays
  Coding DNA Sequence Number=SeqID_21305
  Subcellular localization annotation: CTP_CleavageSite=9; ConfidenceScore=5.06e-01
MSGLDASARASSRTSCGPVFATHGPVDPTYAMCGPTTMPYMTLLTGAAHFADTAFIYHCRGHNTPTLLADPGPSTSKAFFAHLAVVYPRREQAMPVPPDAPAAHTKPAVYHRVTIHRDLGHVHPMVTRHATDILRPINWLILAADTTASPPDASLVPSSVCTTLADPH

SEQ ID NO: 63085 - protein, 38 aa, Zea mays
  Coding DNA Sequence Number=SeqID_21306
MAGDLYATKPDKNYPLDLFYTKYLMTSKNRNLRTVTPI

SEQ ID NO: 63086 - protein, 155 aa, Zea mays
  Coding DNA Sequence Number=SeqID_21307
  Homolog annotation: Hit_ID=O82790; Match level="QueryCoverage=32%, HitCoverage=19%, E-value=7e-20, Identity=86%"; Hit description =Expressed protein
MAGVRLVGVRPSPGRLERWVGSLPDAGSRGGRPTLPIRGVRSYFIRSIPPLGRVERGVRKARTSRPAMGGDLYALDFDGVLCDSCGESSLSAIKAAKVRWPSLFEQVDAAMEEWIVEQMYTSDGIGGRVVCAGGLTDTPYVGGRVPTIGIEARLT

SEQ ID NO: 63087 - protein, 75 aa, Zea mays
  Coding DNA Sequence Number=SeqID_21308
NWGVVRFAVMPLMGLGVTLPRLVRPLREECGGDEDDGFGYDYGTGDRVCEELLPCAPTGGAPYTTTERPSHWSSY

SEQ ID NO: 63088 - protein, 129 aa, Zea mays
  Coding DNA Sequence Number=SeqID_21309
MARREGAMGGCIGFQQWGKPPSTMDPRGMKALLLKSLGREFGEAKAQLGAPSTHLPRAQLGLRAPAMPSSSSAALLQLAMVVASLLTSTSLDCALWHSLAEQLPHAAPLVKIVPMASLGLQLLLAPAHW

SEQ ID NO: 63089 - protein, 79 aa, Zea mays
  Coding DNA Sequence Number=SeqID_21310
MGKTTQHRGPRGMNVLLLRSLGRELGEAKGKGALEVWHLGRMPWKEQETELGFCDHGNVVEPWRNKCRAEAMTGDRRCA

SEQ ID NO: 63090 - protein, 130 aa, Zea mays
  Coding DNA Sequence Number=SeqID_21311
  Gene Ontology: Mol. function=methyltransferase activity; Cellular component=cytoplasm; Biological process=tRNA processing
  Homolog annotation: Hit_ID=Q5VNJ0; Match level="QueryCoverage=62%, HitCoverage=14%, E-value=1e-32, Identity=80%"; Hit description =Putative tRNA-(N1G37) methyltransferase
  Pfam annotation: Domain name=Met_10; Domain location=3-130; Score= -7.3; E_value=4e-10; Accession=PF02475.7; Description=Met-10+ like -protein
MGEDMEDICVGKAPSWRWTLERACYWNSRLATERQRLVNIFRNLDVVCDMFSGVGPLAISAAKKVKYVYANDINPNAVGYLERNMVLNKLEKKIEVFNMDARRFLTWMLEGGFPFPSLLAKFLHCNWNLY

SEQ ID NO: 63091 - protein, 121 aa, Zea mays
  Coding DNA Sequence Number=SeqID_21312
MFIQELLHDDTKSCWSLVEFDVSQSWTWNSKHSARTTPELKSTSIDGRNLLESLKMELDKGKIDDVVSYGTKAHCILFTESQVAANQWEFRSHLQILVDQESPNNSYQEFKMLTFQIRRLR

SEQ ID NO: 63092 - protein, 156 aa, Zea mays
  Coding DNA Sequence Number=SeqID_21313
MAAKVNGTGTGNNMFDSDNDSENYCNESESDYEHESEYNSEHENENSKAMNHEVDTLTRSNNEEGRENSEGAFEEENTRENMVFKKKHALFKGDRQSHRVRPRKKLKSMNHEVGTLTRADNEEGRDTCRAHIQNNNMDTLTKADNEEERDTCRAHI

SEQ ID NO: 63093 - protein, 214 aa, Zea mays
  Coding DNA Sequence Number=SeqID_21314
  Gene Ontology: Mol. function=RNA-directed DNA polymerase activity; Biological process=RNA-dependent DNA replication
  Homolog annotation: Hit_ID=UPI00004C1732; Match level="QueryCoverage =47%, HitCoverage=6%, E-value=4e-24, Identity=51%"; Hit description =UPI00004C1732 related cluster
MGRKARRDQIVPRFWGASQNVVAAAALLDKLPRWKLQANENPPRDPVTFGAPSNFRTKILTFEEVEFQGTYHAILWRPCYAKFMYIPNYTYLNLKMSGLAATIIMGTTVHHAYNCEVKCCDLAEEATAKQEPLGILQVVDEQSFDAKRGDSAIIHRTVRCTPDSVRCAKGGRPQELASFGKLQRLVRYNSPDCPVYTGLSDVRRAHSGTPDKEQ

SEQ ID NO: 63094 - protein, 66 aa, Zea mays
  Coding DNA Sequence Number=SeqID_21315
ECSIGEAETPNYGSPDEMFSKDLNPCLTPCIAKSKSDVSAQFQSSSQFTKVSVYVDSGIHDSTYAM

SEQ ID NO: 63095 - protein, 858 aa, Zea mays
  Coding DNA Sequence Number=SeqID_21316
  Gene Ontology: Mol. function=microtubule motor activity; Cellular component=microtubule associated complex; Biological process =microtubule-based movement
  Homolog annotation: Hit_ID=Q75LL2; Match level="QueryCoverage=99%, HitCoverage=66%, E-value=0.0, Identity=72%"; Hit description=Kinesin- like protein
  Pfam annotation: Domain name=Kinesin; Domain location=41-386; Score =487.1; E_value=2.2e-143; Accession=PF00225.13; Description=Kinesin motor domain
MHLDGVDDELGGGSCAPSPARFELQEDPSFWKDNNVQVAIRIRPLSGSEVSMQGQKRCVRQDSSQSLTWIGHPESRFTFDLVADEHVTQEGMFNVAGVPMVENCIAGYNSCMFAYGQTGSGKTHTMLGDIENGTRRNNVNCGITPRVFEHLFEKELRRDEKLMFTCKCSFLEIYNEQILDLLNPNSVNLQIREDARKGIHVENLTEHEISNAREALQQLIEGAANRKVAATNMNRASSRSHSVFTCLIESKWESQGIKHHRFSRLNLVDLAGSERQKSSGAEGERLKEATNINKSLSTLGLVITNLIAVSNKKSQHVPYRDSKLTFLLQDSLGGNSKTTINCKHKPIQLLPFHFESYTFDISRFLSSCAAETLSTLKFAQRAKYIRNNAIINEDASGDVLSMRLQIQNLKIIIHLKLTCFCRKVISRLQGQLGSDKTESIASHGFVCESPSTFKWDQGHGMFTPLTFDKRATQRNDCDAALVAAFRREQEKEAQLKAVIDAKQTAEQLVAQKTEEVRSFKMRLKFREERIKRLEQVASGKLSAEAHLLQEKENLVKELEVLRGQLDRNPEITKFAMENLQLKEELRRLQSFVDEGEREMMHEQIIVLQDKLLEALDWKLMNEKEPINKGLSLFGESAGDEENEFLRLQAIQNEREIESLRKKMTFCLEAKDNLERHVNELTTELELTKKHNNTYKEFKAAQLQEQGEADLHNLSDAQMELKTLVDAIASASQREAEAHETAIGLAKENEELRLQLKVLIEDNKRLVELYEHTVVNVEANQDGNPVDDLLNAQPAATSDFHAHNSSSVAQESKIVDEKCTNEDNFSRVTSVELRLQLEEMHEENDRLMGLYEKSYAGKR

SEQ ID NO: 63096 - protein, 284 aa, Zea mays
  Coding DNA Sequence Number=SeqID_21317
  Subcellular localization annotation: CTP_CleavageSite=28; ConfidenceScore=5.56e-01
MKKASAASRYAAYDSPSPSPSSRRAAPSAAAATPGGAHGSSRALVVAGRSGRDLLGAKPQPQAHGNLGSVLRRLISMDKKPPKNQLPVPPAAASAAKNNGGGKLPGLSRKLFQKASSTAAAAPRKTKALTEVKNSGNNANTRTLAMVLRTERELLAQTKAQEDEIAALRLQLENKDREVERLKDLCLRQREEIRTLKDAVLFPDAEPEPDRRLRDEISTLTDQIQCLAQELTQVKAEKHSTRSCFDEDGYCSSPRTPGFNEETAFSLIAICILFAKSHLELNLK

SEQ ID NO: 63097 - protein, 124 aa, Zea mays
  Coding DNA Sequence Number=SeqID_21318
  Gene Ontology: Mol. function=RNA-directed DNA polymerase activity; Cellular component=intracellular; Biological process=RNA-dependent DNA replication
  Homolog annotation: Hit_ID=UPI00004C1732; Match level="QueryCoverage =99%, HitCoverage=8%, E-value=2e-43, Identity=67%"; Hit description =UPI00004C1732 related cluster
MKGIPREATEHSLRINPRSNPLKQRLCRFHEEKRKAIEEEISKLLAAGFIREINHPEWLANPVLVRKKNGKWRMCVDYTGLNKACPKDPFPSHASTSMKNAGATYQRCMNKCFSDLIGRTVEAY

SEQ ID NO: 63098 - protein, 314 aa, Zea mays
  Coding DNA Sequence Number=SeqID_21319
  Pfam annotation: Domain name=zf-CCHC; Domain location=153-170; Score =29.9; E_value=8.8e-06; Accession=PF00098.13; Description=Zinc knuckle
MSGGDGPHPVFDGDDFPYWKICICCEEDSYCVAHREVCHIITMLHQMNLSIVTPTKILGNINAYDLYMHINNKDGSSSKKKDLALKANQEKGKTKILVEEETSSNDDLDDVNIALMVKKTTQMLKRLNQEGIKFDSRKKKFFSSSKRKPFSEMDCYNCGELGHLAHQCTKPKKNKFKGKKNDESEYQNKEKKFFKKNDGKYKRFHRRKGGKAYIIGDWLTDIESISDSSSSEKDDEKAINPVLKLDVATSCHNLSIVDKSSHHEDLIETFEVISLENEKLKKYLKDAATKGNIVIERNDLDNELVHAMKGLEKK

SEQ ID NO: 63099 - protein, 127 aa, Zea mays
  Coding DNA Sequence Number=SeqID_21320
  Subcellular localization annotation: CTP_CleavageSite=11; ConfidenceScore=5.32e-01
MSVARSAFQPRRAHGSTSSGHPVHGPTRQQAARLFLFTYVHDFFNPKRICSLLSLATNSSGNQQPGAVAGDQGVAAGASVAGVPVRPRAPFPGRQNRLAVSGSAVVVRLAPYEPTNSLHVARKVLPY

SEQ ID NO: 63100 - protein, 71 aa, Zea mays
  Coding DNA Sequence Number=SeqID_21321
  Gene Ontology: Mol. function=transcription factor binding; Cellular component=intracellular; Biological process=regulation of transcription, DNA-dependent
  Homolog annotation: Hit_ID=Q40219; Match level="QueryCoverage=68%, HitCoverage=22%, E-value=4e-18, Identity=91%"; Hit description=RAB8E
  Pfam annotation: Domain name=Ras; Domain location=3-61; Score=-87.1; E_value=0.0095; Accession=PF00071.12; Description=Ras family
MEQRHRGRPYGIDGRYGPMAVPTSRGQALADEYGIKFFETSAKTNLNVEQVFFSIARDIKQRLAESDSVTP

SEQ ID NO: 63101 - protein, 232 aa, Zea mays
  Coding DNA Sequence Number=SeqID_21322
  Gene Ontology: Mol. function=nucleotide binding; Cellular component =membrane; Biological process=small GTPase mediated signal transduction
  Homolog annotation: Hit_ID=Q39433; Match level="QueryCoverage=87%, HitCoverage=82%, E-value=2e-73, Identity=72%"; Hit description=Ras -related protein RAB1BV
  Pfam annotation: Domain name=Arf; Domain location=1-179; Score=-81.1; E_value=0.0017; Accession=PF00025.11; Description=ADP-ribosylation factor family
  Pfam annotation: Domain name=MMR_HSR1; Domain location=16-131; Score =3.6; E_value=0.00047; Accession=PF01926.13; Description=GTPase of unknown function
  Pfam annotation: Domain name=Miro; Domain location=17-131; Score =86.9; E_value=6.1e-23; Accession=PF08477.3; Description=Miro-like protein
  Pfam annotation: Domain name=Ras; Domain location=17-206; Score =355.1; E_value=1.1e-103; Accession=PF00071.12; Description=Ras family
  Pfam module annotation: Pfam domain module=Arf::MMR_HSR1::Miro::Ras; Domain location=1-179::16-131::17-131::17-206
MAAPPARARADYDYLIKLLLIGDSGVGKSCLLLRFSDGSFTTSFITTIGIDFKIRTVELDGKRVKLQIWDTAGQERFRTITTAYYRGAMGILLVYDVTDESSFNNIRNWIRNIEQHASDNVNKILVGNKADMDESKRAQMVCHGAGAQVRGAVHAKSIGQANGMAVPTSRGQALADEYGIKFFETSAKTNLNVEQVFFSIARDIKQRLAESDSKPEGKKTNNLHTCYFSYVA

SEQ ID NO: 63102 - protein, 61 aa, Zea mays
  Coding DNA Sequence Number=SeqID_21323
MATGTYPSGSTIPYPYPSKKFYPSGYPYILAGIKSYPYPYPRGYFYPSGLLQGCNGNFACL

SEQ ID NO: 63103 - protein, 85 aa, Zea mays
  Coding DNA Sequence Number=SeqID_21324
MGGEKGKREEMEGEVRMHHNSMKGEEWRRRINNGDLIGVGGYDRASVAGGDVDTNNGALAGVEGKVAYRSPFGYVQRRRSDVIYV

SEQ ID NO: 63104 - protein, 106 aa, Zea mays
  Coding DNA Sequence Number=SeqID_21325
MAGITHRSYSGLPETLSPLFSLLYPWIHGPFPAIEFAVAPSSSLPNFGDPRATLARVHLKSGDLTAAERSGAARSRLFPRSDTLHLIQIERLGPPRTPRTPPSVRS

SEQ ID NO: 63105 - protein, 72 aa, Zea mays
  Coding DNA Sequence Number=SeqID_21326
MAKTDHVILRLPAAEEYHGEELLTAGVSLYLPGPAKSETWPTGVGNQGRELAADLASLVDGQNEGMTGRILS

SEQ ID NO: 63106 - protein, 66 aa, Zea mays
  Coding DNA Sequence Number=SeqID_21327
MGKLSGNILGAQCKGGWVIRGQQNSRCNATSELKTFPRNLPADTVDTEMPFIPWQSTQLGGRTTAA

SEQ ID NO: 63107 - protein, 935 aa, Zea mays
  Coding DNA Sequence Number=SeqID_21328
  Gene Ontology: Mol. function=nucleic acid binding; Cellular component= intracellular; Biological process=chromatin modification
  Homolog annotation: Hit_ID=Q3MJK7; Match level="QueryCoverage=26%, HitCoverage=79%, E-value=1e-09, Identity=19%"; Hit description =Cement protein 3B variant 3
  Pfam annotation: Domain name=zf-C2H2; Domain location=144-166; Score =19.3; E_value=0.014; Accession=PF00096.16; Description=Zinc finger, C2H2 type
  Pfam annotation: Domain name=zf-C2H2; Domain location=98-121; Score =19.6; E_value=0.012; Accession=PF00096.16; Description=Zinc finger, C2H2 type
  Pfam module annotation: Pfam domain module=zf-C2H2::zf-C2H2; Domain location=144-166::98-121
MLSSPKGSHFSTCKDVSAYLMALLGYPELKPATNKYESTGQPYSSANDGDDSALCFQDQIGSIMDKTNVHSISSLTFSSYSSDPNDVNERNLNKANVYQCQKCNLTFGDRTSYAQHHLAYHEMSVKRRRTGKFGEPVVGKDGKFECPICHKTFEEEPQYFGHVGSHARYEGLAPEAFLDKATSRRAANDSLAEIPFSLQELTESHGQNNKVSYGEKGFQHHNHSNKHGDNNLTAIDLFGTNYSDNFIRPNKTWGSPEEGPSCNDAPSVSRYTNFTGHADVIVSERASISNNQSVSNINGFIFSDQPGGNHVVRPTASVTANHYEDQIIDRGRAAPNADNNTVKARDVNLNSCASASTISFPIAYANNETSAALNEANRSSSTAKCFSGSFNNNDGACSASSSCGPTNKISSSFGTSSKTQAAGSRSIGASYEPYGEDCSALKANPFASKNNTSVYQYNLATQPVYAVAARADCFASGSEQTKNSDKELASSAKQRIDNVENRTSKEAGFVAEAYNSGAFNGGITEKGFAQISNSFTHIKSNASGSCSLPESKTPTNGSDSNCIKGSLVNRGDDSFTKVSIVNRPINNNESNVARLEAMGKLNDEMQNRYNYHAPGIDPHVAASASRNANGFMPMQANFGCMSSTVQSVVDVSVSSTSQDQQCDLQLGFGAQKQQIFSNHGELRTATPGSPLPGSIARKDSVPTEPSHFGSMNGPKSFPTGTSQFGGFAKPTFVPAAPSQFGSMAQANYVHSAQSSQFTSWVQPNSIPPAESSQFGSKAQSSSVPPANTSQFRGMAGQNSVPPAQSFGSTVRPNYVTPESSQFGSMARPNSVPPQYVNMPSQNFVSSSEPTLVLGYAPQIGSGPPPQVQLGWDLSLPRMVTGGSMVTCLCIWCNSQFHHFGPVDGQQPSSFGFICPTCKDRMSGHHSVPNNGSWQP

SEQ ID NO: 63108 - protein, 98 aa, Zea mays
  Coding DNA Sequence Number=SeqID_21329
MAMMGSTSEKMYLCQVSYCNCFHTFVSPMYCNVCETGETLLGKLEERTKVASQRFAFEQSELARDRKDYKKDLQKVYDRELEASRKEKRMAKKEEHLN

SEQ ID NO: 63109 - protein, 121 aa, Zea mays
  Coding DNA Sequence Number=SeqID_21330
MGLSIVARAYWRSVERAGLGGSDDSEEASSEEVEDSFDSEEWSGSEGDGGEDDGSSGDDDGKGGGDDDDEDGDDEGDGDNDSKGDDKGDGGDGKGDGDDGKGDVGKGDDGDGKASGIMLLV

SEQ ID NO: 63110 - protein, 98 aa, Zea mays
  Coding DNA Sequence Number=SeqID_21331
MDDEAIAEELRLDVMTKTKLGAPDEQAALGKTQRPRLKFTGLSDVVGDRYPPGNRIQRSPYLGMKLRKWEKLLTNEYTEKDITPTTVIADRFKIGNES

SEQ ID NO: 63111 - protein, 73 aa, Zea mays
  Coding DNA Sequence Number=SeqID_21332
MAPTLLCRSTVIEAPKEIKVAYSPSPEIVISRTKQEGDKRQVDTVKKCVNILLDATKGRYCHTPTGDQGKTPI

SEQ ID NO: 63112 - protein, 120 aa, Zea mays
  Coding DNA Sequence Number=SeqID_21333
  Subcellular localization annotation: CTP_CleavageSite=42; ConfidenceScore=5.01e-01
TDEVEVPPMMALPWGSLPACVLPLRLSAPLSGLPLGRFQAKSASEAEPPWFSEVTSLPSLGPGITVGEMPWGKGVTGALCFNSLVRSRVKTARCRNLNPTPLRGCVTCVQPQRLVPIGGK

SEQ ID NO: 63113 - protein, 122 aa, Zea mays
  Coding DNA Sequence Number=SeqID_21334
  Subcellular localization annotation: CTP_CleavageSite=48; ConfidenceScore=5.24e-01
MKLWKETSRSSKTTTSSRRGLAATPSRLPVKAAFIYVSFPHFDLLCLKLSRTQGRGTQNRAHNLLIDKVPAEQVCKAERPTKSPPPAEQVGKAERPPSPRRASRRGRVVYQVPAEEVCEAEI

SEQ ID NO: 63114 - protein, 62 aa, Zea mays
  Coding DNA Sequence Number=SeqID_21335
MVEPSLTCATVGGVVPYGIRGGAGVRIKCECPPPAFGCALSSLPETGLGEMDGTMVGRGGFG

SEQ ID NO: 63115 - protein, 88 aa, Zea mays
  Coding DNA Sequence Number=SeqID_21336
MADGIDSLSRDLANISIAPEVPPVAPASTFLVRTALKGIIPYFLGWLCMRGVLQVASPECRGANEIKMMGVGDLFSNAMNQEQGNIKC

SEQ ID NO: 63116 - protein, 231 aa, Zea mays
  Coding DNA Sequence Number=SeqID_21337
  Gene Ontology: Mol. function=protein binding; Cellular component =nucleus; Biological process=cell division
  Homolog annotation: Hit_ID=Q9XFH3; Match level="QueryCoverage=99%, HitCoverage=100%, E-value=1e-108, Identity=89%"; Hit description =Mitotic spindle checkpoint protein MAD2
  Pfam annotation: Domain name=HORMA; Domain location=12-224; Score =193.5; E_value=5e-55; Accession=PF02301.8; Description=HORMA domain
MASRSASKDIITLRGSAAIVSEFFGYAANRYGTLYSARQTAAVPVHPGLDRILYNRAVYPEESFSKVKKYGLTMLLTQDEGVKNFIASLTSQLSEWLEAGKLQRIVLVIMSKATSEVLERWNFNIVTDAEVVEKGAIKEKSDKEIMREIQAIMRQIASCITYLPCLDEPCVFDVLAYTDTDVDAPGTWVESDAKLIDNPQMVKLHSFDTKWQIHKVDTLVSYKKDEWDEEE

SEQ ID NO: 63117 - protein, 232 aa, Zea mays
  Coding DNA Sequence Number=SeqID_21338
  Gene Ontology: Mol. function=ATP-dependent helicase activity; Biological process=DNA recombination
  Homolog annotation: Hit_ID=Q8W028; Match level="QueryCoverage=61%, HitCoverage=19%, E-value=2e-17, Identity=31%"; Hit description =Helicase
MAFKASITRINIMGDKGSPRRRLMYSPGSSLTRILVEEVDSSRLIRLHQFRSNPKCCNISSKNDQETELKALEIFNFNRIFYFSSNQFSGEISFELKDPACIYVILKKPDDLNALSADITRWLSEVENSKISKLDAMFDLANFAVKGCQRTDGCSGSQHTPCIQKKIIQYFSKNYSTSDSGQCTQPQRGSPFLQADIKAGILVGRGRYLEVDFPVVMEAAKAELVKLVGKGE

SEQ ID NO: 63118 - protein, 844 aa, Zea mays
  Coding DNA Sequence Number=SeqID_21339
  Gene Ontology: Mol. function=ATP-dependent helicase activity; Cellular component=nucleus; Biological process=DNA recombination
  Homolog annotation: Hit_ID=Q8W028; Match level="QueryCoverage=70%, HitCoverage=68%, E-value=1e-162, Identity=50%"; Hit description =Helicase
  Pfam annotation: Domain name=DEAD; Domain location=367-534; Score =94.1; E_value=4.3e-25; Accession=PF00270.19; Description=DEADDEAH box helicase
  Pfam annotation: Domain name=Helicase_C; Domain location=600-676; Score=91.5; E_value=2.5e-24; Accession=PF00271.21; Description =Helicase conserved C-terminal domain
  Pfam annotation: Domain name=ResIII; Domain location=363-528; Score= -22.4; E_value=0.0035; Accession=PF04851.6; Description=Type III restriction enzyme, res subunit
  Pfam module annotation: Pfam domain module=DEAD::Helicase_C::ResIII; Domain location=367-534::600-676::363-528
MKKLSSGKKSGKGDGLGRPGESLDSQARQIAVRSPLPWREAYQSSPQIPRYSPLRLRSRLRRRAPPSPPAPHRATPMYSQLVDGDSDSEGSLISDISASPPRGRSPSPPPPPPPPPEHRPNPKHTATVKPKPPKSKAKPKLAASACTAAVSPPPLPSAALSDPHGLVSRIAAAPALVTATSTVSSSSFRRLVQSRNPSFDPAAAFSAPTPAPTLAPTEIATAATAQCPAPDAPPQTRPKRVHPNSVSEVVPPAAEAEQPKRPRGGAEGNFVRLNINGYGRRRTFRNAQARRPTKYRSWRRQRHGGAKPQGRGDEEGDFVAEAMIEREKKRAGGDGGVLEAVEAAREDPSEQNLENLLRIIYGYNSFREGQLEAIQKVVAGESTMLVLPTGAGKSLCYQVPAMILPGLTLVVSPLLSLMVDQLMKLPAFLPGGFLASNQTSDEFHETLQRLRGGEIKVLFVSPERFLNEEFLLIFRDGLQISLVAIDEAHCISEWSHNFRPSYLRLRASLLRRKLNVQSILAMTATATTQTLEEIVTVLEIPSDNLIKTSQIRDNLQLFISMSNNRLKDLLLLLKASPFVDMKSIIVYCKFQGETDYVSKYLCDNNITAKSYHSGLLMKNRNRVQELFCSNKIRVVVATVAFGMGLDKSDVEGVIHYSLPESLEEYIQETGRAGRDGRLSYCHLFLDSTTFYKSRSLLHSDGVDEYAMSKFLFQVFSCENSVGCICSLVKESTSRKFDIKEEVLFTVLTQLEIGGQQYLRLLPQFSVTCTLYFHKTSPQLLADKDVLVRSVLDKSETKGGHFVFDMTKVANDLSITVNEVFDHLQQLKLNCWGHAWCIAPMRTES

SEQ ID NO: 63119 - protein, 43 aa, Zea mays
  Coding DNA Sequence Number=SeqID_21340
METAASAARLVNYPLVAALLAFAVAQSSKFFTTCLPARLQFLW

SEQ ID NO: 63120 - protein, 82 aa, Zea mays
  Coding DNA Sequence Number=SeqID_21341
MDRAGKVTTTVNPSGKTAAVTDPTKAMKGKGDGGKDPSEKRQLRQRALRWRRPSEKNAGVEEGNDRHAEHGGASGFPASWGR

SEQ ID NO: 63121 - protein, 38 aa, Zea mays
  Coding DNA Sequence Number=SeqID_21342
MTLDGVGTDSSIKAKGVTSIELTIGTKTIAYHPRVVLV

SEQ ID NO: 63122 - protein, 149 aa, Zea mays
  Coding DNA Sequence Number=SeqID_21343
MDEDNIDVDNLTEEDQVDYGASSEHLGAPIHPRNTHTRRPQWPRLRCTQGDRSRELEPNTTGICAFTECQPLCRVLFLALGKAAFAESRTRQSPTLGNELVYPVQDTRYRKTLDKDAFAEWQTLGKEDSRQRAVSGRSKADGRQPLPRA

SEQ ID NO: 63123 - protein, 112 aa, Zea mays
  Coding DNA Sequence Number=SeqID_21344
MVTVVSLAEERSPDMDTYRLLRSFPDARSSGKRNRFVVAARIRLWVCPPSPGQHPVEDVERPTVEVVPVREEEAHGECDKKGRCSWTSSALASRAEAVSITGDSAWGGAVRY

SEQ ID NO: 63124 - protein, 277 aa, Zea mays
  Coding DNA Sequence Number=SeqID_21345
  Subcellular localization annotation: CTP_CleavageSite=43; ConfidenceScore=5.31e-01
MAHILPSPHAAAAPAAHPAASSHTPRDPPASSSPRPQHPPPMVAATPAQGKLLPKSAHGYKISSVQPLAWHKCSDLDPSDKISQIPQTSSSERIPQPHARIPQPRRSRSFHPRGSPSRSFHPHEDPPAVPSILADPSALDRIPLIAATINALLPHEIDGARVEGVGRRCAAAINDVLPICSAILAILPGYQSVFGSPAEAQIYLNGFPMKHHLVAHWHHLCSVETGMKSLDFSDLSTTVSEVAFSVNGITGIFGFVKIRLSFFLLQEFLYSCRLIWV

SEQ ID NO: 63125 - protein, 81 aa, Zea mays
  Coding DNA Sequence Number=SeqID_21346
MSSPAFTGGYTMEKRERGTEKRKISRRLNSGAARPGWGFGRRWRSSGRDTGAALSWGSIHVEISFLECGFESSEVLFRATH

SEQ ID NO: 63126 - protein, 209 aa, Zea mays
  Coding DNA Sequence Number=SeqID_21347
  Subcellular localization annotation: CTP_CleavageSite=68; ConfidenceScore=5.10e-01
MGARDTTATPQASLPRDATLGRTHAPDSALPLPHLGAAPLASTSTRPICPHPSTLARQPRPHARIVIPQPTISSIRTRTIDRVSPISSIHAIPSNIEIQIETAITFHRRFPPSIVDGHIPPTASKWEPSLAPLMTSTDIKEHVQVEAATPFPSSSTLVFCSLLVTTPFLFNRFVTGLALTVKILGEYNGDQSNFTSFGGLASKKCFYMN

SEQ ID NO: 63127 - protein, 38 aa, Zea mays
  Coding DNA Sequence Number=SeqID_21348
MAIVSSSLVVPPSSTQATELRLREPAQWHHVGLPGSAI

SEQ ID NO: 63128 - protein, 274 aa, Zea mays
  Coding DNA Sequence Number=SeqID_21349
  Homolog annotation: Hit_ID=Q01B93; Match level="QueryCoverage=32%, HitCoverage=13%, E-value=1e-08, Identity=36%"; Hit description =Inframe stop codon
MPHFPRRLKPKRLALALKKLIWKVLRVADPTIGSSSIKRPLVTEAATFMVMRLLPEKPSKAEIEKVKKRREELLKRHDMKRKWFVFDNHNLFYNNFALMVVCEWELGEARKRDALDRARVHGEEPPPEVLAEERGLHASIEGDVKSLLDGKTSTELEDMHGQIESQMSSGTAKVVEYWEAILKRLHIYKAKAFCDFDSVISVSTSALVWFQYKKFAAKVVFTVATCILRMVLREFLTIFLYHYILMLRNRDKNVGTHVLKVKNVGTVELNVQPT

SEQ ID NO: 63129 - protein, 102 aa, Zea mays
  Coding DNA Sequence Number=SeqID_21350
MNRCSRESLGISRIKFIGLSDEPIASAPTVGSTIDAQSPGDVWPEARVTRPHRTVRCAPDSVRCAKWTKGSTVGFAKEGKKSCTVHVQWCTGLSDAPTDRRQ

SEQ ID NO: 63130 - protein, 76 aa, Zea mays
  Coding DNA Sequence Number=SeqID_21351
  Homolog annotation: Hit_ID=Q6QP51; Match level="QueryCoverage=96%, HitCoverage=35%, E-value=3e-08, Identity=50%"; Hit description =Putative growth-regulating factor 1
MARSVQAQGRARRRLLLRPRPGSGEDAIPPEAEVEAEPWGRVRRRPPSQTEVEAEPWGLQFPPEAGLGRGEIASLG

SEQ ID NO: 63131 - protein, 86 aa, Zea mays
  Coding DNA Sequence Number=SeqID_21352
MTVVMTQMATGWLGGGVRGRSGTVRGAHAAPAVYAYDEMTMDELGEIKRVEIGQTGEFGMYTMMILKRFHVAFQWYLNIDLIHGNL

SEQ ID NO: 63132 - protein, 214 aa, Zea mays
  Coding DNA Sequence Number=SeqID_21353
  Subcellular localization annotation: CTP_CleavageSite=32; ConfidenceScore=5.21e-01
MPARPSLKLNVSCHCSCSCCFLMARRRPPCFCASADVQRSGGHRFTVIRLVQTWSGGVEPRSGRAVEVHQAGLASSKQLHLARQQATDNIHVSMSRSARATSMPPLEKHLSLDLWSYLPDPPPTPSSGKGNNGVPILAVPGSSAALSPANNDKQGGSRHGANAVVDRQTKNPSVVALDAEEEEGEAVDISGTRKRAKRTKAFVCDYFTKKIEKQ

SEQ ID NO: 63133 - protein, 72 aa, Zea mays
  Coding DNA Sequence Number=SeqID_21354
MDRLHRLRLGLAQTRHAQTAHAASPVAAFADFFLTCPIRKAVKCRLAAYLLTATAVACRPYSNKVTQNNAQK

SEQ ID NO: 63134 - protein, 349 aa, Zea mays
  Coding DNA Sequence Number=SeqID_21355
  Gene Ontology: Mol. function=protein serine/threonine phosphatase activity; Cellular component=protein serine/threonine phosphatase complex; Biological process=protein amino acid dephosphorylation
  Homolog annotation: Hit_ID=Q9SZ53; Match level="QueryCoverage=86%, HitCoverage=87%, E-value=2e-65, Identity=43%"; Hit description =Protein phosphatase 2C-like protein
  Pfam annotation: Domain name=PP2C; Domain location=4-295; Score =215.3; E_value=1.3e-61; Accession=PF00481.12; Description=Protein phosphatase 2C
MKRLEYAVSAMQGYRLNMEDAHAIVLNLDAATGTSFFGVYDGHGGPAVSKYCARHLHAELRRHESFRDNLQTAIERTFLRMDEMMRDRRAGRELSGYGGNDNWKAYRKAINMSLFLPFCQKPAYQGPVMDGCTACVVLIRDNRIIVGNAGDSRCVLSRNNQAIDLSTDFKPNLPDERQRIEAAGHVVTFSERGNVHRIDDGIAVSRSLGDLMYKDNNDLGPVQQAITAFPEVRTEEITQDDQFLIIACDGIWDCLTSQQAVDFIRIYSFADVGLASICEALLAHCVAQPRGRDNMTVILVRFKTPGACQVRASNVPPPPIRQDAAASQAAGSQAAAASQAAGSQAAAGH

SEQ ID NO: 63135 - protein, 481 aa, Zea mays
  Coding DNA Sequence Number=SeqID_21356
MSYGCDSGIRGDDVGFWSDTGSSSGQAMARLFLSKIEGDGWIGGGIPTKCLMVCLIRSHEEIMVSGDGSYLLQQDLVVPDASQVFVGMPQEVSADKELDELPYVDVVWDDEPLDIETIVGEDWVHADQKQDADLQLAQGTEEMMCKQVPLEASILLEEMYQGGENLPLFLDFDVFTVGKAIEDNKVVWDKELLQEVESHDSILMPVAQGECLSVMDDKPVVKLVSFKASIVINDDEGELFDERSLTNVIWDDEFVHELELNGGPVVLDEMPHEDIIWDEERHTGGSRTNDFSISYASVAALDDHICAFGGEEKKGILCSFEKAHSSTSTSSPTLPPLSKTTTALAPPALDARAASARSHPIRHALSAAAPCGGVPAAHAVIRRMPSNSRAQSPVEPPSFELAPKSASTPSSSSLCAACHGWALAELYSPLRAALLLRSRSAISARPGKPPAQSHRAALASSDTTALPPPSAKPRPAICDVA

SEQ ID NO: 63136 - protein, 220 aa, Zea mays
  Coding DNA Sequence Number=SeqID_21357
  Gene Ontology: Mol. function=DNA-3-methyladenine glycosylase I activity; Biological process=base-excision repair
  Subcellular localization annotation: CTP_CleavageSite=51; ConfidenceScore=5.21e-01
GEGAVGRFEIARSRWLGPMSGASARGRLSPASGGAGDSEPRSAGGRTRSVSATRGRKPSPRPGRDAAAAAGATEERKPAAVPTLLPSLSAPAGMRRQELLLRSGLSLDASCSSDASTDSFCSRASTGRIGRPAFGARKKKTLSQTDYKPVSMLEREGGLAYQTDAAGVKRRCAWVTANTGACFWFCLHVLAFDVGELESLPKNTQNGRRECYAPRILANL

SEQ ID NO: 63137 - protein, 298 aa, Zea mays
  Coding DNA Sequence Number=SeqID_21358
  Gene Ontology: Mol. function=protein dimerization activity; Cellular component=nucleus; Biological process=regulation of transcription, DNA-dependent
  Homolog annotation: Hit_ID=Q8RZ35; Match level="QueryCoverage=52%, HitCoverage=36%, E-value=1e-26, Identity=50%"; Hit description =Putative ABA response element binding factor
  Subcellular localization annotation: CTP_CleavageSite=42; ConfidenceScore=5.42e-01
MGLSLFMILSLARSLPTLLGVTKPSTKPYRRRSVIQFVKRLRRQKKTYMPHVVCKKTEIPFIDHIDLVTKQSTKPYRRRSVIQFVKRLRRQKKTYMPHVVCKKTEIPFIDHIDLTSDVAEEQQQQQQAVDPLARQSSIMSLTLEELQNSLCEPGRNFGSMNMDEFMANIWNAEEFQAATAGWNKEGVYREPVPVATTTGTGENGGGGGGGRGLVLQGSFALSSPLSRKTVEEVSAEISQGPTDFQASAASQPVGEARRGVGGPLTHASARWRRVSCGASMSVRDRRGRGHARAPMLHS

SEQ ID NO: 63138 - protein, 342 aa, Zea mays
  Coding DNA Sequence Number=SeqID_21359
  Gene Ontology: Mol. function=nucleic acid binding
  Homolog annotation: Hit_ID=Q9FKY7; Match level="QueryCoverage=85%, HitCoverage=24%, E-value=2e-65, Identity=51%"; Hit description =Arabidopsis thaliana genomic DNA, chromosome 5, TAC clone:K2A18
MAVMVLCAAFVLASSGFTFGIQVAIYAEFRRDWPEALKFYEEGVCVLRELAATYMREKRYAIECSSSMANLTTEVNGVPESVMPSVYVGQYVRLFEQGDTVSLLPLSDTEYTSYALSEAERFQDSYEIIALFRKAYESFQSLGATRMASACSSGMAIEYYAAGDFSNAKQLFDSVAGLYRQEGWTSLLWENLGYLRECSMKLNSPKDFISYSLEMAALPLFSGSGEENRENKIKSGPAGSPTISRRENIQQEVINVLERKQSSEGTYDGFNNAIEEVTHLDIDQISPLRMVLTASVAFHDQSVKPGSPLLVSVSLLSHLPSPVVVDQLEPWRFCSINLTVTL

SEQ ID NO: 63139 - protein, 105 aa, Zea mays
  Coding DNA Sequence Number=SeqID_21360
MAPPFQLESDSPGGCQQQNNRVWRLNQWCQALAALTLLLAAKCHFVIVSWHIFQYLVEAGAITVKHVRKEDCAMLPKRPVSVILRDTDDYMLDEMTDPCMMFCAL

SEQ ID NO: 63140 - protein, 212 aa, Zea mays
  Coding DNA Sequence Number=SeqID_21361
  Gene Ontology: Cellular component=integral to membrane; Biological process=protein transport
  Homolog annotation: Hit_ID=Q6Z8F5; Match level="QueryCoverage=95%, HitCoverage=83%, E-value=2e-84, Identity=63%"; Hit description =Putative secretory carrier membrane protein
  Pfam annotation: Domain name=SCAMP; Domain location=75-212; Score =186.2; E_value=7.9e-53; Accession=PF04144.4; Description=SCAMP family
MHHDPNPFDEGSAEDNPFSNGGAGGGKQQYGFRPTEPVGFGGASRGDAVVDVPLETMGDIKRREEALKNAGVPMEEKNWPPFFPIIHHDIANEIPANVQKLQYLAFASWLGIVLCLSWNFVAVIVCWIKEGDSKLFFLATIYALLGIPLSYLIWYRPLYRAMRTNSAFSFGWFFLCYLIHIGFCIIAAIAPPIVFHGKSLTHVPVEDLIFPL

SEQ ID NO: 63141 - protein, 158 aa, Zea mays
  Coding DNA Sequence Number=SeqID_21362
  Subcellular localization annotation: CTP_CleavageSite=67; ConfidenceScore=5.59e-01
MYPPVTVGALITTAILASWGSTRGSRNSMPGPVLAGSVLATTPSSPAHCYAFRVAPQPYRPPPSPARVDKSPPLLRPPSLLPGVPTAVLPALCNFAHDSHELELQHFQHPILETLCLTTYRLEPLCFTTYRLRLSDTPYYLDKNSIMQYFFMYKAPAG

SEQ ID NO: 63142 - protein, 616 aa, Zea mays
  Coding DNA Sequence Number=SeqID_21363
  Gene Ontology: Mol. function=acyltransferase activity; Cellular component=integral to membrane
  Homolog annotation: Hit_ID=Q5Z7E7; Match level="QueryCoverage=67%, HitCoverage=91%, E-value=0.0, Identity=77%"; Hit description =Putative very-long-chain fatty acid condensing enzyme CUT1
  Pfam annotation: Domain name=ACP_syn_III; Domain location=340-426; Score=-18.0; E_value=0.048; Accession=PF08545.1; Description=3 -Oxoacyl-[acyl-carrier-protein (ACP)
  Pfam annotation: Domain name=ACP_syn_III_C; Domain location=506-588; Score=19.6; E_value=1.3e-07; Accession=PF08541.1; Description=3 -Oxoacyl-[acyl-carrier-protein (ACP)
  Pfam annotation: Domain name=Chal_sti_synt_C; Domain location=447 -590; Score=9.6; E_value=0.00028; Accession=PF02797.6; Description =Chalcone and stilbene synthases, C-te
  Pfam annotation: Domain name=Chal_sti_synt_N; Domain location=187 -410; Score=-90.4; E_value=0.096; Accession=PF00195.10; Description =Chalcone and stilbene synthases, N-te
  Pfam annotation: Domain name=FAE1_CUT1_RppA; Domain location=229-490; Score=500.1; E_value=2.5e-147; Accession=PF08392.2; Description =FAE1Type III polyketide synthase-lik
  Pfam module annotation: Pfam domain module=ACP_syn_III::ACP_syn_III _C::Chal_sti_synt_C::Chal_sti_synt_N::FAE1_CUT1_RppA; Domain location= 340-426::506-588::447-590::187-410::229-490
MSELVVYTDADSASCPNMCRSTSGYAVFLGANLRATHVFCDNVSVVYLSTNLMQHQHTKHVDIDLHFVRERVAVSEPVTPTAPPPSSSSPPPATTPPPSPSPSNGNVFTTVRLYVDQRRIGWSADPKTIPGTLLLDRGHSGEARFRLFAEKKTLYAPDSMGSSAALQPKQLYQLVVNNFVAVLAAPLAVAAVVNAARVGPDELLGRLQALRAVHVFLAVFVAAATAILYVLLRPRAVYLVDYACFRTRPNCRVPFATFLEHAKLVTFVEGASIDERSVRPRARRWSSSSFSAIDDLLAKTGISPSAIDILVVNCSLFAPVPSFTDMVINRYGMRPDVRNVHLSGMGCSAGLISVGLARNLLQVAGRGAHALVVSTETITPNYYVGKERAMLLPNCLFRIGGAAVLLSTSRSRARFRLARVVRTLTGAQDSAYRCVFQEEDGEGHRGINLSKDLMTIAGDALKANITAIGPLVLPASEQLLFALSFIARRVLNRRVKPYLPDFRTAFEHFCIHAGGRAVIDELQRSLGLSDEDVEASRMALHRFGNTSSSSVWYELAYIEAKGRMRRGDRVWMIGFGSGFKCNSAAWECIAPARTAEGPWAESVSRYPVDIPEVLKH

SEQ ID NO: 63143 - protein, 120 aa, Zea mays
  Coding DNA Sequence Number=SeqID_21364
MEMWTYTNDEVPMLQYKSTSLIEPTSQRPSAVVPPEDSAPITNCWPGPGQNQRVGQCPHCTPSRSVIAGISSNLQRTVPRWYYAASELKRSGSLSYPKVVRSWGVERGAKYVCYVHELHY

SEQ ID NO: 63144 - protein, 217 aa, Zea mays
  Coding DNA Sequence Number=SeqID_21365
  Gene Ontology: Mol. function=RNA-directed DNA polymerase activity; Cellular component=mitochondrion; Biological process=RNA-dependent DNA replication
  Homolog annotation: Hit_ID=UPI00004C1733; Match level="QueryCoverage =76%, HitCoverage=15%, E-value=1e-70, Identity=67%"; Hit description =UPI00004C1733 related cluster
  Pfam annotation: Domain name=rve; Domain location=51-197; Score=67.6; E_value=4e-17; Accession=PF00665.16; Description=Integrase core domain
  Subcellular localization annotation: CTP_CleavageSite=43; ConfidenceScore=5.03e-01
MSGAHRTVRCPLLAVSSATCPAQIARPTVGPADRWLTGQSAPRALVGNAFRQGFYWPTAVADATRIKAPGGFSHLLVAIDKFSKWIEVRPLTSIRSEQAVAFFTNIIHRFRVPNYIITDNGTQFTRKKFLDFCEDHHIRVDWAVVAHPMTNGQVERANDMLLQGLKPRIYNDLNKFGKRWMKELPSILKPGTYKLANDQGEVYSNAWNIQQLRRFYP

SEQ ID NO: 63145 - protein, 108 aa, Zea mays
  Coding DNA Sequence Number=SeqID_21366
MGRGKRGKGWPRRADRKHKRPPSPPSEDFGDSEYSEERSIERTGLGGSHDSEEASLEEVEDSSDSKEWSGDSEGGNNKGNDKGDGEGGKGDGKGDGDDGKDSGIMLLA

SEQ ID NO: 63146 - protein, 107 aa, Zea mays
  Coding DNA Sequence Number=SeqID_21367
MWNWSFNYFHVQIESMHSEVYHAKADRNMVEWAQAMGGMNALVLNNTTGRGNYVVKRVLPMYSVGHGRVGPSNVSVGVFIGNQVSGHALQSTIYALGYLRLPQNIPL

SEQ ID NO: 63147 - protein, 79 aa, Zea mays
  Coding DNA Sequence Number=SeqID_21368
MGYMTCGYWVQPLHSVKLMRQERQERMEIRQEMRQERLERQQQPQPQPPPPPPAAPPRDKHREFMSHKPPTFSNSMDPL

SEQ ID NO: 63148 - protein, 269 aa, Zea mays
  Coding DNA Sequence Number=SeqID_21369
MPHRPWHRPRSPIFCAPSPTPSIPRGARGQGVAEEVGPSERPVELVEEYNILPPIAEAGGDLICAGPDVAEPPKAKLTHDEAFWPVKRSSIIKPTSVRSLTDSNGDNALRLPSKDNAPTQMETMHGDNAESNAKHHKNPFHKRESRKVSISSLDKSLATVRSPTSHLLAGNGHKRQRLTKPSAGLASLILDDPNPSLNCTNPAHILFAHDGGENRRQTEVFPVTGCGLAQLIGSTSMPSVPGCYNKREKGKNEPRDSGPRRGVHGGAET

SEQ ID NO: 63149 - protein, 94 aa, Zea mays
  Coding DNA Sequence Number=SeqID_21370
MGKSLFMRCVSASMLDDAGMSFAVDVKVGAELGPGRSLPEVMAESFLMCAIVDGVASYGIRSGAGSSSSELETWFLALERHALAENLPERVLRA

SEQ ID NO: 63150 - protein, 466 aa, Zea mays
  Coding DNA Sequence Number=SeqID_21371
  Gene Ontology: Mol. function=translation elongation factor activity; Cellular component=eukaryotic translation elongation factor 1 complex; Biological process=translational elongation
  Homolog annotation: Hit_ID=Q5Z627; Match level="QueryCoverage=88%, HitCoverage=99%, E-value=0.0, Identity=75%"; Hit description =Elongation factor 1-gamma 3
  Pfam annotation: Domain name=EF1G; Domain location=305-413; Score =155.1; E_value=1.8e-43; Accession=PF00647.9; Description=Elongation factor 1 gamma, conserved
  Pfam annotation: Domain name=GST_C; Domain location=149-246; Score =45.7; E_value=1.6e-10; Accession=PF00043.15; Description=Glutathione S-transferase, C-terminal domain
  Pfam annotation: Domain name=GST_N; Domain location=50-125; Score =69.6; E_value=9.9e-18; Accession=PF02798.10; Description=Glutathione S-transferase, N-terminal domain
  Pfam module annotation: Pfam domain module=EF1G::GST_C::GST_N; Domain location=305-413::149-246::50-125
MALVSSFAFLSLFFLSLFQKCCVAHHLSDCLYWCRCHCLFACVLLNYHAQTEVLHSGAGNKNAFKALIAAEYSGVKVELTKDFEMGVSNKTPEFLKMNPLGKVPVLETPDGPVFESNAIARYVARLKDDNPLFGSSRIEQAHVEQWMDFAATEVDPGVGWYLYPRLGYIPYAHTTEETAIASLKRSLGALNTHLALNTYLVGHSVTLADIVLTCNLYHGIARILTKSFTSDFPHVERYFWTMVNQPNFKKVIGEVKQAESVPPVLKKGVPPKESKAKDVKKETPKEAPKPKVVEVPAEEEAPKPKPKNPLDLLPPSKMVLDDWKRLYSNTKTNFREVAIKGFWDMYDPEGYSLWFCDYKYNDENTVSFVTLNKVGGFLQRMDLCRKYAFGKMLVVGSEPPFKLKGLWLFRGQEVPKFVMDEVYDMELYEWTKVDISDEAQKERVNAMIEDQEPFEGEALLDAKCFK

SEQ ID NO: 63151 - protein, 258 aa, Zea mays
  Coding DNA Sequence Number=SeqID_21372
  Gene Ontology: Mol. function=protein kinase activity; Cellular component=extracellular region; Biological process=protein amino acid phosphorylation
  Homolog annotation: Hit_ID=Q69TY6; Match level="QueryCoverage=77%, HitCoverage=33%, E-value=3e-47, Identity=46%"; Hit description =Putative receptor protein kinase PERK1
  Pfam annotation: Domain name=LysM; Domain location=111-157; Score =6.8; E_value=0.11; Accession=PF01476.10; Description=LysM domain
  Pfam annotation: Domain name=LysM; Domain location=178-221; Score =23.4; E_value=0.00079; Accession=PF01476.10; Description=LysM domain
  Pfam module annotation: Pfam domain module=LysM::LysM; Domain location=111-157::178-221
MASPPQTELQAVALALLVLLLAGAAPARAQQEYEANKQNACYATNASSVLGYTCNATTASTPACDSYLIFRSSPTYYNTPVSISYLLNSSVSATAAANAVPSVSPLAPSSLVLFRGETYFIIANITYQGLTTCQALIAHNPLHDSRGLVAGNNLTVPLRCACPSPAQAAKGFKYLLSYLIMWGDDVTSIAARFRADPQAVLDANSLTADDIIFPFTTLLIPLKTAPTLDMLASTAPPPAPTPPQPAPAPSGRSGSGKL

SEQ ID NO: 63152 - protein, 190 aa, Zea mays
  Coding DNA Sequence Number=SeqID_21373
MATRRSESYTKLSYNTECTGDQGRLKGSMHALNRRAKCSDHRRTLARRKLLHRRAIPRSPHFLSPNRHCEHFHRTLVMLLNRCYWPERRRRQDPTNGTAILSSTSRRGSRYGFRTWVLRARGLEALLMCQNDGTREVWGPLYRPAELVKSWWRLHSRRKRRKEDFVRVVTDRWVQRIQRDDPESARVMNG

SEQ ID NO: 63153 - protein, 192 aa, Zea mays
  Coding DNA Sequence Number=SeqID_21374
  Subcellular localization annotation: CTP_CleavageSite=70; ConfidenceScore=5.08e-01
MRCTRLCPLNPGVTTGLLIRTSIARDSPSLPRSPPNTQRAVSCDGHGGGHHRRFATHASAPQPQIRDTLRATENESIVRRTYKKGSRRWDQFTAQGRSGTWSKSGDGFPLVQVTATPKAPKVTLQCSTGSQLAPRFPKSGTDSKGARWQGDPPDLSAHRQLALFIDNQSKQRSGRSRAFLYTPARATVTPRI

SEQ ID NO: 63154 - protein, 93 aa, Zea mays
  Coding DNA Sequence Number=SeqID_21375
MAKAAPATSDADPHTIVTIMTSPTSPTTSPELYCRRLHLSYSLHSIECNLADGEYILVLEQGIAQEVAQDPAPEPAIEDLPAPALEGKPRFYA

SEQ ID NO: 63155 - protein, 92 aa, Zea mays
  Coding DNA Sequence Number=SeqID_21376
MSPPACAHGSADFGHHRRQAVPRRDRRDFPEPTPSFTGPPSPPEKYCNLADGEYILVPEQGVAQEVAQDPAPEPAIEDQPAPALEGKPRFYA

SEQ ID NO: 63156 - protein, 126 aa, Zea mays
  Coding DNA Sequence Number=SeqID_21377
MTGGQLRRSAGGRLPPPEAGRGGGSPTRMRGTGKGGYPERDPSPRRNRAPSPPLLIRGSKAGPPRVQQSPQIAWARHPLLVRGSKASPPKGFMAASGYSGSAPITDQGFEGWPPKGSQSPQTPSEG

SEQ ID NO: 63157 - protein, 457 aa, Zea mays
  Coding DNA Sequence Number=SeqID_21378
  Gene Ontology: Mol. function=protein serine/threonine kinase activity; Cellular component=cytoplasm; Biological process=protein amino acid phosphorylation
  Homolog annotation: Hit_ID=Q7X996; Match level="QueryCoverage=95%, HitCoverage=96%, E-value=1e-160, Identity=67%"; Hit description =Putative Serine/threonine Kinase
  Pfam annotation: Domain name=NAF; Domain location=318-378; Score =92.5; E_value=1.2e-24; Accession=PF03822.5; Description=NAF domain
  Pfam annotation: Domain name=Pkinase; Domain location=15-269; Score =306.4; E_value=5.2e-89; Accession=PF00069.15; Description=Protein kinase domain
  Pfam annotation: Domain name=Pkinase_Tyr; Domain location=15-267; Score=68.2; E_value=2.6e-17; Accession=PF07714.7; Description =Protein tyrosine kinase
  Pfam module annotation: Pfam domain module=NAF::Pkinase::Pkinase_Tyr; Domain location=318-378::15-269::15-267
MAGHNKRNIILMHKYEMGRLLGQGTFAKVYHARNTRTSVSVAIKVIDKGKVVKVGLVDQIKREISAMKLVRHPNVVQLNEVIATKTKIYFVLEYVKGGELLAKVKRGRLKEDVARKYFQQLICALDFCHSRGVYHRDLKLENLLLDENSDLKVSDFGLSALAECRRQDGLLHTTCGTPAYVAPEVINRKGYDGAKADIWSCGVILFVLLAGYLPFYDKNLIDLYKKIDSADFRCPTWFSTHVRRLLLRILDPTPGTRISIEKIMENPWFRQGLDHANLLLRYNLKTNDAPQVDTDKNEDFDPPSTNITTDSKQEDEKKPANMNAFDIISHLSSGLDLSGLFQESDKKTESKFTSTNTSSAIISKIEDIAKDLRLKLTKKDGGLLKMEASKPGRKGVMRIDAEIFEVSPNFHLVEIKKTNGDTLEYQKVMHQEMRPALKDIVWAWQGEQLKQQQEQQQ

SEQ ID NO: 63158 - protein, 946 aa, Zea mays
  Coding DNA Sequence Number=SeqID_21379
  Gene Ontology: Mol. function=nucleotidyltransferase activity
  Homolog annotation: Hit_ID=Q2QTU0; Match level="QueryCoverage=89%, HitCoverage=90%, E-value=1e-168, Identity=41%"; Hit description =Nucleotidyltransferase domain containing protein, expressed
  Pfam annotation: Domain name=NTP_transf_2; Domain location=128-210; Score=8.3; E_value=0.025; Accession=PF01909.13; Description =Nucleotidyltransferase domain
  Pfam annotation: Domain name=PAP_assoc; Domain location=294-383; Score=7.1; E_value=0.0098; Accession=PF03828.9; Description=PAP25A associated domain
  Pfam module annotation: Pfam domain module=NTP_transf_2::PAP_assoc; Domain location=128-210::294-383
  Subcellular localization annotation: CTP_CleavageSite=31; ConfidenceScore=5.03e-01
MAAAAYLGGRGPGSRRRVVRARRRRRVGAPVGEARWGRSGGGGSCSSRREGDAGGGDGEEGASAVGDPPGRGARCGRRPPARCCCASPPPGRRERRRQDVLAYLTRLIGSSLWLRGVRSYVVTVDSSSCTHAQAQHNHGSTNVFAFGSVPLRTYLPDGDVDITVLGNTWLNSTLIDDVRSMLQSEQENCDAELKLTGLHFIDAEVKLIKCVIENIIVDVSFNQIGGVSTFCFLELVDRQVGKNHLFKRSIMLTKAWCYHESRILGAHHGLISTYALETLVLYIFNMFHKSLHGPLEVLYKFLEYFSKFDWDRYGISLNGPVDLSSLPSLTVEPTEVQGELLLGKDFHQGSLDRLVVIPNEFDGCDTQFRQKFLNIVDPLKANNNLGRSVSKANFYRIRSAFSFGAQKLGQILLLPSEYICDEIYGFFSNTLKRHGKGERLDIDASSAFQPLLGPESTLSEDGSMFKSSCINEGENGSSCHSSELPDMGSSVTDVHKNSGKYLPGLFQDLPWNKIWFMEYASDLKENPQTSASSRSHSSFSQDNGNGNSKECFENYAAEEGLHQISRLNVPQQIYAGHPSHRLANSTSANILDFSSSCFVDESDWTAPLAGKKLLPPLLLSNMLDLSGDLELYLGCLRKVQYHLESLFDELLQAVEEACFADVLDEDSFNMPDMILKLKTSTRSSSLPLDSSTDSERRKLSPVYCSHSIGDDSQQSHGEAQVDMFWQQNVPLSPNGSTFPSSPSTNSDNYPVSWFCFSPKTHGTGTYIPNVSYQTYRERIMLERDTIRARKQRQRLPGRRYYSAEQGFSGSQTEEDTIAQSATNQSPKKQNSVQQSGYSGKSTVPDADFVCFREHVATEGGTKQLAVGRETMPPSSSSGIALAQNGQGNRICEPSSPATADLLHAAESLEFGSLGPFSLGLVSTSTQFEEAFPALPTRKRAEGAENH

SEQ ID NO: 63159 - protein, 114 aa, Zea mays
  Coding DNA Sequence Number=SeqID_21380
MSGFAGLPTASHGQSLDCSTPPDTKLKDETYFVPFPWFLKGAESETFLAGQSEISVPSVGSAGAHTLRSPYCGLLVVAIRSGEVGSPAVMADICDTHSCEDNDGVGRVVSAVED

SEQ ID NO: 63160 - protein, 92 aa, Zea mays
  Coding DNA Sequence Number=SeqID_21381
MGCCTESTSTFFPHAGMALGNPRSYVIRGLEALPLSIFLLYKLAMDPLCVASTRKQDLCPRFKVMLAKIKVKIERGGAIRQELAKLKKAYMA

SEQ ID NO: 63161 - protein, 319 aa, Zea mays
  Coding DNA Sequence Number=SeqID_21382
  Gene Ontology: Mol. function=oxidoreductase activity; Biological process=electron transport
  Homolog annotation: Hit_ID=Q93WC0; Match level="QueryCoverage=92%, HitCoverage=58%, E-value=1e-128, Identity=76%"; Hit description =Flavin containing polyamine oxidase precursor
  Pfam annotation: Domain name=DAO; Domain location=42-318; Score= -52.4; E_value=0.018; Accession=PF01266.14; Description=FAD dependent oxidoreductase
MSMLADFAPRDLHVTASALCGPNSVLFLAQSYASLAGASGPRVIIVGAGMSGISAGKTLWEAGVRDLLILEATGRVGGRMHKHNFGGINVEIGANWVEGLGGDQLNPIWPLVNSTLKLRNFYSDFDSVVGNVYKENGGGLYDEEYVQKRMDRAYEVEELGANLTKKMHPSGRDDISVLAMQRLFNHQPNGPTTPVDMALDYFIYDYEFAEPPRVTSLQNTQPTPTNADFGEDNYFVADQRGYESIIHSIGSSYLSTDGNGKLKDRRILLNKVVRQIAYNKQGVVVKTEDGSSYRADYVVVSTSLGVLQTDLIQFKPQLP

SEQ ID NO: 63162 - protein, 354 aa, Zea mays
  Coding DNA Sequence Number=SeqID_21383
  Gene Ontology: Mol. function=oxidoreductase activity; Cellular component=nucleus; Biological process=electron transport
  Homolog annotation: Hit_ID=Q93WC0; Match level="QueryCoverage=72%, HitCoverage=48%, E-value=4e-83, Identity=63%"; Hit description =Flavin containing polyamine oxidase precursor
MDVVRQIAYNKQGVVVKTEDGSSYRADYVVVSTSLGVLQTDLIQFKPQLPLTSKTHRIASSGRSRRSTVSTWGCTPRSSSSSPSGSGPWGEGKQFFMYASSRRGYYALWQSFEREYPGANVLLATVTDDESRRIERQSDDQTKAEVAEVLRDMFPAADVPGPDQIDVYVPRWWSDRFFKGSYSNWPVGVSRYEYDQLRAPVGRVYFTGEHTSERYNGYVHGAYLAGIDSANILINYIFKNEEYKVRGKYDVDDLIAQSGSRHRDRSRPIINGLGLGTTTPCVMGRMGAPKQDPEGGENEFLGQAHEASSLGAMDKTGRGNPPYLTFLFLHSFLRERDRLHLIIVHVKIKMATPE

SEQ ID NO: 63163 - protein, 911 aa, Zea mays
  Coding DNA Sequence Number=SeqID_21384
  Homolog annotation: Hit_ID=Q2QUQ6; Match level="QueryCoverage=34%, HitCoverage=27%, E-value=7e-09, Identity=24%"; Hit description =Expressed protein
  Pfam annotation: Domain name=DUF1723; Domain location=89-138; Score =65.6; E_value=1.6e-16; Accession=PF08330.1; Description=Protein of unknown function (DUF1723)
  Subcellular localization annotation: CTP_CleavageSite=82; ConfidenceScore=5.37e-01
MRAFNGRRLHDPKPPSFLPLPLAPRTTTPPPPPPSSPPHAIPPLNFRYLTPCPRWSAWVATALSDPVFAPILASSAISGAVAASTAVVSPDRAALSALLSLWDPDTHAFRLPAGPATFTLEDALVLAGLPPAGAPLDRTLTPEEDDLRVRLVVEREKIKELHPCARAARRVSAEVWLEWFDGGGIRPGEDDELRWLGFLAYWLAFFVTPRLRSRGGELPERVFAHAARLSLGERIALGQGMVANLYAEMDKIVTCTVADGVCGRLDVCVPVWMLQVWMWERYKRLCPPELKAPQFPVSNVRVLYWSRRKKKSTSEEALKILLDEVCFEWRPYRHNSLNWMEPKWFNKDTILVTCHGKDKPEWLLDYIAVISQTMLTGFHSDDTDNSVLYNPQLVARQFGYDQAAPVSIVREIHFEGIELWIPSIGRYGMPGEDYVAWCSSSGQFYKHQNDVQYGCSVLRNHENGAISSQLNVNEKCVVVPTLDQFITQVTRRDHINYIVEGQPEKMDNGSHEDETEVIVCGLEACVKDSRTTSVKQNVQKQRDKFAEDGGDSKKKRKVESNTKRSSLQLEGQKYSSLQKALNSDSKKCEELAQVDSDDECIVLEQPKNKCEVINLDDDEEQSVSNREHHNMQLVLELEEFVRSGLLSQWEESSDEDDVSGSKQETQKKSNNDPYAEAAMREYPLFFEFIPQKPHYRGFVNYDETLGDLPYSGLWFLLIGLAKEVLKTSCDTDASEIAYLMKKAQHLEQLGFNVTHLIARLKEPQIRLKKLQDSRARLDHAREKEEGNVVESLSSHLNKLKGNIRMMDSHLDGTKQAFISNIQDKLNEGINLASLEKEVETAEKCCQAMKDEVAAMRMRYICPVCSCHLKTNIGDEHHTLAFCVLLDKQLQSGRIRKCPTEKGKGKGKDYCT

SEQ ID NO: 63164 - protein, 35 aa, Zea mays
  Coding DNA Sequence Number=SeqID_21385
MAHGPWLLWLRLFKKLLNDFWSKKMKSFRELLELL

SEQ ID NO: 63165 - protein, 55 aa, Zea mays
  Coding DNA Sequence Number=SeqID_21386
MAVVTFFAGGINGVKGVKRGDPLWKEFASKLLADGRRIGVQAQMTYCLSASQLVP

SEQ ID NO: 63166 - protein, 299 aa, Zea mays
  Coding DNA Sequence Number=SeqID_21387
  Gene Ontology: Mol. function=polyamine oxidase activity; Cellular component=nucleus; Biological process=electron transport
  Homolog annotation: Hit_ID=O64411; Match level="QueryCoverage=64%, HitCoverage=35%, E-value=2e-74, Identity=69%"; Hit description =Polyamine oxidase precursor
MGVYTKIFLKFPERFWPVGEGKQFFMYASSRRGYYALWQSFEREYPGANVLLATVTDDESRRIERQSDDQTKAEVAEVLRDMFPGADVPGPDQIDIYVPRWWSDRFFKGSYSNWPVGVSRYEYDQLRAPVGRVYFTGEHTSERYNGYVHGAYLAVWGSAAHTLANTSSTGIDSANILINYIFKNEEYKVRGKYDVEDDLIAQSGSRHRDRSRPIINGLGLGTTTPCVMGRMGAPKQDPEGGENEFLGQAHEASSLGAMDKTGRGNPPYLTFLFLHSFLRERDRLHLIIVHVKIKMATPE

SEQ ID NO: 63167 - protein, 83 aa, Zea mays
  Coding DNA Sequence Number=SeqID_21388
MSKLDKTFPLLVLPVLPSLHNPGVGLLEAWFEGISKSSMLNLEKPGMGDQMGSSYWKENHSHRSSYDWNMGLAGLRWTGQHDG

SEQ ID NO: 63168 - protein, 167 aa, Zea mays
  Coding DNA Sequence Number=SeqID_21389
  Gene Ontology: Mol. function=acyltransferase activity
  Homolog annotation: Hit_ID=Q6K714; Match level="QueryCoverage=66%, HitCoverage=22%, E-value=1e-10, Identity=48%"; Hit description =Putative anthocyanin acyltransferase
  Subcellular localization annotation: CTP_CleavageSite=82; ConfidenceScore=5.34e-01
MGDRRHCRLYRKSRQSTSYARPRCLLSAVPTPPESVATVAALPPSPRPTLVLASPARFSRFTPHRFRLASPCSDGGGEYDFVCFVGGSTGGNDDEVVELIVAESSDDFDELSGGGPRDVVWLYALVWRERLPPLEADDSSVFTTSQVTKGFKASGQARGRTERRVVG

SEQ ID NO: 63169 - protein, 66 aa, Zea mays
  Coding DNA Sequence Number=SeqID_21390
MQIHYVIPNENLSLKGNCNLADGEYILVPEQGAAQEVDPDPAPEPAPVPPPLLWKQAPVLCKPTNL

SEQ ID NO: 63170 - protein, 41 aa, Zea mays
  Coding DNA Sequence Number=SeqID_21391
MAIGRLLGFRKKKARTHGGAEIRTRITAKELILEMDSTNRP

SEQ ID NO: 63171 - protein, 94 aa, Zea mays
  Coding DNA Sequence Number=SeqID_21392
MEPADRGRLKRSTTASRNHGVRCSARSRLGWPPHESLWSSLRLQGWWSLTDSSRAIELATMARRDTGDPDPSVSDSVVMCSVVGRWAYRIQTGF

SEQ ID NO: 63172 - protein, 72 aa, Zea mays
  Coding DNA Sequence Number=SeqID_21393
MATIRPGSEILAIASYASQLQGIKYHHVAPPPLVSPPQAIRWTTFTQAFAGRTGSTASPACVAVAVDPHQGH

SEQ ID NO: 63173 - protein, 211 aa, Zea mays
  Coding DNA Sequence Number=SeqID_21394
MKILKAERWRKGASPHEIMLLQQQQAAHQDKRPFGLKALGVNQQGHGNCGGAEQNLEGKGAQQEEEKQGMTVTRGVNPFLKADSSDRAPKGHKKSPPTHSGAPLPYDMGARPHKSYGWRNDLLESYPSDVGQCVKRRRTAVEDEPPRAPVPCLLRTTAEDREGTGTPVDMTNGSYPPLRRAQGPLSVPWIKGTPYYCIKAQFPYDYLLATW

SEQ ID NO: 63174 - protein, 211 aa, Zea mays
  Coding DNA Sequence Number=SeqID_21395
MDTAGATPLSILALSLRRSPTGACRLRVTDSRFQFNPSEGLDAHADSTFDASISMFYETFCLDKMGVVLGAINPVQSTRALISAIPVVLACSRSFPGNVQVMMTMARARWLRPLAYITGGGPRGSIGSPPGREAEVFMMGSRHVSASDPAWSLTRALSTFRPSASGPHRERSGPFAKGYGSHLGGPEYSITMDPRRSRTFSGGEAERCCGP

SEQ ID NO: 63175 - protein, 451 aa, Zea mays
  Coding DNA Sequence Number=SeqID_21396
  Homolog annotation: Hit_ID=Q6H5H5; Match level="QueryCoverage=71%, HitCoverage=90%, E-value=2e-66, Identity=43%"; Hit description=Emsy N terminus domain-containing protein-like
  Pfam annotation: Domain name=ENT; Domain location=51-124; Score =122.6; E_value=1.1e-33; Accession=PF03735.5; Description=ENT domain
  Subcellular localization annotation: CTP_CleavageSite=36; ConfidenceScore=5.13e-01
MKAVGYSPYDSSGTDDDLPPAQNRGLRGRSFSGNVVASAGAFPYMRANNDLESEIHRVEQDAYTGILRAFKVQSDAISWEKESLITELRKELRVSDEEHRELLNKVNEDGTIRRMRELRQAGGSPSGLHHGNMVLYGAEPGSTTKRQRASHSIPLQSAGLQSPMMPSHSVSSAKWGPLQARGTKARTPIPLALPSVDPSSLINHKVYTRWPEDNNFYEATITRYNPVTGEHGLVYDMGTQAESWESVRLCDMAPEDIRWGFDGHLSNRDVWSPSGPMLMRHMTNNGAMAGSIKGRGRLSINETIKDYAPPENGTNRNFDHVDIPNTGSVVMEVKRVLFNPNMPEIEKARKLLKDQEQSLLDAIARLDEASDSDNVVVIVGIHHFLDPEPYEQLYLPPHGSQLQQAQKTVSMHGAQNELLPLKVFMQMLFYEKACVVTLYSPSQQAAARFGT

SEQ ID NO: 63176 - protein, 150 aa, Zea mays
  Coding DNA Sequence Number=SeqID_21397
MGRPRGGKAKRPTSQANHSEDADAGSGGEEEAVTVTPAYKRRGRPQKHHTADDTDDEEDDAAKAEPMEDAKPAVVSPESGGKKKRRRRRQQQPKRGCDPATEEEKDDEAAKRSGFRHHGSRRKSTPRRAAEAGVECRVRIKVITIPEYKL

SEQ ID NO: 63177 - protein, 139 aa, Zea mays
  Coding DNA Sequence Number=SeqID_21398
MSSYCDRLFVDQQSISRPTGYPYANPNIFVLAPAYPRLRRRQVIEAVVLRPGPVASVASVDLPPRAKEQANHRVPSLFVIDYSPVFPQAATFIPNSIHTEHEVSPVFVCASTINLPSNHFDLVVTLFLIAISMMAHKIA

SEQ ID NO: 63178 - protein, 62 aa, Zea mays
  Coding DNA Sequence Number=SeqID_21399
MSVRIKAVVDRFVKELQEALDTNIQDRIMKEREMQSYIEECEREVAEQEVAWKAELSRREAE

SEQ ID NO: 63179 - protein, 214 aa, Zea mays
  Coding DNA Sequence Number=SeqID_21400
MMNAGTFGEITDRWVMELIMKLKLPFGRPRFFAPSGDADGAVFGAFGPLGEKGPEAPRAAGAGSPAMDAGTNASDMEPSGPYFLGRPRFFLVPGSPAPPECTGAPPLPPTPAKLEADAALPPTGWYVAVAGGTELTGVKMAVPSVVYAMRRPCVPPEDGGVAGVFGSPNGSLPAITPCSGDGLTSIIPHRTGAPKQKRNYESGNLRLSSAIFLD

SEQ ID NO: 63180 - protein, 425 aa, Zea mays
  Coding DNA Sequence Number=SeqID_21401
  Gene Ontology: Mol. function=protein-tyrosine kinase activity; Cellular component=integral to membrane; Biological process=protein amino acid phosphorylation
  Homolog annotation: Hit_ID=Q9LSI9; Match level="QueryCoverage=80%, HitCoverage=54%, E-value=4e-95, Identity=51%"; Hit description =Receptor-like protein kinase-like protein
  Pfam annotation: Domain name=Pkinase; Domain location=117-400; Score=- 15.3; E_value=1.2e-07; Accession=PF00069.15; Description=Protein kinase domain
  Pfam annotation: Domain name=Pkinase_Tyr; Domain location=119-397; Score=-22.4; E_value=4.3e-11; Accession=PF07714.7; Description =Protein tyrosine kinase
  Pfam module annotation: Pfam domain module=Pkinase::Pkinase_Tyr; Domain location=117-400::119-397
  Subcellular localization annotation: CTP_CleavageSite=14; ConfidenceScore=5.28e-01
MVSSPPSGPFPCLTASQRWSKARGFAGFTERALVAAGAAVVSAILVNPLDVAKCTGKGKGGRRRHRRGTSESGGGEDGSWWTERLRAAHNRLVPVSLFQKPIVKVKLADLMAATHDFSTSHIVVAGSSQAGIAYRAVLRDGSALTVKRLHSCPLSEKAFRAEMGRMGQLRHPNIVPLLGFCVVEDERLLVYKHMESGALSSVMKKPGEAPLDWATRLRIAVGAARGLAWLHHGFQVPQIHQNLSSSAVLLDEDYDARITDVGLTRLVRMAPGEGGDTSPFLNGDFGEFGYVAPEYASNPVGTMKGDAYAFGVILFELVSGQESAAVVTDVTGEGFKGTLVDWVNQLKASGRISDAIDKPLRGKGHEAEIQEFLKIAFACTQPRVTERHSMYRVFHALKSIGEGCDVTEQFDEFPLAYNKDDSDAI

SEQ ID NO: 63181 - protein, 268 aa, Zea mays
  Coding DNA Sequence Number=SeqID_21402
  Gene Ontology: Mol. function=DNA binding; Cellular component =mitochondrion; Biological process=chromosome organization and biogenesis (sensu Eukaryota)
  Homolog annotation: Hit_ID=O23142; Match level="QueryCoverage=75%, HitCoverage=43%, E-value=6e-37, Identity=49%"; Hit description=AT -hook protein 1
  Pfam annotation: Domain name=DUF296; Domain location=19-190; Score =129.8; E_value=7.8e-36; Accession=PF03479.5; Description=Domain of unknown function (DUF296)
  Subcellular localization annotation: CTP_CleavageSite=61; ConfidenceScore=5.25e-01
MQSYARLPYLQNLNAKSLTRSFVARLRVDDVSAKIMSFSQHGTRAVCILSANGAISNVTLRQSATSGGTVTYEVRILNATSYEYRVHFDTDSQLEYFTARYTGTAIQKSDLTDVYCLYRESSLSLGRFEILSLSGSFLLSENGGQRSRTGGLSVSLAGPDGRVLGGCVAGLLTAASPVQIVVGSFDAGGKKQPKQQQQQQLAPSPAPLNLAPTGVAAGPSSPPSRGTLSLSESSSGAPPSPPHAGASGGHGQQQQQPQPGGFSGLFWK

SEQ ID NO: 63182 - protein, 35 aa, Zea mays
  Coding DNA Sequence Number=SeqID_21403
MGQVFTGDLPFSHFSARDTQILMLKQFLDEKAKNK

SEQ ID NO: 63183 - protein, 65 aa, Zea mays
  Coding DNA Sequence Number=SeqID_21404
MEKENLEKEKSVLMGTASNQDNQDGALEITISGNHGMLLNRIADTYAKTVLFIKNWTARTACSGS

SEQ ID NO: 63184 - protein, 75 aa, Zea mays
  Coding DNA Sequence Number=SeqID_21405
  Subcellular localization annotation: CTP_CleavageSite=60; ConfidenceScore=5.58e-01
MAAGGEALFFPGAAPPFLRVFSSGRSLWPAASVAAGSTMASLSARKHNLTSRACYFFFVVCSFGDKLPFLAKLIN

SEQ ID NO: 63185 - protein, 140 aa, Zea mays
  Coding DNA Sequence Number=SeqID_21406
MTPMHYGRTFVCFMRERRMHDHERSTDMYSHLTIPIEEVNVYGLTQMTQANVVIKILSILSTDNYVQIVIMLHQVDLSITMPTQILVKINVQDSSSSNKKKIWHSRLSKRRRANDTIKMLKNLNKKVKAPCVVLVIETNN

SEQ ID NO: 63186 - protein, 49 aa, Zea mays
  Coding DNA Sequence Number=SeqID_21407
MAELLEEYTAAVARAVERLLSSAAPRRILPRRVQFTFFVDVLLPVSGYV

SEQ ID NO: 63187 - protein, 470 aa, Zea mays
  Coding DNA Sequence Number=SeqID_21408
  Gene Ontology: Mol. function=hydrolase activity; Biological process =regulation of cell growth
  Homolog annotation: Hit_ID=Q0KB35; Match level="QueryCoverage=44%, HitCoverage=33%, E-value=1e-14, Identity=29%"; Hit description =Hypothetical membrane spanning protein
MGLYIANYVIERSTGWVLTHPLTISEYEKLKKQLKPDFEDMVPWTSTDLFKTVFDLMISVTLFVGRFDMRMMQAAMNKTPDEANSHDLLYDHLDGKDELWFDFIADTGDGGNSTYAVARLLAQPLLVINSDDSRLTFPRGQLLLVGGDLAYPNPSSFSYERRFFCPFEYALQPPAWYKPEHIALEKPELPLGVSELRRYRGPQCFMIPGNHGNDCSYLDFPMDGWVFGLDQALHGDIDVYQFKFFAELCQQKVTIPFMNGTEKWKANIFLIPQDFALVSSIGPLDFTLHVMAVTRSTICKKGIESLPRGGAIIYYVCVFLYFWVLSTPVVSLVFGSYLYLCINWFHIHFDEAFSSLRIANYKAFTRLHIKKNGDLEVFTLAVDKVPKDWMLDPDWDMEPKQPFQMSYTRKFPSKWRAASGLDPINAVRIVDRFVIPRTPSSPTTPGGSVSSPTTPGGSVSSPTTPGGFMR

SEQ ID NO: 63188 - protein, 104 aa, Zea mays
  Coding DNA Sequence Number=SeqID_21409
MALGEDAVCDNDKDLGNESTSNVSHFADDLAAKRHPTRPRGALSHAVRPQAVRPRGGRAWRGVGHVSYGQGPHGSGFGSHFPKDHDFLLVDRGLENTWFMDVTP

SEQ ID NO: 63189 - protein, 106 aa, Zea mays
  Coding DNA Sequence Number=SeqID_21410
MALVSGGGSSSHLSPAMFSVSSLLTITKEKLESLRDEELAMVASSFNRFHDNRQNRWCGRSKDGCFNSSDLDHLIASCPEMGKSEAGPHVGVKYRNTIWGGHITLF

SEQ ID NO: 63190 - protein, 113 aa, Zea mays
  Coding DNA Sequence Number=SeqID_21411
  Gene Ontology: Mol. function=transition metal ion binding; Cellular component=endoplasmic reticulum; Biological process=intracellular protein transport
  Homolog annotation: Hit_ID=Q9FH68; Match level="QueryCoverage=86%, HitCoverage=37%, E-value=5e-15, Identity=48%"; Hit description =Arabidopsis thaliana genomic DNA, chromosome 5, TAC clone:K16E1
MIQLLFVVLVAEASLTAALLFKTPLRKLAVLVIDRLKRGRHAPVVVKTVAGVILALLASTLYSMTQIAGSTSDSDSGGGPTPTDQVLFSRHLLEACLMGGCSSGCVDIKVFLV

SEQ ID NO: 63191 - protein, 68 aa, Zea mays
  Coding DNA Sequence Number=SeqID_21412
MDGRAVAPASLYRPDNAMTSAQERVLWLRDYLTELVDAWRTIVKQLTPVRIIPASRSPSGYDELTVDR

SEQ ID NO: 63192 - protein, 140 aa, Zea mays
  Coding DNA Sequence Number=SeqID_21413
  Gene Ontology: Mol. function=kinase activity; Cellular component =ornithine carbamoyltransferase complex; Biological process=amino acid metabolic process
  Homolog annotation: Hit_ID=Q6QP54; Match level="QueryCoverage=58%, HitCoverage=29%, E-value=5e-18, Identity=59%"; Hit description =Putative kinase
MAPPVDVVGPRPRLGDVEAPPRLRSSLSSVAEVESEPLGRARRRPSAEARAESEPWGRAKRSSLSSGAEPESEPWVGWSGVRRLPGLSPSPSPGSGEAELPMVSEVGPDYLSASLRRVAQQSERRSGTVPSVMPVSGAAK

SEQ ID NO: 63193 - protein, 181 aa, Zea mays
  Coding DNA Sequence Number=SeqID_21414
MKNARGRRGPHLSVSSSSSLAVRNRRVGDGADGGDVSRPINHDLRLLREPKSHAAATIDLGSGSGSSVVAPIDIVDEDSGASGGSGTEAPIVVSQGSSDRKRCNTSKVWDDFEPVYTIKNNKRIKTGGIPRLTAIAAKSTQGPPYTDHSPTALAPFGGPGAKNTETQETVAEDGGFYSLKS

SEQ ID NO: 63194 - protein, 187 aa, Zea mays
  Coding DNA Sequence Number=SeqID_21415
  Gene Ontology: Mol. function=enzyme inhibitor activity; Cellular component=cell wall; Biological process=cell wall modification
MDWRDLWARIAQGKGERGSGAGKHRSSFLSQPPSSNRLPLRYAPTPAAAARHLRHAEGWQQRRHGRGRRGPALRRDVCPSTLVTIPNLAQKMLQDVISALVGRTTIVVGASSSKVQLLVLPPAAAPRGWVHLRVRDQLALSECLELFRHTLKLLDTAVVGLSHRRRRQRRSPSSLACRPCSRRLTNQ

SEQ ID NO: 63195 - protein, 122 aa, Zea mays
  Coding DNA Sequence Number=SeqID_21416
MGAGEQLVIPEAMVAARVLQLTSTSPDDGKTRNNGSASPRNQGRIDAALTLPHGDDFGLRYAARADERVQGRVKGILATGRGTCRAVQMGPSQSPTPRRADASAGVLGRVVTGMKLTSWPRM

SEQ ID NO: 63196 - protein, 138 aa, Zea mays
  Coding DNA Sequence Number=SeqID_21417
MRGNYQGPGSQTPSIEESQRYDEHLQQSRVVLAPRAIARFGSLNFVIDKDDEMGYFPTIDDLEFVGMVEGGGDLIFDALDSGMDPGSLVSSEGRPPNNGESGGRLTLATLVPSKGQAPLVASANWGATRGKSPRNHQA

SEQ ID NO: 63197 - protein, 309 aa, Zea mays
  Coding DNA Sequence Number=SeqID_21418
  Homolog annotation: Hit_ID=Q9ZU41; Match level="QueryCoverage=82%, HitCoverage=82%, E-value=2e-25, Identity=30%"; Hit description =Predicted by genscan and genefinder
  Pfam annotation: Domain name=DUF789; Domain location=25-278; Score =203.0; E_value=6.9e-58; Accession=PF05623.3; Description=Protein of unknown function (DUF789)
MASSTAIATARAHDAAVYGAAGTHSNLRSFLDSVTPVVKAHTVPMASYLPLSNGYYEKIADGVRCFYLGDLWNSFYEWSACGVGTSQIQLYTNTRNAPVSQSMIYDGRFDRNNHYSVGMYTHGYQAPLRMPTIGVEGKGELFFKYFEPDSPYERIPFADKVYELCYSCPSLSSLSSAELSPSSWMSVFWYPTSHVPMKNRKDLNTCFLTYHSLSTCKDSMQAFNHMSLAPFGLATYKLDAKVWASPNSGDQEHISSLFDASQSWLKEHNIHHYDFNYFAHRCSSKMNNMNMTDQQVHSLWGLKCVVCCF

SEQ ID NO: 63198 - protein, 101 aa, Zea mays
  Coding DNA Sequence Number=SeqID_21419
MIVSALWSKGKGLIGYEWEGTSAFAVARRQTQLMRPITCDRSVSDQVVKFRKTSITLLALGAASVHVPVSCAPAACAAAPADAAQIATSTVSTFSHTLYDE

SEQ ID NO: 63199 - protein, 110 aa, Zea mays
  Coding DNA Sequence Number=SeqID_21420
  Gene Ontology: Cellular component=plastoglobule
MRRRGAAGVVRAFFNPLGDERILREAIKFEFQYPFSRVYDCMLAKFILEKEPVAFMGGVFAGLLRLDLNEDPLKEWISRTVEASGIAEENSSEESSEADQNDAPQQIEIE

SEQ ID NO: 63200 - protein, 178 aa, Zea mays
  Coding DNA Sequence Number=SeqID_21421
  Homolog annotation: Hit_ID=Q8RYH0; Match level="QueryCoverage=37%, HitCoverage=90%, E-value=4e-09, Identity=45%"; Hit description=GPI -anchored protein-like
MAVSSMNCESKGEKRVAARALLYGEMVRRSRQAPHVSHTVKRESEAPRLTRGSGLSARSGRGDGLRDVFPLVGRIQILQPSRFGPGLANFCVRHCSTSVQELVCPALAGAMRDWAPSIIATALFALLCPGGVLQMPDRHRPVDLMNMKTSFPSMLVHVVIYSLLLMLFLVILQPHLYI

SEQ ID NO: 63201 - protein, 195 aa, Zea mays
  Coding DNA Sequence Number=SeqID_21422
  Gene Ontology: Cellular component=chloroplast thylakoid membrane
  Homolog annotation: Hit_ID=Q6EPY8; Match level="QueryCoverage=71%, HitCoverage=48%, E-value=1e-49, Identity=73%"; Hit description=SOUL heme-binding protein-like
  Pfam annotation: Domain name=SOUL; Domain location=57-195; Score =40.7; E_value=2.5e-11; Accession=PF04832.3; Description=SOUL heme -binding protein
  Subcellular localization annotation: CTP_CleavageSite=30; ConfidenceScore=5.25e-01
MHRGLELPVRDPAAGKSNGVVAAVLRFPTAASSPRPASLRRPLAADGRRGRRHPLPDLETVPLRILKRKAEYEIKEVESYFVAETTMPERSGFDFSGSSQSFNVLASYLFGKLQNTASEQMEMTTPVFTRKGELNSQSMDMTPVITKKSAGTNKWKMSFVMPAKYGSNLPRPKDPFVTIKEVPCKIVVVAAFSGS

SEQ ID NO: 63202 - protein, 621 aa, Zea mays
  Coding DNA Sequence Number=SeqID_21423
  Gene Ontology: Cellular component=membrane
  Homolog annotation: Hit_ID=Q75GI5; Match level="QueryCoverage=94%, HitCoverage=95%, E-value=0.0, Identity=65%"; Hit description =Expressed protein
  Pfam annotation: Domain name=DUF221; Domain location=175-595; Score =357.8; E_value=1.8e-104; Accession=PF02714.6; Description=Domain of unknown function DUF221
MPGSSIVNSQFFHGWIVRIPNWKQPHNFSVYFGRRLAEERFQRQDDYFSFERLLPTAGWIVKAYWLWVHCSALYVITISACILLFHEYKYISRKRLAHVTGYPPNPGLFTVLVRSIPRFDNELLDDTIRNFFVNYHGSSYLSHQMIFRKGHFQKFVDRAERAYRRFVRLYRNKFIEAKKSDLTNPEVVEAQKTRYAAVVASRVFQSSNPMLWVTDLAPEPRDVYWSNLWIPYRQIWLRKLATLAASIVFMFVFIVPVAFVQSMMQLEQLKRMFPSLTGLLNKSFFARVITGYLPSVTLLLSLYTVPPLMMLFSSIEGSISRSGRKRSGCLKILFFNIWNVFFVNVLSGSVLNQLNVFSRPKDMPTMLAELVPKQAGRVCARRYCRFSTWSTTSSAGSSAAAIARIRNTFTLSRTTPKCPKVLLFNLLGFTFSIMAPLILPFLLVYFCLGYLVYRNQILNVYYPKYEMGGKLWPVMHNAIVFSLVLTQVIALGVFTIKRSPVTAGFTILLLVGTVLFNEYCRHRFSRIFEAYSAQDVIELDRDDEQSGRMQEIHQHLLDAYSQTPPGEGSSRGGSQVPIELIMEDPAQEASESSQELCDTVQEVSGAIHDHDHVVEDKAHSV

SEQ ID NO: 63203 - protein, 47 aa, Zea mays
  Coding DNA Sequence Number=SeqID_21424
MDARSSDRGRSYQRGLATERGGLRLAGDRGKGKTGVAAALGEIEGGD

SEQ ID NO: 63204 - protein, 47 aa, Zea mays
  Coding DNA Sequence Number=SeqID_21425
MDARSSDRGRSYQRGLATEHGGLRLAGDRGKGKTSVAAALGEIGGGD

SEQ ID NO: 63205 - protein, 367 aa, Zea mays
  Coding DNA Sequence Number=SeqID_21426
  Homolog annotation: Hit_ID=Q75GI7; Match level="QueryCoverage=70%, HitCoverage=63%, E-value=4e-68, Identity=55%"; Hit description =Expressed protein
MDLVQLCSFKYFIVSLPLVKYIKKDAYMLVTSYSRNLQVFQWSILTRRRRAYSEGEVNDLHKDDKGQGEAVRLGRKDVPPKMEADSSTLDERVEDEENDEDEERKERSQEDQEKSFHGDDVSSAVTHDPQSSEQDELFHHAQDTVLFVDDASTAVPNENHVAGNDEEEVQRARERSFRGDDVSSSVDHDAKVAKPLPEEQLNSMDKIFEGTTNLSNGISFRAPGINGSYAGMDNVATVPTNSPSQKNAGTPSNDIESKTHPSPANLTGPEQSNSTLKDHPDQQVNSTAVLGNQVQPLTNQTPWPELDSPNGTLALVTDVQKSTSGAGDDGSSTVDKRTDGRDGPKEDVDVSTKIMNRAISEDEVVPE

SEQ ID NO: 63206 - protein, 360 aa, Zea mays
  Coding DNA Sequence Number=SeqID_21427
  Pfam annotation: Domain name=DUF295; Domain location=281-333; Score =35.3; E_value=2.1e-07; Accession=PF03478.8; Description=Protein of unknown function (DUF295)
MGMLMNNDDSSSMHPRPQVLASLPLLVYEYKDHPNATTRMLIYSLPERSIVYTHNSSRPQMMMMEGNLSFSTPQGWLVILGQASEASIWHPLTGETITLPPIHGDHRIPDSCKCLLTRSSVAHPDCAVVLLDVTDPLMWFCPVNGGADRMWVQHAYDIGDHFFPEEFRTPSTPTKNVVDDVAALGGKLYFCFTESDQNFMGVFDFDFHGHTPAVEFYEFDVSQEFNLKFPEGVCSACIHLLESMDELFAVCIFYVDFDPTNISAAHIFKMEEICDEEPVAWHRVDDIGDRAFLLTGTNMATWCSASTNNLKGNSLYFLGHLVAGHRNLCIYDIQEQSMEIVQVHDQEDMEIVRTPPYWIN

SEQ ID NO: 63207 - protein, 89 aa, Zea mays
  Coding DNA Sequence Number=SeqID_21428
MRTDRAQDRHLLRRTVPNLRPRHRFTLWRQPLVLRISTEALALAGKEHPDDNAQRRHLSDSGSNDPTQALFVYVGLHPESFQLIKVYIN

SEQ ID NO: 63208 - protein, 236 aa, Zea mays
  Coding DNA Sequence Number=SeqID_21429
  Homolog annotation: Hit_ID=Q69LJ9; Match level="QueryCoverage=35%, HitCoverage=43%, E-value=2e-25, Identity=68%"; Hit description=Auxin- induced protein-like
  Pfam annotation: Domain name=Auxin_inducible; Domain location=119 -213; Score=75.7; E_value=1.5e-19; Accession=PF02519.5; Description =Auxin responsive protein
MSSSMGHESSGGGADEEDPAGLQRVIWLRQMLHRWQSSSSRIAAERRSSASDDGDRANPDDANATTDQSSNGDPTPAAADNASSSSSSRNQMLPAAPHGAADEEDEDEDRRLLSRVLLVEERRRGCPPDAAACDSPMTPMTPDAPADVPRGCCPVYVGAERRRFVVPTAYLGMPVFRRLLEKAEEEFEFDYHGGAVTIPCDTEAFKYILVVMDRHRHGLVDDDGNEKHEEQDASSS

SEQ ID NO: 63209 - protein, 83 aa, Zea mays
  Coding DNA Sequence Number=SeqID_21430
MEGGRPVQVGDVAEEDIDDDNAYSRAPQIPVGGEGEQGRREGERVGAAFVRRLSRWRGRWHGERAAGVDCRETGDARQGQAGA

SEQ ID NO: 63210 - protein, 842 aa, Zea mays
  Coding DNA Sequence Number=SeqID_21431
  Gene Ontology: Mol. function=mannosyl-oligosaccharide 1,2-alpha -mannosidase activity; Cellular component=membrane; Biological process=transport
  Homolog annotation: Hit_ID=Q69YB0; Match level="QueryCoverage=98%, HitCoverage=97%, E-value=0.0, Identity=64%"; Hit description =Putative Sac domain-containing inositol phosphatase 3
  Pfam annotation: Domain name=Syja_N; Domain location=88-465; Score =360.4; E_value=2.9e-105; Accession=PF02383.9; Description=SacI homology domain
MAAAAAEAEVDSCLQSFELYEAESKFYILGTNSNKTIWRLLKIDRMEPSELNVDEDSTVHSQSDYLDMLKNLDEEHRSTGGVKFVTNCFGIIGFIKFLGPYYMLIITEQRKIGDIFGHPVYQVTKTAMIELSNSKSRPKLINSKDENRYKKLLQIIDLRKDFFFSHSYHIMRSLQKNFNDPQEGWELYDTMFVWNEFLTRGVRDILKTTLWTVALVYGFFKQSHILTSFKDKFAICGKDIMLTLIARRSRHYAGTRYLKRGVNEEGRVANDVETEQIVYENMLGPWQISSVVQNRGSIPLFWSQETSKLNLKPDIILHEKDKNYEATRLHFENLRKRYGNPIIILNLIKGRDVPLTSFLKKLVSRLEPGLAQQTASLACPADQLHLESVGSFTYKSKVIHENHPFEIYFVLFLKTLEKRPREIILRWEFDRAIKIINSGLPGEDHLRFLHWDLHKNSQSKSTNALQVLLKVAFEALNMTEFFYCQVSPDQRAKGSPNLSPTLKIGFGHHACDDKNCGNADYVDDLDDISQEDTCGSSDPGNGIAEDKFEVNGSAQIKRPKFQKGVLRTNCIDCLDRTNVAQYAYGLAALGHQLHALGSVESPEVHLDSPLSRHLMHFYERMGDTLALQYGGSAAHNKIFSAKRGHLKFAIQSQEFFRTLQRFLGYFQPQVGKPALWEPESGDEHVLDDETCKLMKRARSDGSILNKSKLSISSNGPNGILKLAFTGSKNEGQRPNRSSDTACDNGMSKSRYTPTLSHIKHISCELDYYNGSGDSNFLDLDWLTASDNERSKAISTPDVNISTDSGVRDVISGTTDDQASGIHAQGFSKDFVQWLNQGEAFWY

SEQ ID NO: 63211 - protein, 302 aa, Zea mays
  Coding DNA Sequence Number=SeqID_21432
  Homolog annotation: Hit_ID=Q9LJG5; Match level="QueryCoverage=48%, HitCoverage=51%, E-value=9e-32, Identity=52%"; Hit description =Arabidopsis thaliana genomic DNA, chromosome 3, P1 clone: MAG2
  Pfam annotation: Domain name=DnaJ; Domain location=19-87; Score =109.0; E_value=1.4e-29; Accession=PF00226.21; Description=DnaJ domain
MTAGQCGNIQDQEAAPGADLYAVLGLNRECTDAELRVAYRRLAMIWHPDRCSASGSSARVEEAKERFQEIQGAYSVLSDSNKRLLYDVGVYDSEDDDADLSGMGDFLGEMADMMSQATPTVTPAPAGQDLEHPSRVEIRALTQSSPSVNVQESFEELQQLFVDMFQDDLDGAGFFGGLPTSRSAQGPSSTSLPPSTSPLRPTPPARSKGAQTPSSFNGAGRRGSTAKRPRTGWAGLEPDLGLSGFCFMVSKSKERPAAWACDGGDERSGSKQRLSTSRDVSGSGGGMSRSRGRAKAVETCGQ

SEQ ID NO: 63212 - protein, 76 aa, Zea mays
  Coding DNA Sequence Number=SeqID_21433
MGLGAARRVVHVEGEVKCGQLFMASQSGAKRGIHSSGFLPTRPTSPIRFCHARSQARYRRDSQYKDVLSRPYNFER

SEQ ID NO: 63213 - protein, 105 aa, Zea mays
  Coding DNA Sequence Number=SeqID_21434
GLEEVDEHVSLFVGECYPNANPLGQDREVDRDLLRVLSGLEGVGANLVGTRSILGMSFLSHPNLKANSGANKMFFPKLVFGFLVTSSWSSGPFARNPKTNLESQS

SEQ ID NO: 63214 - protein, 132 aa, Zea mays
  Coding DNA Sequence Number=SeqID_21435
MSGAPEDSNANLLPSGISRGDSAIIHRTVRCTPDSVRCAKGGRPQELASFGKSQWLVHYNSPDCPVCTGLSGPPSQQNPPEGLPRNPLQDRHHSKILPRAFPGIPCRTAITAKSSRGPPYTDHSPTALAPFG

SEQ ID NO: 63215 - protein, 176 aa, Zea mays
  Coding DNA Sequence Number=SeqID_21436
  Gene Ontology: Mol. function=trans-octaprenyltranstransferase activity; Cellular component=cyanelle; Biological process=isoprenoid biosynthetic process
  Homolog annotation: Hit_ID=Q75HZ9; Match level="QueryCoverage=66%, HitCoverage=29%, E-value=2e-49, Identity=83%"; Hit description =Putative polyprenyl diphosphate synthase
MDLGDAYADKFMLITCLWCTDSEEFQPVVPVVKAEPLKNQWADEDVEEDDVKESWEEENLGLSFQVVDDMLDFTQSAEQLGKPAASDLAKGNLTAPVIFALQSEPELREIIDSEFSDTDSLAAAIELVHRSGGIRRAHELAREKGDLAIQNLQCLPRSDFRSALEKMVEYNLEGIE

SEQ ID NO: 63216 - protein, 156 aa, Zea mays
  Coding DNA Sequence Number=SeqID_21437
MRAWAWGGCVISARIREIARSGWGIAARMEGAGCGAAQLRDASVGWLRGRSGGAGMREAARMEGAEERDAAWKERRSGCVDGRSGEAAARRGAAGTAAGVRGLRARQNVRHQKLDAYTPYIISSRDLILPFCHASLRGCGLDFGLVQDGPVKNDKQ

SEQ ID NO: 63217 - protein, 112 aa, Zea mays
  Coding DNA Sequence Number=SeqID_21438
MGYLSPMMTVWKLALAIINQVKNLYRRKGIMNMSSESPFFQNKNMFGLLDDLISFLDSLLGVIGYDAEVTRLSTIAYDSEIPGTLNCHYYAGVYVAELDAMNHDAELLSPDT

SEQ ID NO: 63218 - protein, 212 aa, Zea mays
  Coding DNA Sequence Number=SeqID_21439
  Homolog annotation: Hit_ID=Q6RYF4; Match level="QueryCoverage=32%, HitCoverage=6%, E-value=6e-16, Identity=64%"; Hit description =Coatomer alpha subunit
MLTKFETKCNRVKDLAFHSRRPWILSSLYSSVTQMWVYRMGTILNRFAVASSSTPHNRSLYPEYGCTQAIEIICSVLARHGANILLPRLGFMFYEARAVFNGMEAMYFKQHFFPPSKLQQYCLVVVTVKPSAASSVRPASPDLTYIWFYEEGNHKSRLKLINSTLEQLNEQVLQVLKVVSAQVQLLYRISFGEDTYSGTFKSINVSVQELKE

SEQ ID NO: 63219 - protein, 127 aa, Zea mays
  Coding DNA Sequence Number=SeqID_21440
MHDEVVKWVKVFGHEGQMGLAVAWPRRAISDCSRPQPSLERRWPAGRGHSDRGRGPIFRESGPGTRDGIVSESDLISFLLWMPLLILLNTSPKPLLILSKHGWERLRPAGGDRPVRLLAGRATDWPL

SEQ ID NO: 63220 - protein, 80 aa, Zea mays
  Coding DNA Sequence Number=SeqID_21441
MASDIRLKSSVSRADESRFLPAKVERTTGQRKSDACSGPWKGVSRHYRLTADGDGKLFLDVQFLIVIPSPSLLRDITVED

SEQ ID NO: 63221 - protein, 730 aa, Zea mays
  Coding DNA Sequence Number=SeqID_21442
MTIDFLRARLLSERSVSRAAKERADHLAKRSIVTEPVAAVQVVELEEQLRTVTAQRRKAERAAAEVLAILDSQGFGRLSDAADDSGSEYEADTGDPNAVERDGGGGNAAEDALSGSELGAPAAAAAASAAQAGGLSWRGRAASPECERRRPQHQQHKGRQLRQRHGHGHGPQEGLLLLPRRGFVAQVPPRAVLPEDQEEGAEVRALLIAQVPSQLLACYCAIIWHTHTHALLIDRSQTEEEEGNDNAVESTEDGQERSDCTVCTDQPADVDGEVNQDGHGSSSNGRGEDRDDLAMVYEKDGEMERVLEKQAELIGQFEAQENAQREWEEKFSLSRDSVMDNVNLLNNKLNQAENACGRRETARVVDKEVVCEQARSSDNNFHCINDPSECLPNGPVSELPQNVAKDSVTEHRKFDGFGHDCVVTAAAVISSHGELQVRKDVLTTKSYPEGSGNNLGKSALPPQGSCGSRLNAGHRNGQGDESSDSGSSYHVNARSSEQYINTSSVGSQLSDTPKSEVSEWSSSCFHNHTDNQLDTQLHQSSNKDVGGVLEALRRAKMSLRAKLSWPSLASKNILALEAPDDLPVNGMELSLCRTAHVSQEIFALPTPTDYLNKVLPHDDVKVPIGPAGLFRLPIDSFPRDEMTTRDGYGSWFSLTSVSPPYVSPSYHADHIMPALSLSQYGSGLSLNPYYDPHSSMLLSMPTAGGRSVPVSDFRIGDGSFLREVPRPDNY

SEQ ID NO: 63222 - protein, 409 aa, Zea mays
  Coding DNA Sequence Number=SeqID_21443
  Gene Ontology: Mol. function=4 iron, 4 sulfur cluster binding; Cellular component=nucleus; Biological process=base-excision repair
  Homolog annotation: Hit_ID=Q9SJQ6; Match level="QueryCoverage=93%, HitCoverage=32%, E-value=2e-88, Identity=43%"; Hit description =Protein ROS1
MSGLEKVRYWSVPVRLRDYLLSIRGLGLKSVECVRLLTLHHLAFPVDTNVGRICVRLGWVPIQPLPESLQLHLLELYPILETIQKYLWPRLCKLDQQTLYELHYQMITFGKVFCTKRQPNCNACPMRSECKHFASAFASARLALPAPQEESLVKLSNPFAFQNSSMHAMNSTHLPRLEGSIHSREFLPKNSEPIIEEPASPREERPPETMENDIEDFYEDGEIPTIKLNMEAFAQNLENCIKESNNELQSDDIAKALVAISTEAASIPVPKLKNVLRLRTEHYVYELPDAHPLLQQVPCRTAMRGSFPLNGTYFQVNEVFADHRSSHNPIHVEREMLWNLQRRMVFFGTSVPTIFKGLRTEEIQQCFWRGFVCVRGFDMETRAPRPLCPHLHIIARPKARKTAATEQVL

SEQ ID NO: 63223 - protein, 67 aa, Zea mays
  Coding DNA Sequence Number=SeqID_21444
MARRARCKCTSWSRNREHEGRPRAFTSEATRRRCGFKVRGGAATKRWRTWRVSQPTSEVFVWDYNLL

SEQ ID NO: 63224 - protein, 82 aa, Zea mays
  Coding DNA Sequence Number=SeqID_21445
MADTVTQPYQGYQQAIEKWIHSHTRRKVVFWTWSVVKDMMAEVMLDPSVFDELTKDISNNDGQIGRDWIPLTKTILHGIQGQ

SEQ ID NO: 63225 - protein, 67 aa, Zea mays
  Coding DNA Sequence Number=SeqID_21446
MRGMLWPARASAVLVSGAAALLTRERRVWGKGRGPLKRRCHYVNGNMERPPGKTVLPQGYNGTPLAD

SEQ ID NO: 63226 - protein, 66 aa, Zea mays
  Coding DNA Sequence Number=SeqID_21447
MRGMLWPARASAVLVSGVASLLTRERRVWGKGRGPLKRRYEHATVDSEVQQVEVAEQELIEGKLCP

SEQ ID NO: 63227 - protein, 84 aa, Zea mays
  Coding DNA Sequence Number=SeqID_21448
MADEAIKKNEKESYDARVKAKEAEEAAERALIIAGLSPPPEPFNHEADPVIKTALDVMKVANKIVDEVVDKLLNEAAERILKED

SEQ ID NO: 63228 - protein, 48 aa, Zea mays
  Coding DNA Sequence Number=SeqID_21449
MGEGAKWAAGRGVEWAETKSLGPDEGPYGEVLRKQPEPPKVITRTSSG

SEQ ID NO: 63229 - protein, 198 aa, Zea mays
  Coding DNA Sequence Number=SeqID_21450
  Subcellular localization annotation: CTP_CleavageSite=44; ConfidenceScore=5.24e-01
MVAELPPSPMVVLAPSFLSPYCSSKCSLLPSIVFNLQLGPSPALAMAELALAAAMPGLLSLIPAPSALLPTSARPGRPSAWRPSREQALTLPTAPLHGGCPSPCSSPSFALHGHAPARIKVSASSSSPAPPVVSSSAELAASRPYAELASSLPSLRECQHALGKLRYACTIKLHLLVQSIADPRSQIIPVVPRSDALR

SEQ ID NO: 63230 - protein, 82 aa, Zea mays
  Coding DNA Sequence Number=SeqID_21451
  Homolog annotation: Hit_ID=Q8S977; Match level="QueryCoverage=37%, HitCoverage=3%, E-value=6e-10, Identity=83%"; Hit description=Auxin response factor 8
  Subcellular localization annotation: CTP_CleavageSite=17; ConfidenceScore=5.19e-01
MKSAPAALQNAWLSYVRLQISGRLSLSNTWTTQSSRRINSFFAYDGALWSAEKKCLKSELWHACVGPLICLPTVGTCIVYFP

SEQ ID NO: 63231 - protein, 42 aa, Zea mays
  Coding DNA Sequence Number=SeqID_21452
MVVPSSMTFLSLRGVRSRAERIPAKAEKYAASTAPVRCEPKR

SEQ ID NO: 63232 - protein, 229 aa, Zea mays
  Coding DNA Sequence Number=SeqID_21453
  Gene Ontology: Mol. function=protein serine/threonine kinase activity; Cellular component=nucleus; Biological process=protein amino acid phosphorylation
  Homolog annotation: Hit_ID=Q2L3D1; Match level="QueryCoverage=91%, HitCoverage=60%, E-value=7e-32, Identity=46%"; Hit description =Cyclin dependent protein kinase
  Pfam annotation: Domain name=APH; Domain location=36-228; Score= -15.8; E_value=0.077; Accession=PF01636.13; Description =Phosphotransferase enzyme family
  Pfam annotation: Domain name=Pkinase; Domain location=34-229; Score =43.4; E_value=3.8e-11; Accession=PF00069.15; Description=Protein kinase domain
  Pfam annotation: Domain name=Pkinase_Tyr; Domain location=34-229; Score=-52.6; E_value=3e-09; Accession=PF07714.7; Description=Protein tyrosine kinase
  Pfam module annotation: Pfam domain module=APH::Pkinase::Pkinase_Tyr; Domain location=36-228::34-229::34-229
MTGLLVVCKSPAATVKTGLKRKRIAVGSSEQYEFEETCRLGAGAFGAVFKARHRATGQIVAVKCHSAADGDLTMVFREARFHEEACCGGANPFAVSFHGVVRDPGTWKRYLVMECMETSLHDLLHQRPRGSPPLPEATVRAAMWQLLTGTKKMHEACIIHRDIKLQNILVGEGQSVVKICDFGLVMFTDERLPYEPVGTLWYQAPEMLLGKTRLRHQARARFSSTHPYQ

SEQ ID NO: 63233 - protein, 406 aa, Zea mays
  Coding DNA Sequence Number=SeqID_21454
  Gene Ontology: Mol. function=protein serine/threonine kinase activity; Cellular component=nucleus; Biological process=protein amino acid phosphorylation
  Homolog annotation: Hit_ID=Q2L3D1; Match level="QueryCoverage=70%, HitCoverage=84%, E-value=4e-59, Identity=47%"; Hit description =Cyclin dependent protein kinase
  Pfam annotation: Domain name=Pkinase; Domain location=87-375; Score =158.1; E_value=2.3e-44; Accession=PF00069.15; Description=Protein kinase domain
  Pfam annotation: Domain name=Pkinase_Tyr; Domain location=90-373; Score=-44.1; E_value=9.1e-10; Accession=PF07714.7; Description =Protein tyrosine kinase
  Pfam module annotation: Pfam domain module=Pkinase::Pkinase_Tyr; Domain location=87-375::90-373
MDKEKMMNSKKEAKYLTLPSPNKRRKPRIVLCLDDPPPLLPPECVIELRETANLWQVEPEQHLDDSEFRKVGQSHSSSMSSRRHVAWKVGAFGAVFKARHRATGQIVAVKCHSAADGDLTMVFREARFHEEACCGGANPIRRQLSTGVVRDPGTWKRYLVMECMETSLHDLLHQRPRGSPAAAPRSPCAPPCGNYLRAPKKMHEACIIHRDIKLQNILVGEGQSVVKICDFGLAMSTDERLPYEPAGTLWYQAPEMLLGKPDYDTKVDVWSLGCVMAELVNNGRPLFQGSDDDGQLCAIFDVLGVPDDSTWPWFSSTPFATEVMPELDMQRNNHLRDLFPETKLSTEGFQVLSGLLTCNPNRRLTAAAALNHPWFAKVDDLELPKKKEKLESMLPKRHIQRRLRAV

SEQ ID NO: 63234 - protein, 154 aa, Zea mays
  Coding DNA Sequence Number=SeqID_21455
  Subcellular localization annotation: CTP_CleavageSite=42; ConfidenceScore=5.34e-01
PKFVFPSWLCAFVVLYTTFLPISHSQVPNPPPPPRRGIHTCNCNYEPTKSSRAPTAPNRAASEIQQGLEEPGETPSEEEGQQQPEEEGQQQAGGGGEIVSGCRGICDDNPVEAGGAAARLPDPIPAQCAQISRAWTLVVLVLVPWSVVTFCELQ

SEQ ID NO: 63235 - protein, 39 aa, Zea mays
  Coding DNA Sequence Number=SeqID_21456
MEFVGSGDTVRQKRRRVVKTENYVRLAPFILVTARGDSN

SEQ ID NO: 63236 - protein, 74 aa, Zea mays
  Coding DNA Sequence Number=SeqID_21457
TRQQVDRSERSGTSSGPGLLARRDATETLVDGVGCIANAGSLEEMVAGVTWPSTLPPGWTVEWDPASAEEEREE

SEQ ID NO: 63237 - protein, 81 aa, Zea mays
  Coding DNA Sequence Number=SeqID_21458
MEKLNMEIVPQASIANLQLGSILVDQIIEAQKINVGIAHMKERMDECPSGQGVTLHKIVTVIGGGVSVAKAQRLWKAVVRP

SEQ ID NO: 63238 - protein, 419 aa, Zea mays
  Coding DNA Sequence Number=SeqID_21459
  Gene Ontology: Mol. function=ubiquitin-protein ligase activity; Cellular component=intracellular; Biological process=protein modification process
  Homolog annotation: Hit_ID=Q9LUV3; Match level="QueryCoverage=65%, HitCoverage=28%, E-value=4e-75, Identity=53%"; Hit description =Arabidopsis thaliana genomic DNA, chromosome 3, P1 clone: MGD8
  Subcellular localization annotation: CTP_CleavageSite=25; ConfidenceScore=5.27e-01
MAADGHWRRATQRRSAHRKKTADPRAGRRRRTPGGAPGCGRRRQDPRRTPGGQTAQWQLDPRWQIEEEAADGAQTEIHPWRRTLQARGRPRDGERQRDGQRADRRAGRDGSTVTARRRQKFGTGSGADDDDETPMDVDIKINLDVDLERQITAAIDPKLLQHLVNALFRGTLSINDSDLSEPSDAEVDAVGCICAFLHVTFNTFPLERIMTVLAYRTEIVPALWNFIKRCHANRRWPFFSKFASSLPADAPGWLLPMSVFCPIYKHMLKIIDNGEFYEQEKPLSLKDLKSLVLILKQALWQLLWIIPSSSTQKVSSNPSGLKKLSVENVKIRARVGLSELLTQLQDWNNRLPFTSASDFYSQEATSENFVSQAILGNTRASEIIKLAPFLAPFTSRVKIFTLAAEVKWRKECTDSKIQE

SEQ ID NO: 63239 - protein, 584 aa, Zea mays
  Coding DNA Sequence Number=SeqID_21460
  Gene Ontology: Biological process=protein modification process
  Homolog annotation: Hit_ID=Q84UT7; Match level="QueryCoverage=99%, HitCoverage=66%, E-value=1e-116, Identity=43%"; Hit description =Calreticulin interacted protein
MVGLQMHLFVSEAFVNSGPAVYINSTGPNPIMVQFWVEFLVLLGIVDPSRHMNIPSNGASATSGSAAGTTTGSEGAIHGNRQDAARTQGGNPPGFLAATRGLPTRTVVAAVPARSSGEAPNHIFSVILPVQVRGQVVVPNQSSQGSQTAVGNGAQGNSTSAIPQASVGGVSGVPLIAAQVANALANAPSQVSLSTQSAADQGFHLTTDNRADVLSSSTPATTPQNGPSVLIVYNSIHNWEILVQIQLTYQETPQPISTHDAPSNPSVDSSVLKNKSSDEVGSQTTEPSASGSAEPLGLGGGLIPIPKRRSKAVKPSGSTTDPSRDLSSVSQNQDPISVAQQFLEGFASRNTNGSRSNTLSSGPPSSVPQATEVPPRRQGGGQPDIGSMISGMLNNPVFSNMLSNVATQAGGSSADLKSVMEGLQSPAIVDTISNIVQNVDEQDLGAMFGSGRGQGGMDLSRMLQQMMPVVSQALGGAGGRSAGANGGQHRSRPQRIDGEGNAPASSSQIDLHEARQSIEQHESPENIFRAVLETAAQAHGEDNSIQGMVEELATDQELADDYMKLLMEQVRQRIQSESQSGSQP

SEQ ID NO: 63240 - protein, 106 aa, Zea mays
  Coding DNA Sequence Number=SeqID_21461
MALVIGGGSSSYPSPAMFALSSLLSIIEEQEALKKKYLQKAKIKEHSFLTSLGDLDHDSDDATSSSSDEETHRRVEDKLNELCFLVNTIGGLCTIALGDDAVGSYN

SEQ ID NO: 63241 - protein, 95 aa, Zea mays
  Coding DNA Sequence Number=SeqID_21462
  Subcellular localization annotation: CTP_CleavageSite=27; ConfidenceScore=5.13e-01
MATAAAHVSPWAAPMCHSLGMALSPFMAAPPSGCYAPFKLVFGSPGSWFGDRRQELHRDDLRHHRGRDHYVNWNMERPPRKTVLPQGWYGTPLVD

SEQ ID NO: 63242 - protein, 652 aa, Zea mays
  Coding DNA Sequence Number=SeqID_21463
  Gene Ontology: Mol. function=RNA-directed DNA polymerase activity; Cellular component=nucleus; Biological process=RNA-dependent DNA replication
  Homolog annotation: Hit_ID=Q8S472; Match level="QueryCoverage=99%, HitCoverage=63%, E-value=0.0, Identity=79%"; Hit description =Putative gypsy-type retrotransposon RIRE2
  Pfam annotation: Domain name=Retrotrans_gag; Domain location=170-241; Score=2.3; E_value=0.09; Accession=PF03732.7; Description =Retrotransposon gag protein
MPEPSTTEGRRIQGELKNLLEDATVRRAESSASRRQGYPSEHHVATSRFMREASVHTGRTRNTAPAASGRLGNEHHHRDHRAHLDERVRRAYHPRRGGRYDSGEDQSPSPKPPGPQAFSRAIRRAPFPTRFRPPTTITKYSGETRPELWLADYRLACQLGGTDDDNLIIRNLPLFLSDTARAWLEHLPPGKISNWDDLVQAFAGNFQGTYRTELPNITDSDVIGAFLAGTTCRDLVSKLGRKTPTRVSELMDIATKFASGQEAVEAIFRKDKQPQGRPPEDAPEASTQRGAKKKGKKKSQAKRDVADADLVAAAEYKNPRKPPGGANLFDKMLKEPCPYHEGPVKHTLEECVMLRRHFHRAGPPAKGGRARDEDKKEDHQAGEFPEVRDCFMIYGGQAANVSARHRKQERREVCSVKVAAPVYLDWSDKPITFDQADHPDHVSSLGKYPLVVDPVIGDVKLTKVLMDGGSSLNIIYAEALGLLRVDLSSVWVGVAPFHGIIPGKRVQPLGQLDLPVCFGTPSNFRRETLTFEVVGFRGTYHTVLGRPCYAKFMAVPNYTYLKLKMSGPNGVITVGPTYKHAFECDVECVEYAEALAESEALITDLESLSKEVPDVKRHAGNFELAETVKSVPLDPSSDASKQIRIGSELDPK

SEQ ID NO: 63243 - protein, 200 aa, Zea mays
  Coding DNA Sequence Number=SeqID_21464
  Gene Ontology: Mol. function=ATP-dependent helicase activity; Cellular component=mitochondrion; Biological process=regulation of transcription, DNA-dependent
  Homolog annotation: Hit_ID=Q9LUW5; Match level="QueryCoverage=92%, HitCoverage=30%, E-value=2e-72, Identity=71%"; Hit description=DEAD -box ATP-dependent RNA helicase 53
  Pfam annotation: Domain name=DEAD; Domain location=18-184; Score =208.0; E_value=2.2e-59; Accession=PF00270.19; Description=DEADDEAH box helicase
  Pfam annotation: Domain name=ResIII; Domain location=14-179; Score= -37.8; E_value=0.068; Accession=PF04851.6; Description=Type III restriction enzyme, res subunit
  Pfam module annotation: Pfam domain module=DEAD::ResIII; Domain location=18-184::14-179
MAAHLRSAAVRLGAAHLRSAARAVLEPAMQGKDIIGRARTGTGKTLAFGIPIMDKILSYNEKNGNPLAIILAPTRELARQVEKEFRESAPLDTLCVYGGVPINQQMRALKYGDDIVVGTPGRVIDLLRRGVLNLSQIQFVVLDEADQMLAVGFDEDVEVIMEQLPQNRQSMLFSATMPSWIRKNSNKYLKDPVIIDLLVL

SEQ ID NO: 63244 - protein, 149 aa, Zea mays
  Coding DNA Sequence Number=SeqID_21465
  Homolog annotation: Hit_ID=Q8SA97; Match level="QueryCoverage=29%, HitCoverage=8%, E-value=6e-10, Identity=68%"; Hit description =Ornithine carbamoyltransferase
  Subcellular localization annotation: CTP_CleavageSite=58; ConfidenceScore=5.40e-01
MNTVSLDLRLSHVLKMLGDVEAPPKPRSSPSPRVGRGGDCRLVPGRSPSPGVGRSGVRRLLESSPSPSPGPGEAEIVVFWGRAKVRALGEEEIVIFWGRAQIRALCRAEFDVFRDLARVRPLRRPEFAVSGTYPESETWVGRSSPSSGT

SEQ ID NO: 63245 - protein, 90 aa, Zea mays
  Coding DNA Sequence Number=SeqID_21466
MAMPEHALVLGPARPRHETPNPAPMPTPIKPTEALTVCPRSLSAPPKRKIAGVRSAHGVPTVARASTTMDRPLQPTSTLSNPSTSLLEAQ

SEQ ID NO: 63246 - protein, 121 aa, Zea mays
  Coding DNA Sequence Number=SeqID_21467
MGSTIGRSFADPDKEIENRSCNAHSTLTKHRQIVYSWGRKLMLEYYLGELAVYGVEGGVLHALYQGAHLRGDRRVERDHPAGRADPALWPPGPRPGAQVQIFLEELCPLASAGLVSGFTES

SEQ ID NO: 63247 - protein, 179 aa, Zea mays
  Coding DNA Sequence Number=SeqID_21468
  Homolog annotation: Hit_ID=Q108Z7; Match level="QueryCoverage=77%, HitCoverage=5%, E-value=1e-54, Identity=73%"; Hit description =Transcriptional regulator, putative, expressed
MPDSDGLLETLSNELELSTTERVVVGLALSDSENPDLNLEACKDPFPLHAICGLLWNNIKGQLSFLKHAVALPNDTFTFAHCTRKMVFPDLGNCNQGNQAWYCLVLLEVLCQLAELGYSKPVRAIQPILGYPLINYPEVLLLGVSHINTAYNLIQHEVLSCVFPAVVKNTMHSSLMNYL

SEQ ID NO: 63248 - protein, 143 aa, Zea mays
  Coding DNA Sequence Number=SeqID_21469
  Gene Ontology: Mol. function=hydrolase activity, acting on acid anhydrides, catalyzing transmembrane movement of substances; Cellular component=integral to membrane; Biological process=copper ion transport
  Homolog annotation: Hit_ID=Q655X4; Match level="QueryCoverage=71%, HitCoverage=11%, E-value=2e-39, Identity=75%"; Hit description =Putative ATP dependent copper transporter
  Pfam annotation: Domain name=E1-E2_ATPase; Domain location=18-143; Score=-30.7; E_value=1.3e-07; Accession=PF00122.10; Description=E1 -E2 ATPase
MPQPTCPPMPPRSATHCDRRARPRLPQAILLLKDKGEKKIDASLIQPSDALKVLPGSKVPADGIIIWGTSHVNESLVTGESVPISKEVSSLVIGGTMNLHGILHIQATKIGFGTVLSQIISLVETAQMSKGLFGFSFFSDQLF

SEQ ID NO: 63249 - protein, 53 aa, Zea mays
  Coding DNA Sequence Number=SeqID_21470
MKKGHIEVMKKLEHSDVDLIRLYEAKVWNQMYNASIKSRSSTIRQRQQGRSDY

SEQ ID NO: 63250 - protein, 64 aa, Zea mays
  Coding DNA Sequence Number=SeqID_21471
  Subcellular localization annotation: CTP_CleavageSite=41; ConfidenceScore=5.31e-01
MTKLQKAVPKGAQQGKGPNVAREQIQDSVNSTKVFLLMGPSAMKQTPNSSPFTVLDRFHNELDT

SEQ ID NO: 63251 - protein, 98 aa, Zea mays
  Coding DNA Sequence Number=SeqID_21472
MTGELEAIRMDCSKSSMAMRKNMGGGGGDEKRDFDNSLSLDLASDEVRSRECRERRTRPWAAMVGEKDCVICVGPVGLAAQESRKKRVGSGYLAARKR

SEQ ID NO: 63252 - protein, 53 aa, Zea mays
  Coding DNA Sequence Number=SeqID_21473
MRTMEGAAQPARQMIEWFLLNVDLVEKTTPMFSIVSYVRACTVVFNVGALKVF

SEQ ID NO: 63253 - protein, 98 aa, Zea mays
  Coding DNA Sequence Number=SeqID_21474
MSLGPRFVVRLNCCAACTVRGVRKLTGGAGLDCDCGCGAGGPNGVLGGQGGLLIQAERPYIQFSVACAIDTFVAQCYVRGYNRTREGKASKSLMRNET

SEQ ID NO: 63254 - protein, 452 aa, Zea mays
  Coding DNA Sequence Number=SeqID_21475
  Gene Ontology: Mol. function=ubiquitin-protein ligase activity; Cellular component=ubiquitin ligase complex; Biological process =protein ubiquitination
  Homolog annotation: Hit_ID=Q6Z5P5; Match level="QueryCoverage=98%, HitCoverage=99%, E-value=1e-130, Identity=58%"; Hit description =Putative immediate-early fungal elicitor protein CMPG1
  Pfam annotation: Domain name=Arm; Domain location=213-254; Score =10.6; E_value=0.58; Accession=PF00514.13; Description=Armadillobeta -catenin-like repeat
  Pfam annotation: Domain name=Arm; Domain location=259-301; Score=2.7; E_value=5.7; Accession=PF00514.13; Description=Armadillobeta-catenin -like repeat
  Pfam annotation: Domain name=Arm; Domain location=303-343; Score =11.3; E_value=0.48; Accession=PF00514.13; Description=Armadillobeta -catenin-like repeat
  Pfam annotation: Domain name=Arm; Domain location=349-385; Score=6.5; E_value=1.9; Accession=PF00514.13; Description=Armadillobeta-catenin -like repeat
  Pfam annotation: Domain name=U-box; Domain location=41-115; Score =72.9; E_value=1.1e-18; Accession=PF04564.6; Description=U-box domain
  Pfam module annotation: Pfam domain module=Arm::Arm::Arm::Arm::U-box; Domain location=213-254::259-301::303-343::349-385::41-115
MVTPAVSRYRLRPRLVRVAVSEIPLATRRTRQQPVAATEPAIPSNFLCPISLEMMKDPVTALTGITYDRDSVEGWLQRGHSTCPVTARPLRAEDLIPNHATRRMIQDWCVANRALGVERVPTPRVPLSAADAAELLAAVSAAARRGDAMVCRQLAAKARALGKESDRNRRCLAAGGAARALSSAFLRLVDQPASFGGALGEILATLVVFFPLDEECRSHIASPASLDAIVSILSHDGEATSKSSAAVVLREIASSSDSDPECLDALSETNGVHDALIKLLQKPVSAQATKAALVTAYYLVRGSDLAARRLVDLGMVELLVEMLVDADKGTTEKALAVLDSLLLTEEGRGKACAHALAVPVLVKKMQHVSEMATEFAVSALWRLCKSFSGEGPCKAEALQLGAFQKLLLLLQVGCMGVTKERASELLRLLNGSRDGVECIETVDFKGLKRPFS

SEQ ID NO: 63255 - protein, 930 aa, Zea mays
  Coding DNA Sequence Number=SeqID_21476
  Gene Ontology: Mol. function=transferase activity, transferring phosphorus-containing groups; Cellular component=membrane; Biological process=two-component signal transduction system (phosphorelay)
  Homolog annotation: Hit_ID=Q2ACC1; Match level="QueryCoverage=99%, HitCoverage=99%, E-value=0.0, Identity=80%"; Hit description =Histidine kinase
  Pfam annotation: Domain name=CHASE; Domain location=38-224; Score =135.0; E_value=2.1e-37; Accession=PF03924.4; Description=CHASE domain
  Pfam annotation: Domain name=HATPase_c; Domain location=427-610; Score=130.6; E_value=4.3e-36; Accession=PF02518.16; Description =Histidine kinase-, DNA gyrase B-, and HSP90-like ATPase
  Pfam annotation: Domain name=HisKA; Domain location=288-380; Score =42.6; E_value=1.4e-09; Accession=PF00512.15; Description=His Kinase A (phosphoacceptor) domain
  Pfam annotation: Domain name=Response_reg; Domain location=785-919; Score=111.6; E_value=2.2e-30; Accession=PF00072.14; Description =Response regulator receiver domain
  Pfam module annotation: Pfam domain module=CHASE::HATPase _c::HisKA::Response_reg; Domain location=38-224::427-610::288 -380::785-919
MGGKYRAARTKRWWRGLAAAGWVLTAVVCSAVMHWTLRRDSMDRAEERLVSMCEERARMLQEQFGVTVNHVHAIAILISTFNFEKSPPAIDQDTVSYLARIDMMSGEEDRENIFRARTTGKAVLTNPFRLLGSNHLGVVLTFAVYRPDLPADASVEQPFDVESLVENLLSKLAGNQDIVVNVYDVTNASDAMVLYGPSSLDEQVPFLHVSMLDFGDPFRKHEMRCRLVVLTGYSIAAAYSRYDKVTEDCRKMEELKTQAEAADVAKSQLIVWLFYVPDLLDHLPDLVSINQFLATVSHEIRTPMNGVLGTYAFILILLNLQFHGPGNLKFLPSGVGMLDMLLGTDLTMTQKDYAQTAQMCGRALITLINDVLDRAKIEAGKLELEAVPFDLRSLMDDVVSLFSSKSREKCIELAVFVCDNVPKVVIGDPWRFRQILTNLVGNAVKFTERGHVFVRVCLAENSNVEANQVLHGAMNGKGGRVESTTNGAFNTLSGFEAADRRNSWQYFKLLLSDKESLLDDLEGENSNQSDSNHVTLAISIEDTGVGIPLQAQDRVFTPFMQADSSTSRNYGGTGIGLSISKCLAELMGGQISFTSHPSVGSTFTFSATLKHSYKDISVDSSRSLTEALPTAFKGMKAILVDGRPVRSAVTRYHLKRLGILLQVVNNMNAVVKAFPGQNGATGSREKASILFIESDFWRPETDVQLLNHLREQKNGQLSDGHKVVLLVTSEADKDKYGSIFDIVMCKPIRASTIASSIQQLLKVEIAERKDNQNRPSFLRSLLVGKNILVVDDNKVNLRVAAAALKKYGANVSCVESGKDAISLLQPPHRFDACFMDVQMPEMDGFEATGQIRQMELKANEERKNKLASIEGSTTAEYHLPVLAMTADVIQATYEECIKSGMDGYVSKPFDEEQLYQAVSRLVVGTTDSAV

SEQ ID NO: 63256 - protein, 136 aa, Zea mays
  Coding DNA Sequence Number=SeqID_21477
  Gene Ontology: Mol. function=GTPase activity; Cellular component =microtubule
  Homolog annotation: Hit_ID=Q5DMX3; Match level="QueryCoverage=67%, HitCoverage=10%, E-value=6e-26, Identity=64%"; Hit description=DRP
  Subcellular localization annotation: CTP_CleavageSite=49; ConfidenceScore=5.39e-01
MQRSKSYSKRTTMLNVGGKNTKNNHPSCQSSLANSAFMTIEQLHMGTIVLELRVAPGLLATLVRIGSLPSTQQQMALLTGPVHSMRQGSHPLLILVIGGRKHMGPENGKLTGRFGWTWDFVATDQLILVLYASSLV

SEQ ID NO: 63257 - protein, 128 aa, Zea mays
  Coding DNA Sequence Number=SeqID_21478
MAPRELRRQLFGAIQSLDVSDIALEKARHVCTASAPQQPELKPALRNEAQSRAPEPGASAHCFAGCCHLDRPSEGFHTSHRFAAEGFPVPVDRGGIPGYLTWAAQSDQAQSGDRYGWYRTRRSPKEVA

SEQ ID NO: 63258 - protein, 48 aa, Zea mays
  Coding DNA Sequence Number=SeqID_21479
MGQTPTGHNSGTGTSYRPADYAGLARCGVRTHGLMEEVREHWVKLSNQ

SEQ ID NO: 63259 - protein, 110 aa, Zea mays
  Coding DNA Sequence Number=SeqID_21480
MREWRAQVECPLLLAAWLFPFYSSKERPLQGACYDKSYARYWWITPSTRYAGHYSDSGVEALCSDIWWDPSSKVGETPVLDTFLHPFGMLSWRHPRWCAVASCLTVTDVG

SEQ ID NO: 63260 - protein, 51 aa, Zea mays
  Coding DNA Sequence Number=SeqID_21481
MAMASKFVLQLLLLATLTLLVVSVSGNTIQELVITYGDDRSNPVEDEIRCH

SEQ ID NO: 63261 - protein, 180 aa, Zea mays
  Coding DNA Sequence Number=SeqID_21482
  Gene Ontology: Mol. function=protein dimerization activity
  Homolog annotation: Hit_ID=Q2QRD1; Match level="QueryCoverage=47%, HitCoverage=8%, E-value=8e-20, Identity=52%"; Hit description=HAT family dimerisation domain containing protein
  Pfam annotation: Domain name=zf-BED; Domain location=98-148; Score =27.9; E_value=3.6e-05; Accession=PF02892.5; Description=BED zinc finger
MVCESGKVEVVAVRDQVPTMEHRYDPTSINHDLVLMGQTPDDVDDVHDGLEDLFGFTAPTPNPTINLGDDNVAAEGEALSDATASTTASTGRKRKCTSDVWEDMDKIFATENGVQVRVGARCHFCKKELAARSTIGTGHLSRHRDKCKRLHGRTGNQSMLRYNADGTVFCWEYSAEVARV

SEQ ID NO: 63262 - protein, 175 aa, Zea mays
  Coding DNA Sequence Number=SeqID_21483
  Gene Ontology: Mol. function=kinase activity
  Homolog annotation: Hit_ID=Q6QP54; Match level="QueryCoverage=57%, HitCoverage=49%, E-value=5e-16, Identity=45%"; Hit description =Putative kinase
MALSPLLLAERRRRGGLLSGTIIRGTLKAPNSQLVTPISIKLQRPDGARTRAKPRKTANSAPPDPGLGLGLSPGRRRTPLCPTQGSDSTSATEDRLDLSFGGAYTSPNLGRRPATSTGGAIITLPRADSGHGNKTGVPSGSLREIGNDGSGTPPTATTSHQLGAKISPAATTACT

SEQ ID NO: 63263 - protein, 333 aa, Zea mays
  Coding DNA Sequence Number=SeqID_21484
  Gene Ontology: Mol. function=GTPase activity; Cellular component =microtubule; Biological process=defense response to fungus
  Homolog annotation: Hit_ID=Q9LQ55; Match level="QueryCoverage=94%, HitCoverage=33%, E-value=1e-116, Identity=69%"; Hit description =Dynamin-2B
  Pfam annotation: Domain name=Dynamin_N; Domain location=47-216; Score= 141.8; E_value=1.8e-39; Accession=PF00350.13; Description=Dynamin family
  Pfam annotation: Domain name=MMR_HSR1; Domain location=45-217; Score =8.6; E_value=0.00016; Accession=PF01926.13; Description=GTPase of unknown function
  Pfam module annotation: Pfam domain module=Dynamin_N::MMR_HSR1; Domain location=47-216::45-217
MSSSAAMEAIDELVQLSESMRQAASLLADDDPSDETASRRPSTFLNAVALGNVGAGKSAVLNSLIGHPVLPTGENGATRAPIVVDLARDPGLSSKSIVLQIDSKSQQVSASALRHSLQDRLSKGASSGSGRSRSDEIYLKLRTSTAPPLKLIDLPGIDQRVMDDSTISEYAGHNDALLIVVIPAMQAADVASSRALRLAKDIDPDGTRTIGVLSKIDQAAADAKTVSCVQSILSNKGAPRAAADIEWVALIGQSVSIASAQSGSVGSDNSLETAWRAEAETLKSILTGAPQSKLGRIALVDTIAKQIRKRMKVRLPNLLTGYAYNADHPVLYF

SEQ ID NO: 63264 - protein, 127 aa, Zea mays
  Coding DNA Sequence Number=SeqID_21485
  Subcellular localization annotation: CTP_CleavageSite=4; ConfidenceScore=5.26e-01
PTSRASLRASLARWRGPPRLPHVAPPCLPSVVRAPPAPVAWLPGAPAHGPLAPLRGRLPGAPCARPSRPPAPALGSASTCCVARFVARRISLISGGDEDDGFGCDYGNGEDEVVEEDFQEFQEYDEF

SEQ ID NO: 63265 - protein, 320 aa, Zea mays
  Coding DNA Sequence Number=SeqID_21486
  Homolog annotation: Hit_ID=Q6QP51; Match level="QueryCoverage=56%, HitCoverage=73%, E-value=4e-09, Identity=30%"; Hit description =Putative growth-regulating factor 1
MVAQTHTSCNRCDGCYVQETAPPLAPLPCLLDCGTSTATRGNPAHDPTVPTRHISHGKWAPSPPTDQRFEGWPLGGFNSRLRALGLRAHNWSEVRRPAPRKGSTAASGHSGSAPTTDQGFVGWPSKGFDSRLRHKARDDPGYVRYITKARATLPSHFAAPLTGLTRGQRRLRRSDCCATRQSEADSGQGSDSGSAPEDDELRLARSQGSDSGSAPEDDELRLARSQGSDSGSAPEDDELRLARPQGSDSGSAPEDDELRLARSQGSDSGSAPEDDELRLARSQGSDSGSAPEDDELRLARPQGSDSGSAPEDDELRLARS

SEQ ID NO: 63266 - protein, 203 aa, Zea mays
  Coding DNA Sequence Number=SeqID_21487
MTATAWVTHAHRRPPGDSHHHASTSDLQKNFFEAHDAMKADEEAKKAAEDEVCNLSIAFDDAITMQVQAQTSLKEHSAELQKLHLATSEVCDHLSPTPPTHAPLIDRLLALLEHVEHVVLEGAFNMGSLALGQMVSNFDEIDVGVIAVGFAACRSNEELDSIEEQGLATDPLTVPQSRPFRMEIRLGVDQNQVINANDLLIVT

SEQ ID NO: 63267 - protein, 169 aa, Zea mays
  Coding DNA Sequence Number=SeqID_21488
  Subcellular localization annotation: CTP_CleavageSite=32; ConfidenceScore=5.03e-01
MPRLLCNSQPDSNFLEHISHLSPYLPSTSSPRSHRRSPGRFFHGLAGITGAIMDQGTMVRSKVGIGDEPRLRPWHATKKLHHRARTPREPYSSNDSVGTGRASSSRNLQAIGVMTRLVQGASTAVRTRVILRASWYLESQVPDHYVNWNMENHPGKQCYHKGLWTPLAD

SEQ ID NO: 63268 - protein, 54 aa, Zea mays
  Coding DNA Sequence Number=SeqID_21489
  Subcellular localization annotation: CTP_CleavageSite=32; ConfidenceScore=5.09e-01
MAARPRRGVPARPRVVGLGVAPLPLAARNAVRARLGPNMCAARPQRVSAVLRIT

SEQ ID NO: 63269 - protein, 164 aa, Zea mays
  Coding DNA Sequence Number=SeqID_21490
MYCSMSGAPVWARLPSARAARAFNALQVALDADIAVAPLLHRTVRCTPDSPVNYSRAAQVNSRGWRVPEAILPWSTGHVRCTPDSPVNYSRVPLEIPEGGEFEFESSGAPDTVRWCTGQSGAPRPEEAPDSLTSHNDYLQTRTAMVRLGDPEIVKQAQPVSMTV

SEQ ID NO: 63270 - protein, 1167 aa, Zea mays
  Coding DNA Sequence Number=SeqID_21491
  Gene Ontology: Mol. function=protein dimerization activity; Cellular component=nucleus; Biological process=regulation of transcription, DNA-dependent
  Homolog annotation: Hit_ID=Q653U3; Match level="QueryCoverage=71%, HitCoverage=91%, E-value=0.0, Identity=74%"; Hit description =Putative auxin response factor
  Pfam annotation: Domain name=Auxin_resp; Domain location=193-276; Score=190.9; E_value=3e-54; Accession=PF06507.4; Description=Auxin response factor
  Pfam annotation: Domain name=B3; Domain location=66-171; Score=111.9; E_value=1.9e-30; Accession=PF02362.12; Description=B3 DNA binding domain
  Pfam module annotation: Pfam domain module=Auxin_resp::B3; Domain location=193-276::66-171
MEAQIPNYPSLPPQLICQLHNVTMHADAETDEVYAQMTLQPLSPQELKDPFLPAELGTASNQPTNYFCKTLTASDTSTHGGFSVPRRAAEKVFPPLDFNQQPPAQELIAKDLHGNDWKFRHIFRGQPKRHLLTTGWSVFVSAKRLVAGDSVLFIWNDNNQLLLGIRRANRPQTVMPSSVLSSDSMHIGLLAAAAHAASTNSRFTIFYNPRASPCEFVIPMAKYVKAVYHTRISVGMRFRMLFETEESSVRRYMGTITGISDLDPVRWPNSHWRSVKVGWDESTAGEKQPRVSLWEIEPLTTFPMYPSPFALGLKRPWPAGLPSLYGGRGDGLTSSLMWLRDRANPGFQSLNFSGLGMSPWMQPRLDNSLLGLQSDMYQTIAAAAALQSTTKQVPPSAMQFQQPQNIADRSALLSSQILQQVQPRFQQIYPQNLNENKIQGHTQPEYLQVQQQLQRCQSFNEQKPPMHPQQQQQEPQQQQCVQTPQDQQMQEQKHLHNFHSLPDALSAFSQLSPATHSPPSALQTVPAFSHQQNFPDTNISSLSPSTGPSMHGMLGRLPSEAASSLPCVAMNAPVSVSDPWSSKRVAVESVNPCRPHVSPHIEHLDMATCNMPQSSALAPLPGRECLVDEDGCSDPQNHLLFGVHIDSHSLLMQGGIPALQNDNSSGTIPYSTSNFLSPSENDFPLNQPLRSAGCLDESDYLPCAENAEQANQQFATFVKVYKSGTVGRLLDITRFSSYDELRSEVGRLFGLEGQLEDPLRSGWQLVFVDREDDVLLVGDDPWQEFVNSVSCIKILSPEEVQRMGKPGIQLLSSAPSRRLGNGCDSYASMQEPRGLDAGMAPHLLALRLGTKHVDQMELCAAPRLMMSYVKPFFCHNNLYIETVLGSHGIRLTTSDEGNWNLGAFHRIETTDNSNLPMQFQFQLGQTNIAVAVNVTIIAKATFSKSKRQFVMILEKLRDRYIDMISEGIHSGAPLCLHNLALLGADNDAMDRSSSSHSLMCSLGPYLTETPECGPPLAKKKRMASRSLRASVGANPGSFSGDLSIAFIISSAGPPVRHHLEHTLAVRHRARSRARNRHEHPQRVPDPPAGQPTAAHAHGTEGGHGAGVGRLRVMGLGVRSVTFTWDGKDGRSKAGGGYGPKYFLWKQEGRVPAPACKSAQLALQMLAR

SEQ ID NO: 63271 - protein, 86 aa, Zea mays
  Coding DNA Sequence Number=SeqID_21492
MRGLAPCRLLVFLVALAGVVRGQPCPSLVGGSPLGDGGTGTVGWLGPQQSAATQQAGGCHDTCRPKTVPTDTGTGHTATRKCDPDP

SEQ ID NO: 63272 - protein, 279 aa, Zea mays
  Coding DNA Sequence Number=SeqID_21493
  Gene Ontology: Mol. function=thiosulfate sulfurtransferase activity; Cellular component=mitochondrion; Biological process=sulfate transport
  Homolog annotation: Hit_ID=Q94C43; Match level="QueryCoverage=99%, HitCoverage=100%, E-value=3e-99, Identity=59%"; Hit description =Thiosulfate transferase
  Pfam annotation: Domain name=Rhodanese; Domain location=161-265; Score=60.8; E_value=4.6e-15; Accession=PF00581.10; Description =Rhodanese-like domain
  Pfam annotation: Domain name=Rhodanese; Domain location=9-132; Score =43.6; E_value=6.5e-10; Accession=PF00581.10; Description=Rhodanese -like domain
  Pfam module annotation: Pfam domain module=Rhodanese::Rhodanese; Domain location=161-265::9-132
MAQDDPVVSAQWLHEHLGMPDVKVAHIPGALFFDLDGIVDRTTDLKYRYSDDFPRIVVVHTSFCKSHLPHMLPSEEAFAAAISELDIKNQDKVIVYDGKGFFSAPRVWWMFRVFGHKKVWVLDGGLPQWQASGFNVEKASPDDDAVLKSIAANRAVKRVYNGEQVAQNVTAKTYQQIDARAKGRFDGVAPEPREGVRSGHIPGSVCVPFPEVGMVQGLFGISLDRPIVVTCGSGVTACILALGLYRIGKRDVPVYDGSWTEWEGQSDSDYPKVTAPGTA

SEQ ID NO: 63273 - protein, 127 aa, Zea mays
  Coding DNA Sequence Number=SeqID_21494
  Gene Ontology: Mol. function=DNA binding; Cellular component=nucleus
MSQGPYTRSARPKRLGCSHAQSNTYMAASYTRHETGTSVEPERSQDIASELANKLHDNAQHIHAILKEEAAQDGGQNHDLGSSMLPDAMEAARRKADELIQSLGGLVSYLNQFTELVKETGFENIAT

SEQ ID NO: 63274 - protein, 658 aa, Zea mays
  Coding DNA Sequence Number=SeqID_21495
  Gene Ontology: Mol. function=protein-tyrosine kinase activity; Cellular component=integral to membrane; Biological process=protein amino acid phosphorylation
  Homolog annotation: Hit_ID=Q6H504; Match level="QueryCoverage=97%, HitCoverage=95%, E-value=0.0, Identity=70%"; Hit description =Putative receptor-like protein kinase PRK1
  Pfam annotation: Domain name=LRRNT_2; Domain location=31-78; Score =18.3; E_value=0.011; Accession=PF08263.3; Description=Leucine rich repeat N-terminal domain
  Pfam annotation: Domain name=LRR_1; Domain location=108-129; Score =11.0; E_value=2.5; Accession=PF00560.23; Description=Leucine Rich Repeat
  Pfam annotation: Domain name=LRR_1; Domain location=131-154; Score =13.3; E_value=0.91; Accession=PF00560.23; Description=Leucine Rich Repeat
  Pfam annotation: Domain name=LRR_1; Domain location=156-178; Score =10.6; E_value=2.9; Accession=PF00560.23; Description=Leucine Rich Repeat
  Pfam annotation: Domain name=LRR_1; Domain location=179-200; Score =11.4; E_value=2.1; Accession=PF00560.23; Description=Leucine Rich Repeat
  Pfam annotation: Domain name=LRR_1; Domain location=201-223; Score =15.7; E_value=0.17; Accession=PF00560.23; Description=Leucine Rich Repeat
  Pfam annotation: Domain name=LRR_1; Domain location=82-103; Score =1.4; E_value=1.5e+02; Accession=PF00560.23; Description=Leucine Rich Repeat
  Pfam annotation: Domain name=Pkinase; Domain location=369-638; Score =7.6; E_value=5.2e-09; Accession=PF00069.15; Description=Protein kinase domain
  Pfam annotation: Domain name=Pkinase_Tyr; Domain location=368-638; Score=-7.8; E_value=5.4e-12; Accession=PF07714.7; Description =Protein tyrosine kinase
  Pfam module annotation: Pfam domain module=LRRNT_2::LRR_1::LRR_1::LRR_ 1::LRR_1::LRR_1::LRR_1::Pkinase::Pkinase_Tyr; Domain location=31 -78::108-129::131-154::156-178::179-200::201-223::82-103::369
MARPRPHGCIVHVAFVFAFASAVLLPPAAEGVQEGDVLVAFRDTLRGLDGAPPGPLRNWGTPGPCRGNSSSWYGVSCHGNGSVQGLQLERLGLSGGAPDLSVLAVLPGLRALSLSDNALTGAFPNVSALAVLKMLYLSRNRLSGAIPEGTFRPMRGLRKLHLSSNEFSGPVPESITSPRLLELSLANNHFEGPLPDFSQPELRFVDVSNNNLSGPIPVGLSRFNASMFAGNKLLCGKPLEVECDSSGSPRTGMSTMMKIAIALIILGVLLCVAGITTGALGSRKRKPRRAAAERLGGGDQTPSNPKLNTAPAVNIENAASTSQPRTAAAAGGAASAAAAAGKRPRRDEHGRLVFIQEGRTRFEIEDLLRASAEVLGSGNFGSSYKATLCEGPAVVVKRFKDMNGVGREDFSEHMRRLGRLAHPNLLPLVAYLYKKEEKLLVTDYIVNGSLAQLLHGNRGSLLDWGKRLRIIKGAARGLAHLYDELPMLTVPHGHLKSSNVLLDGAFEAVLSDYALVPVVTPQIAAQVMVAYKAPECIAPQGKPSKKSDVWSLGILILEILTGKFPANYLRQGRQGNADLAGWVQSVVTEERTGEVFDKDITGARGCESDMVKLLQVGLACCDADVDRRWDLKTVIARIDEIREPEPAAAAAASESSSS

SEQ ID NO: 63275 - protein, 267 aa, Zea mays
  Coding DNA Sequence Number=SeqID_21496
  Gene Ontology: Mol. function=DNA binding; Cellular component=nucleus
  Subcellular localization annotation: CTP_CleavageSite=97; ConfidenceScore=5.28e-01
MDPAAADRPCVIQSLPANCNTLPPPLVQALPANCNTLPPPLVQALPAKTNPSQPSSPTAKRRHAPPAPGSGPAPPSPRRTRSGGAPEWTPAETLALVAEVAAVDDGWSRSVSAFQKWAMVAENLAASEALLSGPGSRRRGRGSKRTAGECRRRWEALAAEYGAVRRWEVRTGATYWEMGAAARKEGWPSLPSSTTRCMGLWTRSYGSRRRCLRMLLAVDGGDSVEAEVGEEQVQQDASAGEEEEQDVDEDVEEMQEDGGNAGASNDL

SEQ ID NO: 63276 - protein, 32 aa, Zea mays
  Coding DNA Sequence Number=SeqID_21497
MTICVLPMVMRYLIPWAALLRSPLSVSAYVLT

SEQ ID NO: 63277 - protein, 32 aa, Zea mays
  Coding DNA Sequence Number=SeqID_21498
MTICVLPMVMRYLILWAALLRSPLSVSASVLT

SEQ ID NO: 63278 - protein, 146 aa, Zea mays
  Coding DNA Sequence Number=SeqID_21499
MTICKNPTGFGLFARDIRRLPRDREREERKRGFADGLLAVEMAKRGGGKARDTKANAMVLFAQWVADGGTRSTRVGENRGTTVSTVVLGASSCSSKGVETSAQDGEAVVGSVFGQWRSVGADTSLARVGHDGSASGGGRREVRVSG

SEQ ID NO: 63279 - protein, 169 aa, Zea mays
  Coding DNA Sequence Number=SeqID_21500
MLEEDPKLWLVAAARILAASSFHPLNASFHQHPLTPTASHITKDVYENIQDVNGQFEEICDSAERNLNDYEPMIERRFCDVTLDSTSSNMYIYFDIIFLHMTNLWASLLSYYQYTNDVGQIPPAQVLGDYIVFSIVSLDFEVLSMSKLGYDGVVALLVADIPLSVKLRM

SEQ ID NO: 63280 - protein, 55 aa, Zea mays
  Coding DNA Sequence Number=SeqID_21501
MDAERMNTLEQMFKRLTLADDTSLKPMLAHIPPLHPHFASMFWSIYTACNFYPKT

SEQ ID NO: 63281 - protein, 101 aa, Zea mays
  Coding DNA Sequence Number=SeqID_21502
MLYLYVWTLEGMQPDLVSLDGHRDMGRPSETVVLRASFFERMLGFDQSDPMISVDFIVHHPSFVAHNLQLVGCRPDQLRCPRLAVLSRATKNWIISLSVGL

SEQ ID NO: 63282 - protein, 172 aa, Zea mays
  Coding DNA Sequence Number=SeqID_21503
MAPRTVRHCSLSGAPSDADLTLRELSVHYSRALFTFADDRSCSSRCSAWLTGQSGATPDSLMNYSGLAFQKPEAEKFRLYGPWCTRHCTVVHRTLSGGTPDSPGKKIKVLTHRPRYIETATVPKLGEGTSSTAEAEQAIRVGRSTKESVGVPKVSAPESVKVPKHTVELKER

SEQ ID NO: 63283 - protein, 195 aa, Zea mays
  Coding DNA Sequence Number=SeqID_21504
  Homolog annotation: Hit_ID=Q75HJ9; Match level="QueryCoverage=64%, HitCoverage=16%, E-value=9e-40, Identity=68%"; Hit description =Expressed protein
MVGEAQRIRRLTQRRSCEQESFVFKNKSPTAATCLQGIQPSVSKGAVVELLLLLAASAAMVGMKIVSFGTDSGANKVQLADNLKIFKTDHFDSDTYLQSKCCAMDEKEVRHLCSYLQDLKKAFVEEMCRSVHANYVVFIKTSKDILDLEGELLSVRNLPSTQSALIHGLFEGVQIDSLATGPEGSTEQDISGAKD

SEQ ID NO: 63284 - protein, 139 aa, Zea mays
  Coding DNA Sequence Number=SeqID_21505
MGKSKKGGSSSHHSSDKCKREPTPPSEDFGDSGYSKEKFSSESEGSLAPASPPASSDDSDDSQGLAAEGSDESEYSSDEENSSDSSEEGGGDGDGDGGDGDGSGDGGEGDGDGGGKGGSGDGGDGSKGGSSKGSNKASG

SEQ ID NO: 63285 - protein, 100 aa, Zea mays
  Coding DNA Sequence Number=SeqID_21506
  Subcellular localization annotation: CTP_CleavageSite=68; ConfidenceScore=5.78e-01
MSRTQPLASDPFSRQYPTSPTSSGPATSPLSLRSSRHQISEPFTVVPWPVHRRGETLGGRVASRSLVLCASSVDEQATVETEVQQVEVAEQELEEGKLCP

SEQ ID NO: 63286 - protein, 84 aa, Zea mays
  Coding DNA Sequence Number=SeqID_21507
MTPPDVKHKAITKDLCVEYGDPRYRRECVPVTGGGIRVVITPNPSFRELETKNSRGSLTRPGLIAAGQQLTSQIKLSAVTIAVT

SEQ ID NO: 63287 - protein, 69 aa, Zea mays
  Coding DNA Sequence Number=SeqID_21508
MAIIAHKQAWLCGWETCERGPSTRARGSFRASSCEQLTERPHVSVGAAVGWAAQAYVKVGRAKSRIGPI

SEQ ID NO: 63288 - protein, 279 aa, Zea mays
  Coding DNA Sequence Number=SeqID_21509
  Gene Ontology: Mol. function=magnesium ion binding; Cellular component=chloroplast; Biological process=metabolic process
  Homolog annotation: Hit_ID=Q5GAS4; Match level="QueryCoverage=77%, HitCoverage=32%, E-value=4e-45, Identity=48%"; Hit description=Stc
  Pfam annotation: Domain name=Terpene_synth; Domain location=77-276; Score=176.4; E_value=7.1e-50; Accession=PF01397.11; Description =Terpene synthase, N-terminal domain
  Subcellular localization annotation: CTP_CleavageSite=22; ConfidenceScore=5.38e-01
MASFSLKPQHNGSSSRIYHTICSATASEWRSLLRSRSSVSWSWKKHTRLRLRCCQGSNGGDDSRLSQNTGIFHPSIWGDFFLGCSSSPEEAAASSQQKAWMERCDELKEEVGRLMVVEANSPLHERLHFIDALESLCLDHLLKEEIGAALTQIETAGVSDDCDIGTVSLWFYLLRKHRRRASPDVFVRFRDAEGGFQANDPGDLLRLYNAAHFRTHGETILDEAIAFARSRLEMMLPYVKGPLLAHEVRSSLEIPLPRRVRIYESKYYIHAYETSGNAA

SEQ ID NO: 63289 - protein, 242 aa, Zea mays
  Coding DNA Sequence Number=SeqID_21510
  Gene Ontology: Mol. function=magnesium ion binding; Cellular component=chloroplast; Biological process=metabolic process
  Homolog annotation: Hit_ID=Q5GAS4; Match level="QueryCoverage=97%, HitCoverage=38%, E-value=4e-72, Identity=52%"; Hit description=Stc
  Pfam annotation: Domain name=Terpene_synth_C; Domain location=1-184; Score=66.0; E_value=1.3e-16; Accession=PF03936.6; Description =Terpene synthase family, metal binding domain
MVIAIVTLLDDIFDSFATPQECEILTNCIESWDPKGAQDLPGCMKFALEKILDSYQTITNMLHREDKYRMTYLRHFTEDLVRSFNMEVKMLQKGYIPDSVEEHLKVSLRTGGCPILSCACFVGMDDIATKDFFDWISSVPKMREQLIPHVASTIDTYMKKHNVSIEVAQENIHKLKEESWKDLNSEWLNPCNDVYPKQLLERIFNLARTMEFMYNQEDNFTNCHNLKDTIRCLLVEPYRIHI

SEQ ID NO: 63290 - protein, 71 aa, Zea mays
  Coding DNA Sequence Number=SeqID_21511
MSCVDDVVRRRSRLRHDLLALVVSARSSSIQSIHCRDTKFFSPYAALLLFREIDPIVENQDLFRGRISSFL

SEQ ID NO: 63291 - protein, 71 aa, Zea mays
  Coding DNA Sequence Number=SeqID_21512
MAALPCCNVLRPDEGSDGDNPNSSSAWHTGLSSALGWPTVNQLLSGIDGVVRITYSPPRCSQLVSKLILFI

SEQ ID NO: 63292 - protein, 74 aa, Zea mays
  Coding DNA Sequence Number=SeqID_21513
  Subcellular localization annotation: CTP_CleavageSite=33; ConfidenceScore=5.06e-01
MAAAGQHTSPRWPVAFGDGSMAAADEDAGGGRRASTRRPNFVAAPKTCTTAVVRLGLWVGEEGERRVCKTKTRT

SEQ ID NO: 63293 - protein, 113 aa, Zea mays
  Coding DNA Sequence Number=SeqID_21514
  Subcellular localization annotation: CTP_CleavageSite=50; ConfidenceScore=5.24e-01
MYIEDVAGDSLSVTARWAQPPKPHAGVRPLGSSTTARRRSRRLDAAQQWRAGVDPSRTVDDLIPVKIYNLAFDLHQHNMTPKKYDVHLPRQDVWRSQKHFNHFEGDISVADLM

SEQ ID NO: 63294 - protein, 239 aa, Zea mays
  Coding DNA Sequence Number=SeqID_21515
  Gene Ontology: Mol. function=protein serine/threonine kinase activity; Cellular component=membrane; Biological process=protein amino acid phosphorylation
  Homolog annotation: Hit_ID=Q33AC4; Match level="QueryCoverage=73%, HitCoverage=28%, E-value=5e-47, Identity=45%"; Hit description =Protein kinase domain containing protein, expressed
  Pfam annotation: Domain name=Pkinase; Domain location=5-235; Score =92.1; E_value=1.7e-24; Accession=PF00069.15; Description=Protein kinase domain
  Pfam annotation: Domain name=Pkinase_Tyr; Domain location=5-237; Score=9.2; E_value=4.9e-13; Accession=PF07714.7; Description=Protein tyrosine kinase
  Pfam module annotation: Pfam domain module=Pkinase::Pkinase_Tyr; Domain location=5-235::5-237
ITNNFSEDQTIGRGGFAVVYKGLLRNGLSVAVKKFYDTIELSDEMYQARQRLLCFEFVPNGSLDKYISDMFHGLEWRKRYQIIRGICEGLRYLHDENVLHLDLKPSNILLDHNLVPKITDFGLSRCFDDNKTRTVTANLIGSVGYLAPEFFSGLISFKSDVYSLGVIIMEVVTGIKGYCEIEDEPKSHLPAGTHQGGEIQGLSWGRQATQDVSRRRRAEESMVFKAVRRSKALDHRLDA

SEQ ID NO: 63295 - protein, 91 aa, Zea mays
  Coding DNA Sequence Number=SeqID_21516
MARQQHMKARPQKYNPTLKMVVAGGQTVKYSEDDERYTLQYVGQETVCSSNLSQGGGWFSAPMVVESCNIHSQKREGIANPHHPRVLDNLV

SEQ ID NO: 63296 - protein, 198 aa, Zea mays
  Coding DNA Sequence Number=SeqID_21517
  Gene Ontology: Mol. function=sugar binding; Biological process =protein amino acid phosphorylation
  Homolog annotation: Hit_ID=Q5ZAS9; Match level="QueryCoverage=98%, HitCoverage=98%, E-value=4e-19, Identity=31%"; Hit description =Putative beta-glucosidase aggregating factor
  Pfam annotation: Domain name=Dirigent; Domain location=1-183; Score= -25.6; E_value=0.00052; Accession=PF03018.5; Description=Dirigent -like protein
MAPYDSEPLDHSLELHELHYQLILIQHWCGTSKANQVEVASPGGFNKLGNMVANDWDLEDPCQNGKIVAHAKGLHVQASREEASWHASFDIVFEQGSGYMFAIRRKWERTNKCTNKFGSSIWYRLEGSTLQVMGPNVFKGEWSIVGGTGKLTMARGVIYKKYLTTVDSTSKIDLQIHAFYIPMERKDAGTSGKNVWRW

SEQ ID NO: 63297 - protein, 294 aa, Zea mays
  Coding DNA Sequence Number=SeqID_21518
MGRAVVGGERAGEGMGGTRDLTSGPDQSAGERRERERGGAADRMRRFGKHAVQQCHVHQWSPQKPPRDHFEQGQHLHHLATSSAPDDLVELVPRRANVGAKKQIFHSSMVSSAIQGLLQRIAGTNIHLFKVYINHCSRWGWHRSVRQLVGQHYRDMMSGGIGGGGEQGMTWSSEWASGRCGPSRCAIWGHTGGLVRGAETSWMTVHILVFAVIPFSIIRPRDRDCSVVSSGRLSSISFEATNGISEAASQVQEEGRVLFEPPGPESTLLSGFETPPASVVAPRDVSGQDDASMS

SEQ ID NO: 63298 - protein, 80 aa, Zea mays
  Coding DNA Sequence Number=SeqID_21519
MAPPLWAPPPPLSVVGDQETIGDVDLLMDVDTGSGADQSNPGAQFLIQRLGFTDTASFGLFAKETLGFHLFNPPSILSEK

SEQ ID NO: 63299 - protein, 85 aa, Zea mays
  Coding DNA Sequence Number=SeqID_21520
MPGGGALERKVWALGGGGAMAAGLLPACWREGREEAPCAKEEEDREVGWRREKIIGQNHRGSRDSDDKANMIHKNEDYQIQAKGE

SEQ ID NO: 63300 - protein, 49 aa, Zea mays
  Coding DNA Sequence Number=SeqID_21521
MAELPVSPAPCSKNPTRSPYSLDVAAASRAMHDSVKHLNHGRMRDSNPR

SEQ ID NO: 63301 - protein, 145 aa, Zea mays
  Coding DNA Sequence Number=SeqID_21522
  Subcellular localization annotation: CTP_CleavageSite=46; ConfidenceScore=5.83e-01
MAPSIFSLSLALGFCFSSSRCSFFPQPFTTTVMLPLLAPKFSSLLRSMVASHLALAPLSARSHVLELGFELHLPAPLLCWSATAPWSAHCFEFAELPRHRRRSLLLQLVGRIPLLGHRRSSLDGLKRPRLPVVSACRRLSLPRVL

SEQ ID NO: 63302 - protein, 67 aa, Zea mays
  Coding DNA Sequence Number=SeqID_21523
MAPPWISNSAVVHVPVGGKTLGSLVLSVWAVDPLNNGRDVDEQTTVDPEVQLVEVAEQELIEGKLYP

SEQ ID NO: 63303 - protein, 116 aa, Zea mays
  Coding DNA Sequence Number=SeqID_21524
  Subcellular localization annotation: CTP_CleavageSite=74; ConfidenceScore=5.12e-01
MAAAPHASLSARTVSRAELLLSSFSAAPELPPILLLGHASSPRAPSPYARTVPLCSLATCAFSSQAAPSTVRVAVAHRGNQLAHAELMSDPTVVSSVRPPLQAARASIPGRGGVVA

SEQ ID NO: 63304 - protein, 90 aa, Zea mays
  Coding DNA Sequence Number=SeqID_21525
MELEAELEDEAARRQRGQREMGGDHGTQERGKLGREQRQHHGSGERLGKERAAGAGETEAKRKRERKAVGHHGIKGLHIGGYGEEANTCD

SEQ ID NO: 63305 - protein, 120 aa, Zea mays
  Coding DNA Sequence Number=SeqID_21526
MTGDKQKQKLKQKPTNKISNTYINKVDKKAATPYLIKKKKNGKVIAIKANKQANKEKGAKHIWVPKEIISNMKSTKKVWIPKGKYAYLSTLYLVYLLCLVFTFVLKLCILGKSHGRTACL

SEQ ID NO: 63306 - protein, 663 aa, Zea mays
  Coding DNA Sequence Number=SeqID_21527
  Homolog annotation: Hit_ID=Q10Q83; Match level="QueryCoverage=27%, HitCoverage=43%, E-value=3e-21, Identity=33%"; Hit description =Expressed protein
  Pfam annotation: Domain name=DUF566; Domain location=125-499; Score= -12.6; E_value=4e-07; Accession=PF04484.3; Description=Family of unknown function (DUF566)
  Subcellular localization annotation: CTP_CleavageSite=61; ConfidenceScore=5.73e-01
MSSSKRWTSASGTAELPGRSPLPASALSPVRQSARRSVSRPEPGATTSPVAVSIARTLWPSSSTGNKSGKSKAPRPPSPLSSAPPPPPSPSVATLADHLVKDDSPRSLSRQRSCTEVPRFADADAEARKIGKQASGKGAGHAFGRSMRFLPSTRPAGVTLTPGRVAPSDLRRLGNMAVSLDAAADVASSGSECSDASRGSTTTPRTASKPRSPLLPRTGSVRLLGSSNTQWALSPGRRSGSPLKQAATTTTLATVPESKGKKSLISLGWGHIFHRRKHAAEDASIAAAATATLLSSPVPSSSRSSGGEAGHHVRMAHCRLLQWRFANANADAVRKRKTGSAELELMGTWASVSEMRGKVARKRVQLEKEKQKIKLDTVLYFQIKDLESWGQQLQTAHDSALASTVGCARAAVCRLPVTNGAKQALELTLTAKTVTRSSSPMAEDTASLISKLVLVAREEQATLQECVELLRLVSALQVEEHSLRSHLVQSASRSAVAVKYAACAALTAVPLDRVRLTAAKSSLRRHRKLRFARPQGSDTGSAPEDDELRFARPQGSDSGSAPEDDELRFARPQAPEDDELRFAQPQGSDSALASADGLRLTRPRGSDSTSALEDRLDLDLGGASTSPNPGLGPTTSQEAPSLPYPKLTQASRNKTGVPSGSLR

SEQ ID NO: 63307 - protein, 404 aa, Zea mays
  Coding DNA Sequence Number=SeqID_21528
  Gene Ontology: Mol. function=metalloendopeptidase activity; Cellular component=integral to membrane; Biological process=proteolysis
  Homolog annotation: Hit_ID=Q84NY6; Match level="QueryCoverage=81%, HitCoverage=83%, E-value=1e-131, Identity=72%"; Hit description =Hypothetical protein OSJNBb0016P23.2 (Os03g0579000 protein) (Membrane- associated zinc ...
  Homolog annotation: Hit description=metalloprotease family protein, expressed) (Putative sterol-regulatory element binding protein (SREBP) site 2 protease)
  Pfam annotation: Domain name=Peptidase_M50; Domain location=63-393; Score=196.6; E_value=6e-56; Accession=PF02163.12; Description =Peptidase family M50
MITTHLSPALKHRSPSPLHSTYHSHHHLPVHLPLPLPRRHCHLAKPAAAASPDLLASIESVASAASVLAAIVLVHESGHFLAAASRGIHVSQFSIGFGPALARFRLGAVECTLRAIPLGGYVGFPDDDPESGFAPDDPDLLRNRPVPDRLLVVSAGVAANLAFAFLVVYAQALTVGVPVQARLPGVLVPEVLPGSAAARAGLLPGDVILAAPGAAPDPSVPPRPGKLEPDPRPVELTVVPDTSADGTGRIGVQLSPNVRVTRVRPENLADATVLAAREFALLTVTVFDGLRQTLLNFSQSADKVSGPVAIIAVGAEVARSSADGLFQFAAVINLNLAAINLLPLPALDGGTLALILLEAARGGRKIPREVEQGIMSSGILVVLMVGMFLIVRDTLNLDFIKEML

SEQ ID NO: 63308 - protein, 107 aa, Zea mays
  Coding DNA Sequence Number=SeqID_21529
MVRRSGQWLAGFLLGRASPTTVSCVCACIHFQGGRRDDDDGDINDDSDCRFWYFHYEEPNPTQKLVHLSQAGHLLRCLWGNLCSGKEEEECVEADLQEFLDFDEFED

SEQ ID NO: 63309 - protein, 37 aa, Zea mays
  Coding DNA Sequence Number=SeqID_21530
MVRRSGQWLAGFLLGRASPTTVSCVCACIHFQGGRRV

SEQ ID NO: 63310 - protein, 55 aa, Zea mays
  Coding DNA Sequence Number=SeqID_21531
MRKHRTPVRTAQTPEYGPGLPRNVLVRDMYSRLNLITNELNSIGINKPGDVDMTY

SEQ ID NO: 63311 - protein, 682 aa, Zea mays
  Coding DNA Sequence Number=SeqID_21532
  Gene Ontology: Mol. function=RNA-directed DNA polymerase activity; Cellular component=nucleus; Biological process=RNA-dependent DNA replication
  Homolog annotation: Hit_ID=Q8S461; Match level="QueryCoverage=98%, HitCoverage=36%, E-value=0.0, Identity=77%"; Hit description =Putative prpol
  Pfam annotation: Domain name=Retrotrans_gag; Domain location=170-261; Score=73.2; E_value=8.5e-19; Accession=PF03732.7; Description =Retrotransposon gag protein
MPEPSTIEGRRIQGELKNLLEDAVVRRAESSASRRQGYPSKHRAVTSRFMREASVHTGRTRNIVPAAPGRLGNEHHHRNRRAHLDEKVRRGYHPRRGGRYDSREDRSPSAEPPGPQAFSRAIRRAPFPTRFRTPTTITKYSGETRPELWLTDYQLACQLGGTDDDNLIIRNLPLFLSDTARAWLEHLPPGQISNWDDLVQAFAGNFQGTYVRPGNFWDLQSCRQQPGESLREYIRRFSKQRTELPNVTDSDVIGAFLAGTTCRDLVSKLGRKTPTRASELMDITTKFASGQEAVEAIFRKDKQTQGRQPEDVLEASSQRGTKKKGKKKSQAKHDAADADLVAAAEYKNPQKPPGGANLFDKMLKEPCPYHQGPVKHTLEECAMLRRHFHKAGPPAEGGRAHNNDKKEDHKAEEFPEVHDCFMIYGGQVANASARHRKQERREVCSVKVVAPVYQDWSDKPITFDQGDHPDRVPSPGKYLLVVDPVIGNVRLTKVLMDGGSNLNIVYAETLGLLRIDLSSVRAGAAPFHGIIPGKRVQPLGQLDLPVCFETPSNFRRETLMFEVVGFRGTYHAVLGRPCYAKFMAVPNYTYLKLKMSGPNGVITVGPTYRHAYECDVECVEYAEALAESEALIADLESLFKEALDVKRHTGNFEPAETVKSVPLDPSNNAFKQIRIGSELDPK

SEQ ID NO: 63312 - protein, 113 aa, Zea mays
  Coding DNA Sequence Number=SeqID_21533
  Subcellular localization annotation: CTP_CleavageSite=60; ConfidenceScore=5.59e-01
MTDKKRREMEDRKSKIGGPHAGSSSRPRFSSNPPSSSSRVTLKDTSTNTKTNVSTNSSIRGSSLSSSSSSTARTTKREETGCDEDDGFGYDYGNGEDEVMEEDLQEFQEYDEF

SEQ ID NO: 63313 - protein, 74 aa, Zea mays
  Coding DNA Sequence Number=SeqID_21534
MAAQELAAGFYGLEASPGRCQESDQSGLLRIWQRSQIRPRSQRPSSIARVCYGSNVEKKTLECGPLRSDGTEMA

SEQ ID NO: 63314 - protein, 170 aa, Zea mays
  Coding DNA Sequence Number=SeqID_21535
MGKGRRGRGSNRRAGNKRKRTPSPPSEDFGDSEYSEEVSSESDGSPAPASPPASSDDSDDSQGLSAAVWTYICVVERSGLEGSDESEVSSDEENSSDSSEEQSGNDSHGEGDGSGDDSDGGDSDEGGDDDGKGGSGGDGGDDGSKGDGGSKDGGKSDGDSGKASGIAPLV

SEQ ID NO: 63315 - protein, 229 aa, Zea mays
  Coding DNA Sequence Number=SeqID_21536
  Gene Ontology: Mol. function=hydrolase activity; Cellular component =cytosol; Biological process=cAMP biosynthetic process
  Homolog annotation: Hit_ID=Q2QRA2; Match level="QueryCoverage=50%, HitCoverage=24%, E-value=5e-51, Identity=84%"; Hit description =Amidohydrolase family protein, expressed
MADSPTIDAVFHNAVIVTMDDAFRVLQDGAVAVAGDRIAAVGPSADVLAAFPCAVQTLDLGGRIVLPGLVNTHVHTSQQLARGIADDVDLMTWLHGRIWPYESHMTEEDSYASTLLCGIELIRSGWWSLIVLSEFMVPLLECKCVADSRARGKLGQESCYVLVWWIWHLTITPRGFQRGGAGLNACVFDGWDPSVSTTCQEVEAESRLWVMAGDKVLQELLGRASWLHA

SEQ ID NO: 63316 - protein, 132 aa, Zea mays
  Coding DNA Sequence Number=SeqID_21537
MIRQKESRKNQTLHTEPKEPNLTLRTDATDPTQTTCEDIDELSFFVRHLGEGELSEKEALELDHKGESMVYGPGAMLFGGGDKMLMCVPNPDESRIKIFSSNGVTLRAISYTPGDIEGAPGWMEKELAEVEY

SEQ ID NO: 63317 - protein, 73 aa, Zea mays
  Coding DNA Sequence Number=SeqID_21538
MSVSPKLAAHSSYPWDPPSSLRVEYSTLKVSVKVLSGDQWAPGDQGLRDYSPEFTGATVPPFTLSGPSWHPLS

SEQ ID NO: 63318 - protein, 208 aa, Zea mays
  Coding DNA Sequence Number=SeqID_21539
MDDIVAFQRNGIAVGSEGLCADEERESRRYDKRVRCVLPRGLLVLVLRLILHLHVEETLAMMAMLWHATSWHGVKHDSGDTAAGSDTWLLSVASSTTSGSALAGCAGLADPPLQFTVLIHSHVDSKNPSGWVTLSPLELATAQAVELLEDELSSKGGEMSWGGSPEHGGHRDRLRALALVALILLALVQGWPLEGVVVHTGVVVTSLQ

SEQ ID NO: 63319 - protein, 183 aa, Zea mays
  Coding DNA Sequence Number=SeqID_21540
  Gene Ontology: Mol. function=nucleic acid binding
  Homolog annotation: Hit_ID=Q2QZT6; Match level="QueryCoverage=69%, HitCoverage=13%, E-value=1e-08, Identity=30%"; Hit description=Zinc knuckle family protein, expressed
  Subcellular localization annotation: CTP_CleavageSite=56; ConfidenceScore=5.25e-01
MEPSMDLVRLPPLQPKHKRRRSKRGKGAAVLGRSQSPPADLVPLTSNLPSCVLELSTDMAREEVALRRALFVTVTGTRPAVLGSDVLEEVSRRYCINIDDMSIHQSMPEDFLMFLPDEEVATRVLNEGKPFRGPMFSLVFKQWTRFAHASATSFSHLMDIEIRGIPAHAWGLNTAKKLLPSAI

SEQ ID NO: 63320 - protein, 172 aa, Zea mays
  Coding DNA Sequence Number=SeqID_21541
  Homolog annotation: Hit_ID=Q2QRA2; Match level="QueryCoverage=27%, HitCoverage=10%, E-value=2e-19, Identity=91%"; Hit description =Amidohydrolase family protein, expressed
MEPPAEESPRQRWALDRPSWELSRRDGQDADAEEVEIKGVVAGTGVMAGEGLVGRGAGREAEQAGWGSEEEGAAPGQGAEATAINLFQRIRILHISYNGSIQGSTVEQQLQFGGKPSPQSIVDFVKHALKPNNSTARAISETNCPPASAKHVTCHSMTKERKVMHSEKSYGY

SEQ ID NO: 63321 - protein, 52 aa, Zea mays
  Coding DNA Sequence Number=SeqID_21542
MAMMGSTSNKMYLCQVPNFGILNDKAETGRVRKHQTFVVFVQKVIPKEEPQQ

SEQ ID NO: 63322 - protein, 170 aa, Zea mays
  Coding DNA Sequence Number=SeqID_21543
  Pfam annotation: Domain name=zf-CCHC; Domain location=102-119; Score =19.2; E_value=0.00066; Accession=PF00098.13; Description=Zinc knuckle
MMNPNEDNVDEVNDKIPTPTLVKRKDESHRYLLNGMKNNKRTRKMFGYKIKPPQPQVEEPKLVNTQTGESNQAKLFSMQATDQPSSAGNQEKLTRREVKVRGACFYCKEEGHFICQCPKKRLDRLAKKAFKQNSTSDNLEEIVFTSSKYKLIQTSDESGRLLDIRVEPRE

SEQ ID NO: 63323 - protein, 65 aa, Zea mays
  Coding DNA Sequence Number=SeqID_21544
MSRKASLHTNVRAVHVQLQDVMWEPHNDGERALQDVEQEETRSVTDIGANADDSNCDRVTRIILA

SEQ ID NO: 63324 - protein, 81 aa, Zea mays
  Coding DNA Sequence Number=SeqID_21545
MGWRHGHLAAGSGWRGRLLGDGSARSWKQAASRAYGGSRLRDHLVARPPGGTRRRELCFLVAGRTLEVRLPPERKNTLGVD

SEQ ID NO: 63325 - protein, 204 aa, Zea mays
  Coding DNA Sequence Number=SeqID_21546
MVRKGDADEVALKRAAGLSSDRDLVEEFLACGVWPLSHGWGVGAMKLWLMSFKENVLVRSLTFVVDLCGHDAGVFVGELEAVAMKIIEKYPMKTEVAKSWDIRGSNIQLNQDASKEAKEQTEGNKKCDSKGAVVTQGEWLRGVPIPWTVGEDFLTSRLVQSFKVFLYGRNIDGVVSASMESSQKESKKMGPAWLGTLKELCETC

SEQ ID NO: 63326 - protein, 51 aa, Zea mays
  Coding DNA Sequence Number=SeqID_21547
MATPSPSIAAPGDGSVQDDDTTSWQNNLFASHSPTRGSGHNSNQPGDGWLA

SEQ ID NO: 63327 - protein, 118 aa, Zea mays
  Coding DNA Sequence Number=SeqID_21548
MAMGQQGPRRAGRACPRAGATPGEAHRPCRSSRGARAPCHGHSAGRRVWPCQAAEAQGATRTAMAKGKQGPRAPTGRGHAWGGPSAVPGLTRGQGRPALATPLAVGSGHDRLPGRRGL

SEQ ID NO: 63328 - protein, 94 aa, Zea mays
  Coding DNA Sequence Number=SeqID_21549
MGKEAARGEGNRLRQIPGRGHGRLVRGTAEQKWSSANSMGEQSAGKSELSREMKMRGRAEGERRRLGARARAVEQGPDRLWFTQKSDKNISGRE

SEQ ID NO: 63329 - protein, 111 aa, Zea mays
  Coding DNA Sequence Number=SeqID_21550
MARGLKLGQHAAHVLVLVWPRCLLAAHSACACAWLVRGALAWTCARGNENDGWALSMVMPNRTLAEYVDVYSPLLYTPNPPSPGCLHCNHCSGEDEAVEGDFQEFQDYDEF

SEQ ID NO: 63330 - protein, 104 aa, Zea mays
  Coding DNA Sequence Number=SeqID_21551
MHGRVRCEGIELASLVHMPDRDGSGRLTTESMAGEPEVAATQGTQHSRLAKLTCGPARKRASIGVSDCPVGSGCQRLPVSWAARASEGNRRWAELGSTAQGVHM

SEQ ID NO: 63331 - protein, 869 aa, Zea mays
  Coding DNA Sequence Number=SeqID_21552
  Gene Ontology: Mol. function=hydrolase activity; Cellular component =intracellular; Biological process=metabolic process
  Homolog annotation: Hit_ID=Q1T265; Match level="QueryCoverage=91%, HitCoverage=98%, E-value=1e-160, Identity=32%"; Hit description =Tetratricopeptide-like helical
  Pfam annotation: Domain name=PPR; Domain location=128-162; Score =24.0; E_value=0.00054; Accession=PF01535.11; Description=PPR repeat
  Pfam annotation: Domain name=PPR; Domain location=201-234; Score =10.7; E_value=0.4; Accession=PF01535.11; Description=PPR repeat
  Pfam annotation: Domain name=PPR; Domain location=237-271; Score =42.4; E_value=1.6e-09; Accession=PF01535.11; Description=PPR repeat
  Pfam annotation: Domain name=PPR; Domain location=341-375; Score =26.9; E_value=7.3e-05; Accession=PF01535.11; Description=PPR repeat
  Pfam annotation: Domain name=PPR; Domain location=443-477; Score =31.3; E_value=3.4e-06; Accession=PF01535.11; Description=PPR repeat
  Pfam annotation: Domain name=PPR; Domain location=562-596; Score =31.4; E_value=3.1e-06; Accession=PF01535.11; Description=PPR repeat
  Pfam annotation: Domain name=PPR; Domain location=598-632; Score =19.0; E_value=0.017; Accession=PF01535.11; Description=PPR repeat
  Pfam annotation: Domain name=PPR; Domain location=701-735; Score=9.0; E_value=0.64; Accession=PF01535.11; Description=PPR repeat
  Pfam module annotation: Pfam domain module=PPR::PPR::PPR::PPR::PPR::PP R::PPR::PPR; Domain location=128-162::201-234::237-271::341-375::443 -477::562-596::598-632::701-735
  Subcellular localization annotation: CTP_CleavageSite=68; ConfidenceScore=5.66e-01
MAATPLPITSPPPPPTPPLPQPPTAATIRSLTAAGNHAAALHALSSLSAASSSHAPLDHFALPPAAKSAAALRSLIAVRSIHGAALRRDLLHGFTPAVANALLTAYARCGDLTAALALFNAMPSRDAVTFNSLIAALCLFRRWLPALDALRDMLLEGHPLSSFTLVSVLLACSHLAEDLRLGREAHAFALKNGFLDGDERFAFNALLSMYARLGLVDDAQMLFGSVDTTDSPGGGVVTWNTMVSLLVQSGRCGEAIEVIYDMVARGVRPDGITFASALPACSQLEMLSLGREMHAYVLKDSDLAANSFVASALVDMYASHERVGVARRVFDMVPGGHRQLGLWNAMVCGYAQAGMDEEALELFARMEAEAGVVPSETTIAGVLPACARSETFAGKEAVHGYVLKRGMADNPFVQNALMDLYARLGDMEAARWIFAAIEPRDVVSWNTLITGCVVQGHIHDAFQLVREMQQQGRFTDATTEDGIAGTDEEPVVPNNVTLMTLLPGCAMLAAPAKGKEIHGYAMRHALDSDIAVGSALVDMYAKCGCLALSRAVFDRLPKRNVITWNVLIMAYGMHGLGDEAIALFDRMVMSNEAKPNEVTFIAALAACSHSGMVDRGMELFHSMKRNHGVQPTPDLHACAVDILGRAGRLDEAYSIITSMEPGEQQVSAWSSFLGACRLHRNVPLGEIAAERLFQLEPDEASHYVLLCNIYSAAGLWEKSSEVRNRMRQRGVSKEPGCSWIELDGVIHRFMAGESAHPESTLVHAHMDALWERMRNQGYTPDTSSVLHDIEESEKAAILRYHSEKLAIAFGLLRTPPGATIRVAKNLRVCNDCHEAAKFISRMVGREIVLRDVRRFHHFVDGACSCGDYW

SEQ ID NO: 63332 - protein, 264 aa, Zea mays
  Coding DNA Sequence Number=SeqID_21553
MNRVGSSEEPIVASLGCSAGRLFDSLTSLGSLAVFSPLAYIQVIILALTQSSCPSNLICEVTLELGRTKGFLLLRDAEGWNVPVRGLFLALVRRELISPCPDEATHYIRGGKWQLPAWLRLRKGAWSSRQRALALAAARWRWRLETTVFSTTKSLLKIRMSRAHVPARRRQCRTAPARDEGRSTGAHPRAAAGSDSESDGDHGPAAAARQQQQAPRASSSLKSSQRRYFLSSTVASPPVPAGSATEERVGAQLLVNYLGSAAFF

SEQ ID NO: 63333 - protein, 154 aa, Zea mays
  Coding DNA Sequence Number=SeqID_21554
  Subcellular localization annotation: CTP_CleavageSite=59; ConfidenceScore=5.40e-01
MALCPPPPLPRVAGAQPAHGLVSPPASTRHHHGRKTKTPTSPPACLQRGKTHMTSIRFACGARDEGNGKLLLPTDEAGRNRGGTAQLRHRPQLQPHRGKVRYCLNISEDEYRKTIKVNVIRPWFLMKIIGAERGLYPGATTYGNSLGATKPVYT

SEQ ID NO: 63334 - protein, 188 aa, Zea mays
  Coding DNA Sequence Number=SeqID_21555
  Gene Ontology: Mol. function=thiamin pyrophosphate binding
  Homolog annotation: Hit_ID=P51849; Match level="QueryCoverage=35%, HitCoverage=11%, E-value=2e-22, Identity=75%"; Hit description =Pyruvate decarboxylase isozyme 3
MREFLSTLAKRVRPNTTAYGNYRRIFVPGGQPPECEAGEPLRVNVLFKHIQRMLSDGGAIIAETGDSWTAKLLEMVETLVAAPFNDRQGSRDRGLAPWRVAGGARYVFVQWQLRAMPFLNSATKQIEGFKSQIQEAAKKFIATNISFLIGDVESADRAFHYSGLKENDVPLLFVIAQGGKISKPNYRP

SEQ ID NO: 63335 - protein, 146 aa, Zea mays
  Coding DNA Sequence Number=SeqID_21556
  Homolog annotation: Hit_ID=Q5ZEA1; Match level="QueryCoverage=39%, HitCoverage=5%, E-value=1e-15, Identity=86%"; Hit description=Beta adaptin-like
LLSSNAGAVEGSAGMDADPLAFLSAGTGDIFDAGLLDAALASTKELGVGDGGAASNDALLSSYDSGTTGENISSGESNNYSGGGHDAEVALGSFSPVVSGMTDDSRDEILDKVGDTEGAETTESEAADSGVLILAVPREEVSGEEG

SEQ ID NO: 63336 - protein, 42 aa, Zea mays
  Coding DNA Sequence Number=SeqID_21557
MARPIAIGRSQMRSLEEPVTENPGEQQVELAEQVLIEGKLCP

SEQ ID NO: 63337 - protein, 255 aa, Zea mays
  Coding DNA Sequence Number=SeqID_21558
DNDGAAEWRAERARAAARMLVMGENSSEARRRRKVKNGAAARNQQRLACCAFRRAHSKRQQRTAQQHASRGNGARVPSVHHGRDDELGSVKRSRGWRPWTGRGLRSREKRSRGRAELLLDHTPLEPRRKGAMVICCCCCEGVELLGDGSGCSLPLGKKGAAEGGEAKGESRTPPSRSMGKTTDCGEEGRRHHGQPAVWPSREAPHALQGEMSQGRPPWERGQRRSAVVGRRAEHHGEEEEPSSLLAVVWKKGTAK

SEQ ID NO: 63338 - protein, 107 aa, Zea mays
  Coding DNA Sequence Number=SeqID_21559
  Subcellular localization annotation: CTP_CleavageSite=80; ConfidenceScore=5.45e-01
MTSILAAALARSALHSAAPSLSLLKRRLKFLQQASPSIAPQQHAPSPRAWVLDESQQRATPSGFASVSHARRRVRLRAPCAATPTEIAMIRGKPTCRMYSGLCRCSS

SEQ ID NO: 63339 - protein, 305 aa, Zea mays
  Coding DNA Sequence Number=SeqID_21560
  Homolog annotation: Hit_ID=Q10FZ4; Match level="QueryCoverage=32%, HitCoverage=47%, E-value=5e-12, Identity=46%"; Hit description =Expressed protein
  Subcellular localization annotation: CTP_CleavageSite=82; ConfidenceScore=5.15e-01
MMLPCIVWARLPGRFYSSIHQPNLESGQAVSPPPTPASPRRSPLLLCITQLARLLHPTPSFRGIRSILGRAPRVEGQPKLAMAAVRSDRVHHHHRRSEASCPATSAAVAAARADDALRQRPRGLVQVRERDQGPLSTGHQHLHHHHHQLRRSAAFPPRRPGPGRRPPQRCESDLNIREHRSCSEVAGGTAAGCAAVCCCFPCVMVEVAVLATVRAPAALCRKAARVRKGRRRSASAGQATEIYELLVDDTGVVEVDAGAANAVALPVKPALQLEEKGELEKEVWARFYGTGFWRSPSQLDDNDDR

SEQ ID NO: 63340 - protein, 92 aa, Zea mays
  Coding DNA Sequence Number=SeqID_21561
  Subcellular localization annotation: CTP_CleavageSite=32; ConfidenceScore=5.71e-01
MQPNRPSAPAPPDRRTPPVSGSPLSCALSPLSLAAQWGRPVGTSFFTRVPLLSLPRGPAPPSPPTSWTGECALAHVVGFLGHDAHPRAQLPS

SEQ ID NO: 63341 - protein, 76 aa, Zea mays
  Coding DNA Sequence Number=SeqID_21562
MAPWLRPSPDELPRLAREPGLILGAASRRLAQRSGQRARQQARLARAVGGQQPSPASGAQPAWLACGQPVRDPRRG

SEQ ID NO: 63342 - protein, 496 aa, Zea mays
  Coding DNA Sequence Number=SeqID_21563
  Gene Ontology: Mol. function=transferase activity; Cellular component= nucleus; Biological process=flavonoid biosynthetic process
  Homolog annotation: Hit_ID=Q6ZBI7; Match level="QueryCoverage=77%, HitCoverage=88%, E-value=1e-122, Identity=58%"; Hit description =Putative hydroxyanthranilate hydroxycinnamoyltransferase 2
  Pfam annotation: Domain name=Transferase; Domain location=46-468; Score=211.2; E_value=2.4e-60; Accession=PF02458.6; Description =Transferase family
MSYPEPTQPLFIRSCVKKKKKKKKKKKKKKKKKKKKKKKKKKKKKKKKKKKKKERKKERKKERKKEDQWLWRCRGYTPTVYFYHRSTDAAAAGNVSDATSRLKDSMANALVLFYPLAGRLGVDKDGRIEIDCNSEGALFVIARSELTMDDLKNLEPSPELTRLFVPRIPSTDEQPSSIILAVQVTLLKCGGMSLGTALHHVAVDGTSAFHFFQTWSTISRDGDGAAVEPPCHDRTLLRARRPPSVHPDALSVFCPKMSFAEPSGPTASKVFVVSADQLASLKRASGSETTFCALTALVWQCTCVARRLPPAAEARVSFSANIRRSTRPPLPTRYFGNALVPVFAAGAAGDVASDALESVAGRIRRAISRVDDELVRSAVDYHELFGIDYRLQRGILPATELRMVSWLGMPLYDADFGWGRPWRARAPHEQRPGAGQWRPRPRVLGGCTYGGVRATALCKARRLAFSFLCVSCHQSKSKFGVGIFNCIHVLFLEQLQ

SEQ ID NO: 63343 - protein, 122 aa, Zea mays
  Coding DNA Sequence Number=SeqID_21564
MASSVGGKPYSAVIKTVGGWVEDSGGGGIRPEQSRLATSSFAGADRSTACELTTTSRGMRVREWEELREEGHDMEAEVGRSRRGGHGHKYHGCIVFFNFKENILLNESNYTIIQKAISHLIS

SEQ ID NO: 63344 - protein, 144 aa, Zea mays
  Coding DNA Sequence Number=SeqID_21565
MEDKDGPVMVRCRRCPKCERSESLVRLRSKRWENDNFGREFVKCESKSYRDNKVVKIYNFFMWMDDYVKMLEGAGVVGGSGEMMTSNMWDERAHVTTNWDKFAAELEKMNDNMVELKNIKDNMVELKKMFGAFYASMIFILFLF

SEQ ID NO: 63345 - protein, 215 aa, Zea mays
  Coding DNA Sequence Number=SeqID_21566
MPPIQQGSGFGGCGEVDEDFIAVGNWKDARRRGVEQGGAGVEEAHGEEALQACCGAPPRDAAYRSVLLGDSGRKMGLADLDRENGDLDREKMSLADLDRETRRAISTWGGGAPSPEQTTVGRRRAWRGRRERVGGEEDGGEGGAKPSAAGGGEMKGVGSALVGRGGRQAQCRRRWGDEGRRVPPTVGSLEGRRAGEYRIWVWGILDGEGSRGPHA

SEQ ID NO: 63346 - protein, 101 aa, Zea mays
  Coding DNA Sequence Number=SeqID_21567
MAPWSPSSADGREDALGLPLLGRLPPPAPAPLCAVDLAPLPKSGCLRAPSSFSPVSRISFGRSAKLPAERSFSSPRAQPSKLPAIVVFGPAVGTTSFAVAS

SEQ ID NO: 63347 - protein, 302 aa, Zea mays
  Coding DNA Sequence Number=SeqID_21568
  Pfam annotation: Domain name=DUF313; Domain location=106-237; Score= -23.9; E_value=0.02; Accession=PF03754.4; Description=Domain of unknown function (DUF313)
MGSIIFPCHVVPLDLPMWWGRVLLSMWPEAYDRAFAESQQRANKRARQDEASAKSSSSSSSSLLEEATASAGAIVPYVGAVHDVAPINSVVVPPSLQPPPPAAGSREAPPCLRRHFLQALGLRADLPVHFIHDKRVSKTDLDGHQSRFRIPLDGVERHLRPILSPQELEAANLLEGPRRRPRGQQPEPRDGNNRRTTAKKKGKAHGGLPVMLVDLQAGAKELRLSRWDSSQGTIVKGEGYLQFTRQCTFKEGDDVAIWAFVQRRFRLFGVDVWDDSLLHILVVKKQAPEARCCVCHAHAQPE

SEQ ID NO: 63348 - protein, 187 aa, Zea mays
  Coding DNA Sequence Number=SeqID_21569
MPNWGSLLDTQLKTNQSGGIITNVLDIATHCSLIKCNGAFASYNNDEETESIELILDLSLKLVFARRRRSVVGVIVKVNKGGEEDVFLDFGLVEVLLLEHLLSNLYLIIGRVLTLSLALTNVVVALVDVQLALHIGLVGNKLVGVSIVEAAILDRAMPPIHVVVVELHEATGNKWQLLIPKALNLLL

SEQ ID NO: 63349 - protein, 131 aa, Zea mays
  Coding DNA Sequence Number=SeqID_21570
  Gene Ontology: Mol. function=kinase activity; Cellular component =ornithine carbamoyltransferase complex; Biological process=amino acid metabolic process
  Homolog annotation: Hit_ID=Q6QP54; Match level="QueryCoverage=99%, HitCoverage=32%, E-value=6e-15, Identity=52%"; Hit description =Putative kinase
MAPPVDVVGPWCSRLSDVEAPPRSRSSLSSMAEVESEPLGRARRRPSAEARAESEPLGRARRRPSAEARAESEPWGQTKRSSSSSGAEPESEPWGRAKRSSSSSGAEPESEPWGRAKRSSSSSGAEPKSEP

SEQ ID NO: 63350 - protein, 62 aa, Zea mays
  Coding DNA Sequence Number=SeqID_21571
MGSRDLLSRSQMHVGARDEEDYDDDAEVLMKGSSFILPFFHGSVIHMTRLIDRYNERYLSAN

SEQ ID NO: 63351 - protein, 147 aa, Zea mays
  Coding DNA Sequence Number=SeqID_21572
MEHELVELHRGVNRLQSEVALLGSDFDNAREGNTRLEEADLELSQTRKKIGGSPFFPFSCTRVICSFEEIGVGGGDGDGDQDERAFLYFQTALLRFKSFGRSLMGIALGRMVSHFDEVDIALIVEGFATGRIDEELHVIEDQFRPHA

SEQ ID NO: 63352 - protein, 55 aa, Zea mays
  Coding DNA Sequence Number=SeqID_21573
  Subcellular localization annotation: CTP_CleavageSite=23; ConfidenceScore=5.02e-01
MGMDMGQNLHPLGKRTCKSFNPYAFAFQSTLSGRPIMGPRSGALPVLGPDYDSGA

SEQ ID NO: 63353 - protein, 139 aa, Zea mays
  Coding DNA Sequence Number=SeqID_21574
  Gene Ontology: Mol. function=sugar binding
MDPAALKFLLYEINRRFDEADARVDRLFGKLQQPAHLMGPSPSVSLDLPTTPLNVDHFPNASASVPPTPTTVVGAVVIVDNWGGCFDDGEQYYAAPSVVADNWGRFFDGEYGAANTEFADHWDHPFNPEANGDLNRISD

SEQ ID NO: 63354 - protein, 172 aa, Zea mays
  Coding DNA Sequence Number=SeqID_21575
MAAQALFIPRREAPCRGCAAAVPVPHGELPTMAKLPRRDPALALNSRPWSSPLLLRVLYFLHPLWPPVYAAANGLPAGGEICTLDRLDDGWGSTFSRVQARRLLAIGSTRGVVVVTVGSKFLRWVAGSLRTGDLRCLGLFALSRMGVWGKEVEEHTCAVGLELGRGDWIALV

SEQ ID NO: 63355 - protein, 132 aa, Zea mays
  Coding DNA Sequence Number=SeqID_21576
  Subcellular localization annotation: CTP_CleavageSite=15; ConfidenceScore=5.22e-01
MASRARTLLPSRVISACAAPSPTIVLPMKPPVEPPPLVSPPCPRRYASLATPPCSSPRHRGQPLARALPRHGDVGFPDPFRLASMPSLRFVRAQERLHFLYESRLAVGKSSEGFQALQQSTPGPASRLLLHR

SEQ ID NO: 63356 - protein, 101 aa, Zea mays
  Coding DNA Sequence Number=SeqID_21577
MTKLQKSFLRERIVNSEAAKVVPKGAQHKFRSSKVIPKGMQSQIPPKYKAFYARKCFDVYKKKGRCFSPSAQKDTNFVHSKAIHTWIKKIMQIFLSSIDAS

SEQ ID NO: 63357 - protein, 118 aa, Zea mays
  Coding DNA Sequence Number=SeqID_21578
MANKMGTELSGSQRRHIIDEEFPDDEIDFLLTVLLGGLPHAVVNAHDLPAGADRHQGKTMSDTLGPRGRVKGMRRGAVERLERARPIRLMTRSQASAVEDVWARKAGANEVGPTRHTR

SEQ ID NO: 63358 - protein, 106 aa, Zea mays
  Coding DNA Sequence Number=SeqID_21579
MQQAGCELRRVGKERRKQQDVVGSRGEAQRGQKGSGCGTEKGAGDNNSTWENGEECEHLRASPQHWRPPPVNSFDHLRQTVTFVMPSKKASGLGAATTGRQSGDTT

SEQ ID NO: 63359 - protein, 74 aa, Zea mays
  Coding DNA Sequence Number=SeqID_21580
  Subcellular localization annotation: CTP_CleavageSite=44; ConfidenceScore=5.03e-01
MPAKRKPSLPFYIYKYICPRSCFSITRPDHPSSSRTGAQPFPVQCHNSVDAVKPSRDPWSRRPTPPSPELYCTQ

SEQ ID NO: 63360 - protein, 92 aa, Zea mays
  Coding DNA Sequence Number=SeqID_21581
GLEQGCARGSTGRKSSGDGCRTWAGDETHSRGGLRERGDGWGFTMGGSVGNGYSEHDDARICRGHSTREGLGRGRRGYLRVEHARALAAGAG

SEQ ID NO: 63361 - protein, 370 aa, Zea mays
  Coding DNA Sequence Number=SeqID_21582
  Gene Ontology: Mol. function=kinase activity
  Homolog annotation: Hit_ID=Q7XCE9; Match level="QueryCoverage=94%, HitCoverage=72%, E-value=1e-154, Identity=75%"; Hit description =Pollen-specific kinase partner protein, putative, expressed
  Pfam annotation: Domain name=DUF315; Domain location=1-365; Score =465.4; E_value=6.9e-137; Accession=PF03759.4; Description=Domain of unknown function (DUF315)
MELVWDGVIFIGRCMCISCNVAPFDRFVGAATVFGSCHKLEPLPAGKKAMWTREMDCLLSVCDYIVQFYPSTQTLPDGTKVEVMATRPRSDIYINLPALEKLDAMLIDILDSFQKAEFWYADAGTRSFGSVTSSSSSRMSCSSSFRRSAHRNDDKWWLPVPCVPDAGLTDKARKDLQQRRDCANQIHKAAVSINSGVLGDMEVPESFMAVLPKSGRASVGDSVYRVMLGADKFSPEFLLDTLDISSEHDALAMADRVEAAMYVWRRKASGSHGKLPWSKVKELAADDDDKNVTLANRAESLLLCIKHRFPGLSQTTLDTSKIQFNKDVGQAILESYSRVLESLAFNIVSWIDDVLFVDRSIRKLSDNLKS

SEQ ID NO: 63362 - protein, 120 aa, Zea mays
  Coding DNA Sequence Number=SeqID_21583
MDEFGVYWINGSNTMLNGARHIYPHGAVHKEFKRRNNINQATPRQVMRDSTATSHWNFTRRKIGPYEATSMGSKCCSALEIARARTVQAERDCVSGLRTERLRPVDFLEWDGFEFEENIL

SEQ ID NO: 63363 - protein, 900 aa, Zea mays
  Coding DNA Sequence Number=SeqID_21584
  Homolog annotation: Hit_ID=Q10T01; Match level="QueryCoverage=99%, HitCoverage=100%, E-value=1e-180, Identity=42%"; Hit description =Expressed protein
MGKRGHRRSASQDDDNVGCVWGLMRMLYFRRDPKLLLDAKQLSGRHAFREVSGRGHSAKRPNDFDGIEEDGNIEDRTLQKPTVKNLMEDELEKLMLLKKFPNDEVQRRKADLGIDVSLDTISEHTNKSTDNSYHQAGISTPSTPSMDYGVLNYTEEYNLESVLVNFLGEIYSCHNECPHSDCKNKNELCPSLKSLIHKKVNELNNLPHNIGRGQSQEGSDAKPSDQNNLYNTMAAQSKQFKDALEILGSNSELFVKLLQKPNQHIADSIQQHENSKVSAGLEPDKIHGQTNFVGGRGSSKQHPLATKEQAKERKYMFFWRKSKSNRRQMLDATDGAQTVSKIVILKPNPERGINQKAATARTLHQQPCTSNAPGCSGRENSKFSIKEVKKRFRFVTGERSERNLSPAEDLQGDPRKIKDSVVAINKYFRHLPEGSLANKSASDIENGIKPFISSKQKNQNGSITEISGHIVAPKGASVFYEEARRHLSEMLKGNDCSINYPEVQISKSLEGILSLPHGNVSTTGSSLRGKDYLDPSPGETDVYDACEVEREECTQERSQSQEDFGSIAHCTCTTVDDQVTVREGYYTNEAQEGPRHAHDEPDTLYIEGLDKFICRENIRNEESSPAEQSRDDIRQEILEEINQGKEHVKMSLASVEGIDEKLGQQEPETPEPRASAKLISDGSPNQSDEKQERPSPVSVLESSFEDIGSPDCINKKECELHGLQRTLYFPDNEPDVNVLWEDKNVRLDYIKLVLELSELCAEQNLEVWYLEDELISPCLFEELQSQGDQTDDRMLLFDCICEALTEIQERYFRLSSWLTFLKHDIRTPPTGENLITEVDRYVNGYIIQYSLPSTLEQTIKRDLEVQTWMNIRSKTEGIIMEMWEFVLDELIDETVSDLWI

SEQ ID NO: 63364 - protein, 510 aa, Zea mays
  Coding DNA Sequence Number=SeqID_21585
  Gene Ontology: Mol. function=ubiquitin-protein ligase activity; Cellular component=ubiquitin ligase complex; Biological process =protein ubiquitination
  Homolog annotation: Hit_ID=Q336U1; Match level="QueryCoverage=95%, HitCoverage=99%, E-value=1e-133, Identity=53%"; Hit description=U -box domain containing protein, expressed
  Pfam annotation: Domain name=U-box; Domain location=422-486; Score =20.9; E_value=2.7e-06; Accession=PF04564.6; Description=U-box domain
MAAAVVDKVFVALPAEVKAGQSTLAWALDRFGGGGGGRTTVVIAHVHVPPQMIPVMGVKFHSSKLSPEQVKLFRRIEHERVDKQLDGYVRQCSKMKVKCEKLVFEKDDVVAGLVELVVLHKVTRLVIAAAADRQYSRKMDRPKCRTATEIMQRADPSCKIWFVCKGQLICTRGVEEEVAPSATPFVPDDLDHQALQLVVSHQKEDEAKSELGLYDELKEACIAAENLMKRALNESSRRQKADGEVASALQKAKEYQELYFEETRKREELEGALARAHREIARLMQAKQVFVVERNTAADELQEAMSERSSLEGHDVDEDAVLRTAGGQATEQQEEEEEHVQTQHDLGTGERDLELEARLNQSKLAAFSPSSVIQSPYDEDRVPACFLCPILQVWVLALHPPQALSTVHAWRSCLNVVEFTYMQEPMRDPHVAADGFTYEGDAIRGWLDGGNGASPVTGQPLAHRELAPNLALGAVIQDYTVMRRRQCRFCDSHDGVAALQFFPSPVGCQR

SEQ ID NO: 63365 - protein, 211 aa, Zea mays
  Coding DNA Sequence Number=SeqID_21586
  Pfam annotation: Domain name=zf-CCHC; Domain location=102-119; Score =14.5; E_value=0.004; Accession=PF00098.13; Description=Zinc knuckle
MSQEETTSSRSYAFACDEHKKMKDNKKAQNSSSSSEEEEYEEEDNEEEGDDDKPTTSSSEDKEIVQCVRKVMRMIHKINLMGVPLHVEDILFNIDEKEQRKRGCFTCRENGHFWDNCLNKVVPKKRRIKGKALTTIRAWDDSSSENEPPRSRDHYSSLCSSRSFHRFLMARGNTNNLSSSDDDNDSDSYDDKPFVDELVHFVNFVEDVCTK

SEQ ID NO: 63366 - protein, 62 aa, Zea mays
  Coding DNA Sequence Number=SeqID_21587
MASPIHRRVASGDYKVTWEVSVVLPCKEGSRAMGNCSPEREHRHKSAPPHGQYYRYRDSRLT

SEQ ID NO: 63367 - protein, 187 aa, Zea mays
  Coding DNA Sequence Number=SeqID_21588
MSRDPRDRHARHARATRGETRDTRERRVTTREWHTRCTHMTKKRDLWQRRKGLAGRFHRCAGAWGARRCRLASLPRRDTDNATTQGNAGGESPLQGLEQGCDRGSTGRKSSGAGCRTWAGDETHSRGGLRERGDGWGFTMGGSVANGYSEHGDARICRGHSTREGLGRGRRGYLIVELPRALAAGAG

SEQ ID NO: 63368 - protein, 157 aa, Zea mays; identical to SEQ ID NO: 49556
  Coding DNA Sequence Number=SeqID_21589

SEQ ID NO: 63369 - protein, 144 aa, Zea mays
  Coding DNA Sequence Number=SeqID_21590
  Subcellular localization annotation: CTP_CleavageSite=8; ConfidenceScore=5.06e-01
MANNNKSCCFSGSSLSFELTFRSDTFVLRSRIAWGGGGGRNGRSGSPGLGAPPGRGGGADGRAGWGVGGGTGGAGTAGGAGTKAPAGVAGGGSSGGRASSTLYGRWKKRERKESERRSQARSTIGGRNGRERKVREDKVDSLVK

SEQ ID NO: 63370 - protein, 997 aa, Zea mays
  Coding DNA Sequence Number=SeqID_21591
  Gene Ontology: Mol. function=protein translocase activity; Cellular component=chloroplast outer membrane; Biological process =intracellular protein transport
  Homolog annotation: Hit_ID=Q94LU7; Match level="QueryCoverage=99%, HitCoverage=100%, E-value=0.0, Identity=63%"; Hit description =Putative outer envelope protein
  Pfam annotation: Domain name=AIG1; Domain location=366-552; Score =151.6; E_value=2e-42; Accession=PF04548.7; Description=AIG1 family
  Pfam annotation: Domain name=MMR_HSR1; Domain location=366-478; Score= 10.9; E_value=1e-04; Accession=PF01926.13; Description=GTPase of unknown function
  Pfam module annotation: Pfam domain module=AIG1::MMR_HSR1; Domain location=366-552::366-478
MENGGGVGEGRSENRAGENGGVAEAATAADEGDCDVVVEGGDEGDMPPGAVAAGDHQPMVTPNTRAVLETGQLAADKWDEDDTPRFIDVEESFADDVNQDHVEENAMGQSIREYVTAAVLADRKKERLDKDHNFFATRDNKAEVAAQSGSEYEDVKDGTLVYQSKEQPGTSTEDIASSHSRPGTVTHSAAEPAVAIEELDDSSSSADENTATSAPPAQFSSGSSTPAQSSSAASARSTNGPSLPSRPAGLGSSSSLSQPPARSVQQVHANRPAIVERGTQGATEDDGDENDEIHEKLQMIRVKFLRLANRFGQTYHNMVVSQVLYRLGLAEQLRRTTSNGSFSIDRARDMAERLEAAGNAPLDFSCTILVLGKTGVGKSATINSVFDDTRLDTNAFDSSTRKVQEVVGMVEGIKVKVIDTPGLSCSSLEQHRNQKVLNSVKRLISKNPPDIVLYFDRLDMQSRDNCDVPLLQTITKVFGASVWFNAIVVLTHAASAPPDGQNGIPLSYEMFVTQRSHVVQQAIRQAAGDVRLMNPVSLVENHSACRTNRAGQRVLPNGQVWKPQLLLLCFASKVLAEANVLLKLQDSPIGKLSRTRIPPLPFLLSSLLQSRAPLKLPEEQFGGDDDDLEDDLADDSDSDDGSDYDDLPPFKRLTKAQLAKLNREQRKAYLEELDYREKLFYQKQLKEERKRRKLMKKMAAEASARANDFSNSNLEDDATTPTNVSVPMPDMVLPSSFDSDYPSHRYRFLDTPSEWLVRPVLETQGWDHDVGYEGLNVERLFAVKGKVPLSVSGQLTKDKKDCSLQMEVASSIKHAEGKTTSLGLDLQSVGRDMAYTIRGESRFKNFRRNNTSAGISATLLGDSVSAGMKIEDKLIVNKQLRVLVSSGAMSGRGDMAYGGRLEATMRDKDYPIGRMLSTVALSVVDWHGDLAIGCNIQSQIPAGRASNLVGHANLSNKGTGQVGIRLNSSEHLEIALVALVPIFQNIMKLLQNYSESG

SEQ ID NO: 63371 - protein, 166 aa, Zea mays
  Coding DNA Sequence Number=SeqID_21592
  Subcellular localization annotation: CTP_CleavageSite=64; ConfidenceScore=5.72e-01
MGKLRLARPRARTQPRPRKTNSASPDPRVRTQPRPRKTNSASPDPRARTQPRHRKTNSASPDPRAQTRPRPRRSLRLARPRARTCHVIGKAIITLPLASSSYGKQDRRPIWLAPGNTKATGFPFCLSLPPFVLRLAPTHLGWDTRQQFTRRSRDPPGSPSDSWRAR

SEQ ID NO: 63372 - protein, 288 aa, Zea mays
  Coding DNA Sequence Number=SeqID_21593
  Gene Ontology: Mol. function=acyltransferase activity; Cellular component=integral to membrane; Biological process=metabolic process
  Homolog annotation: Hit_ID=Q337H3; Match level="QueryCoverage=62%, HitCoverage=62%, E-value=1e-58, Identity=63%"; Hit description=1 -acyl-sn-glycerol-3-phosphate acyltransferase 1, chloroplast, putative, expressed
  Pfam annotation: Domain name=Acyltransferase; Domain location=167 -267; Score=-11.1; E_value=0.026; Accession=PF01553.11; Description =Acyltransferase
  Subcellular localization annotation: CTP_CleavageSite=57; ConfidenceScore=5.24e-01
MGTLIRPGPAASPLPIASPSSSSAHGIADSPLCRPVSPGGSHATALILSYDLFWLVRSGCRWRWREELAASGVGVGGGVPVPEYAGSGDEMAPPERRVEESIDAGQQLASRVRGVCFYLVTAVAAIFLFVAMVVVHPLVLLFDRYRRRAQHYIAKIWATVTISMFYNLEVEGMENLPPNSCPGVYVANHQSFLDIYTLLTLGRVGNVSLGCDSSAAYGQQEPVDTIFQFAFHVLHNIGFGNAGLSQTRGAFSVAAKTGAPVIAITLIGTGKLMPSGMEGILNSGSVKM

SEQ ID NO: 63373 - protein, 374 aa, Zea mays
  Coding DNA Sequence Number=SeqID_21594
  Homolog annotation: Hit_ID=Q337H4; Match level="QueryCoverage=99%, HitCoverage=36%, E-value=1e-105, Identity=59%"; Hit description =Expressed protein
MAKKRRLSENAQTALSNGGDDPFAFDDTDQEPSNWDPFGPKRKSPQKRAKRSNGELVLDDCDTAVTGSPELCQPEGINQSGATSDSKAADESNLLEDCLLASVKVLMNLANDNPSGCEQIASCGGINTMASLIIKHFPSFDFSMDSNNQMKERVSSGDLSSSQNSKSLQIKTKQLRAYELDFLVAILGLLVNLVEKDNLNRVRLANARVSVNLSQSPDTEEVQRDVIPLLCSIFLASQSTGETAEAISPGKICSLNHIFGGNMEIYSKLILRTWLIHNASMNHRCTLSYRSHLKNNHVKTEIQVEAHCGLASELYVCCHSMKVRGAISSCLPDNNLKVLVPVLEKFVSFHLQLNMMTRETHSAVTEVIERCRQS

SEQ ID NO: 63374 - protein, 199 aa, Zea mays
  Coding DNA Sequence Number=SeqID_21595
  Homolog annotation: Hit_ID=Q337H4; Match level="QueryCoverage=66%, HitCoverage=18%, E-value=2e-32, Identity=59%"; Hit description =Expressed protein
MFKVACFVDNGKRACLSAVALEDTSEMVLKLGGNFKETLRQSGGLDNIFNVMVNCHSELEKLVKDASTTDVEGKERAPLQSAALLLKCLKILENATFLSDNNKPSLFFRNLPLFQEKQTQKILKFAMGLALDLCTIWCYVKDLWSEGNWTATTEIVVAFRGRRRGYSPTPSPFAVWVMPPRRRVERVGEGEIRLVIYSA

SEQ ID NO: 63375 - protein, 443 aa, Zea mays
  Coding DNA Sequence Number=SeqID_21596
  Gene Ontology: Mol. function=DNA binding; Cellular component =mitochondrion; Biological process=DNA integration
  Homolog annotation: Hit_ID=UPI00004C1732; Match level="QueryCoverage =90%, HitCoverage=29%, E-value=1e-171, Identity=72%"; Hit description= UPI00004C1732 related cluster
  Pfam annotation: Domain name=RnaseH; Domain location=25-140; Score= -18.0; E_value=0.0027; Accession=PF00075.14; Description=RNase H
  Pfam annotation: Domain name=rve; Domain location=166-314; Score =70.0; E_value=7.7e-18; Accession=PF00665.16; Description=Integrase core domain
  Pfam module annotation: Pfam domain module=RnaseH::rve; Domain location=25-140::166-314
MGRHPVADGSDPTGALDHVFRRVADEDRSRRGPALHLAPWKAPALRAAPPFPASNNVAEYEALVNGLRIAIELGVRRLDARGDSQLVIDQVMKNSHCRDPKMEAYCDEVRRLEDKFFGLELNHIARRYNETADELAKIASGRTTVPPDVFSRDLHRPSVKIDDAPEPEAPSARPEAPSAQPEKAPGGYTHLLVAIDKFSKWIEVRPLNSIRSEQAVAFFTNIIHRFGVPNSIITDNGTQFTGKKFLDFCEDHHIRVDWAAVAHPMSNGQGSSLRSTTTSNKFGKRWMKELPSVVWSLRTTPSRATGFTPFFLVYGAEAILPTDLEYGSPRTRAYTDQSNQASREDSLDQLEEARDRALLHSARYQQSLRRYHDRGVRSRDLQVGDLVLRPRQDARGRHKLTPPWEGPFVIAKVLKPGTYKLANNQGEIYDNAWNIKQLRRFYP

SEQ ID NO: 63376 - protein, 233 aa, Zea mays
  Coding DNA Sequence Number=SeqID_21597
  Gene Ontology: Mol. function=protein binding; Cellular component =spliceosome; Biological process=mRNA processing
  Homolog annotation: Hit_ID=UPI0000DA43ED; Match level="QueryCoverage =63%, HitCoverage=95%, E-value=7e-12, Identity=30%"; Hit description =PREDICTED: similar to keratinocytes proline-rich protein
MAPPVTWSVRALGLGEVEAPPEVKVESVFRGRGRVRAPGSGRGEDRRAEARAESEPWGRAKRSSSSFGAELESEPWGRAKRSSSSSGAEPESEPWGRAKWSSSSSGAEPESEPWGQAKRSSSSSGAEPESEPWGQAKRSSSSSGAEPESEPWGRAKRSLSSSGAEPESEPWGRAKRTFRWRLRPDLAAVSLTLSSGTTVRAAQATLSSCQAGQWSGEVTTVTSALSTGGRASG

SEQ ID NO: 63377 - protein, 174 aa, Zea mays
  Coding DNA Sequence Number=SeqID_21598
MAPRTLYDDSGSQPLTEARGRQQGHDSPDSYPSARLWRSSDGHDITRTGCQNLSGCHDGMYLGRWLSSASSPQDSHRGGASPRPRWPHRRRNPNTRTGSPTLRGDVASPEGIWLRPGPIPGARGRRQFPVAVLFGELGFTEQLQIPRDARGMIGHGSANETELTIWVHASEKRE

SEQ ID NO: 63378 - protein, 86 aa, Zea mays
  Coding DNA Sequence Number=SeqID_21599
  Gene Ontology: Mol. function=translation release factor activity, codon specific; Cellular component=cytoplasm; Biological process =translational termination
  Homolog annotation: Hit_ID=Q75I90; Match level="QueryCoverage=66%, HitCoverage=13%, E-value=1e-21, Identity=93%"; Hit description =Eukaryotic peptide chain release factor subunit 1-3
  Pfam annotation: Domain name=eRF1_3; Domain location=46-85; Score= -23.3; E_value=0.0033; Accession=PF03465.5; Description=eRF1 domain 3
MTKFYTKLKEKRKALEEEKLQAEAKKWNLFNQAIELSAEILANVKFIQVKKLIGKNFEEISQDTGKYVFGVDDTLKALEMGAVETW

SEQ ID NO: 63379 - protein, 72 aa, Zea mays
  Coding DNA Sequence Number=SeqID_21600
MANTTCGSLPVLVLRRTPLPQRCDIEAEGMNQRGRLNGPSGHNGEVGRKRNSAEAQVKLYGRVDLSHQFRLK

SEQ ID NO: 63380 - protein, 107 aa, Zea mays
  Coding DNA Sequence Number=SeqID_21601
MGVGKGWLDDSQGLAAEVWTYIRTVERSGLEGSDESEYSSGEEDSSDSSEEGGGGDGGDDDDGGDGDDGDDGGDGGSGGGNGGSKGGNGSSRGGNGGSSKGSNRASG

SEQ ID NO: 63381 - protein, 58 aa, Zea mays
  Coding DNA Sequence Number=SeqID_21602
MAHKYEDRYHRAVVLGCNKEIGNDEQTGILRNQISIESVMDNMFCFTYELGIGLLKLI

SEQ ID NO: 63382 - protein, 207 aa, Zea mays
  Coding DNA Sequence Number=SeqID_21603
  Gene Ontology: Mol. function=structural constituent of ribosome; Cellular component=intracellular; Biological process=translation
  Homolog annotation: Hit_ID=Q9LJA1; Match level="QueryCoverage=66%, HitCoverage=42%, E-value=9e-23, Identity=44%"; Hit description =Arabidopsis thaliana genomic DNA, chromosome 3, BAC clone:F16J14
  Pfam annotation: Domain name=Ribosomal_L18p; Domain location=85-202; Score=9.1; E_value=1.1e-06; Accession=PF00861.12; Description =Ribosomal L18pL5e family
MEERSTYATCRKFSTSCTNLLESISQWAGLVSCDMASRLQGLPLFWHGELSWFFNLMVWSSSRSFFGVEDFVDEDNSRPYTYKKEKRSKNPHKHISFKQRTIAHMEPFTLDVFISKRFVSASLTHRSTCRQVAVAGTNSKDIKAALRSRSDVPACLAVGRFLAERAKEADVYTCTYTPRERDKFEGKIRAVVQSLIDNGINVKLYLD

SEQ ID NO: 63383 - protein, 396 aa, Zea mays
  Coding DNA Sequence Number=SeqID_21604
  Homolog annotation: Hit_ID=Q1SSC7; Match level="QueryCoverage=83%, HitCoverage=83%, E-value=1e-39, Identity=36%"; Hit description=TRNA -binding arm; Pleckstrin homology-type
  Pfam annotation: Domain name=DUF828; Domain location=36-265; Score =370.0; E_value=3.8e-108; Accession=PF05703.2; Description=Plant protein of unknown function (DUF828)
  Pfam annotation: Domain name=PH_2; Domain location=276-382; Score =196.8; E_value=5.3e-56; Accession=PF08458.1; Description=Plant pleckstrin homology-like region
  Pfam module annotation: Pfam domain module=DUF828::PH_2; Domain location=36-265::276-382
MQKRWKPRDAAAGAFSMALELVDDEDDAAPPAIPPPQTPLEPMEYLSRSWSVSASEISKILVAGGNKPSSVAAAACRLPEAAMSIPEQAPVLATSSTVHLPSPQQHRDARRYSTSGGHHQSIGRWFQQAHHRETCRAKQSGKEKQRAEKAHVHAMVSVARVAAAVAAVAGSGDTQTQATKMARAMASATELLASHCVEAAQHAGARHDQVAAAVQAAVGVGSPGDLVTLTAAAATALRGAATLKQRVQRETARSNASVLPYERGSSWSPDIWCKEGDLLKRTRKGGLHRIRVSIYINKRSQVILKLKSKHLGGALSKNNKSVVYGVYSELPTWAGKGSVEETCCFGLSTAQGLVELECEGSASKRKWVDDVQSLLREAALHGHGQVGNGMGLVKLS

SEQ ID NO: 63384 - protein, 330 aa, Zea mays
  Coding DNA Sequence Number=SeqID_21605
  Homolog annotation: Hit_ID=Q8LGL9; Match level="QueryCoverage=21%, HitCoverage=100%, E-value=4e-13, Identity=57%"; Hit description =CONSTANS-like protein CO9
  Pfam annotation: Domain name=CCT; Domain location=266-304; Score =73.7; E_value=6e-19; Accession=PF06203.4; Description=CCT motif
MYCLLANDPRYGLWSDDKGGSGSSTSREEQELGRSKQAGRGPGGETEFTNHTGKSGGRRRKRGECACRHGHGIGGARCGGVVAVADLNRGFPALWHQPEEEPSGAGAAPGLHEFQFFGHDEDHDSVTWLFTDPSPHLHRGPAAAEVGNGVAEAEQRRPPPVFDGGYAHAQYGELPGHGLTFDVPLSGRRGGEVASVAPVLEAGLGLGGGGGGDLATSSSATIMSFCGTTFTDAASAVPGDAAAAAPNGSASGAADPAVDREAKVMRYKEKRKRRRYEKQIRYASRKAYAEMRPRVKGRFAKVPDGEAPSPPAPAAACYEPGRLDLGWFRS

SEQ ID NO: 63385 - protein, 855 aa, Zea mays
  Coding DNA Sequence Number=SeqID_21606
  Gene Ontology: Mol. function=mannosyl-oligosaccharide 1,2-alpha -mannosidase activity; Cellular component=membrane; Biological process=transport
  Homolog annotation: Hit_ID=Q69TU8; Match level="QueryCoverage=45%, HitCoverage=85%, E-value=1e-172, Identity=79%"; Hit description=Sac domain-containing inositol phosphatase-like
  Pfam annotation: Domain name=Syja_N; Domain location=88-370; Score =405.9; E_value=6e-119; Accession=PF02383.9; Description=SacI homology domain
MAAEADDPSLAATLEKFRLYETRARFYVIGSSREKRWFRVLKIDRSEPSELNVSEDPVWYSLQEVKSLLQRIDEGNRSTGGLAFVTKAYGIAGCIKFLESYYLILVTKRRQIGCICGHAIYCIDESQMITIPHSSVQTDVATSKNELRALQQSVTSAGMKEMPYENLFVWNTFLTEPVRSRCHNTLWTVALVHGHFKQVKLSIFGREINVVLSSRRSRHFAGTRYLKRGVNDHGKVANDVETEQIVFEEEAGSWKGRMSAVVQMRGSIPLFWSQEASRLSPKPDIFVQRYDPTYEATKLHFDDLARRYGHPIIILNLIKTVEKRPREMMLRREYCRAVEYLNQNVPEEKKLRFIHWDFHKFAKSKSANVLGVLGKVAGEALDLTGFYYSGKPKVQKKRLIQLSRTSTARDGSLDIRASSGDLSRLRDGSLDIRASSGDLSRLSSNAEALSSTGFQDMRNQANKQSFLVILPVTKLECSVQNCIDCLDRTNVAQYAYGLAALGRQLHAMGLTDVLKIHPDSSIASALMEMYQSMGDALAHQYGGSAAHNTVFPERQGKWKATTQSREFLKSIKRYYSNAYTDGEKQDAINLSAPGNNVFVGSGAALNPGTILSPVPACKEDFSRKKLTSFDKLIERTCSSIRNVRLHCDADLKPSGGVGTSGMAPDAAIHLWFSEIQLKSPNWLFGQRKHTETISTARVAPVENVNEGNRDESNVSLCGELIWLSSSVESCEEDIFRRYLAFTTADVENGWYGGTLLYDRDENSGAYRHYSELCQGAVMDPFEHDPEKERHYAEALSVDLGDARVEAEMQAALDDYQVIGSDLSIIPSCGALAEDPSQLTRWIIGDERLLVGAAAQ

SEQ ID NO: 63386 - protein, 136 aa, Zea mays
  Coding DNA Sequence Number=SeqID_21607
MQESLAGPPSQQNPPEGLPTLTTPLLPLPLSGKMTRVLALVVAIQANMGYGSYRIGDASVPIYNPKKVGWRLAGKPDGYGGYKDLGVGRRMRNMEMSGPTPPYVWCSGILGNMGSQQITLFIHFSAIVTFSLAPVN

SEQ ID NO: 63387 - protein, 178 aa, Zea mays
  Coding DNA Sequence Number=SeqID_21608
MAGGTTARGNGGKGSKGKGAKRKCPLTPLSKSFDDSEYPEEYSGFNSESALPRSPTSSMIDSDDSLGLTPVEWSFIRVVEHSGLSCMDESDESEEEDFEVEEGEQEDEDCDADGSIDVSDEGTKGGKGKGSKGEGGGNDEDDNGAGGSNGIGFSGSDSGRGDNSMGGCAGGEAPPAYI

SEQ ID NO: 63388 - protein, 103 aa, Zea mays
  Coding DNA Sequence Number=SeqID_21609
  Gene Ontology: Mol. function=protein disulfide oxidoreductase activity; Cellular component=chloroplast; Biological process=cell redox homeostasis
  Homolog annotation: Hit_ID=Q7G8Y5; Match level="QueryCoverage=99%, HitCoverage=100%, E-value=2e-43, Identity=86%"; Hit description =Putative glutaredoxin
  Pfam annotation: Domain name=Glutaredoxin; Domain location=13-76; Score=67.2; E_value=5.5e-17; Accession=PF00462.14; Description =Glutaredoxin
MEHVARLASQRAVVIFSTSSCCMCHTVTQLFRELGVNTMVVELDKDPRGNEMEKGLARLLGRSAGVPAVFIGGRLVGSTDKVMSLHLSGNLVPLLRNAGALWV

SEQ ID NO: 63389 - protein, 134 aa, Zea mays
  Coding DNA Sequence Number=SeqID_21610
MTMVMDITCQDKGWTLIMVLELIDSYNGQVVETWSFGVQPQPQIGQKGQNKVKYARDLRTKAHGVKKHGNNTEDGAEPKLNYVTFCTLFECSPSFIMIMKVQETPTCGDPCEEIDLDIRKTVALKFDFSSLERG

SEQ ID NO: 63390 - protein, 114 aa, Zea mays
  Coding DNA Sequence Number=SeqID_21611
MAQLLAKIEEGNLKASRPLGTLEVSRLQFGSYRPAPEDPAPVPDLVPDIQAEDEAFRQFKTQGTTTDDAAVDDDDFGIPPPPPMPHRSHDHEAGSSSAAPATPPAIDPALAAIL

SEQ ID NO: 63391 - protein, 182 aa, Zea mays
  Coding DNA Sequence Number=SeqID_21612
MEIPAAPEIMAAMDVAKTTIKDSLKDEPSLLKEFFGGVGAYGALTYELQRLAKRIVSLCCAASKYKCNWSEFSHGSVGTEASKEDSGSKILMRNIMMKTKISMENLIQQQQWKRMKNLFILPMDLVIPNFYKEVELIPYMNALAFVITCKIIGKKLPRPKEAHEGAATAAAMGPPRGLDKDS

SEQ ID NO: 63392 - protein, 52 aa, Zea mays
  Coding DNA Sequence Number=SeqID_21613
MGADTLLWSGGEPGSVERRCRGDGEYVREPPSGLKIDLPFLGLGVVIRVRDM

SEQ ID NO: 63393 - protein, 66 aa, Zea mays
  Coding DNA Sequence Number=SeqID_21614
  Gene Ontology: Mol. function=zinc ion binding
  Homolog annotation: Hit_ID=Q9M4C5; Match level="QueryCoverage=56%, HitCoverage=8%, E-value=3e-08, Identity=79%"; Hit description=VIP2 protein
MGVSAEPKEQAASAAALAVEDEAGGKEDKAAAVSCSICLDAVLAAFGERSTARLHCGHEFHLGQGP

SEQ ID NO: 63394 - protein, 570 aa, Zea mays
  Coding DNA Sequence Number=SeqID_21615
  Gene Ontology: Mol. function=protein serine/threonine kinase activity; Cellular component=integral to membrane; Biological process=protein amino acid phosphorylation
  Homolog annotation: Hit_ID=Q10NK4; Match level="QueryCoverage=99%, HitCoverage=100%, E-value=0.0, Identity=83%"; Hit description =Protein kinase, putative, expressed
  Pfam annotation: Domain name=LRRNT_2; Domain location=28-68; Score =59.0; E_value=1.5e-14; Accession=PF08263.3; Description=Leucine rich repeat N-terminal domain
  Pfam annotation: Domain name=LRR_1; Domain location=121-143; Score =15.6; E_value=0.18; Accession=PF00560.23; Description=Leucine Rich Repeat
  Pfam annotation: Domain name=LRR_1; Domain location=145-167; Score =14.6; E_value=0.35; Accession=PF00560.23; Description=Leucine Rich Repeat
  Pfam annotation: Domain name=LRR_1; Domain location=169-191; Score =4.2; E_value=48; Accession=PF00560.23; Description=Leucine Rich Repeat
  Pfam annotation: Domain name=LRR_1; Domain location=73-95; Score=0.9; E_value=2e+02; Accession=PF00560.23; Description=Leucine Rich Repeat
  Pfam annotation: Domain name=LRR_1; Domain location=97-119; Score =15.9; E_value=0.15; Accession=PF00560.23; Description=Leucine Rich Repeat
  Pfam annotation: Domain name=Pkinase; Domain location=287-554; Score =148.7; E_value=1.5e-41; Accession=PF00069.15; Description=Protein kinase domain
  Pfam annotation: Domain name=Pkinase_Tyr; Domain location=287-554; Score=99.8; E_value=8.3e-27; Accession=PF07714.7; Description =Protein tyrosine kinase
  Pfam module annotation: Pfam domain module=LRRNT_2::LRR_1::LRR_1::LRR_ 1::LRR_1::LRR_1::Pkinase::Pkinase_Tyr; Domain location=28-68::121 -143::145-167::169-191::73-95::97-119::287-554::287-554
MGSFLRKQPSYLFILIILHLVAHEARTLSSDGEALLAFKKAVTNSDGVFLNWREQDADPCNWKGVRCDSHSKRVINLILAYHRLVGPIPPEIGRLNQLQTLSLQGNSLYGSLPPELGNCTKLQQLYLQGNYLSGYIPSEFGELVELVALDLSSNTLSGSVPHSLDKLSKLTSFNVSMNFLTGAIPSSGSPLSFLKKNSRGGTPPRDDMINKRNGKNSTRLVISAVATVGALLLVALMCFWGCFLYKNFGKKDMRGFRVELCGGSSVVMFHGDLPYSSKDILKKLETMDEENIIGAGGFGTVYKLAMDDGNVFALKRIVKTNEGLDRFFDRELEILGSVKHRYLVNLRGYCNSPSSKLLIYDYLQGGSLDEVLHEKSEQLDWDARINIILGAAKGLSYLHHDCSPRIIHRDIKSSNILLDGSFEARVSDFGLAKLLEDEESHITTIVAGTFGYLAPEYMQFGRATEKTDVYSFGVLVLEILSGKRPTDASFIEKGLNIVGWLNFLAGENREREIVDLNCEGVHTETLDALLSLAKQCVSSLPEERPTMHRVVQMLESDVVTPCPSDFYDSE

SEQ ID NO: 63395 - protein, 186 aa, Zea mays
  Coding DNA Sequence Number=SeqID_21616
  Gene Ontology: Mol. function=protein serine/threonine kinase activity; Cellular component=nucleus; Biological process=response to high light intensity
  Homolog annotation: Hit_ID=Q84Q77; Match level="QueryCoverage=87%, HitCoverage=100%, E-value=4e-48, Identity=63%"; Hit description=17.4 kDa class I heat shock protein 3
  Pfam annotation: Domain name=HSP20; Domain location=59-162; Score =164.2; E_value=3.4e-46; Accession=PF00011.11; Description=Hsp20alpha crystallin family
  Subcellular localization annotation: CTP_CleavageSite=51; ConfidenceScore=5.46e-01
MSLIRRGSAFDPFSLDLWDPFQGLFPFGSGSSSSSSLFPSFGGTTTSSETAAFAGARVDWKETPEAHVFKTDVPGLKKEEVKVELEDGNVLQISGERCKEQEEKTDTWHRVERSSGKFLRRFRLTENARTEQISASMENGVLTVTVPKEEAKKADVKSIQISGYVCCGYCVPNDIEVSSVVYQCRL

SEQ ID NO: 63396 - protein, 455 aa, Zea mays
  Coding DNA Sequence Number=SeqID_21617
  Gene Ontology: Mol. function=carbohydrate binding
  Homolog annotation: Hit_ID=Q10NJ9; Match level="QueryCoverage=99%, HitCoverage=99%, E-value=1e-156, Identity=67%"; Hit description =Lipase, putative, expressed
  Pfam annotation: Domain name=DUF620; Domain location=139-406; Score =562.4; E_value=4.4e-166; Accession=PF04788.3; Description=Protein of unknown function (DUF620)
MRKVCPNLERDDALDTVLEVPIPEEMFSGGGGGGGGSCGFRFGCTSVKAWMRSHAADRCGAGEPCSMSRGELQLMLGVIGAPLVPLPVAVCCRAEQSPCSVLCEQLKTGPIESSSAKYIVQQYVAASGGERALDRVKSMYAMGKVRMTAAEQLNGSDAAGGHCGGATGKGNRGGRRKGRGGEVGGFVLWQKRPELWCLELVVSGCKISAGSDGKVAWRQTPWHQSHASRGPPRPLRRSLQGLDPQLTASLFADSVCIGERSVDGEDCFVLKVEAEASSLRARNSGSVEIVRHTLWGYFSQRTGLLVQLEDSHLLQIRSGGGGGGGSIFWETTVESRLGDYRAVDGVNIAHAGRTAVSLVRFGDCQQDGSSARTRMEETWDIEEVDFNIWGLSMDCFLPPSDLREGGKESQDVAVAVAKADARPPPIRIPAVAVRVGPSQVAAVSMDDSDSLIARP

SEQ ID NO: 63397 - protein, 925 aa, Zea mays
  Coding DNA Sequence Number=SeqID_21618
  Homolog annotation: Hit_ID=Q10NJ8; Match level="QueryCoverage=87%, HitCoverage=93%, E-value=0.0, Identity=56%"; Hit description =Expressed protein
MAHIAWAEVLNYGRLRGPLAVAYSFLYFGSDSSFWEVRFPQCLFESQHTELNQVIIVFWSYTKIYLKLLLHMFTHHKYSNKGQMNSERNVKIISGRDGQKKGNSQYGQIVHMPKDMVTTVNGNVDAKFEDEVRVVKNDRFQRQRESWGGECKKGSKPWPGRKAATVDELVKHMSNVPSYLQRKETSDHLQDKALNVGVLEWGLLANWSQQEKHKLTRSYGPSPPNTSRSVLFPSPSHSSPSPSSRSLESNQSTPMSGHHHSSIRAQQNRLTDKHHERARCPPSPNSAVLSLLSGHGTHPCPENGHNYVGLGLSNVSLASDSLGSSSRSCGRHEMVGDEETRRKTEDVVHHCSRRLFADSDNIGKHFFASNTNDSMCNDPEQSIGLNGENFESLTSDAVMDTARNDSKSSDYLLEDIEPSLEFPRIPYSCPLPIIDSAAKEIGITSTEAGDAKVSKNSNRNQSAMNVTENPPQYSAKFSDKMPYCHLGSGMNRGSCSSSLKESPHIRQPNIVPPVDKTGDRSSPNSKGRRSPLRRMLDPILKPRHSSPVRPSFVPKCQLPVNTTKQSLDLGKSVPHNVQRSARYIQKGNDSATTRQALLQLAWKNGLPLFILSYGDSDILAATVRRKGIPEKDGLESTYAVFTVEEPKKKSGAWIKTGGKNKKHHLLSSIVGEIKVARRKSRCHHTTDVHVHREFVLVGSKFLPSSEESGDSNVSGELAAFISTLPQQEAETSKQSSSQNTRQRNSMPIGCGCPPLGNFHPSTRSANSASANVVAVLPDGFHGTITSGQPLPLIERWRSGGACDCGGWDEGCMLSVLTDASEENDAIQANQAKDGSQRFELLDQGRSREERHAFSMTSFKRGALYSGIQIIHCITSGFCNVYSDAPWKLRSAGGIDIPWSNGPYVIRMSKVTISAQVFRDSSLYML

SEQ ID NO: 63398 - protein, 125 aa, Zea mays
  Coding DNA Sequence Number=SeqID_21619
MGMPPGHRAIAAAADLTTLAHATLAHVKLLRPATKEPPPGSGPSPAAQLPACSSAPGAPRFSFPVPTTSRSNPSSVNEIAQFRAPRDPDADNETAQFRAFLQYPAHARTHTHPNHKDCTVAVQEW

SEQ ID NO: 63399 - protein, 113 aa, Zea mays
  Coding DNA Sequence Number=SeqID_21620
MTRLRSSVGGTDSHDSPNANPLGGIHSYSSPEANPGGIQSYNSPEAKARQNRQSARGNPRVGETVTTRLRPSLGRTGQPRLARGHPLARQAVTTRQKPTLDRRHSHDSPETKP

SEQ ID NO: 63400 - protein, 429 aa, Zea mays
  Coding DNA Sequence Number=SeqID_21621
  Homolog annotation: Hit_ID=Q5JME8; Match level="QueryCoverage=32%, HitCoverage=64%, E-value=5e-18, Identity=51%"; Hit description =Putative drought-induced protein DI
MEAGILADGILESVWDLVLLWFCLFIVRVHLTLSWWLGMNIVSYLEKMRVLQSEIIPGVKAMFLLKVVADEGHLHLDVAKGAREEKHEWANKRSARRRAQSKQKLNHMYLQREEGWHVVEVVVGACLCLQGGSRSCSKPLPPLIAYRWPGDSGERMGWRRSGRERAGIAAREESGARTAGSARRGDLRHDMGGDRADGWGSTTRRAEVGSTVSLPSTERERGHRAPPSPGLDVVPPPGMGLGVGARHLHPPPSIRGKRSCASRRGCGRRGVAAALARWMAAALARWMAAAVFWRSAGVRGDGKVRATSIRHLPSAGRGVAPAVGVAGAGVWRRLWRGGWRQLWRGGWRPRMERNRGVLARGWKRNAGAEGGEIAAVRRCGRRGHAADLARRMAAADGKNSGVLVRGEKRIAAGRTGIYREPNLKDVAAG

SEQ ID NO: 63401 - protein, 1056 aa, Zea mays
  Coding DNA Sequence Number=SeqID_21622
  Homolog annotation: Hit_ID=Q1T393; Match level="QueryCoverage=61%, HitCoverage=92%, E-value=8e-65, Identity=27%"; Hit description=IMP dehydrogenase/GMP reductase
MYVHAVGRRGSVALRWDGGGELCGAQGRQPQLHGVREHDVSFELVVQPQPHPHLRHLRLGYTVPPTASVSAGPAFTSASSTVSALVSFSEPCPGRGGFVCNATYCNLIVYGSGSVDPSTLQVLSPGLRYSVAVAISPDAEYGRLVLVMGRGFCTDAAGHPFTRTPNSTFTLRFDRRSDSMNITATVAEKMVQIQGVTRLVQASNEEEGLRIYLAFAQPVLNSSEQILRALTATDAVAVHLTPTNRSTLGNRRFGYVKMSDAAAIVSVACDTSSIISRQGTPVVPAEPFTFLYDTQRPWVKLGTSTRRTSSRDILVLIKFAKPVFNFSSSAVQVAENAAMDVAGNPNLASDRLQVRHYSVPASSSWIAAITTVVFLTTAAVAALLTVSTSSLVAAGAVSRPSSYMISEPSRNVLRMACHIQIFALSRWLSANLPIEYYEFAKGVEWSIPYMRLPWEGPAADPYLGYSTMPAIAYSESELLDRSAVGGAANISSYRPRAQQGQPVTPAQIIPSDPVFPTEIPEDGKPTPPVQTPGGDATPPVMPVQTPLPLDGMPLTAMEYRSFFENPDMKPEAQIIMKLQDLDGWKYFGRNMFWLGVIGGGLILLHLLTLLYFKLRYRDRERRRHGYAALLLPRLEIMVVVLAMPCVAQAAAALIRGGTTCGLVVGIVLTAVLTSVLVALLLFLSLGITMGKLLQYREVHHEEGQEEYHWLGPLFEDLRGPPKYTRGGGGGKRRAEGGGPERRVIASEDENEGSRAPLVQQLLGVLRIYLTLLESVKRVAVGIVAGAHASSGRSSRAHAVALVETLSVASEVAVFAACLALIDRTASSGGWLPDGEARGVGLAMLGAFVLGFAAQVCNEWNALYRQARLLSADRSSFLDGAKTAGLGLLVLVLPSSALGDHRDPPPPDGGGGAGESVSASTAADGGRGGSSNNERWWLGQLWEMAKASFSKESNASSRASALRRRLDAALSSAPPPCCERVSFALPLHSCAERLQISNRASATTPTSAGVATDTPTPSSSAAAAGTPTPIDGGTDNVVVAGEDGNVTVGSKRKLKSD

SEQ ID NO: 63402 - protein, 272 aa, Zea mays
  Coding DNA Sequence Number=SeqID_21623
  Gene Ontology: Mol. function=zinc ion binding
MNVCEITLAVLTSPQVTMYKQQPEEDHIVCSRPDITSSGPIKVQDIQGLPKQPNQASNLQVVAGVPDLLIGQPKPQTIKTEPSSQENKAAHCVDLVSDDHESNKQGLGDAAVLSIVQKDSSNLKYGSVSHEHLKSEAQNPRHTVAENPNSTLGSAKVCTSFSGSVSTPPELSHSLASKEPSSGNSDCSKKEELLSPTVSKHDPVKFSEDSSQEVTRYSEKVQLKDSQPSAPKSSQASRIHLSTVKHRLPVSKEQSQKIALTGGTSADHSMEK

SEQ ID NO: 63403 - protein, 239 aa, Zea mays
  Coding DNA Sequence Number=SeqID_21624
  Gene Ontology: Mol. function=zinc ion binding
  Homolog annotation: Hit_ID=Q9MAQ7; Match level="QueryCoverage=81%, HitCoverage=21%, E-value=4e-17, Identity=29%"; Hit description =Location of EST 206I21T7, gb|N37185
MSSSPRVPRVPRCHQAAGAQMLHSTGSSVFSKRYSSHGGRDHAAVIKKRNREDSLKDSEDTKRTEKRHRVSSTEHAPVKNSCRSAENIASEQKIRGICPTGANAGLSKDDLMDTIVSHNLPGLIDEIVSKDRNITYVELCDAIHQHFRDSRKSNGGDSLYRSYADAIKGCLRKRREWAHLFDQASKSFFSRKAQETTPHYIKEVKGLKKTRYNKTDFLTEVLKPENQKNPSENSTQLLA

SEQ ID NO: 63404 - protein, 169 aa, Zea mays
  Coding DNA Sequence Number=SeqID_21625
  Gene Ontology: Mol. function=RNA-directed DNA polymerase activity; Cellular component=membrane; Biological process=RNA-dependent DNA replication
  Homolog annotation: Hit_ID=Q2QSK7; Match level="QueryCoverage=94%, HitCoverage=16%, E-value=3e-35, Identity=44%"; Hit description =Retrotransposon protein, putative, LINE subclass
YTQKNSKRTVQEALLNRRWISDIKGALFVGVLVDYLQLWNLLSEIVLQPTIEDKHVFSIASDGNYLAKVAYEGLFMGSVYFSHYPKVWKTWALPKCRFFLWLAAHNRCWTVDRLAKRGLDHPPKCPLCDQEDETLDHLLASCVYSRDFWQLLRTFDLQVLAPSFMSWWE

SEQ ID NO: 63405 - protein, 79 aa, Zea mays
  Coding DNA Sequence Number=SeqID_21626
MEGHDLRAERESRLVGGDENGGFGIDYGNGKWYSFRLERVVHIATTAQEKMKPWKETSKSSKIMTSSRRGLAATPVGYL

SEQ ID NO: 63406 - protein, 142 aa, Zea mays
  Coding DNA Sequence Number=SeqID_21627
  Gene Ontology: Mol. function=hydrolase activity, hydrolyzing O -glycosyl compounds; Biological process=carbohydrate metabolic process
  Homolog annotation: Hit_ID=Q9FXT4; Match level="QueryCoverage=50%, HitCoverage=17%, E-value=2e-31, Identity=88%"; Hit description=Alpha- galactosidase precursor
MQQFVKASDFRSKAESGVVVCSSVGLGWAAQQQQEGRGSLEPAGIPGNHHRAVVEHRARFFHCCHCSRSMGALVVLGSRPAISFGATSRLQDVCLDAELAQKTRADCSMARGMQPFGQDSGKKSMQARISREGNSISFGYTG

SEQ ID NO: 63407 - protein, 340 aa, Zea mays
  Coding DNA Sequence Number=SeqID_21628
  Gene Ontology: Mol. function=helicase activity
  Homolog annotation: Hit_ID=Q5NA16; Match level="QueryCoverage=69%, HitCoverage=50%, E-value=2e-31, Identity=35%"; Hit description =Helicase-like protein
  Pfam annotation: Domain name=Rep_fac-A_C; Domain location=114-241; Score=-50.8; E_value=0.0035; Accession=PF08646.1; Description =Replication factor-A C terminal domai
MIELSLSGKRALEFDGDQVLDVGQQHHVIAIFVGTLVKLYKGEYTFLSGTSACRWYINENDIAEIKAFQKSLPSEPVPIKKTYLQNDDATHKFEEKSLEQLKHVDPFLDMGQRYQCTATIIGITENQTWCYKACKICNSAIIQKENGYKCTKEGCPSTQFEWKYKIPFIASDHTYNLEFMFFEKKGMELIGKSASTLRKQYEPKEIPPDITSWIGYKFTFVVRVLSKKSVKTIDPSFEVLMIKEKYQKEPIISFISSSGVVPAESSSSTMAEYKELPLLVPITSKDIEKKERSTSQPEHTEETQDMDIEPSGKQLMTKMTFHNSRKSGVPTLKEKAKNDA

SEQ ID NO: 63408 - protein, 412 aa, Zea mays
  Coding DNA Sequence Number=SeqID_21629
  Gene Ontology: Cellular component=membrane; Biological process =transport
  Homolog annotation: Hit_ID=UPI000038CD8D; Match level="QueryCoverage =66%, HitCoverage=86%, E-value=3e-39, Identity=35%"; Hit description =COG0697: Permeases of the drug/metabolite transporter (DMT) superfamily
  Pfam annotation: Domain name=DUF6; Domain location=130-279; Score =54.9; E_value=2.7e-13; Accession=PF00892.11; Description=Integral membrane protein DUF6
  Pfam annotation: Domain name=DUF6; Domain location=280-384; Score =34.8; E_value=3e-07; Accession=PF00892.11; Description=Integral membrane protein DUF6
  Pfam module annotation: Pfam domain module=DUF6::DUF6; Domain location=130-279::280-384
  Subcellular localization annotation: CTP_CleavageSite=46; ConfidenceScore=5.40e-01
MAAAARPASAHLLLLAPLPSPPRLSHLIHTRRLYALAPARRPAAARARRESSPPSAPSPPAPADSLDCVGTGSDVECFVDAGAEDAAPLLPALSAGASKDDGKSEGDAAVSASPTGRELLEWASLVSPFFFWGTAMVAMKGVIPRTGPFFVAAIRLLPAGALLVAFAAARGRKQPSGWEAWLAIAAFGLIDAACFQGFLAEGLQKTSAGLGSARQVFALPSWPGELVALTELDSPFQVIIDSQPLTVAILASLLFGESIGAIGVGGLVLGVVGLLLLEHMIIGGLPLLVISVLNHDPALSGHIQDLTWSDILALGYTSIFGSAVSYGVYFYNATRGSLTTLSSLTFLTPMFASVFGYLYLGETFSTVQIGGALLTLVAIYMVNYKSIIGRLENFLKSGITQYSSDTSEWHDY

SEQ ID NO: 63409 - protein, 124 aa, Zea mays
  Coding DNA Sequence Number=SeqID_21630
MAKPTIGALEPLAHRTLSGAHRTVRCPLLTVDSATCLARIARPTVGPADRWLTGQSEALMRQCHGTVIGLTEGNLLVSRLPVAAGQSIGRFANDSCFADHPIKAYAVIVLRTRVNLKITPGFDT

SEQ ID NO: 63410 - protein, 37 aa, Zea mays
  Coding DNA Sequence Number=SeqID_21631
MGRAARVNVSCIKGVSYGSLVVCRDCSSHAVFGLFGY

SEQ ID NO: 63411 - protein, 105 aa, Zea mays
  Coding DNA Sequence Number=SeqID_21632
MNNSGDSEFVLVAVEEDGWGSGADADGCCRGAEADDWGGGDEANDWGGGDEANGWGGGDEANDWGNDEEDIWSGGVDVDGRGGEPDRDVAAPVGGGDRKAAKLGS

SEQ ID NO: 63412 - protein, 113 aa, Zea mays
  Coding DNA Sequence Number=SeqID_21633
  Subcellular localization annotation: CTP_CleavageSite=60; ConfidenceScore=5.54e-01
MLPSLAAFRSPPPTGAATSLSGSGTTVATIALLVTTTPAIHVDAAGPDVLLVVAPVVRLVATAPAVRLVATAPVVRLVATAPVVCLGSSATTIRIGATAPAVFLDGLFLTALS

SEQ ID NO: 63413 - protein, 187 aa, Zea mays
  Coding DNA Sequence Number=SeqID_21634
  Homolog annotation: Hit_ID=Q43619; Match level="QueryCoverage=46%, HitCoverage=26%, E-value=2e-22, Identity=46%"; Hit description=PsPK3 protein
  Pfam annotation: Domain name=potato_inhibit; Domain location=8-71; Score=90.0; E_value=7.3e-24; Accession=PF00280.8; Description=Potato inhibitor I family
MSHSHSTKTSWPEVEGMPAEVAKRKIQEDRPDIQVILVPVDSAVTDDFNTKRVRVFFDKAGNVAQDAGAIEGSSLGNGGGEEEQEIDGKERFEFMVEPMAASSKDCVGTYEYLASELVSGSGYDNGVDRWAFDVFLYELVYGRTPFKSHTKVATLKNILSNATEIKRHPFFAGVDWTLIHYNTCDLL

SEQ ID NO: 63414 - protein, 91 aa, Zea mays
  Coding DNA Sequence Number=SeqID_21635
  Gene Ontology: Mol. function=acyltransferase activity; Biological process=metabolic process
  Homolog annotation: Hit_ID=Q1S6K6; Match level="QueryCoverage=76%, HitCoverage=16%, E-value=3e-22, Identity=71%"; Hit description =Phospholipid/glycerol acyltransferase
MDSEGDGVRALRLRRRRQPDGLTYEGVVRLPVYYPSEQEKDDPKLYANNVRKLMAVEGNLILSDLGLAEKRVYHAALNGNSLARALHQKDD

SEQ ID NO: 63415 - protein, 77 aa, Zea mays
  Coding DNA Sequence Number=SeqID_21636
  Subcellular localization annotation: CTP_CleavageSite=46; ConfidenceScore=5.28e-01
MTSPNLISLSPLSPLFLGGAGGAVLLSGGGIGGNAPTPGPTRGRPRAEGAPGSSGQRWAAGLPATGSSRALAPEAAR

SEQ ID NO: 63416 - protein, 60 aa, Zea mays
  Coding DNA Sequence Number=SeqID_21637
MPGKGFLKSKKVPLGEKNKEKGEEFVYLGSKSSKSYKWSDDKNKKIKKVGVPQVEWVGDC

SEQ ID NO: 63417 - protein, 233 aa, Zea mays
  Coding DNA Sequence Number=SeqID_21638
  Gene Ontology: Mol. function=transporter activity; Cellular component= mitochondrial inner membrane; Biological process=transport
  Homolog annotation: Hit_ID=Q5W6Y0; Match level="QueryCoverage=99%, HitCoverage=100%, E-value=1e-74, Identity=54%"; Hit description =Putative mitochondrial carrier protein
  Pfam annotation: Domain name=Mito_carr; Domain location=128-220; Score=118.4; E_value=2e-32; Accession=PF00153.17; Description =Mitochondrial carrier protein
  Pfam annotation: Domain name=Mito_carr; Domain location=33-125; Score= 119.1; E_value=1.3e-32; Accession=PF00153.17; Description =Mitochondrial carrier protein
  Pfam module annotation: Pfam domain module=Mito_carr::Mito_carr; Domain location=128-220::33-125
  Subcellular localization annotation: CTP_CleavageSite=47; ConfidenceScore=5.57e-01
MPGDVATSPAPAPPSVSSSSQNHHHHGPTTARGLLCHAVAGASAGVVAATFVCPLDVIKTRFQTQGIRAGPMPYKGTLAALRRIAHEEGIRGLYSGLVPALAGISHVAIQFPAYEKIKAYLAEREALSFGDVAVASSLAKVAASTLTYPHEVVRSRLQDQRAHSDARYKGVVDCIRKVYHKEGVAGFYSGCATNLLRTTPAAVITFTSFEMIHRFLLDLFPAESEPHIQPLKH

SEQ ID NO: 63418 - protein, 220 aa, Zea mays
  Coding DNA Sequence Number=SeqID_21639
MSIIRQTAPNSGHPIRPVDARLQNEPVDASEEQDASRDSPEHSSSSSCRRIPAGALSEGCNVSTAAGFFSPVAPAATATSLPGLGEGFQPRVADTERVLPPVDRGSEGRLRWREGRPAGAAPAGCARFFLALLQGRRSAGDRRGRMMAAMGGAVRVLCGAEKERVVGTRKAPGACPRCGGAVVAVDVESERRFLGLPLCLQSKRKYSCTRCLRRLVTLYS

SEQ ID NO: 63419 - protein, 514 aa, Zea mays
  Coding DNA Sequence Number=SeqID_21640
  Gene Ontology: Mol. function=ubiquitin thiolesterase activity; Cellular component=intracellular; Biological process=ubiquitin -dependent protein catabolic process
  Homolog annotation: Hit_ID=Q1RWR6; Match level="QueryCoverage=93%, HitCoverage=100%, E-value=1e-115, Identity=47%"; Hit description =Pentaxin
MWFVGFRCVGGALGRQLVLPCNTAALELMQGSMGSRFASHQLSNGLYVSGRPEQPKEKAPTICSTAMPYTGGDIKKSGELGKMFDLHVEKSRKSGPLGNAPSRNTSFGGAASNSGPVSNAGGRSNYSGSLSSSVPGAGGSARAKSNSGPLNKHGEPTKRSSGPQSGGVTPMARQNSGPLPPVLPTTGLITSGPISSGPLNSSGVPRKVSGPLDSAASMKMRATSFAHNQAVTNLNTEDGYSIQGSFPKPILWAVILLFVMGFIAGGFILGAVHNAILLIVVVVIFGFVAALLIWNACWGSRGAVGFVNRYPDADLRTAKDGQYVKVTGVVTCGNFPLESSFQRVPRCVYTSTSLYEYRGWDSKAANTEHRRFTWGLRSMERHAVDFYISDFQSGLRALVKTGYGARVTPYVDESVIIDINPDNKDMSPDFLRWLRERNLSSDDRTMRLKEGYIKEGSTVSVMGVVQRNDNVLMIVPPSEPISTGCQWAKCVLPTNLDGLVLRCEDTSNIDVIPV

SEQ ID NO: 63420 - protein, 75 aa, Zea mays
  Coding DNA Sequence Number=SeqID_21641
  Subcellular localization annotation: CTP_CleavageSite=34; ConfidenceScore=5.14e-01
MSCPSVKEVAPAVVMAPPAVPVAPAKASSPPRVAEAAVSEMRGTGQELSVDGYLVGDITTFDAQAGLPPTGAETG

SEQ ID NO: 63421 - protein, 564 aa, Zea mays
  Coding DNA Sequence Number=SeqID_21642
  Gene Ontology: Mol. function=transferase activity, transferring hexosyl groups; Cellular component=mitochondrion; Biological process= metabolic process
  Homolog annotation: Hit_ID=Q6K8I3; Match level="QueryCoverage=84%, HitCoverage=98%, E-value=1e-180, Identity=53%"; Hit description =Fertility restorer homologue A-like
  Pfam annotation: Domain name=PPR; Domain location=183-216; Score =25.0; E_value=0.00026; Accession=PF01535.11; Description=PPR repeat
  Pfam annotation: Domain name=PPR; Domain location=221-255; Score =47.0; E_value=6.1e-11; Accession=PF01535.11; Description=PPR repeat
  Pfam annotation: Domain name=PPR; Domain location=257-291; Score =42.4; E_value=1.5e-09; Accession=PF01535.11; Description=PPR repeat
  Pfam annotation: Domain name=PPR; Domain location=292-326; Score =41.0; E_value=4.2e-09; Accession=PF01535.11; Description=PPR repeat
  Pfam annotation: Domain name=PPR; Domain location=327-361; Score =47.1; E_value=6e-11; Accession=PF01535.11; Description=PPR repeat
  Pfam annotation: Domain name=PPR; Domain location=362-396; Score =35.9; E_value=1.4e-07; Accession=PF01535.11; Description=PPR repeat
  Pfam annotation: Domain name=PPR; Domain location=397-431; Score =28.0; E_value=3.2e-05; Accession=PF01535.11; Description=PPR repeat
  Pfam annotation: Domain name=PPR; Domain location=432-466; Score=4.8; E_value=2; Accession=PF01535.11; Description=PPR repeat
  Pfam annotation: Domain name=PPR; Domain location=75-109; Score=0.9; E_value=5.8; Accession=PF01535.11; Description=PPR repeat
  Pfam module annotation: Pfam domain module=PPR::PPR::PPR::PPR::PPR::PP R::PPR::PPR::PPR; Domain location=183-216::221-255::257-291::292 -326::327-361::362-396::397-431::432-466::75-109
  Subcellular localization annotation: CTP_CleavageSite=53; ConfidenceScore=5.28e-01
MKLPAALPWISPLQYRRPGRGASPSPPPPPPPTRRPRYLHHPELARLIESSPSAQRALDLFNAASSQHAFSHTPATFSALLVRLARARLPRAAAAVLRRTASEPCRFQEPQFLPLVRLLPPDHALVLLRFLPALLRTSRVSHKALAVCLDRLVSSRGCHGVLNELLADLRDPRNKYLPRPNTCVYNILVKHYVKNGELETAFKVLDEMREYTCADVKPNLVTYSTLIGGLCRGGKMKEAFELFEEMIEKDRIVPDQLLYNVIIDGFCRQGQVDKARAIFGFMRKNECEPNTFNYATLINGHCKKADIEAARSVFEEMRNSGVEPDAVSYTALIGCLCRHGSVDEGIGLVLEMKEKGCRADVVTYNLVIEGLCKDGRTVEAMGLLESVPLEGVKLNVASYRILMNCLCSRGEMDRAVGLLGLMLGRGFLPHYAASNNLLIGLCDAGRIADATMALYGLADAGFMPEPRCWERLVESVEVLRKGTGDRGSVSFCPHLHYRAELMFSNNEEKAAGPYWYWRQQPTGPDTNFSSRTSCYIQKVSNHEGTMAALFTILVIGDVVQDESA

SEQ ID NO: 63422 - protein, 501 aa, Zea mays
  Coding DNA Sequence Number=SeqID_21643
  Gene Ontology: Mol. function=binding; Cellular component=cytoplasm; Biological process=protein folding
  Homolog annotation: Hit_ID=Q69TG8; Match level="QueryCoverage=82%, HitCoverage=98%, E-value=0.0, Identity=79%"; Hit description =Putative cyclophilin-40
  Pfam annotation: Domain name=Pro_isomerase; Domain location=20-188; Score=367.5; E_value=2.1e-107; Accession=PF00160.11; Description =Cyclophilin type peptidyl-prolyl cis-tr
  Pfam annotation: Domain name=TPR_1; Domain location=313-346; Score =40.0; E_value=8e-09; Accession=PF00515.18; Description =Tetratricopeptide repeat
  Pfam annotation: Domain name=TPR_2; Domain location=227-260; Score =13.7; E_value=0.65; Accession=PF07719.7; Description=Tetratricopeptid e repeat
  Pfam annotation: Domain name=TPR_2; Domain location=313-346; Score =38.2; E_value=2.9e-08; Accession=PF07719.7; Description =Tetratricopeptide repeat
  Pfam module annotation: Pfam domain module=Pro_isomerase::TPR_1::TPR _2::TPR_2; Domain location=20-188::313-346::227-260::313-346
MEGRGAEQAPEAAAEVKNPRCFMDVTIGGEMEGRIVVELYASVVPRTAENFRALCTGEKGIGAASGKPLHFKGSCFHRVIKGFMIQGGDTTAGDGTGGESIYGSKFEDENFVLKHERKGMLSMANSGPNTNGSQFFITTTRTPHLDGKHVVFGRVMKGMGVVRSIEHVSVGEADCPTLEVKIVDCGELPEGADDGVVNFFKDGDTYPDWPNDLEEKPAEVSWWMDAVESAKAYGNDNFKKQDYKAALRKYRKALRYLDLCWEKEEIDEDKSTALRKTKSIILTNSSACKLKLGDSSGALLDADFALREREGNAKAFFRQGQAHIALNDIDAAVESFKQALELEPNDGLFSLVPLKFIDLTDDLMGFSLTPLAGIKRELAAAKKKLPQIADRRDQERKAFARIFQSSGKSDKSNETLRPCVPHFISQLYIFKQFLQQLFSPAAYLNELKAAVFRPESYTVFLSCPHSGSVDCHLSGCWAGSSAVAVRCKSVEIKIKVLIKIL

SEQ ID NO: 63423 - protein, 310 aa, Zea mays
  Coding DNA Sequence Number=SeqID_21644
  Gene Ontology: Mol. function=ribonuclease H activity
  Homolog annotation: Hit_ID=Q69QB4; Match level="QueryCoverage=77%, HitCoverage=53%, E-value=3e-98, Identity=76%"; Hit description =Putative ABA-responsive protein
  Pfam annotation: Domain name=GRAM; Domain location=184-267; Score =40.2; E_value=7.1e-09; Accession=PF02893.10; Description=GRAM domain
MDPAVDASASTAQADSNVSAAVPAPDPSPPLPAPEAETVDPPPPPPAPAPKTVTWSEKLTSESPTHVHAAAAAESSQYVSRGPASSSSKGAVEAMRETLSRWGKSWGETTKMVESLSRDTWQHWKKANIGQILQQSNFKSLKTDYSCRSWAKVLSVKTGPSFTEAAMGRLAQGTKVLAEGGYEKIFKQTFEVLPDEQLKICFACYLSTSAGPVMGVLYISTAKIAFCSDNPLSYKAGNKTEWSYYKARVVIPLHQLRAANPSVSKLSPAEKYIQVVSIEGHEFWFMGFLMYDKAATSLQEALASARELQP

SEQ ID NO: 63424 - protein, 76 aa, Zea mays
  Coding DNA Sequence Number=SeqID_21645
  Subcellular localization annotation: CTP_CleavageSite=47; ConfidenceScore=5.39e-01
MKMNSNPILFTLNCNRSCVTLVFSSFGKLKHLRTRTNIRHLPVRKISSGMPQGVLNLSYKLGEVTQTMGTNDYAPT

SEQ ID NO: 63425 - protein, 68 aa, Zea mays
  Coding DNA Sequence Number=SeqID_21646
MTYLAAGPSTVTPYTIPPSQYGGFAPAFEVSECHNLSGIVLLLVQLELRTHNLVGYSSKGCIWTFQIH

SEQ ID NO: 63426 - protein, 74 aa, Zea mays
  Coding DNA Sequence Number=SeqID_21647
MGGGARASCALNREQGERGVAQKRPVRGRRKGGTYTREARPRPWERRSRAVEGRWLPAGRGARDAPRRRTGSVD

SEQ ID NO: 63427 - protein, 313 aa, Zea mays
  Coding DNA Sequence Number=SeqID_21648
  Homolog annotation: Hit_ID=Q9FKA2; Match level="QueryCoverage=42%, HitCoverage=86%, E-value=9e-27, Identity=50%"; Hit description =Arabidopsis thaliana genomic DNA, chromosome 5, P1 clone:MIJ24
MTKLFMVIVSSSGVDANVGHLFLTPLGYQKQGFRDKWAFAHNVYEHHQAQGFFNTEYQSNIVDPLLRVLRLLDEERRRLLVTRPINKFGAGPTLSIQARNLAPPPNLQRAKRRLRRVRGNDEGVGASGERKSMLKFLSKVVVEYCPLDPRKAAAVELLAQCNGRKAKDSNPACSVELRRLPSPAPSTDLKSQPTLPPPRVLVTYFTGAEEAIVFAEGATAQGIRDQIVARGRLIDTEKMFRDGGEKWPVVIPEEELGMSFPGIKDSRALEGGLWWRHGVEAGATHWRVEARVEASAAATRWSRGPPEQRAAME

SEQ ID NO: 63428 - protein, 78 aa, Zea mays
  Coding DNA Sequence Number=SeqID_21649
MQKGDSVAVSARQQSEAAVELLGQFLAPQRVYTAHRGEILGKVVGHNHPAEDPAALAEFVEEERSTTGARGPRGGDTH

SEQ ID NO: 63429 - protein, 89 aa, Zea mays
  Coding DNA Sequence Number=SeqID_21650
MAGTDLVGDERGARRDQGYSWRRIRNPRAFLQSLCFRKTKGFVFTKDVVAKVGGMFSKIKLDGGSITAVMGSTSEKMYLCQVPSFGLND

SEQ ID NO: 63430 - protein, 179 aa, Zea mays
  Coding DNA Sequence Number=SeqID_21651
  Homolog annotation: Hit_ID=Q1T0Z1; Match level="QueryCoverage=44%, HitCoverage=14%, E-value=8e-10, Identity=48%"; Hit description=Sugar transporter superfamily; Major facilitator superfamily MFS_1
  Subcellular localization annotation: CTP_CleavageSite=51; ConfidenceScore=5.13e-01
MVAVGFFKTSFIALAIVLIDRVGRKPLLYVSMVGRTGCLAALSAALFLQARGSVSRGAGVGVAILTVCNDVAFFSVGIGPVPAARFHAVKTTTAAKDGKKHFSSFLWHRPRTGAGHHAEALRLAFHHLLLPSLPSLSDAEFSPMEELSDDAAPIDEASDSASSSLPVVAASPPRSSSFL

SEQ ID NO: 63431 - protein, 98 aa, Zea mays
  Coding DNA Sequence Number=SeqID_21652
  Subcellular localization annotation: CTP_CleavageSite=66; ConfidenceScore=5.74e-01
MQAACNRAKWARPSGFQRTQHGGPRPRVMQLAHRSLRASNCTATRTTATPPRLRNQYRDSRQPCVRPSSASQGRRDRERGIPRKGSFFMKEAGSEPPY

SEQ ID NO: 63432 - protein, 158 aa, Zea mays
  Coding DNA Sequence Number=SeqID_21653
MRASSVGIDTIGVHVPEKAFHGLSNMTFIAFEDMCLMMNLQRLDVQLVKVFAFVLYRFSIFDMHVCLAECNMISRRSFTIPILMLEPVKGQGPLDTLPIYPKVGKVLVLDSLDYDPSTYAQFLNILELFYEMRDGKYNLSKQRVSLDIHYKWAKKREN

SEQ ID NO: 63433 - protein, 278 aa, Zea mays
  Coding DNA Sequence Number=SeqID_21654
  Gene Ontology: Mol. function=hydrolase activity
  Homolog annotation: Hit_ID=Q5NA00; Match level="QueryCoverage=75%, HitCoverage=36%, E-value=9e-76, Identity=68%"; Hit description =Putative lung alpha/beta hydrolase protein 1
MPVIKGRLSRLRWKDLQAESELLCKDTGDEQMMDRLFSLITVWASSMTVDTYYRRCSSASYVGNVSVPLLCINALDDPLCTREAIPWDECRANKNIVLATTPNGGHLAFFQGLTARRLWWVGATSEFLSALHDSSYMHRQKANDHVLLSSLESSIDKSPYVNLMEDGMVAAVTKDGPSNDGSPLNHAADEQLSNEAGGGQQNVVSALNHNENSIGVGNDSPAEPVKQQGDDIHSNKLHEIIAPVKRSMSQLTRYQGRVRFSGTIGPAVQGDHRTVRCP

SEQ ID NO: 63434 - protein, 667 aa, Zea mays
  Coding DNA Sequence Number=SeqID_21655
  Gene Ontology: Mol. function=phosphoinositide phospholipase C activity; Cellular component=membrane; Biological process =intracellular signaling cascade
  Homolog annotation: Hit_ID=Q69L69; Match level="QueryCoverage=75%, HitCoverage=65%, E-value=0.0, Identity=82%"; Hit description =Calcineurin-like phosphoesterase-like protein
  Pfam annotation: Domain name=DUF1723; Domain location=265-314; Score =88.2; E_value=2.6e-23; Accession=PF08330.1; Description=Protein of unknown function (DUF1723)
MPCQSSPRLAPWDPPCITTRTSATNHCRDKNNKWHGALLHATRRRGSGQQMKDFFSLSEEGTMTGWAAAADATYAAALARAEAFIGIFSGDEHPQISEGIDCHLLDVRRGTNTVGPSIGSRTRTLFDHLELDGGKLTRSRWMSPTKRRGLGRRGHGRGRGATAEKDMDHLDISVPSSPSTTSDREDQPLLIPRQSPACYVGPSEVSTMLLNPKINHRSDAIFGDQAVEQLKLRHHKPLKFHERYRPYLRDAGLLGLSQICQKMPQLDKALITALVERWRPETHSFHLASGEITVTLQDVAMLFALPIDGRPVCSTTDHDYAQVVLDCLGLDARGPAMPGKSFLHYKWLKKHFYELPEEVDDMTVERHVRAYILSLLCGVLFPDGTGRMSLIYLPLIADLSRVSTYSWASAVLAFLYRSLCSVASSHNIKNIGGSLLLLQLWSWERFHVGRPLVRSPLCTEMGIEHDLPPIGFRWVGSRTQSESANRCLKQYRDELNVQRVDQVKWEPYLQVESSTLPPLCTRDADLWLTQAPLINFPIVEMYLPERVMRQFGLRQCIPPPFRPTLQSLHRISRRGKERENWEETHHEYIQEWEARRQRIFRDTEQYDPSSYEEYLRWYSGATRRYLVPATSDDGEAGPSAPTDDFSDLQYQAKSPIIRKAVKHESLI

SEQ ID NO: 63435 - protein, 443 aa, Zea mays
  Coding DNA Sequence Number=SeqID_21656
  Gene Ontology: Mol. function=pepsin A activity; Cellular component =cellulose and pectin-containing cell wall; Biological process =proteolysis
  Homolog annotation: Hit_ID=Q69T49; Match level="QueryCoverage=95%, HitCoverage=94%, E-value=1e-159, Identity=68%"; Hit description =Putative aspartic proteinase nepenthesin I
  Pfam annotation: Domain name=Asp; Domain location=83-434; Score= -82.9; E_value=1e-08; Accession=PF00026.14; Description=Eukaryotic aspartyl protease
MKRLVALLVLIALPVRAVPVSGAGVVALLTHADAGRGLASAELVRRMAHRTRARRRLLSSHRRPARARVRAGLGAGGGIATNEYLVRLAVGTPRRPVALTLDTGSDLVWTQCAPCRDCFDQDLPVLDPAASSTYAALPCGAARCRALPFTSCGVRTLGNHRSCIYAYHYGDKSLTVGEIATDRFTFGDSGGSGESLHTRRLTFGCGHLNKGVFQSNETGIAGFGRGRWSLPSQLNVTSFSYCFTSMFESKSSLVTLGGSPAALYSHAHSGEVRTTPILKNPSQPSLYFLSLKGISVGKTRLPVPETKFRSTIIDSGASITTLPEEVYEAVKAEFAAQVGLPPSGVEGSALDLCFALPVTALWRRPAVPSLTLHLEGADWELPRSNYVFEDLGARVMCIVLDAAPGEQTVIGNFQQQNTHVVYDLENDRLSFAPARCDRLVASL

SEQ ID NO: 63436 - protein, 194 aa, Zea mays
  Coding DNA Sequence Number=SeqID_21657
  Homolog annotation: Hit_ID=Q5JLN0; Match level="QueryCoverage=84%, HitCoverage=37%, E-value=5e-59, Identity=67%"; Hit description =Lysine ketoglutarate reductase trans-splicing related 1-like
  Pfam annotation: Domain name=DUF707; Domain location=1-186; Score =25.1; E_value=1.4e-10; Accession=PF05212.3; Description=Protein of unknown function (DUF707)
MGSAISDRHIRDLAHPASHDGEPQSALDRRSQIHHRLTTRAAWSGGVHRRYYKTSGYGRCYGNSTGPPCAGWVEMMVPVFSRAAWRCVWHMIQNDLIYAWCMDYMLGYCAQGDRSRNVGVVDSQYVLHRGIPTLDDDGKATTTAATSALGTADRLAVRQQSYTELQLFNRRWKKAVAEDWCWTDPYPNPGTTTG

SEQ ID NO: 63437 - protein, 67 aa, Zea mays
  Coding DNA Sequence Number=SeqID_21658
MEDQLESFVPEKLVRGVNWAPDSSDEEDNDQQENTAAEEDDVDVAHALMQLASTEFAFELMNLIYTC

SEQ ID NO: 63438 - protein, 122 aa, Zea mays
  Coding DNA Sequence Number=SeqID_21659
MAILLGDLYTPWERSGGQWKFDVLAAKFCFFRKIKRKIKAALGVSDASKTQPAKRAASKMKDEPSDDSITVDDEEPPQKKQKEALSAAKKKAAVRMKMTVVRKVRMMSQQKLKKRRLMSTAK

SEQ ID NO: 63439 - protein, 178 aa, Zea mays
  Coding DNA Sequence Number=SeqID_21660
  Homolog annotation: Hit_ID=Q6ZL37; Match level="QueryCoverage=48%, HitCoverage=6%, E-value=6e-07, Identity=40%"; Hit description =Putative karyopherin-beta 3 variant
MATGRPVRLVLDASLLLDPSSTREAATVALRPGVEELLRIEVPGVLNVQRLQQLLLTLATLIKRAHNVSAILNFSENCTPEFLTPYLDGIVNKLLVLLQQPTALLGEQPVYHVVQHSIGCGAAKPPVALTDKEAGYFGDYRQSIMAHDEAGVATSALDVAGVPPDAGGGCCLGQRQSS

SEQ ID NO: 63440 - protein, 110 aa, Zea mays
  Coding DNA Sequence Number=SeqID_21661
  Homolog annotation: Hit_ID=Q337Z8; Match level="QueryCoverage=44%, HitCoverage=46%, E-value=9e-15, Identity=67%"; Hit description =Expressed protein
  Pfam annotation: Domain name=DUF1677; Domain location=3-106; Score =48.0; E_value=3.1e-11; Accession=PF07911.4; Description=Protein of unknown function (DUF1677)
MEIESVKCECCGLKEDCTPHYIANVRSGFHGQWLCGLCCEAVRDEACRRKAHPVAGNVFTCGGVLPRWRVGRGGGLQQRASVLLPRRRRGPLAVARRRRGWRAGCGGGLQ

SEQ ID NO: 63441 - protein, 97 aa, Zea mays
  Coding DNA Sequence Number=SeqID_21662
MAARSVTEIHGGGADTGAHELRQRCATRARDPVPCEVRGGQCVPAQSGEEDEPGTATAPWGRGAAIGRNPRHALWHPETFHQLRYMKDIMNIREMIR

SEQ ID NO: 63442 - protein, 84 aa, Zea mays
  Coding DNA Sequence Number=SeqID_21663
MDMGGKWEPKFSAVGPRLSVGTITWAMGRSSSQQASSDWAFRVGTEERQYLRLEDLRWGRISSSRNFSYDEAPVIFNIMLVTND

SEQ ID NO: 63443 - protein, 168 aa, Zea mays
  Coding DNA Sequence Number=SeqID_21664
MAVGEAICRWVHRTVRCVTQPLGFDRWSSDRWDHRTVRWCTGQGAESLNLAKTCTQIGGKVAQFETYTFTPRIGKTLGEVVEIVSCTKNKWGNWWDFWFYVALEDTEGVLELPSSILYSHYYIAFPRFRLKKGDKSEDTLRRTARTRSDHDLVEEIVLSPAFAIEMWG

SEQ ID NO: 63444 - protein, 35 aa, Zea mays
  Coding DNA Sequence Number=SeqID_21665
MSVCWEMEHQLDRHVSSSDTSGVTGWKAPGGELSG

SEQ ID NO: 63445 - protein, 340 aa, Zea mays
  Coding DNA Sequence Number=SeqID_21666
  Gene Ontology: Mol. function=caspase activity; Cellular component =nucleus; Biological process=proteolysis
  Homolog annotation: Hit_ID=Q1SSK7; Match level="QueryCoverage=99%, HitCoverage=99%, E-value=2e-90, Identity=49%"; Hit description =Peptidase C14, caspase catalytic subunit p20
  Pfam annotation: Domain name=Peptidase_C14; Domain location=4-338; Score=226.6; E_value=5.5e-65; Accession=PF00656.12; Description =Caspase domain
MGAKRAVLVGINYQGTKAELKGCHNDVARMRRCLVDRFGFDESGIRVLIDDGSAPQPTGANIRRELARLVGDARPGDLLFFHYSGHGIRLPAETGKDDDTGYDECIVPCDMNLITDQDFTELAQKVPSGCLFTIVSDSCHSGGLLDKTKEQIGHSTKQKQKQTQTQTQSRELEERSPSGTSFREFLKDDASPKIKKFMKVMLNKLQQGQHGGIVGFMGALAQEVLKAKLDGKEEEEFDPAMKQHVHSDQEVYAGTTARVPSNGVLISGCQTDQTSADATTPKGVSYGALSNAIQAILAERGTVTNKELVLKARKMLSKQGYTQQPGLYCSDENASAAFIC

SEQ ID NO: 63446 - protein, 440 aa, Zea mays
  Coding DNA Sequence Number=SeqID_21667
  Gene Ontology: Mol. function=kinase activity; Cellular component =nucleus; Biological process=regulation of transcription, DNA -dependent
  Homolog annotation: Hit_ID=Q6Z1C1; Match level="QueryCoverage=80%, HitCoverage=77%, E-value=1e-105, Identity=56%"; Hit description =Putative RNA-binding protein Virp1a
  Pfam annotation: Domain name=Bromodomain; Domain location=98-187; Score=70.6; E_value=5e-18; Accession=PF00439.15; Description =Bromodomain
  Subcellular localization annotation: CTP_CleavageSite=64; ConfidenceScore=5.46e-01
MRRVHGRTPKAYNYRCSRRSSGSKPHPRADGSKSKPRAAASSPAAGYVTFRPASLGPREARALRDRLAGELTQVRALLSRIDTWQQQGPPPAGLRGEVRKRCGQILTRLRKDKRSVWFNAPVEVERLGLHDYHAVIKRPMDLGTVKEGLAAGRYASHDDFAADVRLTFTNALRYNPVGHEVHTFAGALLAYFERMYKEALACFEEDCKRPEPPRPVPPELTPPPAAEPVEAKVKPRAGNVRMRKPKAREPNKREMSLEEKNMLRVGLESLPEEKMHNVLQIVRKRNNNPEMLGDEIELDIDEMDVETQWELDRFVANFNKALKKSQRAVVMNGGAADVTSAAVAENDTAPVSNVLTLVDNDDVEREKPVRSATMAEQVDEYVDIGDEMPTATYQSMEIEKDAEGATGSRGSGSGSSSSSGSESRSSGDSASGAGNAHSLA

SEQ ID NO: 63447 - protein, 253 aa, Zea mays
  Coding DNA Sequence Number=SeqID_21668
  Gene Ontology: Mol. function=transferase activity, transferring glycosyl groups; Biological process=glucan biosynthetic process
  Homolog annotation: Hit_ID=Q6Z1D6; Match level="QueryCoverage=45%, HitCoverage=6%, E-value=5e-48, Identity=80%"; Hit description =Putative starch synthase DULL1
MDRSYLFLAQELQVCYVSFTLCSDFSELMHVFLCKLHGEYHGRVKLCLTYDEPLSHLIYAGADFILVPSIFEPCGLTQLIAMRYGSIPVVRKTGGLYDTVFDVDNDKDRAQAQGLEPNGFSFEGADSSGVDYALDRQTCPRLHGVVPFCSQKLIAFTTREIRLVLPRVGMLCGILRKKIRGFNLIGPLVMTKFNNNVFVMNNYVRTIELTEFSLFEETTMVGKLTIGNQIEIIADHLLLCKESRDSFYAGKFA

SEQ ID NO: 63448 - protein, 302 aa, Zea mays
  Coding DNA Sequence Number=SeqID_21669
  Gene Ontology: Mol. function=oxidoreductase activity; Cellular component=peroxisome; Biological process=electron transport
  Homolog annotation: Hit_ID=Q84LB8; Match level="QueryCoverage=97%, HitCoverage=98%, E-value=1e-102, Identity=73%"; Hit description =Glycolate oxidase
  Pfam annotation: Domain name=FMN_dh; Domain location=14-292; Score =408.5; E_value=9.3e-120; Accession=PF01070.8; Description=FMN -dependent dehydrogenase
  Pfam annotation: Domain name=Glu_synthase; Domain location=37-280; Score=-209.1; E_value=0.0041; Accession=PF01645.7; Description =Conserved region in glutamate synthase
  Pfam annotation: Domain name=IMPDH; Domain location=92-301; Score= -242.6; E_value=0.073; Accession=PF00478.15; Description=IMP dehydrogenase  GMP reductase domain
  Pfam annotation: Domain name=ThiG; Domain location=82-281; Score= -208.1; E_value=0.093; Accession=PF05690.4; Description=Thiazole biosynthesis protein ThiG
  Pfam module annotation: Pfam domain module=FMN_dh::Glu_synthase::IMPDH ::ThiG; Domain location=14-292::37-280::92-301::82-281
MALITNVSDYEELAKQKLPKMVYDFYAGGAEDQWTLKENKEAFSKILIEEVSSIAPGLRFFQLSVFKDRDIVQQLVRRAENAGYKAIAVTVDAPRLGRREADVRNRFRLPENVVLKCFEGLDLSKMDKTKGSGLAAYATSQIDSSLSWKDIKWLQTITGLPILVKGVITAEDARIAIECGVAGIIVSNHGGRQLDYLPATISCLEEVVREAKGRRVPVFLDGGIRRGTDVFKALALGASGVFIGRPVLFALAVDGRAGVRNALRMLRDELEITMALSGCASLKDITRDRVITERDMIRRSRI

SEQ ID NO: 63449 - protein, 432 aa, Zea mays
  Coding DNA Sequence Number=SeqID_21670
  Gene Ontology: Mol. function=aminomethyltransferase activity; Cellular component=cytoplasm; Biological process=glycine catabolic process
  Homolog annotation: Hit_ID=O49849; Match level="QueryCoverage=90%, HitCoverage=90%, E-value=1e-178, Identity=78%"; Hit description =Aminomethyltransferase, mitochondrial precursor
  Pfam annotation: Domain name=GCV_T; Domain location=82-320; Score =321.1; E_value=2e-93; Accession=PF01571.11; Description=Glycine cleavage T-protein (aminomethyl transferase)
  Pfam annotation: Domain name=GCV_T_C; Domain location=329-421; Score =133.1; E_value=7.9e-37; Accession=PF08669.1; Description=Glycine cleavage T-protein C-terminal barrel
  Pfam module annotation: Pfam domain module=GCV_T::GCV_T_C; Domain location=82-320::329-421
MRGLLACATLARRAAASSAPARVRHLAGAAEAAEAELKRTALYDFHVAHGGKMVPFAGWSMPIQYRDSIMDSTVNCRANGSLFDVAHMCGLSLKGRGAIPFLESLVVADVAALRDGTGTLTVFTNEQGGAIDDSVIAKVTDHHIYLVVNAGCRDKDLAHIEAHMEAFNKKGGDVKWHIHDDRSLLALQGPLAAPTLQLLTKEDLSKMYFSDFKMIDINGYACFLTRTGYHFDSLSPLFEQYCKDCLISYFSYTGEDGFEISVPSENAVDLAEAILERSEGKVRLTGLGARDSLRLEAGLCLYGNDMEQHITPVEAGLSWAIGKRRRAEGGFLGADVILKQLQEGPKIRRVGMVTQGPPARSHSELVSGSGERIGEVTSGGFSPCLKKNIAMGYVKSGMHKAGTELKVVVRGKSYDAVVTKMPFVPTKYYKPS

SEQ ID NO: 63450 - protein, 88 aa, Zea mays
  Coding DNA Sequence Number=SeqID_21671
  Homolog annotation: Hit_ID=Q6ZDR8; Match level="QueryCoverage=56%, HitCoverage=5%, E-value=6e-13, Identity=76%"; Hit description =Putative potential copper-transporting ATPase
  Subcellular localization annotation: CTP_CleavageSite=33; ConfidenceScore=5.53e-01
MPDAALVFYGFPSRHANAMSPPRRPLRLAIQPRSRVSSGSINLNGKLIVEVRRLGGETVMSNIFHLVEEAQTRVVPVQRLADKANIFE

SEQ ID NO: 63451 - protein, 75 aa, Zea mays
  Coding DNA Sequence Number=SeqID_21672
MSKLLKFDQVYKEYCQYLMTPNRMLSGPTVGIFPSTYNMWDSLFEKWSLIAYGLLEKFMNTPVTEFKVILQNNHI

SEQ ID NO: 63452 - protein, 331 aa, Zea mays
  Coding DNA Sequence Number=SeqID_21673
  Gene Ontology: Mol. function=GPI anchor binding; Cellular component =anchored to membrane
  Homolog annotation: Hit_ID=Q9SUC9; Match level="QueryCoverage=50%, HitCoverage=50%, E-value=3e-30, Identity=44%"; Hit description =Uncharacterized GPI-anchored protein At4g28100 precursor
  Subcellular localization annotation: CTP_CleavageSite=54; ConfidenceScore=5.67e-01
MWAQLAVALFVALAVAPPARGSDVPSFPLSQAQSPSNSSSPSNAASRPCHLDLSAELFGGVAAACGAGGGPGSLDRGRCCPVLAAWLFAAHARTALSVPPAPPPSALVGDEGMGPDGDDDGPMVPYDNQRCVDTLGAALERRGVALPRPNATCDTVLCFCGIRLHQIGSLRCPAAFAVKTGAAARNATPTAAVKALEKSCRNASYAGCSRCVQSLQKQPWERAIPPGNHRIGPFLESLNTHLWGQTSFFRARAKAGYSPSYSPSALPPAFGSGKLIMEGSLGFFEKREADSVQMQNVLSIRNPKPPDREACSSVSPGAATATCGSRRRRSF

SEQ ID NO: 63453 - protein, 153 aa, Zea mays
  Coding DNA Sequence Number=SeqID_21674
MSLLLYKKVTWASTRLHHASTPHATPSIPGPSPHPPPPPGADADPHGTRTTAADERVLAEFLEASLRVPDLSLPPRKRFSFPPPVLEPDEIPSHTLVSGDADVEQRAIAAAAESGTVDAREARDAVEAASGLVFAAPEEVKCETWGDGSERRD

SEQ ID NO: 63454 - protein, 168 aa, Zea mays
  Coding DNA Sequence Number=SeqID_21675
  Gene Ontology: Mol. function=membrane alanyl aminopeptidase activity; Cellular component=membrane; Biological process=proteolysis
  Homolog annotation: Hit_ID=Q6ZBX8; Match level="QueryCoverage=65%, HitCoverage=12%, E-value=4e-56, Identity=93%"; Hit description =Putative aminopeptidase N
MTEQFAALAALSQNPGQVRDDALLDFYNKWQHEYLVVSKLFALQATSEIPGNVANVQKLLSHPAFDLRNPNKVYSLIGGFCGSPVNFHAKDGSGYKFLGEIVLQLDKINPQKPREPSMISFPEPKAGGNAEGEYEGEYPAFALARKKEGMRDQAKRDKNGKDEQKQWH

SEQ ID NO: 63455 - protein, 54 aa, Zea mays
  Coding DNA Sequence Number=SeqID_21676
MSIVQPARSRAKPSRAPFRDDEQPVVPECVAKDLLEQQPGEGKCPMTYYVLLTL

SEQ ID NO: 63456 - protein, 220 aa, Zea mays
  Coding DNA Sequence Number=SeqID_21677
  Pfam annotation: Domain name=AT_hook; Domain location=125-137; Score =8.1; E_value=0.9; Accession=PF02178.9; Description=AT hook motif
  Pfam annotation: Domain name=AT_hook; Domain location=144-156; Score =5.7; E_value=2.4; Accession=PF02178.9; Description=AT hook motif
  Pfam module annotation: Pfam domain module=AT_hook::AT_hook; Domain location=125-137::144-156
  Subcellular localization annotation: CTP_CleavageSite=58; ConfidenceScore=5.01e-01
MARARATAAPQATRPVALTPRQGRRHLWQAKQATLHLRHNDRVKKEVRRLAPRKGSTAASEHSGSAPTTGQRLALEGFDSRLRRRARDDPRYVRYITKARATLPRARTRPRPQKTTNSASPDPRARARTRPRKTTNSASPDTRARTRPRPRKTTNSASPDPRARTRHRPQPMVSASPDPGLALDLDHGRQTRPRPRRSLRLTRPRARTDHDTGGPSLPYP

SEQ ID NO: 63457 - protein, 94 aa, Zea mays
  Coding DNA Sequence Number=SeqID_21678
MAGRGSLRSRLAEVVGCGPWAQRSTERWCTGLGLGVENGKDRDTAQCFFAGPRELWGVASGDFRKRSVRVENRSSCVAMAGCRRTREARWIWWT

SEQ ID NO: 63458 - protein, 114 aa, Zea mays
  Coding DNA Sequence Number=SeqID_21679
MEVGGRTQGHNRAEESSGVGTGMGEWGSRATRRSKPRELHGNAVEARAPWERELGWASCRDAGERSRDGAGADVQEQRLMELSAVEEQERSSAPWRPTAMAEEERRLCVPGAGQ

SEQ ID NO: 63459 - protein, 246 aa, Zea mays
  Coding DNA Sequence Number=SeqID_21680
  Subcellular localization annotation: CTP_CleavageSite=38; ConfidenceScore=5.25e-01
MGVFPRGFARSYPPWSFSATGVANSRRNSTASSYPRVYASKIWARGDSPPIKEHDEAEGWKLPADTTRRESSSTPECLHWHLSLAGGKQSRSQLARRARFSPSNTQVGRLVRFTPRDSCGRDDSGNPDPRASERKTQRASGRAAQGRLTRGPQLSARVCGSRSQKWAERGHSPPLVGRITIWRPSDPPLRLRLLRALRVVARTATGVVVVSVSVKGKATSQTPPPAEARGRVLLLLLLSLELLLLV

SEQ ID NO: 63460 - protein, 395 aa, Zea mays
  Coding DNA Sequence Number=SeqID_21681
  Gene Ontology: Mol. function=hydrolase activity, acting on ester bonds; Biological process=lipid metabolic process
  Homolog annotation: Hit_ID=Q5Z983; Match level="QueryCoverage=94%, HitCoverage=90%, E-value=4e-98, Identity=53%"; Hit description=GDSL -lipase-like
  Pfam annotation: Domain name=Lipase_GDSL; Domain location=29-373; Score=65.9; E_value=1.3e-16; Accession=PF00657.12; Description=GDSL -like LipaseAcylhydrolase
MKVLVLSLVAGAVAAVRPSKLLPAAVPAVYVFGDSTLDVGNNNYLPGKDVPRADKPYYGIDLPGSGKPTGRFSNGYNTADFVAQALGFKKEPPCLSGAESAEDANPERCHERSKLCIGRSWDSGFHSHLLVRYDPCMYIVYYVVCLRARVQNAGNNIPLSQQVRLFESTKAEMEAAVGQRAVRKLLSASFFLVSAGSNDFFAFATAMAEQNRTATQADVTAFYGSLLSNYSATITELYKLGARKVGIVNVGPVGCVPRVRVLNATGACADGLNQLAGGFDGALRSAVAALAADQLPGLAYSVADSFGFTQASLADPLGLGFASADSACCGSGRLGAQGDCTPAATLCADRDRYVFWDSVHPSQRAAMLGAQAYYDGPAQYTSPVSFKQLARMRIG

SEQ ID NO: 63461 - protein, 188 aa, Zea mays
  Coding DNA Sequence Number=SeqID_21682
  Subcellular localization annotation: CTP_CleavageSite=60; ConfidenceScore=5.81e-01
PSPSPGVGRSEVRRLPGLSPSPSPGVGRSGVRRLPGLSPSPSPGSGGAEFVVFRVLARVRALGSGGAEFAVFRVLARVRALGSGGAEFAVFRVLARVRALGRAERSFLWRLWQGLTACQSHSVKWHYSRSGAGGAVLLSDRPLQLYADGGYQLRIRRLEDPQLGINRFGSPDFSDMKTGSSTLIVDNK

SEQ ID NO: 63462 - protein, 76 aa, Zea mays
  Coding DNA Sequence Number=SeqID_21683
  Gene Ontology: Mol. function=sequence-specific DNA binding; Cellular component=nucleus; Biological process=regulation of transcription, DNA-dependent
  Homolog annotation: Hit_ID=Q5PSQ3; Match level="QueryCoverage=87%, HitCoverage=24%, E-value=4e-17, Identity=73%"; Hit description=MADS box transcription factor
  Pfam annotation: Domain name=K-box; Domain location=1-76; Score=-6.1; E_value=0.0014; Accession=PF01486.8; Description=K-box region
KSTWCWGPLSVKELEQLENQIEISLKHIRSSKNHQMLEHLFDLKRKTRGNTNQHSEVLQEQQLQDANKDLRMKIYT

SEQ ID NO: 63463 - protein, 47 aa, Zea mays
  Coding DNA Sequence Number=SeqID_21684
MAVGALQKGAWMAVVRCKGGVERCLFQASRVSFPVSSWVRTPRGGGE

SEQ ID NO: 63464 - protein, 887 aa, Zea mays
  Coding DNA Sequence Number=SeqID_21685
  Gene Ontology: Mol. function=protein binding; Cellular component =chromatin; Biological process=defense response
  Homolog annotation: Hit_ID=Q2R2R4; Match level="QueryCoverage=95%, HitCoverage=99%, E-value=0.0, Identity=51%"; Hit description=Stripe rust resistance protein Yr10, putative, expressed
  Pfam annotation: Domain name=NB-ARC; Domain location=128-439; Score =224.6; E_value=2.2e-64; Accession=PF00931.13; Description=NB-ARC domain
MAEIVTGAMGTLLPKLANLIKEEYNLQKKVRGEIMFLETELKSMEAALIKVSEAPIDHPPDVQVKLWTREPHSFKGFIDRSLHLLTRGRIQHSIGIDIKEIRSRIKDVSERRDRYKVDLVPSKPVGRSIDNLRLSALYRKATELVGAEEKSSDLVKRLMEGDKEASKQPVVLSIVGFGGLGKTTLANLVYEKIKGQFVCGAFVYVSHNPDVVKVFKNMLYQLDGDKYRDINQGTWSEEQLIWELRKFLLHKRYFIVIDDIWNTSVWETIQCSLMHNECGSIIIITTRNIDVAKQAGSVYQMEPLSLSDSTKLFCQIIFGSEDKCPPANLAEVAGKILQKCGGVPLAIITMASMLANKTGKEINTHSYWSHVYQSMGYGLDGSTNVKNMRRILSVSYYDLPSHLKTCLLYLSLYPEDYRIRTRGLIWKWIGEGFVHEEQGKSLYEVGKDYIEELVNTSMLEPVGIGHDGKTVSCRIHDMVLDLISFLSNEEHFLTKVGGQQPVSLDLPKKVRRLSLQISQEEEAKQLATMSFSHLRYLSLNAKFITEIPREIRNLQFLQVLDITNLGHKVKMTTIIHLRQLLRLCSRSGWSIKQLDGFGKLTSLQEVKGTITIESPSMLHDLGCLTNLRTLGINFRDWDESYEEPFIQCLSNLVSLKSMKIKGTMMSSLCSECDKLYPGPQQLCSIDMKSLARTVIMTRVPRWMSSLCSLSSIKITLLALGVQDIHVLGSIPSLRCLSVHVKETRDERLVIDKCYPFRCLTEMQIDYESMAVVFAPGSMQNLKELHLLFGVKEVMHKYGDCNFGLEHLMSLEHVSVKTMYTIMPEEVEAVKDEFQKSLDMNPGKPTLIVDYLYPKEHIPFSNWHCILNVAWVLVANKLSEVMNFLQIM

SEQ ID NO: 63465 - protein, 186 aa, Zea mays
  Coding DNA Sequence Number=SeqID_21686
  Gene Ontology: Mol. function=methyltransferase activity; Biological process=metabolic process
  Homolog annotation: Hit_ID=Q5WA78; Match level="QueryCoverage=47%, HitCoverage=41%, E-value=8e-18, Identity=88%"; Hit description =Putative early nodule-specific-like protein ENOD8
MKLKQLEGLLGGLTQFSDPKVLLTAPPPPPPPLGWPFFLPFSYPARFRLAQPRQKGGGKAEEYLTFATNGVFFYNEMALLGVAGAGAVCDGPSHRVADALHGNQEGLTPIINLYKEQNKLQMSFRKQKRHVLGIDIDPQSLELAQENAADLELDIDLVWSDIKNLNLKGELRIFVLRRKRIGERSP

SEQ ID NO: 63466 - protein, 336 aa, Zea mays
  Coding DNA Sequence Number=SeqID_21687
  Gene Ontology: Mol. function=RNA-directed DNA polymerase activity; Biological process=RNA-dependent DNA replication
  Homolog annotation: Hit_ID=Q2QSK7; Match level="QueryCoverage=60%, HitCoverage=20%, E-value=4e-32, Identity=39%"; Hit description =Retrotransposon protein, putative, LINE subclass
  Subcellular localization annotation: CTP_CleavageSite=67; ConfidenceScore=5.83e-01
MRPLGSPARLLGSPAHPLGSPASPLVFPARPLVSRSGASSSVPPSPAIFTIPAPSSVSPSPVILTVPASSAAATEPSLSSVEPGSLPEAPRSTSLSPRGILHRSVGHSKVERWQEASPRSIGNCSIDSRSVKHHAGPKSFLDRLAKFCASGDYSASSVYRALFQGSIGFEPAEKVWKSWAPRKCKFFIWLVEHDRCWTADRLAKRRLDHPDRCPLCDQDDESINHLLISSVFSRQFWFQLLMIGGLQLLCATIDVCFENWWRICSYKVANHLKKGFNSLVILGAWTIWKHRNKCVFDNCNPSLAAALRAAREEALCWFLAGDKALSGLFHIDELLA

SEQ ID NO: 63467 - protein, 102 aa, Zea mays
  Coding DNA Sequence Number=SeqID_21688
MIVGSKIRIDVFQDNILRPSLESLSADEQRQFEDLMNQAHEAAKDKFISYFMGRSSLCLSYLHYKLPICYGVDCGVYFKELTAVTLRAALKFDLQQLQTISS

SEQ ID NO: 63468 - protein, 102 aa, Zea mays
  Coding DNA Sequence Number=SeqID_21689
  Subcellular localization annotation: CTP_CleavageSite=52; ConfidenceScore=5.49e-01
MARTLPRLKKTNSASPEPRGRTRPRPRRSLRLARPRARTCHVTGKATITLPLASSGYGEQDRRPIWLAPPLTEARRRQQGSHSPDSCPSTGPKRSSDGHDIT

SEQ ID NO: 63469 - protein, 117 aa, Zea mays
  Coding DNA Sequence Number=SeqID_21690
MGKGNKRMREPTPPSEDFGDSEYSEEEFSSESEGSPAPVSPPASSDDSDDSQGIVAEEDSPEEDGEGDDGDDDGGDGGDDGDGDGRGGNGDGKGGDGGSSRGSNSGGSSKGSNKASG

SEQ ID NO: 63470 - protein, 362 aa, Zea mays
  Coding DNA Sequence Number=SeqID_21691
  Homolog annotation: Hit_ID=Q8SA97; Match level="QueryCoverage=28%, HitCoverage=19%, E-value=3e-07, Identity=47%"; Hit description =Ornithine carbamoyltransferase
MAASGYSGSAPITDQGFEGWPPKEGQRRLRHSDCSATRQSESDRQSGLAKGATANSAPPDPRARTRAKTRKTANSAPPDPRARTRDKTRKTATPLRPTPGLGLGLRPGRRRTPLRPTPGLGLGLRPGRRRNSASPDPRARTPPWPRPNDFRLARPQGSDSALASAERLPPRPTPWLGLGHGNGRQTQPRLRRNPHVALPRAQTATSTGSAIIILPRIDSGRRQQGLDRSNSCPSARLRRTSDSHDITPAGCPDLSGCHIGMAFLEKVGRAGPRTGQALSWGRSLPSPAWTLVTPLLQAHLTWARDEHEGRGTSTSLTLDSGHLASPPFALAHTLDPSGLGHAAHSLVGLGTPLSRNADSWRA

SEQ ID NO: 63471 - protein, 255 aa, Zea mays
  Coding DNA Sequence Number=SeqID_21692
  Gene Ontology: Mol. function=D-arabinono-1,4-lactone oxidase activity; Cellular component=membrane; Biological process=electron transport
  Homolog annotation: Hit_ID=Q10I64; Match level="QueryCoverage=84%, HitCoverage=35%, E-value=3e-96, Identity=81%"; Hit description=FAD -binding domain-containing protein, putative, expressed
  Pfam annotation: Domain name=FAD_binding_4; Domain location=77-227; Score=69.5; E_value=1.1e-17; Accession=PF01565.13; Description=FAD binding domain
  Subcellular localization annotation: CTP_CleavageSite=91; ConfidenceScore=5.25e-01
MGTTAPVAGAVVVRVKQSMLLVLVIVTSVLVVGPTADRGAFASPPPEPVQCSSGGGTANCTVSSAYGVFPDRSTCRAAAAVFPASEDELVRAVAAAAAASGTKMKVATRYSHSIPKLACPGNGTGEGLVISTRRLDRVVSVDAATGHVTVESGVTLRQLIAEAAKAGLALPYAPYWWGLTVGGMLGTGAHGSSLWGNGSAVHEYVVGMRIVTPAPAAEGYAKVRVLTAGNPDLDAAKVSLGVLGAISQVKKSYLS

SEQ ID NO: 63472 - protein, 172 aa, Zea mays
  Coding DNA Sequence Number=SeqID_21693
MAGVRCGCGWPVGVAGMGADGPVGEHELWRRCAGAVRESLARVGSEVALLGLRVRRGRIGCAGALGCWRGRRGWRCLVRSASGVGGWSRASGTATAWAGSCAGAGRLAPWARTALAPGLRARTSREERGRDGRVGERSGKGGGGWEIEQGGRGLGLGAAGFMGLMGRFGWVD

SEQ ID NO: 63473 - protein, 182 aa, Zea mays
  Coding DNA Sequence Number=SeqID_21694
  Homolog annotation: Hit_ID=Q4CA21; Match level="QueryCoverage=73%, HitCoverage=25%, E-value=3e-07, Identity=27%"; Hit description=TonB, C-terminal
MAGVRRGCGWPVGVAGMGADGPVGEHELWRRCAGAVREGRALGHCVRLLGGFGCARGYASGSVGSRARSVCAAPVLGAGRQRGFSARSSGEAGSHRVRRGARLLARSSRLALPGAVGFGGRRLESSVGHGDGLGWQLRGRVALGSMGADGSGAWAARGQAEKREGEMAVWEREVERVAAAGR

SEQ ID NO: 63474 - protein, 77 aa, Zea mays
  Coding DNA Sequence Number=SeqID_21695
  Subcellular localization annotation: CTP_CleavageSite=45; ConfidenceScore=5.23e-01
MAAAIKVNPPAQRALPARRSPDEHPTGTANSPNGSQGTDRGTMPSAAILARGSPSPQQPRARFQPPVATIRCPEQHK

SEQ ID NO: 63475 - protein, 101 aa, Zea mays
  Coding DNA Sequence Number=SeqID_21696
MRKDDDRAEKAVRVLYAGSPTPRAMEDHHTGKEDHRAIAVEAELPCCGGGPCLDCGNRVMEQTVALVEAREKDCRYGRTTRLEQTATLVDMAKVLEATSMA

SEQ ID NO: 63476 - protein, 205 aa, Zea mays
  Coding DNA Sequence Number=SeqID_21697
MGECKAHLEKKLYDVRLLTAGCRRSVRSLVIGWPIRRASPSRALDASFRAPCGGYSSPREQIRRAPNHQPLETSNTRAAAATHWQTCLAGGEGEENDETGRALHSPLAVVTRRRLLPTHTPASRMLPLPRVRLCKTWHELPMRMRGTPRVRINLTTCTGYGNAVQGRGSAIDWFSSIDRYLTVVAEFAAAFPAGRTRTIISGSEV

SEQ ID NO: 63477 - protein, 245 aa, Zea mays
  Coding DNA Sequence Number=SeqID_21698
MARLLAARALALARPSGTPSALRFCPSRALSDEVEFVEIDLSEESPASSSGGEGEGDSATVQAQMGSRRLEDAIYGVLVRRAAPEWLPFVPGASYWVPPLPRPLGVASLLGAAVYTARGATAMTEEEAFSFTTVRGCPSAAYFVGGLSGFANQAVCMYSGLGWVALHRNLHGDWLCIYTLRIHDIPQGRENPGTPAKPIHSVTVAHVVRVFGLLRLQSVQGQKWLLPKRAARGCEAPLMIVDVDS

SEQ ID NO: 63478 - protein, 124 aa, Zea mays
  Coding DNA Sequence Number=SeqID_21699
  Homolog annotation: Hit_ID=Q1T5G4; Match level="QueryCoverage=24%, HitCoverage=4%, E-value=2e-09, Identity=86%"; Hit description=Zinc finger, CCCH-type
MACTAACWSAGLARWRLAVVFPFVLIYPYPDFECSCRGCGRNCAATGARGRQRLHDARGPPRGAYSHDWTECPFVHPGENTRRRDPRKFLQERSSLASNAKIKIDDMDTGRRAATNFVKNWSTS

SEQ ID NO: 63479 - protein, 387 aa, Zea mays
  Coding DNA Sequence Number=SeqID_21700
  Gene Ontology: Mol. function=glutamyl-tRNA reductase activity; Biological process=tetrapyrrole biosynthetic process
  Homolog annotation: Hit_ID=Q9LVD1; Match level="QueryCoverage=73%, HitCoverage=67%, E-value=1e-111, Identity=65%"; Hit description =Arabidopsis thaliana genomic DNA, chromosome 5, P1 clone:MJB24
  Pfam annotation: Domain name=DUF266; Domain location=134-245; Score =231.2; E_value=2.3e-66; Accession=PF03267.4; Description=Arabidopsis protein of unknown function, DUF266
MKLHQVWQLGIKDMKAVPLPRPRAATRRRAWMLAVAAFIFVALVWAYLYPPPRYTSPVRDWLPGRLPAEPAREFTDEERASRVVFRQILTTPPVRSKNSKIAFMFLTPGTLPFERLWEKFFEGHEGRYTIYVHASREKPEHVSPIFVGREIHSEKVTWGTISMVDAERRLLANALQDMDNQHFILLSDSCVPLHNFDYVYDYLMGANLSFIDCFYDPGPHGNFRYSKNMLPEVTEADFRKGSQWFSVKRQHALMIIADSLYYTKFKLHCRPGMEDGRNCYADEHYLPTVFHMMDPDGIANWSVTHVDWSEGKWHPKAYRAKDVTFELLKNITSIDISHHVTSDSKKVVTEKACLWNETKRPCYLFARKFYPESINNLLTLFANYTLI

SEQ ID NO: 63480 - protein, 213 aa, Zea mays
  Coding DNA Sequence Number=SeqID_21701
  Subcellular localization annotation: CTP_CleavageSite=33; ConfidenceScore=5.06e-01
MKPTPRWPTASQDAQPAFPHRTLEALTLSLVTKSMAAPAAWLSYGASCPVVLRVSDGASHGKRGASAHQHPPQGLAMVHPAQWCCELAMTHTTTSVARRRISTLKADATVQRAGGAAAHPPQAPARAENRAALPAQNDGNEQPNGPEGLDTNESNEGDEGGGRATRRFQPSRGMLRTWQGGLTATGEAGVAGEGDLQRVGEDQRLGIAGRVGK

SEQ ID NO: 63481 - protein, 207 aa, Zea mays
  Coding DNA Sequence Number=SeqID_21702
  Homolog annotation: Hit_ID=Q01CP2; Match level="QueryCoverage=28%, HitCoverage=90%, E-value=2e-08, Identity=59%"; Hit description =Homology to unknown gene
  Pfam annotation: Domain name=DUF163; Domain location=43-168; Score= -10.4; E_value=9.8e-08; Accession=PF02590.8; Description =Uncharacterized ACR, COG1576
  Subcellular localization annotation: CTP_CleavageSite=61; ConfidenceScore=5.57e-01
MAVLLWRCICGPQQSFSKNRGASTPSPLAGRRSKYSGQSVKAMPMRLLTVGKKRSRGTQLLVEEYKEKLGHYCEFEDTLIRSNPKLTSDVKVQVEAEDTAMMQQLKSDDFVILLALVVVLDENGKDVISEQIADLIGDAGNTAVLTSFEPSSCLDSPHGAALQGMDYNKRTEVSPLGLSAIIIRCSEVLQKRMAHLNILLLLRSSVS

SEQ ID NO: 63482 - protein, 479 aa, Zea mays
  Coding DNA Sequence Number=SeqID_21703
  Gene Ontology: Mol. function=protein-tyrosine kinase activity; Cellular component=chloroplast; Biological process=protein amino acid phosphorylation
  Homolog annotation: Hit_ID=Q9FIL1; Match level="QueryCoverage=98%, HitCoverage=99%, E-value=1e-177, Identity=61%"; Hit description =Protein kinase-like protein
  Pfam annotation: Domain name=Pkinase; Domain location=55-303; Score= -17.8; E_value=1.7e-07; Accession=PF00069.15; Description=Protein kinase domain
  Pfam annotation: Domain name=Pkinase_Tyr; Domain location=68-310; Score=-39.8; E_value=5e-10; Accession=PF07714.7; Description=Protein tyrosine kinase
  Pfam module annotation: Pfam domain module=Pkinase::Pkinase_Tyr; Domain location=55-303::68-310
MGARCSKLSVCWWPPHFKSPMLENGAAGDDGSGVPVFAEYSFDDLRVATDGFAPDRIVSEHGEKAPNVVYRGTLFSSGRTVAIKRFGRSAWPDSRQFLEEARAVGQLRSGRLANLIGCCCESGERLLVAEFMPHETLAKHLFHWETNPLSWAMRMRAALYVAQALDYCSSKGRALYHDLHAYRVVFDVDGNPRLSCFGLMKNSRDGKSYSTNLAFTPPEYLKTGRVSPESVVYSFGTVLLDLLSGKHIPPSHALDLIRGKNFLVLMDSCLEGHVSNSDGTDLMRLASRCLQYEARDRPNLKTVTPSHTLLGIQHDKNNSGQVSLSAIGKAFARADLNEVHEILLHDGYNEDDEANAELSLQSWNGDISESFVVKRRADNAFRSKEYTTAIECYSRFLDSGAVVAPTMLGRRCFAHVVAGNPQEGLEDAKRAEIIASDWPMGHYLQALALHKLGREAESQEALKNGTALEAARNSRARTV

SEQ ID NO: 63483 - protein, 68 aa, Zea mays
  Coding DNA Sequence Number=SeqID_21704
MAGHTFQLEKDLKEQQVVHGEVENTLGPGFINLALENPIPKDWRTIHMIGAESNLLDIVSNSVATSIT

SEQ ID NO: 63484 - protein, 76 aa, Zea mays
  Coding DNA Sequence Number=SeqID_21705
MAEDRIEDGEDADGSLRMEARWSWSSVPDDARNDLSYPILSALRRDLSRSDRCANGPIPACEHGADANTVELVFGA

SEQ ID NO: 63485 - protein, 42 aa, Zea mays
  Coding DNA Sequence Number=SeqID_21706
MCCWRRCAMLLCATAMDVRWQSAPRHGSSRCWLSPTATGRIF

SEQ ID NO: 63486 - protein, 162 aa, Zea mays
  Coding DNA Sequence Number=SeqID_21707
MDETPTCLCSSDGRRGALLWPMAATVRRAEKHLCSSFLPPMSTDAMEPNPRSPSLIQRAGHFSGSELEQRLKRTPAAPEIRAAMEGSRTLSPWPPIVLLLSPGVLDAWCFDLDSFPCERHLCSAPSPASELPLLGPSLVQPAGRVPPGGRERGPPLTPLPQR

SEQ ID NO: 63487 - protein, 97 aa, Zea mays
  Coding DNA Sequence Number=SeqID_21708
MEANPRSPSLIQRAGHFSGSELEQRLKRTPAAPEIQAAMEGSRTLSPWPPIVLLLSPGVLDACPQGASLLEDESEAHHRRLSLSCSTCSTLPVSFTG

SEQ ID NO: 63488 - protein, 109 aa, Zea mays
  Coding DNA Sequence Number=SeqID_21709
MARRLQSPSMAWIGTFDKIEDEATDLRGGKGRRLATSNLDEWTVVLSAGLSSRRPLFGPVRLRQLGAQLRHCLRQTTPGTTGAAGRQLQPERSARGSFRPDAGGRRVGV

SEQ ID NO: 63489 - protein, 966 aa, Zea mays
  Coding DNA Sequence Number=SeqID_21710
  Gene Ontology: Mol. function=sucrose-phosphate synthase activity; Biological process=sucrose metabolic process
  Homolog annotation: Hit_ID=Q2ABX9; Match level="QueryCoverage=89%, HitCoverage=81%, E-value=0.0, Identity=81%"; Hit description=Sucrose phosphate synthase
  Pfam annotation: Domain name=Glycos_transf_1; Domain location=395 -560; Score=30.2; E_value=7.3e-06; Accession=PF00534.10; Description =Glycosyl transferases group 1
  Pfam annotation: Domain name=S6PP; Domain location=669-954; Score= -100.1; E_value=0.00075; Accession=PF05116.4; Description=Sucrose-6F -phosphate phosphohydrolase
  Pfam module annotation: Pfam domain module=Glycos_transf_1::S6PP; Domain location=395-560::669-954
MGLVLIQGVVGLELSVENPLAGDHVGARGTRHQVPGVAGQKGCVLLHSATPIRIGENGAGGGGDKFATELVNGPSTKMCTLDLHSASLNKIRIPECILWVHGPIIHGLIRGENMELGRDSDTGGQVKYVVELARALGSTPGVYRVDLLTRQISAPDVDWSYGEPTEMLSPISSENFGLELGESSGAYIVRIPFGPRDKYIPKEHLWPHIQEFVDGALVHIMQMSKVLGEQIGSGQPVWPVVIHGHYADAGDSAALLSGALNVPMVFTGHSLGRDKLDQILKQGRQTRDEINATYKIMRRIEAEELCLDTSEIIITSTRQEIEQQWGLYDGFDLTMARKLRARIRRGVSCFGRYMPRMIAIPPGMEFSHIAPHDVDLDSEEGNGDGSGSPDPPIWADIMRFFSNPRKPMILALARPDPKKNITTLVKAFGEHRELRNLANLTLIMGNRDVIDEMSSTNAAVLTSALKLIDKYDLYGQVAYPKHHKQSEVPDIYRLAARTKAAAYGLPMVATRNGGPVDIHRVLDNGILVDPHNQNEIAEALYKLVSDKHLWSQCRQNGLKNIHKFSWPEHCQNYLARVVTLKPRHPRWQKNDVAAEISEADSPEDSLRDIHDISLNLKLSLDSEKSGSKEGNSNALRRHFEDAAQKLSGVNDIKKDVPGENGKWSSLRRRKHIIVIAVDSVQDADFVQVIKNIFEASRNERSSGAVGFVLSTARAISELHTLLISGGIEASDFDAFICNSGSDLCYPSSSSEDMLNPAELPFMIDLDYHSQIEYRWGGEGLRKTLIRWAAEKNKESGQKIFIEDEECSSTYCISFKVSNTAAAPPVKEIRRTMRIQALRCHVLYSHDGSKLNVIPVLASRSQALSIKQCFARLFARYLYIRWGVELSNITVIVGECGDTDYEGLLGGVHKTIILKGSFNTAPNQVHANRSYSSQDVVSFDKQGIASIEGYGPDNLKSALRQFGILKD

SEQ ID NO: 63490 - protein, 275 aa, Zea mays
  Coding DNA Sequence Number=SeqID_21711
  Homolog annotation: Hit_ID=Q6QP54; Match level="QueryCoverage=21%, HitCoverage=23%, E-value=9e-07, Identity=66%"; Hit description =Putative kinase
MQAACNCTKGVHPFDFDASSMEAQAHMSCNRRAGYYVRETAPPLAPVPRPLDCGTGAATRGNPAHGPTVPTEHIGHGDRERGYSERDPSPRRKWAPSPPTDQRFEGWPLGKGSTAASEHSGSAPTTGQRVRLTTVKSGLRRHRKLRLARPQGSDSTSTSDDGLRLARPQGSDSTSTPEDGLRLARPQVSDSTSTSDDGLRLARPQGSGSTSTSDDELRLARPQGSDSTSTPEDGFRLARPQGSDSASTSEESPPRPTSGSDRPRHRGDHHYPTPS

SEQ ID NO: 63491 - protein, 93 aa, Zea mays
  Coding DNA Sequence Number=SeqID_21712
MRANSVGGPCCKGHKKSLPSSGTTDDMATADDEGHHQLSHAPRLRALAAYGSRGSRRQWRVMGHDGEKTREVGEMERDGGTDLTGEIERGRSP

SEQ ID NO: 63492 - protein, 452 aa, Zea mays
  Coding DNA Sequence Number=SeqID_21713
  Gene Ontology: Mol. function=pyridoxal phosphate binding; Cellular component=cellular_component; Biological process=amino acid and derivative metabolic process
  Homolog annotation: Hit_ID=Q75PZ8; Match level="QueryCoverage=99%, HitCoverage=99%, E-value=1e-169, Identity=85%"; Hit description =Tryptophan decarboxylase
  Pfam annotation: Domain name=Pyridoxal_deC; Domain location=59-379; Score=352.8; E_value=5.7e-103; Accession=PF00282.9; Description =Pyridoxal-dependent decarboxylase cons
MGSLDTNPNAFSAFGVDATTGFQPLHPDDVRAYLHKAVDFISDYYKSVESLPVLPDVKPGYLRQQLRPRQPPRRWRSSRSTGSRSSCACRPSFMNRTGAAGRGTGGGVILGTTSEAMLVTLVAARDAALRRTGSQGVSGLPRLAVYAADQTHSTFFKACRLAGFDPANIRSIPTGPETDYALDPARLFEVMQADVDAGLVPTYVCATVGTTSSNAVDPVGAIADVAAVFNAWVHIDAAYAGSACICPEFRHHLDGVERVDSISMSPHKWLLTCLDCTCLWVRDTHRLTDSLETNPEYLKNDASDSGNVTDLKDMQVGVGRRFRGLKLWMVMRTYGAAKLQEHIRSDVAMAKMFEDAVRSDNRFEVVVPRNFALVCFRIKPHGGGIMTEEDADEANRELMERLNRTGKAYLAHTVVGDRFVLRFAVGSSLQEERHVRSAWELINKTTTEIMQK

SEQ ID NO: 63493 - protein, 469 aa, Zea mays
  Coding DNA Sequence Number=SeqID_21714
  Gene Ontology: Mol. function=pyridoxal phosphate binding; Cellular component=cellular_component; Biological process=amino acid and derivative metabolic process
  Homolog annotation: Hit_ID=Q6YZ18; Match level="QueryCoverage=96%, HitCoverage=96%, E-value=0.0, Identity=72%"; Hit description =Putative Aromatic-L-amino-acid decarboxylase
  Pfam annotation: Domain name=Pyridoxal_deC; Domain location=57-394; Score=412.3; E_value=7e-121; Accession=PF00282.9; Description =Pyridoxal-dependent decarboxylase cons
MGSLDTTPTAAFADVAGGGFEPLNADDVRSYLHKSVDFIYDYYKSVESLPVLPGVEPGYLRRLLQSVPPTSSAPFDIALKEASPASTEMEVLALDWLAQLLRLPPTFMNRTAAAGRGTGGGGVILGTTSEAMLVTLVSARDAALRRAGSVGVAGITRLAVYAADQTHSTFFKACRLAGFDPANIRSIPTGPETDYALDPARLLEVMQADVDAGLVPTYVCATVGTTSSNAVDPVGAIADVAAVFNAWVHIDAAYAGSACICPEFRHHLDGVERVDSISMSPHKWLMTCLDCTCLWVRDTHRLTDSLETNPEYLKNDASESGTVTDLKDMQVGVGRRFRGLKLWMVMRTYGSAKLQEHIRSDVAMAKMFEDAVRADHRFEVVVPRNFALVCFRIRPQGTDLTEEDADVVNRELMERLNRTGKAYLAHTAIGGKFVLRFAVGSSLQEERHVRSAWELIKKTTTEIFEEETM

SEQ ID NO: 63494 - protein, 218 aa, Zea mays
  Coding DNA Sequence Number=SeqID_21715
MVARMTNWSLLLFLLRVTSSAKMTPQSLIYLSTNARDMMCLLCQVLWSMHSAKALIGTQGWATHFYWVNAGSMWLPIAHGDRQSTLTQSLGPSDRATGLWVSVTICPIGGIARQLQPMAGPPHMPSKHPAKGGPMLLRVWAITNEIRTSISVIRMPSQGRSGTATSACIMNSRSPLKRGNDASMWPTAHHESRRHSLMRASSMGPPALNTDRKHAYSH

SEQ ID NO: 63495 - protein, 64 aa, Zea mays
  Coding DNA Sequence Number=SeqID_21716
  Homolog annotation: Hit_ID=Q5N9R6; Match level="QueryCoverage=60%, HitCoverage=4%, E-value=2e-10, Identity=82%"; Hit description =Transducin family protein / WD-40 repeat family protein-like
MAPHYQAATLIASLSYPNAIAWSGDNLVAVASSHIVTILFSMFEENIIKEACLDALKHEVELWR

SEQ ID NO: 63496 - protein, 381 aa, Zea mays
  Coding DNA Sequence Number=SeqID_21717
  Gene Ontology: Mol. function=protein kinase activity; Cellular component=membrane; Biological process=protein amino acid phosphorylation
  Homolog annotation: Hit_ID=Q8W5M1; Match level="QueryCoverage=80%, HitCoverage=41%, E-value=6e-55, Identity=40%"; Hit description =Putative wall-associated protein kinase
MAISSSTSRTQDLVPLLCLLLMAAAAPQHSCASPPLPVTLPGCPDKCGNISIPYPFGTKEGCFKPDFEVLCNDSFHPPRAFIQMAGAKITVDDTYYKTNEDGMPDNDIGSSEWPIELVDVSVSEGKARVLGAFSYDCKMNDTYHAVRRQEIDLGYWMPFSMSDADDVLMGIGSNVVAKQTSGPQCQSYLLYQLSTRKTDDPVNGSCSGQGCCSANLRSGGMAATEVTIQKNTKDDGGFYGDGVSCSYAMIVDKSWYNFSSPDVDSDAFLRRNAAGVPVVVNFSFGVDGCPNASEPTPDDFACVSNYSTCIERPPVLDNVSIPYFCSCSAGYEGNPYIHGGCQDRRCGRLVGEGGTPVTSGRRRGYQGGGQGSGKHEQIDDW

SEQ ID NO: 63497 - protein, 348 aa, Zea mays
  Coding DNA Sequence Number=SeqID_21718
  Gene Ontology: Mol. function=protein-tyrosine kinase activity; Cellular component=membrane; Biological process=protein amino acid phosphorylation
  Homolog annotation: Hit_ID=Q8S5J1; Match level="QueryCoverage=91%, HitCoverage=45%, E-value=1e-123, Identity=70%"; Hit description =Putative S-receptor kinase
  Pfam annotation: Domain name=Pkinase; Domain location=73-337; Score =112.9; E_value=9.1e-31; Accession=PF00069.15; Description=Protein kinase domain
  Pfam annotation: Domain name=Pkinase_Tyr; Domain location=73-337; Score=138.3; E_value=2.2e-38; Accession=PF07714.7; Description =Protein tyrosine kinase
  Pfam module annotation: Pfam domain module=Pkinase::Pkinase_Tyr; Domain location=73-337::73-337
MTADGRSSSRRRLKVHCSRGIGGLFLIALMVFVVLIRNEKRKMAEFFKKNGGPTLEKAKIIKIYRKEELTPILTRSNFIGRGAFGEVYKGLLDNQLVAVKKPIDGNVAQNDQFANEVIIQSQVIHKNIVKLIGCCLEVDKPMLVYEYLSKGSLDDILHGSSGVLLTLEQRLNIAAESAEGLAYMHSKTGKIILHGDVKPANILLNDCFTPKISDFGISRLIVIDKEQTDHIIGDRTYMDPVYLRDGILTDKSDVYSFGVVLLELISRKKATYSDNNSLVRSFLDAHKNQKEATELFDKEIAKPDVLKILASVYEIAVSCLNLDADERPNMAQVEASLLKLKADLGMIN

SEQ ID NO: 63498 - protein, 109 aa, Zea mays
  Coding DNA Sequence Number=SeqID_21719
MARLVQGRAAWRWRGRRAERRRRRAWRAGQRSAGRRAERRGRVGQRGVSGTTRREARRGAQVDAGGRGGAQGGLWRELGARWMGATLKGGGWGMLEGDRARARLMCVGC

SEQ ID NO: 63499 - protein, 84 aa, Zea mays
  Coding DNA Sequence Number=SeqID_21720
MALSVNGRVFECNTYYYITGRQNILPPTSLLIFVTPGFRRIIHGSSPKLELFDREKQPILEPVKTFNSRHECQLVTYSQLINLI

SEQ ID NO: 63500 - protein, 130 aa, Zea mays
  Coding DNA Sequence Number=SeqID_21721
MASATQRCFVGSFLRWAGDDRKAEPAARDTEENQQGRVMMPNGEHTGRAAHRELPRHTGDWARTSGGVLPRRPPPPGWLPPLDGARALQNIGIETVVPVVYGAPPPPWVPPPPWVHTEITGEKPEDARNT

SEQ ID NO: 63501 - protein, 730 aa, Zea mays
  Coding DNA Sequence Number=SeqID_21722
  Gene Ontology: Mol. function=transferase activity
  Homolog annotation: Hit_ID=Q9AUK5; Match level="QueryCoverage=93%, HitCoverage=92%, E-value=0.0, Identity=77%"; Hit description =Putative exostoses
  Pfam annotation: Domain name=EXTL2; Domain location=485-721; Score =398.1; E_value=1.3e-116; Accession=PF09258.1; Description=EXTL2, alpha-1,4-N-acetylhexosaminyltra
MEHRRRQPPAPSAPTYLAATLAFLTLAAVAYFRAAFPRFPHPPATRGCRHDAEGSWSAGVFLGDSPFSLKPVEHWRISSGPGAAWPVANPVVTCADVAEAGFPSSFVANPFLFIQGDSIYMFFETKNPIASQGDIAAAVSKDAGTTWQQLGVVLDEEWHLSYPYVFSYGNETYMMPESSKKGNLKLYRAVDFPLKWELEKVLLERPLVDSVIIHSKGSYWLIGSDLSSYGAKQTGELFIWYSSSPLGPWSSHKQNPIRNTGNRPSARNGGRPFIYNDNLYRVGKDRGGGSGYTIQVFKVQVLTEDHYKEVAVPFVLDKPLKGRNAWNGARSHHFDVQQLPSSQHWIGVMDGDRVLSGDSIHHLTIGCMFYGAACILVLLLGGLIGAIKCTLPLRWYLPHTEKRSDNFDIEKQVLLCHKLSWLICNVNRLGSLIGGKINYRAWKDRVYIAFIILVSVVLTFLGTNYIFGGDGAEEPYPIRGRYSQFTLLTMTYDARFWNLKMFVEHYSKCASVREIVVVWNKGRAPVQGELKSMVPVRIRVENNNTLNNRFKIDKEIKTGAVMELDDDIMMACDDLERGFKVWREHPDRIVGYYPRLAEGWPLEYRNERYARQQGGYNIILTGAAFMDHELAFKRYWSKEAEIGRQIVDSFFNCEDILLNFLFANASSASTVEYVKPAWAIDMSKFSGVAISRNTQEHYHARSKCLAMFSGIFGNLTSKRFFSSRGDGWDV

SEQ ID NO: 63502 - protein, 164 aa, Zea mays
  Coding DNA Sequence Number=SeqID_21723
  Gene Ontology: Mol. function=carboxyl- and carbamoyltransferase activity; Cellular component=ornithine carbamoyltransferase complex; Biological process=amino acid metabolic process
  Homolog annotation: Hit_ID=Q8SA97; Match level="QueryCoverage=99%, HitCoverage=23%, E-value=1e-13, Identity=35%"; Hit description =Ornithine carbamoyltransferase
MAPPVDVAGLRPRLGDVEAPPKPRSSLSSVAEVESEPLVQARRRPSAEARAESEPWGRAERISSSSGGEPKSEPWVGRSGVCRLPGLSPSPSPGSGGAEFVVFRGLARVRALGRAEWSGNVFLSGRSVERRSDGGHFGSVGWGARVRIKLYADGGYQLRIRSLE

SEQ ID NO: 63503 - protein, 118 aa, Zea mays
  Coding DNA Sequence Number=SeqID_21724
MTKSGRHRIDSPSNPSTGDPPASPRGTAAHHVLPDADRGRGQHRRPTQHSALVLSRVLVFTVQIGEVGKRKERRVGFIHEVEAPGRFAGKLRRGLNGVRLRRRRKRSAQCREGTSCSA

SEQ ID NO: 63504 - protein, 98 aa, Zea mays
  Coding DNA Sequence Number=SeqID_21725
MEGPTPRIAILARLLQGKLASSSTEREARGRAQPNRKEGAAEILARMDRGGNCFGAAFVAEPLSPLSGHGVAAVRRGRYSGLVVSRNWWGKRARNVTN

SEQ ID NO: 63505 - protein, 79 aa, Zea mays
  Coding DNA Sequence Number=SeqID_21726
MATLKLSLSWSSSTIAFLIFSIASGSAYVYPDGPVKVIGRAGALTDGPWIYPDSLVVSDSHGFLPPRGHMVALTVRNMP

SEQ ID NO: 63506 - protein, 53 aa, Zea mays
  Coding DNA Sequence Number=SeqID_21727
MAAPTSEQACASLLRFSCCACLRRSMQPPTPCVALNATQPVDVPMLDSFPQVM

SEQ ID NO: 63507 - protein, 299 aa, Zea mays
  Coding DNA Sequence Number=SeqID_21728
MGIINWMQDRFNGKHDKRRPEAINSGSARESCRQDDRAREGKSRNDGGDWPAPQHGLLSIGTLGDDDPPPPRASSQADDVLDFTIEEVKKLQDALNKLLRRAKSKSSSSSSSSRGSGASATDEDRRASHSQLPLDRFLNCPSSLEVDRRVSLIRHDGGGESGEFSPDTQIILSKARDLLVHSNGTAIRKKSFKFLLKKMFVCHGGFAPAPSLKDPVESRMEKCTHIQLFRTMLQKKMNARPSNAAVSSRKYYLDDKPSGRMMTRDGRRRHDGEDDDEKGSDRIKWDKTDTDCKNIFIRC

SEQ ID NO: 63508 - protein, 170 aa, Zea mays
  Coding DNA Sequence Number=SeqID_21729
MEPGYVVAGPRATAKPPQVNRGVQAKRWFHETRPCCSGSGSGSRPALVDAGDLRPAVAHTNWERVLTVTAKRTLFQARCRALRAKKSLSSCHRLESGLWSVEIAASSDTLCWHVNLGAKNYGHSMSTKMDAVQVPCSPGKQSKECPLMATTTTKAARLNQVDDKWEKFLY

SEQ ID NO: 63509 - protein, 58 aa, Zea mays
  Coding DNA Sequence Number=SeqID_21730
  Gene Ontology: Mol. function=RNA polymerase II transcription factor activity; Biological process=regulation of transcription
  Homolog annotation: Hit_ID=Q8GSD5; Match level="QueryCoverage=59%, HitCoverage=30%, E-value=1e-10, Identity=80%"; Hit description =Putative RNA Polymerase II subunit 14.5 kD
  Pfam annotation: Domain name=RNA_POL_M_15KD; Domain location=4-56; Score=39.4; E_value=1.2e-08; Accession=PF02150.7; Description=RNA polymerases M15 Kd subunit
MSTLKFCRECNNMLYPREDKETRTLLYACQTCEHEVDPLFVLRFVHYFPDFVIDSGKP

SEQ ID NO: 63510 - protein, 145 aa, Zea mays
  Coding DNA Sequence Number=SeqID_21731
MGGSLGAPAQRCSGLVAYTSLEGGVLAPWARDSSDRYHYCSIGSDPVRVRGQPRLKARGGQRLAADRDGAADDWTGLIDARCTWAEGDPAVQVQVQMMDGWMLKVETVARACMPSRPVAHTLVSLQSYPTLPYPTLGVTESVANL

SEQ ID NO: 63511 - protein, 968 aa, Zea mays
  Coding DNA Sequence Number=SeqID_21732
  Homolog annotation: Hit_ID=Q8GRM2; Match level="QueryCoverage=99%, HitCoverage=73%, E-value=0.0, Identity=58%"; Hit description=COP1 -interacting protein 7 (CIP7)-like
MEADAPLDLALFQLSPRRQRCELVVCGNGRTEKIASGSVKPFVAHLRAAEEQASAQPPPLAIRLQLERPAPWFSKGTLERFVRFVSTPEVLELANTYDLEMSQLEGARKIYAQGGTGDATSGGAAENVTASAAAAADITKKELLRAIDVRLSSLKQDLAAACSRASSAGFNPISVSELILFANHFGASRLSEACTKFMSLCQRRPDISPQTAQPAVSSHWKVFDDGNVRGSSSSDMSIDEPLVDLSESKNKSTVSGSGSQVHRLSNIQGLESAAAQQPKPTIQQAVDKQEAETDASPAPSKGELSRRLSVKDRINMFESQKKEQTPSSGNSNSAGTGRVVPGKGEHRRVPSGASMEKLVRRWSSVSDMSIDLSNNESSSLNDKKDNGTPAGTPTSTDLEADSKVRANEDSNGQKDSITSHSWPCQKDNVPMDLATTDLCPPSILTLKVKHPFGKEPGVIQGHTRMSNHATSNVSTQDRLKSSAKSVEEALLKNKVIVTSASSEEHVCMIDKEITAVAHEVPVASEQIPQNDIRGLHTKDIHTEAEVTGRKDQPSRSFGRVSGGVNPKPKASSNSRANAKGSSVRDAIASTETEFRDVSLQRNRLPRKSEDVGKKVTAGSDSDCSGRQGKNLSRQSSITDQELNLQARVTRPGKGNQDRHGELQMKANELEKLFAEHKLTSSRRGKPTDVQVESTPMVSEVKPTMVLHETIHTKQVVKESITVNDFDAGELLKMVNNQEFNISTPQKLGILSLEESRGKFYEHYMQKRDAKLKEGWKLQREEKEAMLKAMHDSLERSKAELLTKFSRSADVPDSTYVSHCSQKIPPSRSARKNKDQGVGSFLVEEEMNSDYLSGDGSSRSADSRKHFSNKVASTQNASAGPIHKRSSRTASSGYANRRNPPENPLAQSVPSFSDLRKENTKPSPGVSRVSARVQQKSFARSKSIIEESKSILKEDQSRRSQSMRKNPNS

SEQ ID NO: 63512 - protein, 166 aa, Zea mays
  Coding DNA Sequence Number=SeqID_21733
  Homolog annotation: Hit_ID=Q10JU8; Match level="QueryCoverage=61%, HitCoverage=22%, E-value=3e-29, Identity=53%"; Hit description=Von Willebrand factor type A domain containing protein, expressed
GLLPELCVLEQVKQKLKGHKGRDEQQIYGLKLGFGNKDATRENLITGFGDMNPAEKSVMLQKGSGCCSRVADCLCCMCCIKACNRMNDQCAVLMAQICAALACLGCYECCAEDPLNLEDVDLEGVEDVLVLNSTGPASLSRFLPNGRTRRMIEKPVYGLVQVPAFP

SEQ ID NO: 63513 - protein, 207 aa, Zea mays
  Coding DNA Sequence Number=SeqID_21734
  Gene Ontology: Mol. function=receptor activity; Cellular component =integral to membrane
  Homolog annotation: Hit_ID=Q8H399; Match level="QueryCoverage=81%, HitCoverage=32%, E-value=1e-32, Identity=42%"; Hit description =Putative membrane protein PTM1
  Pfam annotation: Domain name=Lung_7-TM_R; Domain location=4-156; Score=-150.5; E_value=0.055; Accession=PF06814.3; Description=Lung seven transmembrane receptor
MAVVTQTRLSRVLATSRAPGVAGLGAAFFAVTEALEVNENVGTVSDHSPSPMRSLFPVLPVAVLNAVFVYWIFSSLSKTLNKLKVRINTVLAFHFGFLFLQYEKATFDVCSRKRMTTKLEMYRRLNNALIIAVAMSLVWITFESAARYAYLDDEDRDMEDTRPLIRPGPLSYVDNRAISVSKDTTTIILRTDSRVYAKAADDGGKWV

SEQ ID NO: 63514 - protein, 149 aa, Zea mays
  Coding DNA Sequence Number=SeqID_21735
  Homolog annotation: Hit_ID=Q10R48; Match level="QueryCoverage=43%, HitCoverage=16%, E-value=9e-14, Identity=63%"; Hit description=Kelch repeat-containing F-box family protein, putative, expressed
MAEKKVPFGYPREEIQWRRGGPVAQRIRARGYEPQCRGFESLLAHSLLRACLLRPFPVGIAAQSPWTSAAWKICSGIDLLKHLGFLILASMPSRSSITTWSNPMTSIGGPRTYTGGTIELNSWTPDERPPVWNLIARRPSWGTSCITAS

SEQ ID NO: 63515 - protein, 101 aa, Zea mays
  Coding DNA Sequence Number=SeqID_21736
  Subcellular localization annotation: CTP_CleavageSite=87; ConfidenceScore=5.58e-01
MSARPFHHHCWALAAPIVSCSPSPPQPFQLFRPTSRTLGAPVCLASGDGAAVSAGSAAPGYPAKAGKGSRLVGKVCNLCRVLEPGISAELKVKRGLGILID

SEQ ID NO: 63516 - protein, 145 aa, Zea mays
  Coding DNA Sequence Number=SeqID_21737
  Subcellular localization annotation: CTP_CleavageSite=56; ConfidenceScore=5.04e-01
MASWRLQPLLRGTRGGYRGRALLPLLAPSLARRLIPHRIKLSPLRISRSANKLRPPCNSRGSCDCPPATPRESERHTKLGVRRLSLWVLMDSSGKAINQGRGNSSPVSDLPPRPHLTVGSLVAVPIAGKEPTLAFAFVHPLSCTR

SEQ ID NO: 63517 - protein, 161 aa, Zea mays
  Coding DNA Sequence Number=SeqID_21738
MEGLISKFEACDLYEFMGQRTGDNECCDLYGEDMYEEYEQYYGHARLGIAMRFGETPELRHHPADINNIARVTILPRVGIRARLETNFVTSSTVDVVTFMLRQLNDLKMDKNQILAYAPYIMALIKGKTRFEGRCEVAHTFFRPFKNDTAFTHRPMTPFLI

SEQ ID NO: 63518 - protein, 319 aa, Zea mays
  Coding DNA Sequence Number=SeqID_21739
  Gene Ontology: Mol. function=catalytic activity; Biological process =metabolic process
  Homolog annotation: Hit_ID=Q9C8A3; Match level="QueryCoverage=87%, HitCoverage=12%, E-value=6e-53, Identity=41%"; Hit description =Acetyl-CoA synthetase, putative; 45051-31547
MQVQRLRKDEKIKLWLFLPGCHSSVSEIAQPAVNKLRVASNGLWVAPGNSEEVAAALSQALRNSLERSLKGLSYARFGDVFTKYNPPTRNQNSFRRAQPTVEFVFAATEEAIFVHVVISARYVRNLCSDDIEKVLAHSPPSIGEGLPVVVAPSGMLGRLVGCCPSDLVRQVYSSKSLTPNLPGFSQPTVCQLRGQSYYVEVALGFPAASAKKVSEFEHIHIKKELDPVKDAMVGSDGQRKVESPDGLPILERTFIYPPEAVLVPMVHQAFVRFSSKRMCLQGSLGSSSWEAWPFWNFAPSSYFQNRRTVFHYIKKEKKV

SEQ ID NO: 63519 - protein, 1175 aa, Zea mays
  Coding DNA Sequence Number=SeqID_21740
  Gene Ontology: Mol. function=catalytic activity; Biological process =metabolic process
  Homolog annotation: Hit_ID=Q1S8X4; Match level="QueryCoverage=99%, HitCoverage=85%, E-value=1e-173, Identity=46%"; Hit description =Rhodopsin-like GPCR superfamily
TAESHALVIPASDCGDVTFTDSPSTAMDIPEQRLSPVGFTTLDAFDHQIMAPAQDVVAKVQEPHNDTATPAQSHSQVLSSGRFDYLTKAEAKLTFAPEYAAVEILIAEAPTPLFTNPYFPRSKKPGSSSFSARVYSYDVAQSSQIESTGDKPDKTSKLISGNHLHDISSSNLYTLVQGGNKGSDKILKSTDTQPSKGELSPPISGVTSFNFSLVSQKKSGNMFNAGYFLLSMKTALATEIECITFQAAMCRIRHTLLSLRSKASAEFNSATSSFIQTNVSNKSDLTPRYDMRKKEIMTVRLSSDIDHEMFDRSLMDNVGVWRPVVTPKGPKSLESLSANTLTGASPSLSIQRQPVVDLLCAMTLLVQQSTSFVDMSLDMDDGDGSFFWLSLDEQKRRGFSCDPSMVHAGCGGLLGTCHSKDCAGVDLVDPLSAESDIRVALKAAFANMDGPLSVIDWCRGRGNAAESAGTGDAYSFQYSSGDILEPSSSLSIGGDSMSPPQPTSSNRGISELEFQKGYHRVRPTIAVLPSPSMLVGYQDDWLKASVNSLKTWEKAPFEPYALPKPVAKALNSSASVDEASASNVVMLSGFSIPKLVLQIVTIETVLRMDKPNKELAVLKDIAFTVYNKARRIPRAVSTSDMFQSPTYLGRSQSTMMHVTSPAPTLWKECLVPRMSGPTLSRETDFDASMRSATWDNSWQPARSGGLLDPSKLPDLCAQDDRKYAFEPLFILADPGSADLNALMEPSKSGADASGSRVYGSISGSNSDSGVSPLLDVSESDSAASLHCCYGWTEDWRWLVCIWTDARGELLDSLIFPFGGISSRQDTKVLQSLFIQILQQGCQIMSSSPEASNMRPRDVIITRIGGFLELEIQEWQKAIYSYGGNEVKKWPVQLRRSIPEGIPPSSNGPTLQQQQQQDMALIQDRNMPSSPNPLYSPHPKSSFMKVSQDHSLHLTCQADLLSRPASAGEGSQGSSGPWSYLEGFTPVKSIGSMSASHSYLLVPSPSMRYLSPATLQLPTCLTSESPPLAHLLHSKGTAIPLAMGYVVSKAVPPVRRDSAQLTKDEQPSVLSVSIIDHYGGSSGTVQEKMSRGGGGGSKQARNLSQETTGRECEMEMHSVLEAVAAELHSLSWLTVSPVYTERRTALPFHCDMVLRMRRLLHYADKYLSEPKGETTH

SEQ ID NO: 63520 - protein, 260 aa, Zea mays
  Coding DNA Sequence Number=SeqID_21741
  Gene Ontology: Mol. function=RNA-directed DNA polymerase activity; Cellular component=membrane; Biological process=RNA-dependent DNA replication
  Homolog annotation: Hit_ID=Q5VRH2; Match level="QueryCoverage=45%, HitCoverage=11%, E-value=1e-61, Identity=91%"; Hit description =Putative aminoacyl-t-RNA synthetase
  Pfam annotation: Domain name=tRNA-synt_2e; Domain location=1-210; Score=155.3; E_value=1.6e-43; Accession=PF02091.6; Description =Glycyl-tRNA synthetase alpha subunit
MNPLTFLRVLGPEPWNVAYVEPSIRPDDSRYGDNPNRLQRHTQFQVILKPDPGNSQDLFLHSLSAIGINIHEHDIRFVEDNWESPVLGAWGLGWEVWMDGMEITQFTYFQQETKMVVISTRTILAALGSDFCQFSFLPSSGASGGILVAWKRHLGVTGLTRIDRHNISIQFCNEHNRCWASDKNNSNINRAMMGRFRKLVEDLSLKEVPLYGRKYTWSNQQDSPVLVKLDRALCSLEWEDIFPNVLLQSAASEEPPAVWH

SEQ ID NO: 63521 - protein, 466 aa, Zea mays
  Coding DNA Sequence Number=SeqID_21742
  Gene Ontology: Mol. function=arginine-tRNA ligase activity; Cellular component=mitochondrion; Biological process=arginyl-tRNA aminoacylation
  Homolog annotation: Hit_ID=Q5VRH2; Match level="QueryCoverage=92%, HitCoverage=44%, E-value=0.0, Identity=77%"; Hit description =Putative aminoacyl-t-RNA synthetase
  Pfam annotation: Domain name=DALR_1; Domain location=357-450; Score= -16.0; E_value=0.1; Accession=PF05746.5; Description=DALR anticodon binding domain
  Pfam annotation: Domain name=tRNA_synt_2f; Domain location=2-334; Score=128.4; E_value=2e-35; Accession=PF02092.7; Description=Glycyl -tRNA synthetase beta subunit
  Pfam module annotation: Pfam domain module=DALR_1::tRNA_synt_2f; Domain location=357-450::2-334
MNALAEINQGISPCYDSGLCAGLLPRPPYFLLHLERKEKVLHASTVLAQGVGGDFIAPDSLLQEVVNLVEAPVPILGRYDDSFLELPKDVLITVANGAISKEVVRKGNEAVLRARYEDAKFFYKMDTQKKFSEFRGQLSGILFHEKLGTMLDKMTRVENTVAELALILGINERTVPIIKDAAALAMSDLATSIVTEFTSLAGIMARHYALRDSIPEEIAEALFEITLPRSSGDVFPRTDAGIVLAVADRLDSLVGLFGAGCQPSSTNDPFGLRRVSYGLVQILVENKKSFDLRRALTLLAGVQPIAIESDVIDEVDEGINCEIVRSVLMERANCPYLAAQTATEMEAFSRTETFQKIVEAYSRPTRIIRGKEIESALEVDPHVFEKDEEKVLWSAYLEVADKIHPGVDIKTFVDASLILIQPLEDFFNSVFVMAEDERVRNNRLTLLRKIESLPKGIADLSVLPGF

SEQ ID NO: 63522 - protein, 388 aa, Zea mays
  Coding DNA Sequence Number=SeqID_21743
  Gene Ontology: Mol. function=protein kinase activity; Cellular component=cytoplasm; Biological process=protein amino acid phosphorylation
  Homolog annotation: Hit_ID=Q1SS77; Match level="QueryCoverage=86%, HitCoverage=89%, E-value=2e-62, Identity=68%"; Hit description =Protein kinase
  Pfam annotation: Domain name=Pkinase; Domain location=22-345; Score =151.2; E_value=2.8e-42; Accession=PF00069.15; Description=Protein kinase domain
  Pfam annotation: Domain name=Pkinase_Tyr; Domain location=23-343; Score=4.6; E_value=9.4e-13; Accession=PF07714.7; Description=Protein tyrosine kinase
  Pfam module annotation: Pfam domain module=Pkinase::Pkinase_Tyr; Domain location=22-345::23-343
MAVDRVDGEEAFEEVDPTGRFGRYADVLGLGSVKKVYRGFDQEEGIEVAWNRVRLRSLADRDPGMVERLHAEVRLLRSLSHDHIIGFHKVWLDRDAGVLNFITEVCTSGSLREYRHRHRHVSVKALKKWARQILEGLNHLHTHDPCIIHRDLNCSNVFINGNNGQLSYHNSSKQGAVGARDSARAACLPALFCVENAASVGCCFPSIHTRTIDACSTRAAKSKPCARRQVKIGDLGLAAIVDKTHVAHTILGTPEFMAPELYTETYTESVDIYSYGMCVLEMVTREVPYAECGSVVQIFHNVTRGVPPAALKRLKDAELRGFIERCIGQPRNRPSAADLLQDPFFNGVRGGDDDDDAAALADASSVVAAAPVPRPRSYVDDLAGLRLD

SEQ ID NO: 63523 - protein, 509 aa, Zea mays
  Coding DNA Sequence Number=SeqID_21744
  Homolog annotation: Hit_ID=Q9FK64; Match level="QueryCoverage=46%, HitCoverage=55%, E-value=3e-39, Identity=40%"; Hit description =Tyrosine-specific protein phosphatase-like protein
  Pfam annotation: Domain name=DUF860; Domain location=146-474; Score =444.8; E_value=1.1e-130; Accession=PF05898.4; Description=Plant specific of unknown function (DUF860)
DVISSILCDPAGKLGEHHLDPRELGHHLPGVGPIVLVWPHAPERQLHHCLDAGHHGGALAQHRRVDVPPLPAHVHGPQPRDKLQHHDATAARNWGKGTVPPFQVPAARVPAGAGRAEPPTGVPMPLPLRVPARLLFARHKTTAAQHVAARHLDHAFERLAAAHLPLVAASPLVDALRASPEPLALPNLARRLPLRLHRRGPLHFLRLFPRVFDLRAPLPLSLSLTPAAAGLLAVASSPADAARTLHRLLAMSVTRSLPLRAVFRVWRELALPDDFEDSVVEGHPHLFRLVSNPAEPNTHILHLVADQATEDFTPAVEKARPDRYAFKLQFPPGFRLAKEYRKKVKEWQLLPYTGPYQVVSPSAGGSKRVSKLARRKMEKRAVGIAHEFLSLTVEKMVEVEKFSQFRKWFGIEVNVRDVFLDHPGIFYLSAKGKRHTVFLREMYDRGKLLESNDVSEARAKLVELMLLRRRGLGNANSSANMASGATADARESGDDFVDHEDCLLDVSEK

SEQ ID NO: 63524 - protein, 146 aa, Zea mays
  Coding DNA Sequence Number=SeqID_21745
  Homolog annotation: Hit_ID=Q337D0; Match level="QueryCoverage=92%, HitCoverage=95%, E-value=3e-71, Identity=92%"; Hit description =Expressed protein
MEVFGKSVIAEPSNVIFLSAILNTEGSNPSHKCDKRCQNENIFGNMYRCKLTGTTHICDKNCNQRILYDNHNSLCRVSGQFFPLSPLEQQAVRGIRRKHEVDSNEGCSFKRRRGAQLHPSPFERSYSAVSPIPSQVNISGSIFIVG

SEQ ID NO: 63525 - protein, 427 aa, Zea mays
  Coding DNA Sequence Number=SeqID_21746
  Pfam annotation: Domain name=CBFB_NFYA; Domain location=140-186; Score=22.1; E_value=0.002; Accession=PF02045.6; Description=CCAAT -binding transcription factor (CBF-BNF-YA) subunit B
  Subcellular localization annotation: CTP_CleavageSite=52; ConfidenceScore=5.40e-01
MGHFTKSENRRKIHLPSSVLTFVHRLLPPPRRFPVSVFAHRPLGQEFALRFPANARARAFCYRLAVSGGDGGRCQVDKEEWRMRLGVEPDSEREGNTTKASECSTPAILNMSDDNGPSEMGVGQPMVVGRKLLPPIVPGGEPIFVCEKQYAAILRLRERRLRAKEARERRLLQAKKNRPRGPNGRFVMIKDNQEEPNGGSMVECNPAPGDSHQHLITTSGYQQVTTGGSEAQSSIPLGFYWYVFTTSEGGQSSTPAGMGFYYPFNTTNGGENVGGVASGSEVPSSNAPSGFFWPLIMASSEENNGEVTYGSMVPISNPAGYFCWPVAVTNEHGEDTGESADGGEAPISNPAGDFCSWPVVATNDDEENVGEVAYNSVLNLESPDHTDLLRIMMGNRYSTDEASEQFQNVARLQAPGFTALLTVMNNA

SEQ ID NO: 63526 - protein, 227 aa, Zea mays
  Coding DNA Sequence Number=SeqID_21747
  Homolog annotation: Hit_ID=Q2QM38; Match level="QueryCoverage=25%, HitCoverage=18%, E-value=8e-15, Identity=70%"; Hit description=CCAAT- binding transcription factor subunit B family protein, expressed
MMSFRSSSHEGFGFGHAAAAASGAPLPWWAGPAPMLSGEPLALSPEAHCRDGRIQAPQGPPVPSVKAPVLAPQQPPPLPERGIPELLNLSVDPQGQELRIRFCLCLLARRLGQARGGHGMVASIMPNTVFMVPSIYGTEYMGGYSLDMLNPQTKTSCSYTLTTPTPTQKNGKGKKGSDHSATIALQSPFAIYNAHFELGLGQSMISADNSYADQHYGLLSPYPVGAT

SEQ ID NO: 63527 - protein, 254 aa, Zea mays
  Coding DNA Sequence Number=SeqID_21748
  Gene Ontology: Mol. function=cholestenol delta-isomerase activity; Cellular component=endoplasmic reticulum; Biological process=sterol metabolic process
  Homolog annotation: Hit_ID=Q2TU57; Match level="QueryCoverage=86%, HitCoverage=100%, E-value=1e-126, Identity=98%"; Hit description =Sterol-8,7-isomerase
  Pfam annotation: Domain name=EBP; Domain location=23-219; Score =361.6; E_value=1.3e-105; Accession=PF05241.2; Description=Emopamil binding protein
MAAAASMGHPYAPAELDLPGFVPLKLSQVEILVSYLGASVFVFLAVWLVSGRCVRLSKTDRLLMCWWAFTGLTHIMIEGPFVFTPDFFKKENPNFFDEVWKEYSKGDSRYVARDTATVTVEGITAVLEGPASLLAVYAIASRKSFSHILQFAVCLGQLYGCLVYFITAYLDGFNFWVGPFYFWAYFIGANSFWIWIPMLIAIRSWKKTCAAFQAEKVTKRKTTIRGSMGEQSEDENLRKISPLTFLQKGSVHIG

SEQ ID NO: 63528 - protein, 288 aa, Zea mays
  Coding DNA Sequence Number=SeqID_21749
  Gene Ontology: Cellular component=chloroplast
  Homolog annotation: Hit_ID=Q9SW33; Match level="QueryCoverage=68%, HitCoverage=66%, E-value=9e-37, Identity=46%"; Hit description =Thylakoid lumenal 17.9 kDa protein, chloroplast precursor
  Subcellular localization annotation: CTP_CleavageSite=55; ConfidenceScore=5.70e-01
MPLATTAPTPAPPCPPPSPAAAPVRTQLLSSVAKLALTAALVCGSGGPAAVVVVPAAAQAVPFVRPPPPPLQGRPFASSTPYAQSQKLQLGLDKLGKIRPCPSTNPGCVSTNPLGSSGSFASPLLIPESSAGEKTVAKRNSSSSPFQIKHSVNRVMLCFCVSQLISCYFVVAGGVRTCCKSLRQAIEKTQRNVEFKVDEDTPYGHYIEAEMDGGVGRDVMEFLVKKDAGVVAYRCMATKVTFVYPFTTAVGDSKGQKQRIAAISQELGWYAPDIQSSMDSVDDVNYVP

SEQ ID NO: 63529 - protein, 190 aa, Zea mays
  Coding DNA Sequence Number=SeqID_21750
DSVVSLDDQLLDDDIQMICRPDSRAVDRYLSVEEMSGCIMLTESASNKAGISRPRGAHSMEKGSLSPKKPSPKKGILKRNTRGCKGICMCLDCCTFRLHADRAFEFSRKQMKEADDIITNLLKEVASLRSLLEKPAGQSPTREADGSAHACADQGGHTHDRIEGVLADLVRNATVATDPAMKTTIRPKKQ

SEQ ID NO: 63530 - protein, 62 aa, Zea mays
  Coding DNA Sequence Number=SeqID_21751
MPDSKDLNDVSPDSDTILVNLSATEHEELEYYMKKWDEEVHRQQAQKLAAPKKNWRRRIESN

SEQ ID NO: 63531 - protein, 398 aa, Zea mays
  Coding DNA Sequence Number=SeqID_21752
  Gene Ontology: Mol. function=DNA binding; Cellular component=nucleus; Biological process=regulation of transcription
  Homolog annotation: Hit_ID=Q8H7M1; Match level="QueryCoverage=47%, HitCoverage=46%, E-value=4e-66, Identity=64%"; Hit description =Putative NAM (No apical meristem) protein
  Pfam annotation: Domain name=NAM; Domain location=27-163; Score =299.3; E_value=7e-87; Accession=PF02365.6; Description=No apical meristem (NAM) protein
MMTVDLGLQAAPPPSSSGGVPSSCTALPPGFRFHPTDEELIVHYLRKRAAAAPCPAPVIAEVDIYKFDPWDLPAKAVFGEAEWYFFSPRDRKYPNGVRPNRAAGSGYWKATGTDKPITLSSSSSSSAAAAAGMIGVKKALVFYRGRPPKGVKTSWIMHEYRLAEALHAVVNAYRPTRFKNNASSSMRLDDWVLCRIYKKTTPQLAYSMSPPPHEEVEASSTSFMDGGGGFDLSRLHPADDSASVSADDDIMALAAAAATSYYAARPLPRPASISDYLLDYSAVSELFEATPLTETTAQPGTATDAAGGFYYDFGNGGGEPAAAASVVAQQHQLSPLKRRSSVDEDNCNGGITDMLHASSSSSSKRVMGDHHSSSSSMAANSSVFEPGQTSSHQLHDRI

SEQ ID NO: 63532 - protein, 138 aa, Zea mays
  Coding DNA Sequence Number=SeqID_21753
MSLLCFLLDLRNIPPPLLHRLKECLLDLANLYAATTSQTHAVTASPAAAGTLPDRLALGYVYDPSSKPSSSCSSSCPEVLLLTSCAAFHAPMAKPVYHLVFARNEDQFVTAIIQMIVDVDIWDYLNHFYVTFSSQRCR

SEQ ID NO: 63533 - protein, 166 aa, Zea mays
  Coding DNA Sequence Number=SeqID_21754
MNHRGSENIGGVAAQRLNGGLGWFDQASATASEHRTEHGKRRGGRALDFTPCDKLDEEESRARLTPGGRRGSTASFGVKYLELPFMVPKYFCRIRTCLGAEPYMFDSNPVNEKGMLISDKVAANKELKGMMKAVKVDEIDAFEFFLCNYLRLFSKGRLGSMATSNN

SEQ ID NO: 63534 - protein, 146 aa, Zea mays
  Coding DNA Sequence Number=SeqID_21755
  Subcellular localization annotation: CTP_CleavageSite=49; ConfidenceScore=5.13e-01
MWWDRLHADPCAAVASNPPPIVCAWPSDLTSATTASSRGAGAWPPLRVVGGAREQHRLRPAVVFGHGSAWRHTQLQRAEDAARCVDIVASRLRTGRPQFNSDTTWASTLFSLLTPKAEQYIAASANCLNAITSTNENRDKQKEGSK

SEQ ID NO: 63535 - protein, 119 aa, Zea mays
  Coding DNA Sequence Number=SeqID_21756
MAEPGLEDSQPVDLSSTPPHRPHAPVFKDLLYHSIGGGYWNLMAESYAVLVLPRDGHPDPPRLTSPFSFLGLALYLQQREGSEVLCIHTKNMKLAEDVNLELEITLINTGRYKAIDNYS

SEQ ID NO: 63536 - protein, 105 aa, Zea mays
  Coding DNA Sequence Number=SeqID_21757
MGQASERISRSGDDWQVGWRDEWSCTLLEPHDLIQPRPHNWRRHGMETVVRVWSTRSRDDDDPVAACGEGWWKRCGDAEEARAATDGEGTKAHAAAEKRRTRRSW

SEQ ID NO: 63537 - protein, 122 aa, Zea mays
  Coding DNA Sequence Number=SeqID_21758
MASPTLIEGGDTPFHTNSITQEGFPLILWEMATHPIHLFPAEKEDDLIWRDHVDHAKDVWEIYPGATARLTVQCMSALYRMQALQREAMSHLLGLAQDVKVTIIDREDLVVDLSIELVEKDL

SEQ ID NO: 63538 - protein, 84 aa, Zea mays
  Coding DNA Sequence Number=SeqID_21759
MTWSDPLLRGLVCFEDEAFGRGGAVDQGFGSLAVIVVFPSALWCLSWGVELLVTCIELGNDDSRWTLVLPPDEVAHLMLSCRRR

SEQ ID NO: 63539 - protein, 216 aa, Zea mays
  Coding DNA Sequence Number=SeqID_21760
  Homolog annotation: Hit_ID=Q7XEZ1; Match level="QueryCoverage=98%, HitCoverage=98%, E-value=2e-11, Identity=30%"; Hit description=ZIM motif family protein, expressed
  Pfam annotation: Domain name=Zim; Domain location=84-119; Score=59.6; E_value=1e-14; Accession=PF06200.4; Description=ZIM motif
  Subcellular localization annotation: CTP_CleavageSite=54; ConfidenceScore=5.09e-01
MAASGNNRFSLTCARLRKFMMEQNRKVRMDDLVGSSSFQRPLQLTPVPVATGPAAAAAWETGTSRTTLPLFPVRTAGTAEITRPEEGKATLTIFYQGQVSTFHHFPADRAKVLMQMASSVTGNTPEKGVAVATAVPKKAQTSDDQPSPAGAGMPPIARKLTLQNFLRKRKNRIAGTDDADRNEDASPWKKRDSAAGAGGTPAGDVPDDASWLALRL

SEQ ID NO: 63540 - protein, 94 aa, Zea mays
  Coding DNA Sequence Number=SeqID_21761
MLKFVDRCLSPIATVPSTREPIIGTLPTHDDHKSKGVRQQHATKAPMEPILGTCLDRASPASTYVCLNLLSWLFAGTQTLSPLAPTAAKDESGW

SEQ ID NO: 63541 - protein, 214 aa, Zea mays
  Coding DNA Sequence Number=SeqID_21762
  Homolog annotation: Hit_ID=Q7XEY9; Match level="QueryCoverage=94%, HitCoverage=92%, E-value=4e-65, Identity=58%"; Hit description=SPX domain containing protein, expressed
  Pfam annotation: Domain name=SPX; Domain location=1-116; Score=20.3; E_value=1.2e-07; Accession=PF03105.10; Description=SPX domain
MKFGKRLKKQVEESLPDWRDKFLAYKRLKRLVRLVPASSPSRRGGRAADAAFLRLLHAEVDRFNAFFLEREEDFVIRHRARARPDVPPIIRLAKILKKYDKRTGRLLRLPFIGKVLRQPFFATELISRLVRDCEATMEAVFEASTGHARSSAGTAPVASARQGIFRNTVAALVTMGELRSGSSTYGHFSLPPMAPPESDLLRRVCVQVAGQVSI

SEQ ID NO: 63542 - protein, 369 aa, Zea mays
  Coding DNA Sequence Number=SeqID_21763
  Gene Ontology: Mol. function=oxidoreductase activity; Biological process=electron transport
  Homolog annotation: Hit_ID=Q9SZ83; Match level="QueryCoverage=95%, HitCoverage=97%, E-value=1e-100, Identity=50%"; Hit description =Probable oxidoreductase At4g09670
  Pfam annotation: Domain name=GFO_IDH_MocA; Domain location=14-137; Score=126.8; E_value=5.9e-35; Accession=PF01408.12; Description =Oxidoreductase family, NAD-binding Rossmann fold
  Pfam annotation: Domain name=GFO_IDH_MocA_C; Domain location=149-262; Score=31.5; E_value=3e-06; Accession=PF02894.8; Description =Oxidoreductase family, C-terminal alphabeta domain
  Pfam annotation: Domain name=Semialdhyde_dh; Domain location=15-125; Score=-14.9; E_value=0.011; Accession=PF01118.15; Description =Semialdehyde dehydrogenase, NAD binding domain
  Pfam module annotation: Pfam domain module=GFO_IDH_MocA::GFO_IDH_MocA_ C::Semialdhyde_dh; Domain location=14-137::149-262::15-125
  Subcellular localization annotation: CTP_CleavageSite=30; ConfidenceScore=5.01e-01
MSSAAVPDQSPRPVRFGILGCAAIARKLARAMLLAPGAAVAAVGSRSEVKARLFAADNGLDVATTRLHGSYDALLDDPDIDAVYMPLPTSLHVRWATAAAARGKHVLLEKPTALCAADLDTILAACDTAGVQFMDSTMWMHHPRTAKMRETVDNKDAIGDIRTINSVFSFRANEDFLQNDIRVKPGLDALGALGDAGWYCIRAILWAVDYELPKTVIALRDPVKNQAGVLLACGATLYWSDGKTATFSCSFLTNLTMDITLVGTNGTVYVTDFVIPYEEKSAEFPVASKSNFAELHVGWDPLPSKHVVATDLPQEALMVQEFARLVQNIRDAGGKPEGKWPAITRKTQLVLDAVKASIDKGSAPVEVAS

SEQ ID NO: 63543 - protein, 241 aa, Zea mays
  Coding DNA Sequence Number=SeqID_21764
MTCLGQSCGPQGVWLVPGRRLAIYRRATGIPRMTAIAAKSTREPPYTDHSPTALAPFGLPWSRPSSASDSHSIERRRRPRRCSTLFSDLSNGGEVFSMVWGMRAWPSGPIPTYICKGKGYQVNDIQRIAAKVAWMRRYSVTLARGVRGGGGLRQVAPPVIDERRVPGRLRSGPGVGGMAMWAPPSSDPRAIDFNGPQVGALALVWAARFAEDEAFMASEIGKVDEGSECGPLYRFYTEEWV

SEQ ID NO: 63544 - protein, 95 aa, Zea mays
  Coding DNA Sequence Number=SeqID_21765
  Subcellular localization annotation: CTP_CleavageSite=24; ConfidenceScore=5.08e-01
MAMGAALRHLYTVTISNNRRGIVTAPTNPNNPPGGIGMLQRMRAWFREAFGEETTIKWGPRVSDFGVHAVVVRLTGQAPPGSGMGVSRLLQQRDN

SEQ ID NO: 63545 - protein, 192 aa, Zea mays
  Coding DNA Sequence Number=SeqID_21766
  Subcellular localization annotation: CTP_CleavageSite=37; ConfidenceScore=5.17e-01
MSGAPEDTNSNSSPSGNSRGNSAIIHRTVRCTPDSVRCSKEERPQELASFGKLQRLLRYNSPDMSGVHRTVRCNCGATATSAPTATCGAFIARQRAQKSGTPMLAHRTLYSTCPVRHRTSRRAQKSELQRFALFTPPSRRLSPSNYYARRILPLPPSPTPNARLSLHVWNSQVQVDPVPYQGMCLVAKSQPQ

SEQ ID NO: 63546 - protein, 404 aa, Zea mays
  Coding DNA Sequence Number=SeqID_21767
  Gene Ontology: Mol. function=nucleic acid binding; Cellular component= intracellular; Biological process=chromatin modification
  Homolog annotation: Hit_ID=Q8H5B0; Match level="QueryCoverage=93%, HitCoverage=97%, E-value=4e-56, Identity=38%"; Hit description=ZPT4 -4 (Zinc-finger protein)-like protein
  Pfam annotation: Domain name=zf-C2H2; Domain location=268-290; Score =20.0; E_value=0.0086; Accession=PF00096.16; Description=Zinc finger, C2H2 type
  Pfam annotation: Domain name=zf-C2H2; Domain location=33-55; Score =18.9; E_value=0.018; Accession=PF00096.16; Description=Zinc finger, C2H2 type
  Pfam module annotation: Pfam domain module=zf-C2H2::zf-C2H2; Domain location=268-290::33-55
MATRSVFLIPRSSISFTASRLLMDVVELDAARHGCKVCGKSFLSGRSLGGHMRSHISLGEAALEVHAADELTPVSSNGGRGCDGLVAYGLRENPRKTRRLSDFADEKDVGHGVECGKSWKSLFGHIRNHASGDRYHDVDDDEDVEEDEFSVEEGEAEEAEMVKPTEAPVAALTVLSASPRRRRRSMRVAAPPPRVLSGLEKETEDVALCLLMLSRDTGMCSSPAKNETLESAKKIKIKIKGGVAKNRKRASRKNQHDPVPVAPKRTRYECPGCRKLFSSYQALGGHRASHKRMNASCSSPKNKITPAASSAPPEPSTETYTSFNTMSPSASPDSVAIGFGKPKDDEAVPDAELEHKRSHLMSCESNGVDLYYVAGAGADHQEQHSAVADGLLDLNFPPAAAEET

SEQ ID NO: 63547 - protein, 560 aa, Zea mays
  Coding DNA Sequence Number=SeqID_21768
  Gene Ontology: Mol. function=transketolase activity; Cellular component=chloroplast thylakoid membrane; Biological process=pentose- phosphate shunt, oxidative branch
  Homolog annotation: Hit_ID=Q43848; Match level="QueryCoverage=86%, HitCoverage=85%, E-value=1e-167, Identity=77%"; Hit description =Transketolase, chloroplast precursor
  Pfam annotation: Domain name=Transket_pyr; Domain location=249-423; Score=224.3; E_value=2.7e-64; Accession=PF02779.14; Description =Transketolase, pyrimidine binding dom
  Pfam annotation: Domain name=Transketolase_C; Domain location=436 -553; Score=29.0; E_value=1.6e-05; Accession=PF02780.10; Description =Transketolase, C-terminal domain
  Pfam annotation: Domain name=Transketolase_N; Domain location=44-234; Score=104.4; E_value=3.3e-28; Accession=PF00456.11; Description =Transketolase, thiamine diphosphate b
  Pfam module annotation: Pfam domain module=Transket_pyr::Transketolase _C::Transketolase_N; Domain location=249-423::436-553::44-234
  Subcellular localization annotation: CTP_CleavageSite=63; ConfidenceScore=5.55e-01
MVTPASTAPASTASAAAATGSGRGRTPPPPLSRPLPPSFGCGAQDRHAADHRAPRKNPAGGARAGGAVGLPMGCAPLGHVLFDEFLRFNPKNPAWFDRDRFVLSAGHGCMIQYALLHLAGYNGVKMDDLKTFRQWRSRTPGHPENFETPGVEVTTGPLGQGFANAVGLALAEKHLASRFNKTDMKVVDHYTHWSRHIDEGASLEAEWNARFVEYEKKYNQEAAELKSIISGELASGWENALRNYTPEMSPDATRNLSQQCLNALAKVIPGFLGGSSDLATSNMTLLKKFGDFQRDTPEERNIRFGVREHAMGAISNGIAVHSPGLIPYCATFFVFTDYMRASIRLSALSESGVIFVMTHDSVGLGEDGPTHQPVEHLFSLRAMPNILMLRPADGNETSGAYKIAVLNRKRPSVIALSRQKLPQLRGTSVDAVSKGGYIVSDDSSGNKPDFILIGTGSELEIAENAAGELRKKGRTVRVVSLVCWELFEEQPEEYKESVLPSEVTSRISIEAGVTFGWEKYIGQKGKAIGIDRFGASAPAGKIYKELGLTVEHVIAAAEAL

SEQ ID NO: 63548 - protein, 67 aa, Zea mays
  Coding DNA Sequence Number=SeqID_21769
MVKPISLSAIYKTLPTKEKRVSNVRENIEAGIDAGTGHDAEVFLLMGPSATKQTPNSSPFTVLDRFS

SEQ ID NO: 63549 - protein, 40 aa, Zea mays
  Coding DNA Sequence Number=SeqID_21770
MGLRGVATRVRLLVRLLAALGHAGATVAGASRWGWVSGSR

SEQ ID NO: 63550 - protein, 69 aa, Zea mays
  Coding DNA Sequence Number=SeqID_21771
  Gene Ontology: Mol. function=oxidoreductase activity; Biological process=aromatic compound metabolic process
  Homolog annotation: Hit_ID=Q2QPZ6; Match level="QueryCoverage=69%, HitCoverage=10%, E-value=6e-13, Identity=73%"; Hit description =Expressed protein
SRVAEGDTRRLHVRALRVPSQVVPAIQRFTENGVEFVDGHQEDFDAVIFATGYKSNVPSWLKASKCTSQ

SEQ ID NO: 63551 - protein, 259 aa, Zea mays
  Coding DNA Sequence Number=SeqID_21772
  Gene Ontology: Mol. function=oxidoreductase activity; Cellular component=membrane; Biological process=fatty acid metabolic process
  Homolog annotation: Hit_ID=UPI000069ED76; Match level="QueryCoverage =73%, HitCoverage=98%, E-value=1e-12, Identity=32%"; Hit description =UPI000069ED76 related cluster
NYADGIAVAAIAIVAAAIIVVVTIAFAVIAFAGAVPAALTVVVTAALAVVVAATTVSLATVAIIVESEDAISYAACAAPTAVPLGRVRLTAAKSGLRRHWKLRFARPQGSDLGSALEDGELHSARPQGSDLGSAPEDDELRSARPQGSDSGSAPEDGELRSARPQGSDLGSAPEDGELCSARPQGSDSGSAPEDGELRSARPRGSDLGSAPEDDELRSARPQGSDLGSAPEDDELRFARPQGSDLGSAPKDDKLRFARP

SEQ ID NO: 63552 - protein, 62 aa, Zea mays
  Coding DNA Sequence Number=SeqID_21773
MEAKTTMVVDSDGGGQQADDPLLQADADNELSTVTVVECEDGDGVGTLRRRLSGRDNGVRYN

SEQ ID NO: 63553 - protein, 256 aa, Zea mays
  Coding DNA Sequence Number=SeqID_21774
  Gene Ontology: Mol. function=oxidoreductase activity; Cellular component=microsome; Biological process=aromatic compound metabolic process
  Homolog annotation: Hit_ID=Q2QPZ6; Match level="QueryCoverage=73%, HitCoverage=41%, E-value=2e-69, Identity=70%"; Hit description =Expressed protein
MPTSREEGQAEPDEHHPTILHRGGGGDAAGGSGGRPRQVWVPGPVIVGAGPSGLATAACLKARGVPSLMLEKDSCVAASWRHRTYERLRLHLPRCFCELPLAPFPPGTPPYPTRDQFIAYLDDYARVFGIQPHLNARVHRAAYDAAIGFWRVTVKEDSGGDGATAANTEFLSRWLVVATGENAEPAWPEGVEGMDTYRGVAMHTSSYKKGDEFRGKNVLVVGCGQLRHGGQPRPLQQWRQSLHGCQGQGECPLHVR

SEQ ID NO: 63554 - protein, 154 aa, Zea mays
  Coding DNA Sequence Number=SeqID_21775
MNFIDVVYAASMGEEGETEAMNSNNVEGERTARGQLETWSGGCRVGRSVFGWSGVAAGVGFLARWRLGSRVSVDIGSCRRRAGSRGGRSAGLSAWAARLLLLARSRHRGWACDRVGCRGRARRLRIGRGRGCSGKGEAATHRSRQGMLGGVLAG

SEQ ID NO: 63555 - protein, 124 aa, Zea mays
  Coding DNA Sequence Number=SeqID_21776
  Subcellular localization annotation: CTP_CleavageSite=57; ConfidenceScore=5.11e-01
MAERVHGGCDAGAILAHMNRLTVPGDKASAALASSSFLRCHSTPILASSRAAQRKLAAAMVSRLCHWCSHDSRPGSSCKVAGVRACPGLELLALGSPVIAHWCFTTATGSAAHRGHVCAIHNRW

SEQ ID NO: 63556 - protein, 318 aa, Zea mays
  Coding DNA Sequence Number=SeqID_21777
  Gene Ontology: Mol. function=isomerase activity; Cellular component =endoplasmic reticulum; Biological process=cell redox homeostasis
  Homolog annotation: Hit_ID=Q5EUD8; Match level="QueryCoverage=94%, HitCoverage=49%, E-value=1e-147, Identity=89%"; Hit description =Protein disulfide isomerase
  Pfam annotation: Domain name=Thioredoxin; Domain location=248-318; Score=21.7; E_value=2.8e-06; Accession=PF00085.10; Description =Thioredoxin
MEPRHRDLEEGEALRSIAGAHSDELAAASRLEDSINFYQTSIPDVAKLFHIDPAAKRPSIVLLKKEEEKLTFYDGKFKASAIADFVSANKLPLVTTLTQETSPSIFGNAIKKQARDVAYSRISFLHSKGVFECTRANSSQILLFAVASESSKFLSIFKEAAKPFKGKLLFVFVERDNDEVGEPVANYFGLTGQETTVLAYTGNEDARKFFLDGEVSLEAIKDFAEGFLEDKLTPFYKSEPVPESNDGDVKIVVGKSLDVIVLDESKDVLLEIYAPWCGHCQSLEPTYNKLAKHLSGVDSLVIAKMDGTTNEHPRAKDL

SEQ ID NO: 63557 - protein, 108 aa, Zea mays
  Coding DNA Sequence Number=SeqID_21778
MDYFKISVSKSFTIFKKREKKTSHSHVIFPERMKDFLMNPIKFRFGSMDARLQLCARQLGDFWKLGVRIDVIESSPEDRGAAHPQDWQSLHLLEKVLHNPKILFGYMG

SEQ ID NO: 63558 - protein, 382 aa, Zea mays
  Coding DNA Sequence Number=SeqID_21779
  Gene Ontology: Mol. function=protein binding; Cellular component =nucleus; Biological process=ubiquitin cycle
  Homolog annotation: Hit_ID=Q84QP9; Match level="QueryCoverage=87%, HitCoverage=96%, E-value=2e-56, Identity=40%"; Hit description =Putative speckle-type POZ protein
  Pfam annotation: Domain name=BTB; Domain location=164-286; Score =91.1; E_value=3.3e-24; Accession=PF00651.21; Description=BTBPOZ domain
  Pfam annotation: Domain name=MATH; Domain location=18-145; Score= -1.1; E_value=0.09; Accession=PF00917.16; Description=MATH domain
  Pfam module annotation: Pfam domain module=BTB::MATH; Domain location= 164-286::18-145
MSDSTFNSCFTHQFKLNYEDTEKVAIGYSVSSEDILAGGHLWRIVCYPRGDRHEKENKKGECLSMFLRHESESKDAKAIFEAFVMDKEGTVSSSHHSRLVRVFAPKGSGGGIGSLGWRSFVKRSVLESRYVTNDGWFVIVGAVKVVQEEDPLDLPPSNNIGSHLGLLLYSAAGSDVTFVVDGERFAAHRAVLAARSPVFKAQLFGSMAEATMTTSIPLHGTSAATFRAMLRFMYTDACPEEADDSDSDSDSDSSPGEMFHDLLAAADRFDLDRLKLLCARKLWNNVCEDTVADTLICAETYNCPQLKRKCLGFFGEGKDFKTKAVLTDGFARLALEFPWILDELREKSRCRRFMCTDAIPGGAELGGLSYRDVEEHLLVAAD

SEQ ID NO: 63559 - protein, 177 aa, Zea mays
  Coding DNA Sequence Number=SeqID_21780
MDGSRYLNPIGPQFLIWAVRRASNGARIPLPQPCRTVAHPPNRDGAIAGDPILHIPELIPRATRCKLKRTQWGCFHGALPAATRHGVSRPQVWRIHGGIQRRRATPESMLVKFGHEAILHRSRNMTKLRDGNYQRTRRESLGAGRVANDGEVGQSASDSPDCRWSPSNWIVSQPPRE

SEQ ID NO: 63560 - protein, 34 aa, Zea mays
  Coding DNA Sequence Number=SeqID_21781
MARHWWTWAAACQSSGHVSLLAGLEVIRALVREL

SEQ ID NO: 63561 - protein, 80 aa, Zea mays
  Coding DNA Sequence Number=SeqID_21782
MAGWLAGAGEWARSVGMTMRRRSQQAWSRALRTRGRDGGRDGGRGGQRDDGGSDGRPTTGARLGKTGDRDIAWARGKGGA

SEQ ID NO: 63562 - protein, 294 aa, Zea mays
  Coding DNA Sequence Number=SeqID_21783
  Gene Ontology: Mol. function=homocysteine S-methyltransferase activity; Cellular component=cytoplasm; Biological process =methionine biosynthetic process
  Homolog annotation: Hit_ID=Q9FUM7; Match level="QueryCoverage=99%, HitCoverage=100%, E-value=1e-150, Identity=81%"; Hit description =Homocysteine S-methyltransferase 4
  Pfam annotation: Domain name=S-methyl_trans; Domain location=24-282; Score=223.2; E_value=5.9e-64; Accession=PF02574.6; Description =Homocysteine S-methyltransferase
MWFGGGPIDAAGALRGFVREAGGCAVVDGGLGTELEAHGADLHDALWSAKCLASAPHLIRKATIEGFQSRGFSRDESEELLRRSVHVAQEARRVFAAEGDSGDYGKSMTKEDLKNFHRRRLQVLAGAGPDLIAFETIPNKLEAQVYAELLEENGIRIPAWFSFTSKDGVNAASGDPINECAAVADSCPRVAAVGVNCTAPRFIHGLILSIKKVTSKPIVVYPNSGESYVAETNEWVDSDGATGTDDFVSRVGEWRRAGAALIGGCCRTSPATVRAIARAVREAEYDDIPAVAVL

SEQ ID NO: 63563 - protein, 171 aa, Zea mays
  Coding DNA Sequence Number=SeqID_21784
MTTGQGKEAPGSGAVGRRHIRIGVAAERELGGLQLELATFGNFQGPLRYNSPDCLVFTGHVRCSKEGRPQELASLGFSFQPLRYNSPDCPVCTGLSGASAEQRLLQAPTATCSAFIARQRAQRSGTPMLAHRTLYSTCPVRHRTSRRAQKSELQRSISNGTGDVAGAPDCP

SEQ ID NO: 63564 - protein, 57 aa, Zea mays
  Coding DNA Sequence Number=SeqID_21785
MAMDSPGTHVLHHALMRLHTSIVLWICSTLAPTFWPRKQATSLCGNISHDNYIDINN

SEQ ID NO: 63565 - protein, 76 aa, Zea mays
  Coding DNA Sequence Number=SeqID_21786
  Subcellular localization annotation: CTP_CleavageSite=36; ConfidenceScore=5.51e-01
LKWAASALPSPAPRHRPATPTRRSLPRLPLRRRRRRASAPEEPAAVEEKVEEKVVELEEKVEEAAADKAEVLEAEN

SEQ ID NO: 63566 - protein, 68 aa, Zea mays
  Coding DNA Sequence Number=SeqID_21787
MADELRSTSMVQRVHGQSVLLSSISSYSTMNNHWGIGEGFRGNRCTGWRYRGEKNADVTHDWDIVGEI

SEQ ID NO: 63567 - protein, 528 aa, Zea mays
  Coding DNA Sequence Number=SeqID_21788
  Gene Ontology: Mol. function=hydrolase activity, hydrolyzing O -glycosyl compounds; Cellular component=cellulose and pectin -containing cell wall; Biological process=carbohydrate metabolic process
  Homolog annotation: Hit_ID=Q2MV13; Match level="QueryCoverage=94%, HitCoverage=96%, E-value=1e-171, Identity=58%"; Hit description=Beta- mannosidase 4
  Pfam annotation: Domain name=Glyco_hydro_1; Domain location=34-526; Score=635.0; E_value=6.1e-188; Accession=PF00232.9; Description =Glycosyl hydrolase family 1
MAGRARARRFVLAGALMIAWLLCLLPRATAAAVRRSDFPPSFLFGTATSSYQRMNIEDVAGDSLIDLLMIEGAYLEGNKSLSNWDVFSHVPGRIEDGSTGDVADDHYHRYEDDIELMHSLGTNAYRFSISWARILPRGRFGEVNPAGIAFYNRLIDSLLLKGIEPFVTLSHYDIPQELEDRYGAWLGGAEARRDFGHLADVCFAAFGDRVRHWATFNEPNVAVTRGYMLGTYPPGRCSRSCARGNSDAEPYVAAHNVVLAHAAAVQIYKTKYQSKQKGLIGIVMSTVWFVPLTDAPADRLATERALAFDVPWFLDPIIYGDYPPEMRRLLGSRLPTFSPEERRTLGYGLDFIGINHYTTLYARDCMISPGYCPSGQEFHQSLAAYTGERDGIPIGPPTAMPTFYVVPDGIEKMVTYIMNRYSNLPMFITENGYAQGGDGYTTRAEDWLDDQGRIQYLEGYLAKLAKVISDGADVRGYFIWSLIDNFEWLYGYTLRFGLHYVDYQTQERKPKSSALWYKRFLQSSLEAQ

SEQ ID NO: 63568 - protein, 293 aa, Zea mays
  Coding DNA Sequence Number=SeqID_21789
  Gene Ontology: Mol. function=zinc ion binding; Biological process =defense response to bacterium
  Homolog annotation: Hit_ID=Q10NB7; Match level="QueryCoverage=98%, HitCoverage=76%, E-value=1e-100, Identity=62%"; Hit description =Ankyrin repeat family protein, putative, expressed
  Pfam annotation: Domain name=Ank; Domain location=46-78; Score=27.2; E_value=5.8e-05; Accession=PF00023.20; Description=Ankyrin repeat
  Subcellular localization annotation: CTP_CleavageSite=29; ConfidenceScore=5.31e-01
MTPSIPRTGGRACTTRRTTGTRTTSGTILSAAAKGFARFVNVRDDTGATPLHLAARQGWRRCVHVLLENGAIVSASSGAFGRIPYEVAAKRGHVACAALLNPSSAEPLVWPSALKFISELEPDAKSLLEAALMEANRERERRILKGAKNALPSPSHPDDGAHDTAIAEHLLRAGVQHRGPGVRAPDVCGVHAGAVLHCCHAKPNPAMQSQPLPTCPFCRGGIARLVVATRTRAGDDEERGKLESPRHCRSRRSMSLSGDAGSTSTLMGSIASSIGKMGHRRTESSEQVDDDKP

SEQ ID NO: 63569 - protein, 344 aa, Zea mays
  Coding DNA Sequence Number=SeqID_21790
  Gene Ontology: Mol. function=nucleic acid binding; Cellular component= intracellular; Biological process=extracellular matrix organization and biogenesis
  Homolog annotation: Hit_ID=Q2QM64; Match level="QueryCoverage=97%, HitCoverage=40%, E-value=3e-68, Identity=38%"; Hit description=G -patch domain containing protein, expressed
  Pfam annotation: Domain name=TFP11; Domain location=10-239; Score =270.8; E_value=2.7e-78; Accession=PF08697.1; Description=Tuftelin interacting protein 11
MKRVQMQSASGTLTTGELVREFAALKERCPREYTAYRLGHAARAIAAPLLRAAFQRWEPLEDPSRGLETVTTLRDILSDDGSAASPYGALVDDVVVGPALASAAETWEARNPEPMARFLETWGDALPLSAVQRLLEQVVVPKLSAAVESWEPRWEPVPCHVWVQRWIPLLGRRRLEPLYVTVQRKLGKALVGWHAARACADYGMVLPWKEAFRAEAWEEFVGRHVVPYLRQGLRALHVTPPKQDDGGFAGVMRWASVVPAQDMAQLLEEEFFGKWQDALCRWLWAAKPTAGEAVAWHEGWKRLLTPELLAEERVMVPIEAGLQKISRAAQGLQIYRRGGWQWKQ

SEQ ID NO: 63570 - protein, 58 aa, Zea mays
  Coding DNA Sequence Number=SeqID_21791
MPLPSPNIQDAHEDWCSIPTVVCGIVVGHVPLSVINKGMKLCFNEYRSAIAEEGSQAC

SEQ ID NO: 63571 - protein, 113 aa, Zea mays
  Coding DNA Sequence Number=SeqID_21792
GMRHGSPTLGVVEALDATRATAVTAEEARTTAKEMEKKATTTAKLAAIAMDKVGFVVVAVASVVAEEANARWIQWHIAIWLKRSRTSAKKMYRCCSMSSTVWVHDVPVKGMFA

SEQ ID NO: 63572 - protein, 66 aa, Zea mays
  Coding DNA Sequence Number=SeqID_21793
MDHYSLKFLLDQRLSIILQHHWVSVTVGPCGPRCFQKTLHRLCTNFYIIGDCAVVEHSSRLDSYNP

SEQ ID NO: 63573 - protein, 99 aa, Zea mays
  Coding DNA Sequence Number=SeqID_21794
MVTGKEGNPSVHKGLASTLKAEAVPMATAGILGQVGVAVNRNNTKVDTEPKVNSIPVLFTLSWHSLFASHLYCHFLPIEVLENKSPTLAPTSGELTSIS

SEQ ID NO: 63574 - protein, 162 aa, Zea mays
  Coding DNA Sequence Number=SeqID_21795
  Homolog annotation: Hit_ID=Q688L0; Match level="QueryCoverage=52%, HitCoverage=31%, E-value=8e-07, Identity=33%"; Hit description =Unknow protein
  Pfam annotation: Domain name=DUF247; Domain location=5-160; Score= -183.5; E_value=0.055; Accession=PF03140.6; Description=Plant protein of unknown function
MQLVVNVVNDSEYVINRIVLLFLSPTAAWPLTTGAAAPAWLSTRWDMFRRSRSAEELYEADVQIRRSATSSFLDIRFHRGTLYLLPITVDDTTEYVLLNLMAFERLHVGAGNDVTAYVFFMDNMVDSARDVALLQCIIWYTLMLFMFEYRVVRLLIVLFFLV

SEQ ID NO: 63575 - protein, 109 aa, Zea mays
  Coding DNA Sequence Number=SeqID_21796
  Subcellular localization annotation: CTP_CleavageSite=48; ConfidenceScore=5.49e-01
MASFHVDRGPMVKWCTGQSGSPAGRSGAPGTGNQAITRFCARTLFTVRCAPDSSVHSRIEGNQGLPNGAPTAPRSLGAIKGTPRRMEHDTKHLLNILQHRVFAITLLFH

SEQ ID NO: 63576 - protein, 52 aa, Zea mays
  Coding DNA Sequence Number=SeqID_21797
MARLTMRSQQTKKTLQRTGGGGARRRLDSRNPPGQAKGANRTEACSTPFAHT

SEQ ID NO: 63577 - protein, 137 aa, Zea mays
  Coding DNA Sequence Number=SeqID_21798
MELELRNIRSHRKKTESNTRAGVELAHTLFVEAYCELGAQIAPSDESGEEVGLRFLGALYDRMWGPHSCGIVRERADRAQAQVMNEEEVDDLTGLESSVTRVGALAEAGAKGHTTPPRGVAEDPTAAASSAQVEGMH

SEQ ID NO: 63578 - protein, 215 aa, Zea mays
  Coding DNA Sequence Number=SeqID_21799
  Homolog annotation: Hit_ID=Q10D93; Match level="QueryCoverage=74%, HitCoverage=56%, E-value=9e-47, Identity=56%"; Hit description =Expressed protein
  Subcellular localization annotation: CTP_CleavageSite=41; ConfidenceScore=5.58e-01
MASSTLPAYPFRMSLPGLRAPDPAKVKHVSVRAPARRLPVAASAAPSGAAAAAARERRRFLESYGLNPNDFEEDAEENPRVYSNYSELIRNDCRCELEERKDRRRRRQSGRGEQTAEAAVTPAKVEEPRETHKMLQVLGGKVRRRKLLSPKDRNVRPMMEVVRGAAFDILQAHFVEMDPWVISEVLKPNLECTGFIDVSQIHMLRVEKFLANAEK

SEQ ID NO: 63579 - protein, 493 aa, Zea mays
  Coding DNA Sequence Number=SeqID_21800
  Gene Ontology: Mol. function=hydrolase activity, hydrolyzing O -glycosyl compounds; Cellular component=integral to membrane; Biological process=polysaccharide catabolic process
  Homolog annotation: Hit_ID=Q84R49; Match level="QueryCoverage=96%, HitCoverage=97%, E-value=1e-167, Identity=79%"; Hit description =Endoglucanase 10
  Pfam annotation: Domain name=Glyco_hydro_9; Domain location=109-458; Score=395.5; E_value=7.8e-116; Accession=PF00759.9; Description =Glycosyl hydrolase family 9
MFGRDPWGGPLEISNADSATDDDRSRDLDRAALMRQLDETQQSWLLAGPGDQAGKKKKRYVDLGCVVVDRKIFMWTVGTILGLGVFIGFIMMIVKLVPHKRPPPPPPDQYTQALHKALMFFNAQRSGPLPKHNGVSWRGNSCMKDGLSDSTVRRSLVGGFYDAGDAIKFNYPMAWSMTMLSWSVIEYRAKYEAIGELDHIKELIKWGTDYILKTFNSSADTIDRIVAQVGVGDTSKGSSQPNDHYCWMRPEDIDYKRPVTECHSCSDLASEMAAALAAASIVFKDSKTYSDKLVKGAKALYKFGRLQRGRYSPNGSDQAIFYNSTSYWDEFVWGDTPGWYCGPNFYTTEVLRKFARSQLDYILGKNPLKMSYVVGFGNKYPKRPHHRGASIPHNGVKYGCKGGYKWRDTKKANPNILVGAMVAGPDRRDGYKDVRTNYNYTEPTLAANAGLVAALISISDIKTGRFGIDKNTIFSAIPPMFPTPPPPPSAWKP

SEQ ID NO: 63580 - protein, 108 aa, Zea mays
  Coding DNA Sequence Number=SeqID_21801
  Subcellular localization annotation: CTP_CleavageSite=31; ConfidenceScore=5.02e-01
AKTQAKNAEPGKGGVSQEKVVWYAKTALPLPAAMLASATTTSAMRRRLTANVEGEDLDDEAPPQAPPASTAGREKELAIPSVAPPGFNSRKGDRSLPSPPSWAPLGET

SEQ ID NO: 63581 - protein, 117 aa, Zea mays
  Coding DNA Sequence Number=SeqID_21802
MGWRKRSLVGKPMPCRGGEGGKDAVSGGWGRGAAVGKRPTDETSTGLGQAPMRDCQGEGEGGGVVMPVGLGGGGRARDLGARASMRGRGRERSGAVDVAGATVRVEAEPVQRNFLYI

SEQ ID NO: 63582 - protein, 66 aa, Zea mays
  Coding DNA Sequence Number=SeqID_21803
MEVISEFLLNDGFGVGMGGEIGLPPGLSYSPQQTGTMQDVLSVIALGGMQLPLHGSAQLLALLESA

SEQ ID NO: 63583 - protein, 577 aa, Zea mays
  Coding DNA Sequence Number=SeqID_21804
  Gene Ontology: Mol. function=RNA-directed DNA polymerase activity; Cellular component=mitochondrion; Biological process=RNA-dependent DNA replication
  Homolog annotation: Hit_ID=UPI00004C1733; Match level="QueryCoverage =99%, HitCoverage=43%, E-value=0.0, Identity=82%"; Hit description =UPI00004C1733 related cluster
  Pfam annotation: Domain name=RnaseH; Domain location=237-338; Score= -27.8; E_value=0.023; Accession=PF00075.14; Description=RNase H
  Pfam annotation: Domain name=rve; Domain location=438-570; Score =73.9; E_value=5e-19; Accession=PF00665.16; Description=Integrase core domain
  Pfam module annotation: Pfam domain module=RnaseH::rve; Domain location=237-338::438-570
MLLGFIVSERGIEANPEKIAAITNMGPIKDLKGVQRVTGCLAALSRFISRLGERGMPLYRLLRKAECFTWTPEAEEALGDLKALLMNAPILVPPAAGEALLIYVAATTQVVSAAIVVERREEGHALPVQRPVYFISEVLSETKIRYPQIQKLLYTVILTRRMLRHYFKSHPVTVVSSFPLGEIIQCREASGRIAKWAVEIMGETISFTPRKAIKSQVLADFVAEWVDTQLPTAPIQPELWTMFFDGSLMKTGAGAGLLFISPLEKHLRYVLCLHFPASNNVSEYEALVKGLHIAIELGVQRLDARDDSQLVIDQVMKNSHCRDPKMEAYCDELAKIASGRTTVPPDVFSRDLHQPSVKTDDTPEPEKASAQPEAPSAKSEAPSEPEAPSAQPEAPSTLEGFYWPTAVADATRIVRTCKGCQFYARQTHLPAQALQTIPITWPFAVWGLDLVGPLQKAPGGYTHLLVTIDKFSKWIEVRPLNSIRSEQAVAFFTNIIHRFGVPNSIITGNGTQFTGRKFLDFCEDHHIRVDWAVVAHPMTNGQVERANGMILQGLKPRIYNDLNKFGKRWKKELPSVV

SEQ ID NO: 63584 - protein, 116 aa, Zea mays
  Coding DNA Sequence Number=SeqID_21805
MGLSTTARAYWRSIKHAGLGGSDESGVSSNEADSSDSSECSGGDSDDEGDGSSDGDDDKGDSGKGGGGDGSSDGGKGHSGDGSSDGCKGDGDGSGKGDGGSGDDSGGKAGGIMPLV

SEQ ID NO: 63585 - protein, 181 aa, Zea mays
  Coding DNA Sequence Number=SeqID_21806
MLRQLCKISGVKVCFDTENARDSFYRAAVNFVLDDCSRAAKDIGAAKLNGEDPRDFLAGLASNIGLDKFRAATLALEIQGKRPEALDELVKICRIHYIFPPEDNSAEMEMVAAGLEKNLHVAERVHLLYLYRSVCTAGNLKTAAQALGLDFVHMPSCYVAFDDHDVYMWGTSKIRVPCIEG

SEQ ID NO: 63586 - protein, 116 aa, Zea mays
  Coding DNA Sequence Number=SeqID_21807
MEATVVVAAAVEAEEEEAAAAAASTPQRSGRKRPRAIGSGRYRSVSSTRLVSLPAAAGDPAPCGIGPSQQAGSRPGTDGRRRRMEAAATSQPHRRPRTQEKEAVFAWTGIADLTAD

SEQ ID NO: 63587 - protein, 391 aa, Zea mays
  Coding DNA Sequence Number=SeqID_21808
  Subcellular localization annotation: CTP_CleavageSite=24; ConfidenceScore=5.67e-01
MAAATATVTFSPSPPSFLNSHIPRGHRPASTTTIAFARRFRGVKPSPDRSRGKVDQVAHPDDGFGALEAELWRLRRLVELKIHRLGTEADAAYRDLRSAVREVSGDRVVLTFRRSSLRYLTGALLFLLACAIAARLLLGMVLRAWQRRGLRRGLWGEGGRAVVRRRDRSLGGKEVVVAVSSPPKEAARTSRVAEPAKEVWRGYSQAKLPDWWPNVGATVMEPGPEMEKWARMANRLVRAIIDSRVMGRDYRYDDAIQVRARRDKHAKFARIKWWKLKGDTSEVFKERVIKEGTWKEAIGFKYPVSFLWAIPLSLKVACKFTGNVLIKWFLKSFGLHDNTVLMKWFLMRGLHDNNVLMKWFLMRERIGEVVPNARVEVTQGLVLTSMEGMKW

SEQ ID NO: 63588 - protein, 123 aa, Zea mays
  Coding DNA Sequence Number=SeqID_21809
  Homolog annotation: Hit_ID=Q10KX9; Match level="QueryCoverage=21%, HitCoverage=6%, E-value=2e-07, Identity=88%"; Hit description =Expressed protein
MDSTRSNFIHCIKRKNSRLLFPSVRQVSTSMCAYLKCLIIHLATIQSTGEWRSRPHATIENRDNQNMSPQDPPLVALRGLFQRANCDELRALLSLLMSNRILGDNSRQQACQILDEEIAKQWH

SEQ ID NO: 63589 - protein, 108 aa, Zea mays
  Coding DNA Sequence Number=SeqID_21810
MASDGKHKKVPTPFSESFEDSEYFEEEYTGSKGYLLVASTLAIEFLIGQAGDEGGGGNKGDIGKGGDNSKGKGGGSDKGGGNDDDNGKGDGGSMGASGCSAGGKAPSA

SEQ ID NO: 63590 - protein, 608 aa, Zea mays
  Coding DNA Sequence Number=SeqID_21811
  Gene Ontology: Mol. function=nucleic acid binding; Cellular component= intracellular; Biological process=chromatin modification
  Homolog annotation: Hit_ID=Q10RP4; Match level="QueryCoverage=33%, HitCoverage=28%, E-value=2e-45, Identity=42%"; Hit description=Zinc finger, C2H2 type family protein, expressed
  Pfam annotation: Domain name=zf-C2H2; Domain location=396-421; Score =21.5; E_value=0.0031; Accession=PF00096.16; Description=Zinc finger, C2H2 type
  Pfam annotation: Domain name=zf-C2H2; Domain location=424-443; Score =1.6; E_value=7; Accession=PF00096.16; Description=Zinc finger, C2H2 type
  Pfam annotation: Domain name=zf-C2H2; Domain location=449-473; Score =20.1; E_value=0.008; Accession=PF00096.16; Description=Zinc finger, C2H2 type
  Pfam annotation: Domain name=zf-C2H2; Domain location=479-503; Score =22.7; E_value=0.0014; Accession=PF00096.16; Description=Zinc finger, C2H2 type
  Pfam module annotation: Pfam domain module=zf-C2H2::zf-C2H2::zf -C2H2::zf-C2H2; Domain location=396-421::424-443::449-473::479-503
EGLDAIKHKGYIADRVLESVVRADERVGLPERPPVPEVKKCKIDHVPPVNKACVGLQVVKLAAKPEGAAPASEDAADPATKAGVFVVNDAAIEQGVKCIASLSGGASKMEVTVENSLANGPTTELEVSNSLANGPTTELGVSKGTSLANESADLPGVTCIMPEVTDKPVTDLGVISTVVEVSDTGPVVHETTELESAGEDYIASEATAEPEDAGRASCNVDDTAALDEPQPPNCDLYLGNVQDGNAIDTVTSTLQPSRCDAAEGGGSVNFTTNIPVRARGPTFKGGVLKDKSVAPSVLLVLDVLTRSIGKSGRTDVICYARRTGKRKAELLKVKKENIDLEDGVICEKEETLVSTDRCECVLSTAGSIDVKLADIKKDLMDNSAVGKVKKMKRNRFECNIDYCHMVFKTEAELAVHKKNMCTVSSCSRHFRSHRYLRRHQSAHNDDMPYKCPWDGCNMAFKWSWDRAEHFKVHAGAKPYKCTTPGCSKIFKFVSDFTRHRRRCKPQRCLFYAFQEESTKYYVTLSIWKLLCCSSLPRKKDVSKLRGRRNVKNTNILNDNTLTDEVKIDLNMLHVLVLNRVDREVDNADIVVVDKCAPGERVVNPGGVD

SEQ ID NO: 63591 - protein, 47 aa, Zea mays
  Coding DNA Sequence Number=SeqID_21812
MGAWLLGAWDWLWALAVCADLGGMGAGDLACHAPQGDAEVWKTGWLS

SEQ ID NO: 63592 - protein, 85 aa, Zea mays
  Coding DNA Sequence Number=SeqID_21813
MTSGVGRQEWGGVRRRHVENGVSSRTGSSDVEKNEAGQIDPLRTASASPVQLPTPYPTGTTDHRVRRLPFASPNPAADQRHAHPP

SEQ ID NO: 63593 - protein, 1068 aa, Zea mays
  Coding DNA Sequence Number=SeqID_21814
  Gene Ontology: Mol. function=RNA-directed DNA polymerase activity; Cellular component=intracellular; Biological process=RNA-dependent DNA replication
  Homolog annotation: Hit_ID=UPI00005A975E; Match level="QueryCoverage =95%, HitCoverage=59%, E-value=0.0, Identity=89%"; Hit description =PREDICTED: similar to Retrovirus-related Pol polyprotein from transposon 297
  Pfam annotation: Domain name=RVT_1; Domain location=56-225; Score =139.9; E_value=7.1e-39; Accession=PF00078.17; Description=Reverse transcriptase (RNA-dependent
  Pfam annotation: Domain name=RnaseH; Domain location=455-582; Score =10.1; E_value=6.7e-06; Accession=PF00075.14; Description=RNase H
  Pfam annotation: Domain name=rve; Domain location=780-939; Score =117.4; E_value=4e-32; Accession=PF00665.16; Description=Integrase core domain
  Pfam module annotation: Pfam domain module=RVT_1::RnaseH::rve; Domain location=56-225::455-582::780-939
MPGIPRDVAEHSLDIRAGARPVRQPLRRFDEEKRRVIGEEIHKLMAAGFIKEVFHPEWLANPVLVRKKGGKWRMCVDYTGLNKACPKVPYPLPRIDQIVDSTAGCETLSFLDAYSGYHQIRMKESDQLATSFISPFGMYCYVTMSFGLRNAGATYQRCMNHVFGEHIGRTVKAYIDDIVVKTRKASDLLSDLEVTFRCLKAKGVKLNPEKCVFGVPRGMLLGFIVSERGIEANPEKIAAITSMGPIKDLKGVQRVMGCLAALSRFISRLGERGLPLYHLLRKAVCFTWTPEAEEALGNLKALLTKAPILVPPADGEALLVYVAATTQVVSAAIVVERQEEGHALPVQRPVYFVSEVLSETKIRYPQVQKLLYAVVLTRRKLRHYFESHPVTVVSSFPLGEIIQCREASSRIAKWAVEIMGETISFAPRKAIKSQVLADFVAEWVDTQLPTAPIQPELWTMFFDGSLMKTGAGAGLLFISPLGKHLRYVLCLHFPASNNVAEYEALVNGLRIAIELGVRRLDARGDSQLVIDQVMKNSHCRDPKMEAYCDEVRRLEDKFYGLELNHIARRYNETADELAKIASGRTTVPPDVFSQDLHQPSVKINDTPEPEAPLVQPEVPSAQPEASSVQPEVPSPPEGEALHVEEEQSGATPDRNWQTPYLQYLRQGELPLDQAEARRVARRAKSFVLLGDEEELYHRSPSGILQRCISIAEGQELLQEIHSGACGHHAALRALVGNAFRQGFYWPTAVADATRIVRTCEGCQFYAKQTHLPAQALQTIPITWPFAVWGLDLVGPLQKAPGGYTHLLVAIDKFSKWIEVRPLNSIRSEQAVAFFTNIIHRFEVPNSIITDNGTQFTGRKFLDFCEDHHIRVDWAAVAHPMSNGQVERANDMILQGLKPRIYNDLNKFGKRWMKELPSVVWSLRTTPSRATGFTPFFLVYGAEAILPTDLEYGSPRTRAYNDQNNQASREESLDQLEEARDKALLHSARYQQSLRRYHARGVRPRDLQVGDLVLRLRQDARGRHKLTPPWEGPFVIAKVLKPGTYKLANNQGEIYGNAWNIQQLRRFYP

SEQ ID NO: 63594 - protein, 70 aa, Zea mays
  Coding DNA Sequence Number=SeqID_21815
MAGAVLGAWEYGESVQIVRAWKRKQRAGQGSHVVAASQHSPLAWRLKGALHACSVAPYRAPTGRSPSLSL

SEQ ID NO: 63595 - protein, 285 aa, Zea mays
  Coding DNA Sequence Number=SeqID_21816
  Subcellular localization annotation: CTP_CleavageSite=55; ConfidenceScore=5.03e-01
MTTARVQRFGHTARCFDWTGPALRLSSRAASHVAASGFRPGGESRRAWQDLDKCLCRTPRSGRLVLIPPVRETSSLILPSAAHCGSLWAAHPAYATALLDLQLQQRDIFSLGVVLISFPDAALSLLVSCSPLSLSLFISHALNFLASTFWPCERSRPRQPTRGRAEARAMGLDVHVPGRFQLQRVVLHGRRVLASELLPSPCSLPSSPAFLPLPGGRAWPLRPAAARRHLAARRPRATSPMAATPAPFAARRVAPFAVESRYPSRSPMLSASAYVLSRQFASISW

SEQ ID NO: 63596 - protein, 161 aa, Zea mays
  Coding DNA Sequence Number=SeqID_21817
  Subcellular localization annotation: CTP_CleavageSite=56; ConfidenceScore=5.16e-01
MAWPWRALRVRLPGVARRPHPQPSVWPPPCVCTRRGSLRDPVPAHGPRDPPASTCPARVVSPRHGLEARPSVPMARGLELGQRAAPTCAWLVRDALALACARVLAWCARGLERFLECLSVAMRFMVLGIGSGNGCPHCNHCSGEDEAVEGDFQEFHDYDEF

SEQ ID NO: 63597 - protein, 311 aa, Zea mays
  Coding DNA Sequence Number=SeqID_21818
  Gene Ontology: Mol. function=protein serine/threonine kinase activity; Cellular component=cytoplasm; Biological process=protein amino acid phosphorylation
  Homolog annotation: Hit_ID=Q336J4; Match level="QueryCoverage=90%, HitCoverage=49%, E-value=1e-136, Identity=85%"; Hit description =Protein kinase-like protein
  Pfam annotation: Domain name=efhand; Domain location=129-157; Score =33.7; E_value=6.5e-07; Accession=PF00036.22; Description=EF hand
  Pfam annotation: Domain name=efhand; Domain location=165-193; Score =23.5; E_value=0.00077; Accession=PF00036.22; Description=EF hand
  Pfam annotation: Domain name=efhand; Domain location=201-229; Score =28.7; E_value=2.1e-05; Accession=PF00036.22; Description=EF hand
  Pfam annotation: Domain name=efhand; Domain location=234-262; Score =31.0; E_value=4.1e-06; Accession=PF00036.22; Description=EF hand
  Pfam module annotation: Pfam domain module=efhand::efhand::efhand::efh and; Domain location=129-157::165-193::201-229::234-262
MWQLQQALRRKVQKPYELGHKPSSHQETDEGIAQAIIRSNIDFRREPWSKVSENAKDLVRKMLDPSPYCRLTAQQVLEHPWIQNASAAPNIPLGEAVRSRLKQFTVMNKFKKKALLVVAEYLPAEELEAIRELFQLLDTNKDGHLTIEELRKGMRLIGHNVHDTDVDMLMEAADIDGNGTLDCKEFVTVSIHLKKIRSEDHLPKVFSYFDKNGSGYIEIEELKEALSPRGDQKAIEDIILDVDIDRDGKISYEEFELMMKAGVDWRNTSRQYSRAVYNTLSRKMFKDASLKLGSNNGPLAAAAVKEQQDVD

SEQ ID NO: 63598 - protein, 171 aa, Zea mays
  Coding DNA Sequence Number=SeqID_21819
MARTPGAATGDERRGVSAGTLRQCTTGDDDGQALGTGTRSREQGAGTTVQDRDLATQSIEHPAGVNGAAHDSTICSDILSDTSQAAEWSRGVAREGAVTLRAPCAMEQRWRARSSTIGRGELNQVGEERDRKGGLELKPSRKWASSAWESGARVQGAGVDVGSEKTTGHQQ

SEQ ID NO: 63599 - protein, 230 aa, Zea mays
  Coding DNA Sequence Number=SeqID_21820
  Subcellular localization annotation: CTP_CleavageSite=73; ConfidenceScore=5.74e-01
MAARLSGVVGPGLARPRRPLPLSRPPAASARPTPPPSRAAARPRSGTARPRRPAQPRRVPPPDVGAAQPWHARAARPPAWRGFARGSGAVAWCTRLARHGGVARPPAAWRVLAPALLAVAAWLACPRLGAALRPPCPPWRRGSPARDLGAARPWRSELDRDVRRVPGVLRRPALAAGARPWPRRGFGAVTMRLMVLGFDSGNGCQHCNHCSGEDEAVEGDFQEFQDYDEF

SEQ ID NO: 63600 - protein, 220 aa, Zea mays
  Coding DNA Sequence Number=SeqID_21821
  Gene Ontology: Mol. function=peptidase activity; Cellular component =nucleus; Biological process=cell division
  Homolog annotation: Hit_ID=Q6ZHH8; Match level="QueryCoverage=90%, HitCoverage=20%, E-value=1e-86, Identity=75%"; Hit description=Cell division-associated protein BIMB-like
DPFSFSFACKKGVAGNSPKADELVLALTNHDLFLYFGHGSGTQYISSKEVEKIDNCAAALLMGCSSGTLHCKGSYAPRGAPLSYLFAGSPAIIANLWDVSDKDIDRFSKALLNSWLHDKSLDGNNCSKCCQLTMELESMSIASKENGKARRQGTRGKKQQHINDSTKCCSCKQRRIASYISEARRACRLPLLIGASPVCYGVPTIIRKKVMTDSTTREMT

SEQ ID NO: 63601 - protein, 1116 aa, Zea mays
  Coding DNA Sequence Number=SeqID_21822
  Gene Ontology: Mol. function=peptidase activity; Cellular component =nucleus; Biological process=cell division
  Homolog annotation: Hit_ID=Q6ZHH8; Match level="QueryCoverage=62%, HitCoverage=72%, E-value=0.0, Identity=64%"; Hit description=Cell division-associated protein BIMB-like
  Pfam annotation: Domain name=Peptidase_C50; Domain location=775-1116; Score=190.7; E_value=3.6e-54; Accession=PF03568.7; Description =Peptidase family C50
MQIRIIDVLLHKIYCTKEHFLERSRVLIRKAGALRASGVENIKNCLESLRDAISLLLAIAYCLYAQCAQEDKLGGEVIFDSAEKALNLWLDMEAFDHSSSDMVLQQPSKTIVPLICFLVDLLSMKGCFELQFKLCKVMIMIWKQEKLPIEKLLSLLFTSGRLSHACCYLPLDERFLSIAKEHLGRTLPSALFIPQSCKHPFGRQFSFVTSVDEVSKVASSLVSGDTSNEQSTFLAGCLYYDLSEKVFSRGQLFQAFSYGNKALHLRKKLLKKKFKINSGISGNMERQHCGQDISLEVCGPTIVEIWPNSSSSVNTKDFFLTPWNVLRCYLESTLQVAMMHELIGNGAEAEVLLQTGKEISNFHGLSVFCIVFTSFLGQLYCKRQLWDEAESELNYARDLVKNDATISFRRKNSGNAEAGPPLDAKARRSSRNSSRLAKGQNVETLAKTRTRSSKRNACMKSEKVLTELNSKNNVTGSKELAADASVCGEAECFPDGIDHSKDDLCNMFGCWSCLFIKSLNSGCIQNILQLRLDYVHRHYLVSLLLKKARALGSHSNGDCEVHSVYWKCISLLFFRSLPQDCCRTYGPYLIGLIMDRSIGDFLPLECAEILFNMSFFLLKSPLSEQSRDICCIFSSVTMADVVPWLLKAFVLSRESPSLVQEVCKLLACIFLLSTTDSSIQLPLGSHKESLSLNHWATYFHQVSVGTNLNCHYFASLQASSEEKVPKDTYKDFRNETDDNVSKFLRLSSRDIKYIEKHMTEFFQKLPDVPVLCISMLGGDYVNALLKFHCHPPFFPAWMLLSRFDSTNEPTTLLLPVDSISEMQFEDSCTKDLGNPTRVLDKWQCPWGYGITDYVAPVFRNILEENFMSLSSATLTIDDVNADRVRWWSHRMKLNNYLANTLKDIEDSWFGPWKCLLLGHQLSDEHIETASSMIITGLDTEFEFEVNPMLIKAILGGAVSVDEVQECFLQLILYKGYFGRGGCCGKDRLKAFSSCQMDDGSMETLKRIITDASYELPQPADRDPVILVLDVNVQMLPWENLPVLRNQEIYRMPSMGSIFLALSRTNNDYKDHSSPFPVIDPFNTYYLLNPSGDLSSTQEEFVQLFRNYEWKTINCQI

SEQ ID NO: 63602 - protein, 192 aa, Zea mays
  Coding DNA Sequence Number=SeqID_21823
  Homolog annotation: Hit_ID=Q6H6I1; Match level="QueryCoverage=17%, HitCoverage=13%, E-value=2e-08, Identity=82%"; Hit description=3 -isopropylmalate dehydratase, small subunit-like
MASVAESGKERFGLRSLLRKGAARSRRELGLGFGERPRDLEREVRFLEHGVEARGSSRGGADFVHGVRGRPLGGHRRCGGEGSAGGRFKFRCVSRNRGADGEPRQKGKASPVGSGAGCSTPELILARTALYQVPSLGLRWALRWIFIWPVADEQHHQEYNLKPIGDAGPVTEAGGIFAYARKTGMIALKAVA

SEQ ID NO: 63603 - protein, 113 aa, Zea mays
  Coding DNA Sequence Number=SeqID_21824
MACRGAAWLGQGALVRRPARLGKQRIGTGFIGQWWLAGQITRPGRLRAAALGNSSGRRDRGGSAAPRLQGSLPRHGRSNGYSANGRLQKVNRELQCADCAHRSQSRRRWRTRQ

SEQ ID NO: 63604 - protein, 467 aa, Zea mays
  Coding DNA Sequence Number=SeqID_21825
  Gene Ontology: Cellular component=integral to membrane; Biological process=sugar mediated signaling
  Homolog annotation: Hit_ID=Q6ZH55; Match level="QueryCoverage=98%, HitCoverage=82%, E-value=1e-157, Identity=64%"; Hit description =Putative HYS1
MAAMCRILRCLSGCPSRRCLPSVKVVNRCAGSEGGLRPDVLSKMCTSAVKESLTNIYGDRFHSFMSNFEKAFGSTLRTIHLINETPVFEQDVEQCSYKDDDSVPQIKLGGADSLPEIKVGGADSQSQIHDVQTDMPSSSMNSQIVLHTGINDQLVHLTCSRSNPEIGQHILSVFERSLNEQARSNELKELEIGLTMRKLQLSRSQLALSSESQMLEKIKVHMGFQKASFKEKKFKTEMEDTKHAELFRKLIDMLLTAVVLMSVCFGYGTYIYSYQRITAATSACAAISREYTSWWMPSSVSAINSGLLLFKCHVIAATRIFFGILMLLLIGWLIFQRSAMTGPNMPVTFNVMILGVLCGYFGSCCVDTLGGDGNVWLIYWEALCSIHLLGNIWPSLLHHMLYGPISVTHRTKAGHLPYWARRYTFYILVSLILPCLAGLLPFASLSDWKELAVQYLKSRFSGINIED

SEQ ID NO: 63605 - protein, 140 aa, Zea mays
  Coding DNA Sequence Number=SeqID_21826
MGLVAWWQERLPKSLTLKADHDECSISSIVFTGPVPPLHSQHGLATSKAKATWRYIHSTSGKILIGLGLIWLWQDSKVLASERMKKDLSCIVIDTRHFDAITSTSVGDGKSTKFWVNVWLRGMRPSFTTPSRGNKLSSPM

SEQ ID NO: 63606 - protein, 224 aa, Zea mays
  Coding DNA Sequence Number=SeqID_21827
  Homolog annotation: Hit_ID=Q71KW4; Match level="QueryCoverage=17%, HitCoverage=18%, E-value=2e-12, Identity=87%"; Hit description =Desiccation-associated protein
  Pfam annotation: Domain name=PBD; Domain location=24-64; Score=24.5; E_value=0.00017; Accession=PF00786.18; Description=P21-Rho-binding domain
MKGLLKGLRYISQIFGDAKEPEMQIGKPTDVKHVAHIGWDNASVTAPSWVAASVPVPPPTTPFPCSAPRPNVRTPTNSCGWACHVLQMDEFKASPGTARGSDPEPSQPGGSEGCGEEHAGGGEDGGGKAERPRRARGNKGSGGNEPAKRRDCAAEGLRRDRRVAKAADAAEGAEGQGDAAAAAPKQRRRKPRAASGGRSKSSSGGAAASDSAGAPPDEDDRCGC

SEQ ID NO: 63607 - protein, 44 aa, Zea mays
  Coding DNA Sequence Number=SeqID_21828
MAEVRAAGQRGTGMSGVTPDCPVPHEDKASNGRPAPSPNDKGLK

SEQ ID NO: 63608 - protein, 61 aa, Zea mays
  Coding DNA Sequence Number=SeqID_21829
  Homolog annotation: Hit_ID=Q10I53; Match level="QueryCoverage=77%, HitCoverage=36%, E-value=1e-15, Identity=81%"; Hit description =Expressed protein
MTKTTPPAFVYRISTADEWAEFQRTGATLGGDLDSSTGCIHLSDLNQVVAQRLGALPAYLA

SEQ ID NO: 63609 - protein, 138 aa, Zea mays
  Coding DNA Sequence Number=SeqID_21830
  Gene Ontology: Mol. function=kinase activity; Biological process =response to abscisic acid stimulus
  Homolog annotation: Hit_ID=Q94I62; Match level="QueryCoverage=96%, HitCoverage=54%, E-value=2e-40, Identity=69%"; Hit description =Putative secretory-like protein
  Pfam annotation: Domain name=DUF26; Domain location=82-136; Score =60.5; E_value=5.7e-15; Accession=PF01657.8; Description=Domain of unknown function DUF26
LDSLDAVVWLDACTLRYSARAFFGEVDRDHRAVAALRDARPAELGREVVAGLLTRLTRTAYLSPLLFAAGEEDAAVGQQQRLRAMVQCTKDLSGGDCKACLEAAIAQLLARGRAPEGARVLGGSCSLRYELSPFISDS

SEQ ID NO: 63610 - protein, 194 aa, Zea mays
  Coding DNA Sequence Number=SeqID_21831
  Gene Ontology: Mol. function=kinase activity; Cellular component =ornithine carbamoyltransferase complex; Biological process=amino acid metabolic process
  Homolog annotation: Hit_ID=Q6QP54; Match level="QueryCoverage=54%, HitCoverage=37%, E-value=1e-17, Identity=65%"; Hit description =Putative kinase
MAPPVDVVGPCPRLGEVEAPPRSRSSLSSKVEVESEPPGRTRRRPSAKARAESEPWGRAKRSSSSFGAELESEPWGRAKRSSSSSRAEPESEPRGRAERSSSSSGAEPESEPWGRAERSSSSSGAEPESEPWGQAERSFPWRLGPDLAAVSLTLSSGSAVGAAQAALSSCQTGQWSGEVTAVTSALSTGGRASG

SEQ ID NO: 63611 - protein, 163 aa, Zea mays
  Coding DNA Sequence Number=SeqID_21832
  Gene Ontology: Mol. function=DNA binding; Cellular component =mitochondrion; Biological process=DNA integration
  Homolog annotation: Hit_ID=UPI00004C1731; Match level="QueryCoverage =77%, HitCoverage=8%, E-value=3e-70, Identity=99%"; Hit description =UPI00004C1731 related cluster
  Pfam annotation: Domain name=rve; Domain location=3-138; Score=48.0; E_value=3.1e-11; Accession=PF00665.16; Description=Integrase core domain
MDQATRSLVRCDATQLSIKRTKTDAGVVAVAFFTNIIHRFGVPNSIITDNGTQFTGRKFLDFCEDHHIRVDWAAVAHPMTNGQVERANDMILQGLKPRIYNDLNKFGKRWMKELPSVVWSLRTTPSRATGFTPFFLVYGAEAILPTDLEYGSPRTSVTPLVLL

SEQ ID NO: 63612 - protein, 116 aa, Zea mays
  Coding DNA Sequence Number=SeqID_21833
  Subcellular localization annotation: CTP_CleavageSite=48; ConfidenceScore=5.56e-01
MVPQAAFLLALVAAAAAAASTWPSTEAAGSWTTTNAPAASCSGCGDLRGRQRVNMFGVLCRGRLWKCRNVVVFRGERSPLATTMLLCRSKAELWRHRLRHEDYQIVVAWYRALYVT

SEQ ID NO: 63613 - protein, 343 aa, Zea mays
  Coding DNA Sequence Number=SeqID_21834
  Gene Ontology: Mol. function=RNA-directed DNA polymerase activity; Cellular component=mitochondrion; Biological process=RNA-dependent DNA replication
  Homolog annotation: Hit_ID=UPI00004C1733; Match level="QueryCoverage =99%, HitCoverage=22%, E-value=1e-146, Identity=79%"; Hit description= UPI00004C1733 related cluster
  Pfam annotation: Domain name=RnaseH; Domain location=37-164; Score= -0.3; E_value=6.1e-05; Accession=PF00075.14; Description=RNase H
MGETISFAPRKAIKSQVLADFVAERVDTQLPTALIQPELWTMFFDGSLMKTGVGAGLLFISPLEKHLRYVLRLHFPASNNAAEYEALVNGLRIAIELGVRRLDARGDSQLIIDQVMNNSHCRDPKMEAYCDEVRRLEDKFYGLELNHIARRYNETTDELAKIASGRTTVPPDVFSRDLHQPSVKTDDTPEPEKASAQPEVPSAQSEVPSAQSEVPSARPEAPSAQPEAPSAQPEAPSARPEVPSAPEAPRALVGNTFRQGFYWPTAVADATRIFRTCEGCQFYARQTHLPAQALQTIPITWLFAVWGLDLVGPLQKAPGGYTHLLVTIDKFSKWIEVRPLNSI

SEQ ID NO: 63614 - protein, 149 aa, Zea mays
  Coding DNA Sequence Number=SeqID_21835
  Homolog annotation: Hit_ID=Q10I34; Match level="QueryCoverage=94%, HitCoverage=31%, E-value=7e-33, Identity=53%"; Hit description =Expressed protein
MWLSLFVLPGPPFDVVRREIIPLAARLARGESVALAPAALATIYHDLSALKRHITSGDKNGPFVISAPIHILQLWVWEHFTQLRPETVGSSTPDDHDMPRAARWREAGKRLSSKDLHAVLMSPKGFEWRPYKNSRFFGLHPGCSEYCKE

SEQ ID NO: 63615 - protein, 299 aa, Zea mays
  Coding DNA Sequence Number=SeqID_21836
  Pfam annotation: Domain name=DUF241; Domain location=83-294; Score =30.6; E_value=1.2e-07; Accession=PF03087.5; Description=Arabidopsis protein of unknown function
  Subcellular localization annotation: CTP_CleavageSite=28; ConfidenceScore=5.66e-01
MAPSFARSISFPLSPSRSSTSSSGTKPRAGAAAAGSTAAAYHARSVSLPCRSHPILAHLHAHIGAVRAWAQDPPATSAPGAAAGLARVDALHGALADLLGLPEARAALSLSATGDRLLDAFLRLADAHGSFQEAVVELKRDVAEALAAARRRDGARLASALRSQRKAAKDLARLAACAASGGGRPSRLGLSLGLGGAAEVEVAGLLAEAAAATAAASAALFGAVAAMSASASACSCKRTAALVCLTKKVPEEEKETAALVERLEELEECIDGLEAGSDKVFRSLVQTRVALLNIHTHIV

SEQ ID NO: 63616 - protein, 84 aa, Zea mays
  Coding DNA Sequence Number=SeqID_21837
  Homolog annotation: Hit_ID=Q1SXL0; Match level="QueryCoverage=49%, HitCoverage=28%, E-value=1e-10, Identity=71%"; Hit description =Surfeit locus 5
  Subcellular localization annotation: CTP_CleavageSite=58; ConfidenceScore=5.17e-01
MSKAGDGPCSAPVPTATVAAAAVQKQKSLLQKADADVSSLVDNFSSLINIARVNDPPVCNSQEAFQMEMRATRMVWTYSLPTDR

SEQ ID NO: 63617 - protein, 92 aa, Zea mays
  Coding DNA Sequence Number=SeqID_21838
MVPVWLEILNSDHWPGSSRRKLSRKRLQARLVKKERRGWLLVAIHLRAVSAVRLGTVDVPELGVVMDRDPNEFLERIKAECNLLPIAGTLLL

SEQ ID NO: 63618 - protein, 213 aa, Zea mays
  Coding DNA Sequence Number=SeqID_21839
  Homolog annotation: Hit_ID=Q9SI32; Match level="QueryCoverage=19%, HitCoverage=10%, E-value=1e-11, Identity=73%"; Hit description =Expressed protein
MAEEREGGGYAAAEGAIGEGEPEGTSYAVGGEDVSCSRVAGDEEEGRTAATGGGYAVAMGRAAVEGIRAAGARGEGLIGGGRRAVSAPLVGRGGTPASGSSEVWLRPRGWRRHREGSCHGVVGKGGGRVDGRHRNMQFAVVENPGFWNWTFNLVDEDDKMLAQIDRNWRGLGFEMKAPQAESFESSTNLQRSLPAAAQQIGAPLSTEAETIIA

SEQ ID NO: 63619 - protein, 77 aa, Zea mays
  Coding DNA Sequence Number=SeqID_21840
MVSFGHRNRNTCLGDWDDTWGRVDVGPTDPAVGSDLGRVVAGLSPWAQDPPNKGQDQGFGVGAVLYLVILSEPLLYV

SEQ ID NO: 63620 - protein, 136 aa, Zea mays
  Coding DNA Sequence Number=SeqID_21841
  Homolog annotation: Hit_ID=Q6ZIK7; Match level="QueryCoverage=30%, HitCoverage=10%, E-value=2e-13, Identity=85%"; Hit description =Putative major intrinsic protein
  Pfam annotation: Domain name=DZC; Domain location=55-90; Score=30.2; E_value=7.4e-06; Accession=PF08381.1; Description=Disease resistancezinc fingerchromosome co
MGGGGPSPYDPSSVATASSRDEASVSLSNASDLEATEWVEEDEPGVCLTIRELGDGTRELRRIRFSRERFGEERAKVYVSSIEQMLCMKNIIMLANWGGVCSAGMVRHLDSNQPHKTGNQRRQQDPRSITIDLLVQ

SEQ ID NO: 63621 - protein, 132 aa, Zea mays
  Coding DNA Sequence Number=SeqID_21842
MTVKMGTLVIMPPGSFHRWMVQGEGARSEGPSRLSVHERLGGTRTSSQWLSDALETLPNEDFVEDHASVIKESKRLFTGPWRITGGSSKEPLRPESFWEFMELYEVLENVVLKPKTPDVHSWETFLQWLVLH

SEQ ID NO: 63622 - protein, 108 aa, Zea mays
  Coding DNA Sequence Number=SeqID_21843
MQTGKIVGADHGQWQGFLNETKGSCSHPATCGAASALRPVGIGHSPAPPHVPNDVVLLEDCANVGVLTIDRLDFSCTSLLFTVRYQSTDWHAASYKPEPYRAAEHTGQ

SEQ ID NO: 63623 - protein, 101 aa, Zea mays
  Coding DNA Sequence Number=SeqID_21844
MDKTMKPISATCNNDDGVPEETGMDEVFSDLQALKRLYGLLQRLDEASRALLKKLLDDATRRALLKQTNVICINCITFPANSRRVPYLPIQRFAGSHCYLF

SEQ ID NO: 63624 - protein, 386 aa, Zea mays
  Coding DNA Sequence Number=SeqID_21845
MEQILTDLQALTRLYGLLHSPADENLDEASRALLMKILEDATQEAVRRQAKMLMPSGSLMSPVLERELSTQSHCRTRHADPILRPLASPRPSLLASERSRRLDPQHSTVSRRSGLYADGQRHAAEEPPPLARLASNRSSRTALTARHRPSQEQRCPSLSLHRFPVAGTSRHGTVIGSTRLARRRDSIRHSSGRGDQWSLERSNSNSSSSRRSVSRRELSSLRPSSRLRGRATPRHVGTENSSSVSPFERLDSGLSLSLTSRHGVEHAGRGVATPERSSSSKTVATIQSRIRPSSTPLRERSLHRPAVEAKTLRGRQQDSHVLSEEDTYSSMFSGSGKLIGRRQPVRLHEPDGVAGAGAGAACFCYSLLLLPVGGDTWHCATTVVRT

SEQ ID NO: 63625 - protein, 91 aa, Zea mays
  Coding DNA Sequence Number=SeqID_21846
MALHARSAAGSLRLAACVACMLHGLVPGNGNRTGPAPGWHRPHGRATRSKSPWNPTPVPAGTDALDLPIGLGMERSAARRALVCAAFWGCP

SEQ ID NO: 63626 - protein, 108 aa, Zea mays
  Coding DNA Sequence Number=SeqID_21847
  Gene Ontology: Mol. function=kinase activity; Cellular component =integral to membrane; Biological process=positive regulation of I -kappaB kinase/NF-kappaB cascade
  Homolog annotation: Hit_ID=Q1T3I7; Match level="QueryCoverage=81%, HitCoverage=20%, E-value=4e-34, Identity=79%"; Hit description =Protein kinase
MQIAAAYSRTWRGHLQNLLGYALSVYCVYKMLKSVVFKESGSVDPVTMSITIFLRHFDIGIDVALLSQYISLMFIGMLVVISVRGFLANVMKMHLYDRDEENWKAAQL

SEQ ID NO: 63627 - protein, 196 aa, Zea mays
  Coding DNA Sequence Number=SeqID_21848
  Homolog annotation: Hit_ID=Q6AWY6; Match level="QueryCoverage=67%, HitCoverage=30%, E-value=4e-49, Identity=72%"; Hit description =Growth-regulating factor 3
MAAYFSENPCYTIAQPIMPLFQYSKHGLRRVTDRQEFVHAVVLIAAVWRLKSRYSAYGVKSLSDEHSTLLSGGMDPSMMDNSWRLLPSQTNTFQATSYPVFGTLSGLDESTIASLPKTQREPLSFFGSDFVTAAKQENQTLRPFFDEWPKSRDSWPELGEDSSLGFSATQLSISIPMATSDFSNTSSRSPGGIPSR

SEQ ID NO: 63628 - protein, 375 aa, Zea mays
  Coding DNA Sequence Number=SeqID_21849
  Gene Ontology: Mol. function=DNA binding; Cellular component=nucleus; Biological process=regulation of transcription
  Homolog annotation: Hit_ID=Q84QS1; Match level="QueryCoverage=62%, HitCoverage=81%, E-value=6e-24, Identity=32%"; Hit description =Transcription factor GT-3b
MVELPIAVADLGPALLFLGSALGNIISLSWAAPGPDPAEAGRGEKQEEKRGEQGNRGKKARAEAQSLQSAVPRRRRCLAVAIEARKLGSAGVGQVALGLWGDGGWRGGEMMEAGGAGAGGRDERVPQWGVQETRELIVARREMEREAVAARRSAKTMWEAVAARLRERGYRRTAEQCKCKWKNLGKETSDPENGRQCPFFDELHAVFTDRARDMQRQLLESESGASVKRKLKQPGGDRSSGLSDDEGNGGEESDEEKPLPSRKRKADDKKQQHQRMSGKSRAGFSSIHELLQDFLVQQQHIDVWWREMMERRAQERIVFEQQWRQTMQKLEQERLLLEHSWMEREEQRRMREETRAEKRDALLTALLNKLLQEDL

SEQ ID NO: 63629 - protein, 121 aa, Zea mays
  Coding DNA Sequence Number=SeqID_21850
MGYGAKVPGELATRYELANDVAYLGATICNAELGDDVDRVMAVGPYSSDNWYQSRFFFIVARSQTPAKIKPTDNVDESKPEPSRSPRRHRGRSGSRHRSGSRIVEHVIERSSANIAWPMLT

SEQ ID NO: 63630 - protein, 91 aa, Zea mays
  Coding DNA Sequence Number=SeqID_21851
MAAGGEPSPLSPAKYSRLPDDAQPDASPKRRKRHHRHHHHHHHRRHRHADSPIPEAADEEVEEGEILDDASSVSAMEVNAESAAPQSSLAP

SEQ ID NO: 63631 - protein, 138 aa, Zea mays
  Coding DNA Sequence Number=SeqID_21852
MGKSKKGGSSSHHSGDKRKREPTPPSEDFGDSEYSEEEFSSESEGSPVWTYIRAVERAGLEGSDESEYSSDEENFLDSSEEGGSGDGGDGDDDRGDGDGGGDGGEGDGKGGDGGGKGGNGDGGDGSKGSSRDSNKASG

SEQ ID NO: 63632 - protein, 50 aa, Zea mays
  Coding DNA Sequence Number=SeqID_21853
MALDGTAMHADDYDKRSRNFGKQLAIKQQKAKNSQINISVGWWDAIDSLN

SEQ ID NO: 63633 - protein, 855 aa, Zea mays
  Coding DNA Sequence Number=SeqID_21854
  Gene Ontology: Mol. function=protein serine/threonine kinase activity; Biological process=protein amino acid phosphorylation
  Homolog annotation: Hit_ID=Q2QLI7; Match level="QueryCoverage=88%, HitCoverage=83%, E-value=0.0, Identity=56%"; Hit description=Protein kinase domain containing protein, expressed
  Pfam annotation: Domain name=Pkinase; Domain location=504-743; Score =142.0; E_value=1.6e-39; Accession=PF00069.15; Description=Protein kinase domain
  Pfam annotation: Domain name=Pkinase_Tyr; Domain location=504-733; Score=-79.5; E_value=1.4e-07; Accession=PF07714.7; Description =Protein tyrosine kinase
  Pfam module annotation: Pfam domain module=Pkinase::Pkinase_Tyr; Domain location=504-743::504-733
EHFGNGADINTDATKMQAPAPPTLPSSKDRRRSLHGAPESESGGILSSDAEDNKGHGRRQSQSCSKSPKPRREKERRHKDGHHSSSSKDHYPKNRSRASPYSRHQSEAHSRDHLRSGERGDDTNGSDRESNDQNGKSGRHTTGTQENERERSSSHGIHDRHGDRHNDRHGSQERYRDDRTYRDKIDSLEATWKHRERSRSHSRSDLRESTRLRDQSRESERRIGSSMHRDHGSKRDTSKHRESDRVNSAYERERGRDAGDREWHRVKGSETHRAKEGRDKVSDSDRYRDSTRSKYSVSDGYKERTRSGEKGRDVDRKNRKFEEMKENYLKEEDEEKYQEKIEQQLAMQEEEDPEKIKEEARRRKEAIMAKYRQQQSQKQDMEAKPSSNDEEVRAMDGNVTMHQKDDNGSSSTGNDKAENKHDSSEVFDGKTDFSVGKSPAQNDTSTSTGAFTDERTIDVSGLGEGSPKGKGDGLHVERNALHDNWDDADGYYTYRFGELLDGHYEIIAAHGKGVFSKVVRAKDLKASKDDPEEVAIKIIRNKETMYKAGKQEVSILEKLASVDREDKRHCVRFISSFMYRNHLCLVFESLNMNLREVLKKFGRNIGLKLTAVRAYSKQLFIALKHLKNCKVLHCDIKPDNMLVNEAKNVLKLCDFGNAMLAGMNEVTPYLVSRFYRAPEIILGLAYDHPLDMWSVGCCLYELYTGKVLFPGPSNNAMLRLHMELKGPFPKKMLRKGAFTMQHFDQDLNFHATEEDPVTKTDSARASAVCTLYMLKRQHLKVLGWRSLDPPLLIMVDLVSQFSNRYCLSGVFLIVFAFCPKKIGYREKKSQLGLPSISMQKLKGSQPVVPVECSPL

SEQ ID NO: 63634 - protein, 122 aa, Zea mays
  Coding DNA Sequence Number=SeqID_21855
MEELLTLLFNALLLVFVVKLLLALLHTKIIVILLYILVLLFAMLLSGRFPDCLRLIDLLDWIGSERSRKWGKMRSKKRKGSAAARERAKEREGSSFALPAKPSPVLEGRRRPFVAQHSTATV

SEQ ID NO: 63635 - protein, 867 aa, Zea mays
  Coding DNA Sequence Number=SeqID_21856
  Gene Ontology: Mol. function=protein serine/threonine kinase activity; Cellular component=ubiquinol-cytochrome-c reductase complex; Biological process=protein amino acid phosphorylation
  Homolog annotation: Hit_ID=Q2QLI8; Match level="QueryCoverage=96%, HitCoverage=96%, E-value=0.0, Identity=60%"; Hit description=D -mannose binding lectin family protein, expressed
  Pfam annotation: Domain name=APH; Domain location=516-705; Score= -13.9; E_value=0.055; Accession=PF01636.13; Description =Phosphotransferase enzyme family
  Pfam annotation: Domain name=B_lectin; Domain location=89-218; Score =37.6; E_value=4.2e-08; Accession=PF01453.15; Description=D-mannose binding lectin
  Pfam annotation: Domain name=PAN_2; Domain location=327-397; Score= -7.5; E_value=0.008; Accession=PF08276.2; Description=PAN-like domain
  Pfam annotation: Domain name=Pkinase; Domain location=515-801; Score =151.9; E_value=1.7e-42; Accession=PF00069.15; Description=Protein kinase domain
  Pfam annotation: Domain name=Pkinase_Tyr; Domain location=515-801; Score=92.0; E_value=1.8e-24; Accession=PF07714.7; Description =Protein tyrosine kinase
  Pfam module annotation: Pfam domain module=APH::B_lectin::PAN _2::Pkinase::Pkinase_Tyr; Domain location=516-705::89-218::327 -397::515-801::515-801
MASPVLHRLILLSVSLSVAIAAADASAVPVEYLYPTLNLTYIHSIDTDGVFLRSPSANFSAAIYNAAGAGQSSDDSQSRFFFSVLHTASRTPVWTATATGSTMFNSIVLSVAPTGLALYDPSAAKPDDPAWSTPRLREPVVALRLLDTGELALIDSRNTTLWSSFDRPTDTLLPGQPLLLGSPLTSSASDRDLSPGAYRLVLTPNDALLQWATNASTAFLTYWSMSSDPAALQDSNQAVAAMAVNSSGLYLFAANGRDTVYRLLFPSPPASKSESRILKLYPSGSLPSAHRTPTDPPAPVPRPFSTYSNGGCEPADGSALPSIADTCAKQEATTRYNYVSLGAGIGYLSTKFAVADTSGDELPACRDLCSANCSCLGFFYKNTSGSCFLLHNRIGSVFRAGADVAVGFIKTLPLPQQQQRGSKGSSSSLSLITIVFGIVFPTVAAVLISFLLYALRRRRPQHVKKSTSSSWFKLPAMLSSSSAPSDSEGLDEDVLIPGLPTRFTYADLDAATDGFKWQIGSGGFGSVFRGELPDRSPVAVKRMNGLGTQGRREFLTEIAVIGNVHHVNLVKLRGFCAEGAGRQLLVYEYMNRGSLDQTLFRSAPALELEWAARLRVCVGAARGLAYLHAGCDRKILHCDVKPENILLDDHGGVKISDFGLAKLMSPEQSGLFTTMRGTRGYLAPEWLMNAPITDKADVYSFGMVLLEIVRGRKNSKKQGEEHQMASGSSASSSSSSSESSGYFPALALELHEQGRYEELVDPRLEGRADAVQVERVVRVALCCLHEDAALRPTMTVVSAMLDGSMEAGQPRAELLRYLRMYGRGLVDLRPAAAGWMEQGKARGSAGGVSSGWSPPSCVSAQQLSGPR

SEQ ID NO: 63636 - protein, 268 aa, Zea mays
  Coding DNA Sequence Number=SeqID_21857
  Homolog annotation: Hit_ID=Q6QP51; Match level="QueryCoverage=55%, HitCoverage=53%, E-value=5e-09, Identity=39%"; Hit description =Putative growth-regulating factor 1
MGRRETEREGGKPVGDRRKGETGGLRVVPRPGRPWVGRGGGSSEVEVESVFRGRGQVRAPGRARRRPSAETRAESEPWGRTRRSFSSSGAEAESEPWGRARRSSSSFRAEAESEPWGRARRSSSSSSSPNPVVGRGGVRRLPGPRPSPSPGVGRGGASYGARGRTWLLSTSLCRVAQQSERRRRRCPLVRLLCADGGYQLRLGVLGVPLIMVPDKPHPPKWPLGMAAVDGCTGQSGAPPDSPTTVGAVAVAPLAHRIVRCYTGQSGEL

SEQ ID NO: 63637 - protein, 356 aa, Zea mays
  Coding DNA Sequence Number=SeqID_21858
  Gene Ontology: Mol. function=amino acid transporter activity; Cellular component=integral to membrane; Biological process=auxin mediated signaling pathway
  Homolog annotation: Hit_ID=Q9SBX5; Match level="QueryCoverage=61%, HitCoverage=41%, E-value=1e-104, Identity=86%"; Hit description=AUX1 protein
  Pfam annotation: Domain name=Aa_trans; Domain location=2-221; Score= -96.3; E_value=0.00047; Accession=PF01490.8; Description =Transmembrane amino acid transporter protein
MTATKIKESRAVSVLLPLSVLTSHRRASASANATTREIMHAMWRPQKFKAIYLLATLYVLTLTLPSAAASYWAFGDELLTHSNALALLPRTPFRDAAVVLMLIHQFITFGFACTPLYFVWEKLIGLHDCRSLCKRAAARLPVVVPIWFLAIIFPFFGPINSAVGSLLVSFTVYIIPALAHMVTFRSPQSRENAVERPPRFAGGWTGAYVINSFVVAWVLVVGFGFGGWASITNFVQQVNTFGLFAKCYQCPPHLTAAPPAAFMPPPPPMAAAPSMPPAATAFNATGLFFPRCSPGSGSVSDDQLIPPPPPPWAPRPPRPVTSSLTRCAQQAWSLALRFCQTRTILKAPWARLTRYE

SEQ ID NO: 63638 - protein, 682 aa, Zea mays
  Coding DNA Sequence Number=SeqID_21859
  Gene Ontology: Mol. function=RNA-directed DNA polymerase activity; Biological process=RNA-dependent DNA replication
  Homolog annotation: Hit_ID=Q8H912; Match level="QueryCoverage=43%, HitCoverage=34%, E-value=3e-33, Identity=27%"; Hit description =Putative zinc knuckle domain containing protein
  Pfam annotation: Domain name=zf-CCHC; Domain location=147-164; Score =7.1; E_value=0.068; Accession=PF00098.13; Description=Zinc knuckle
  Pfam annotation: Domain name=zf-CCHC; Domain location=166-183; Score =23.5; E_value=0.00013; Accession=PF00098.13; Description=Zinc knuckle
  Pfam module annotation: Pfam domain module=zf-CCHC::zf-CCHC; Domain location=147-164::166-183
  Subcellular localization annotation: CTP_CleavageSite=41; ConfidenceScore=5.57e-01
MPLHQIRSSMICSAAPIPRAAPSSFGQIPSSSPTGALKVICAGQDSATKRRPNGRQSKPIQTLLSQIRSKGVTAHPPSEHSTPTSLSPPRKESSNIEVADAGWEMVKPPFWWRKDRRNARSAQASQRSISKEEQEEREKRFLKHVQGKCCNCFATNHRAAACTKPTKCWRCHKDGHQASRCPSYKESSLKIVEQQSKTSSPISEPPYKSYLQVVKGGHQDMATYPGDPRARPGRVDCAVSANGEIKRERDNLVGKSVVCSHDGNNHASEPRHVIEALSEQLGIRGNKMKVLKHHPEQYLIIFEEQQDQRRVLHQSRLHHRGWVFCFAKWNEQRYSSVVRWDFHVRLRLEGVPVHAWTKDVAAQIIGSHCAIHVLDEKTMPRKRTRTFDLWAWSEDPSKIPRELNLAGCVAACLSGTTVFLTIWELAESVVVLSRVTPCTGVVTTMKTMMTTATVAGTVAIAVAQGGSGGLCHGEVEDCVSSSRRRWNRTPTPFWRRPFEPPHLAWGQGAQASSTKLIWRPKRKPSGKRVSFASPLAVVLGVNPIVQLLPSVDPASGILPLAVSTFHPRNDPMLDEVLYGAAVSEAQALRASKIMQLIHSAEDREYMLAALPGLTSEATMEHNIQVETVQVIGPAPSVASLQEEIRPNSEVHNIDDFLISISKPIPVPEREMCPWAISKYFGD

SEQ ID NO: 63639 - protein, 68 aa, Zea mays
  Coding DNA Sequence Number=SeqID_21860
MVRRWSGLRGCVRRPQRATFRDDLRAREELLGFSSALYPKPTSVTGRFPVLMARPFLSVVLLTPSDYL

SEQ ID NO: 63640 - protein, 106 aa, Zea mays
  Coding DNA Sequence Number=SeqID_21861
  Homolog annotation: Hit_ID=Q9XIV2; Match level="QueryCoverage=63%, HitCoverage=95%, E-value=4e-11, Identity=48%"; Hit description=F1F0 -ATPase inhibitor protein
MAMRTALTSLPARLHAPAPPAAMGGRRLLSDGKGRVLSEEERAKESVYIQEKADSEKVKSADADKTTDQAKYGGKKSFEVPSAREKVKEAEEPKAKCEEEDLQSQG

SEQ ID NO: 63641 - protein, 308 aa, Zea mays
  Coding DNA Sequence Number=SeqID_21862
  Gene Ontology: Mol. function=transcription regulator activity; Cellular component=nucleus; Biological process=regulation of transcription
  Homolog annotation: Hit_ID=Q6Z2G7; Match level="QueryCoverage=97%, HitCoverage=95%, E-value=5e-55, Identity=53%"; Hit description =Putative bHLH transcription factor
  Pfam annotation: Domain name=HLH; Domain location=77-127; Score=20.8; E_value=0.0009; Accession=PF00010.16; Description=Helix-loop-helix DNA-binding domain
MARCQGTVESLCQGLLDLDDDKFGAMCSAFGYLQEWPDLGAAMCGANLAVPPAVATPSAGDGNDSSSCSVSGGLRKRRPDAYLDAKVRRERISERMRYLQELVPGCSKVTGKAGMLDEIINYVQSLQKQVEVPTHRHRPASSSPLLPASQLVIPRSLTAGSPCAQFLSMKIAASNPVVSFDIVEDLFGRQLKQACGPAAGQLEPSCLQMSMSPMQQVVHPSAAAGSTGFGPLDMVLSNLYAPAAASCPVSAAPSVSVAAGPSTIEPCLNVNGTAAAWDIGSQNLFSGFDAQFQSVESGCLLDNLKMEM

SEQ ID NO: 63642 - protein, 207 aa, Zea mays
  Coding DNA Sequence Number=SeqID_21863
  Gene Ontology: Mol. function=nucleic acid binding; Cellular component= intracellular; Biological process=chromatin modification
  Homolog annotation: Hit_ID=Q69WZ1; Match level="QueryCoverage=60%, HitCoverage=28%, E-value=3e-74, Identity=96%"; Hit description =Putative WIP1 protein
  Pfam annotation: Domain name=zf-C2H2; Domain location=110-135; Score =6.8; E_value=1.9; Accession=PF00096.16; Description=Zinc finger, C2H2 type
  Pfam annotation: Domain name=zf-C2H2; Domain location=84-106; Score =22.2; E_value=0.0018; Accession=PF00096.16; Description=Zinc finger, C2H2 type
  Pfam module annotation: Pfam domain module=zf-C2H2::zf-C2H2; Domain location=110-135::84-106
MDHPLQTNNPTVGCTQMHMWGHGSQYRKGPESLRGTQPTAMLRLPCYCCAAGCRNNIDHPRARPLKDFRTLQTHYRRRHGIKPFMCRKCGKPFAVRGDWRTHEKNCGRLWYCACGSDFKHKRSLKDHIRAFGRGHAACGVDDCFDDDDDRDDPSSSEVDHAATNTTSNSTTTTAAAANAHHHHHTSWKPPPPPLSSSSRGSGDDRLL

SEQ ID NO: 63643 - protein, 126 aa, Zea mays
  Coding DNA Sequence Number=SeqID_21864
METWRADCDGDWRAEQRQEQQHPRLDQEEEQQRPRLGRGRSSVPRRLLLDKGRGEEQVTTGVVSVTQAAARVSNRSNWARQRRADLLVGARESMHARVRSIKIDGDFDPSGIYGQRCKYRFVNANF

SEQ ID NO: 63644 - protein, 240 aa, Zea mays
  Coding DNA Sequence Number=SeqID_21865
  Subcellular localization annotation: CTP_CleavageSite=22; ConfidenceScore=5.12e-01
MPCARPSVRPLSAGSRRGGRKRSAAGAAARGGRGAAGGGPRGGAGAGAGAGGASGGFGGRRRLGGGWGAGGGGLGGGQHCGGRDGDYEERGDEDPLDHLHLSLGLARCVHVKDTLQRASTPVAIPVAVRESCLLQSSSQNGAVGMPPRLLLQQKLCGKASPTNLVPPSSSICCATIARHCCIGTERHYCTIIARLCCVGQKQVYCGMETPCGADSQGNYAIVVDHRQIADGDGWISIDHA

SEQ ID NO: 63645 - protein, 106 aa, Zea mays
  Coding DNA Sequence Number=SeqID_21866
MGLGVCGSLCRGWIALGEESAAKGAPLIRDTLIRDVWFTGGDEDDGFDYDYASPLQPNGTIPEYVDVYSPLLYTQNPPRLSTCNHCSGEDEVMEEDFQEFQEYDEF

SEQ ID NO: 63646 - protein, 127 aa, Zea mays
  Coding DNA Sequence Number=SeqID_21867
MGSGHSTCSTEAGCSGSLIGMATGTEGESGVAESSSQLAGTPGGHMAQAAGRRCDARVPQGRTIARSRATAVGAGVPEPECSGSLGEDRGEIEHGVGGGDRSGRVGEDRGENERWRPSEGFAGSLED

SEQ ID NO: 63647 - protein, 116 aa, Zea mays
  Coding DNA Sequence Number=SeqID_21868
MDQMYGLSVAEHPIKSSEPSDDGNRSTGGEDSSPSEENHSSENLESPKSSNEATKRQTQDQSNRSQPDLYRLSPVSGRIKTLAEHAVRWRGHNGTQQQGGSTRLAQWRCRGQGCGA

SEQ ID NO: 63648 - protein, 271 aa, Zea mays
  Coding DNA Sequence Number=SeqID_21869
MGLLIVPILPSPRSHVDGLALAIIVRGLIFYAQPLQPLSSPAACTGLCPPCSIFPLRAPQVPSAQLNSLACALSSTTRPAHPWHRPQLGAPSAIPRPAPAARPSLELTRPLAPAPDRAPWPPRPTLCCCSPVLQLAAPLLFSLLLYSRHGTRLCSLPRGAPLKLVLVATSPWSFLAGAPPYSTLQRAPHLAALGPQLGLPRSCSLWPRTPSSSGPFSQSVHASFVEQRGKICSLSLGQCLCGFGKEDGDMVVEDSEVGLCRTSGARRKART

SEQ ID NO: 63649 - protein, 47 aa, Zea mays
  Coding DNA Sequence Number=SeqID_21870
MAGGQSLATVIPLLRQRRVEATSGANLKRAARRKKKILTYGSHTPYK

SEQ ID NO: 63650 - protein, 238 aa, Zea mays
  Coding DNA Sequence Number=SeqID_21871
  Subcellular localization annotation: CTP_CleavageSite=51; ConfidenceScore=5.18e-01
MGPLRQTDPRWRALAVVWSWFVSAVSPMPQPPGPLRSPPLSRLSPARLTVPAGQEGDRSASNLPPPSHIRGSPWTDRNNVGLRVRTRSPCSPSPQFHFAPSVFSDCAPWRAVGSPAMVTAAGLHTPPCSGEICRGLGLGCVILNRWLRLKARYRFSQRRDGRPIGIAGVWGMFHCIKSRPLIHHRAVMRERGLAGAVDRGSLIQRSIELTVEETVTEDPGDQQIEVAEQELIEGKLCP

SEQ ID NO: 63651 - protein, 243 aa, Zea mays
  Coding DNA Sequence Number=SeqID_21872
MDATARDLRAGAKRPARRTASREAVTELGRTAARRSWAHSRDRAPWGASSERGCERDPCRGNSRHHEREQSSDRACAGKRTRALGLGAVRAEREMSAELKEEAAALGAPSWDWEARARPGEYQSRDRELRPWEVRDRGREKQELGWGFGEAMASKKHSTRHGSLRGESWAQRSALASREEQRARGDERLGEGGRAGAERAPWEPRGRPWRWAEGARRNSMAQEQEEKIREQELAGKISMSTSG

SEQ ID NO: 63652 - protein, 315 aa, Zea mays
  Coding DNA Sequence Number=SeqID_21873
  Gene Ontology: Mol. function=calcium ion binding
  Homolog annotation: Hit_ID=Q10NP2; Match level="QueryCoverage=66%, HitCoverage=47%, E-value=2e-78, Identity=88%"; Hit description =Calcium-binding EF hand family protein, putative, expressed
  Pfam annotation: Domain name=TPR_1; Domain location=128-161; Score =26.4; E_value=0.0001; Accession=PF00515.18; Description =Tetratricopeptide repeat
  Pfam annotation: Domain name=TPR_1; Domain location=162-195; Score =27.6; E_value=4.3e-05; Accession=PF00515.18; Description =Tetratricopeptide repeat
  Pfam annotation: Domain name=TPR_1; Domain location=196-229; Score =12.1; E_value=0.19; Accession=PF00515.18; Description=Tetratricopepti de repeat
  Pfam annotation: Domain name=TPR_1; Domain location=94-127; Score =25.7; E_value=0.00017; Accession=PF00515.18; Description =Tetratricopeptide repeat
  Pfam annotation: Domain name=TPR_2; Domain location=128-161; Score =25.8; E_value=0.00016; Accession=PF07719.7; Description =Tetratricopeptide repeat
  Pfam annotation: Domain name=TPR_2; Domain location=162-195; Score =23.3; E_value=0.00086; Accession=PF07719.7; Description =Tetratricopeptide repeat
  Pfam annotation: Domain name=TPR_2; Domain location=196-229; Score =17.6; E_value=0.046; Accession=PF07719.7; Description=Tetratricopepti de repeat
  Pfam annotation: Domain name=TPR_2; Domain location=94-127; Score =20.8; E_value=0.0048; Accession=PF07719.7; Description =Tetratricopeptide repeat
  Pfam annotation: Domain name=TPR_4; Domain location=128-153; Score =4.1; E_value=12; Accession=PF07721.5; Description=Tetratricopeptide repeat
  Pfam annotation: Domain name=TPR_4; Domain location=196-221; Score =15.2; E_value=0.23; Accession=PF07721.5; Description=Tetratricopeptid e repeat
  Pfam annotation: Domain name=TPR_4; Domain location=94-119; Score =7.8; E_value=4.5; Accession=PF07721.5; Description=Tetratricopeptide repeat
  Pfam module annotation: Pfam domain module=TPR_1::TPR_1::TPR_1::TPR _1::TPR_2::TPR_2::TPR_2::TPR_2::TPR_4::TPR_4::TPR_4; Domain location
MTWSSSSDAAEAEGGEEKFAITHGAVVVRKGSIDGSGGAGNSNFDSFSEAGWSREISGAADSASTSAPWDETSRDYLTFVKEYREAAILCPSHARALKLLGSTLFGVGEYRAAEKALEEAIFLKEDYANAHCDLGSALHAVGEDDRAIQEFQTAIDLKPGHVDALYNLGGLNMDAGRFVWAAEMYTRVLSIRPNHWRAQLNKAVALLGQGESEEAKKALKEAFKMTQRVKVYDAISHLKTLQKKKPKPSLMLLVLVVLIWMFNDPDWGFGILSTLVKLEESDHIRHGSHTSQSPELVVVAATVTGSAAGAEDAWR

SEQ ID NO: 63653 - protein, 134 aa, Zea mays
  Coding DNA Sequence Number=SeqID_21874
MAYIPACESSPTRCWSGFPAVDPSPSEVAQQPEGGFPPDDRSHRRRLGTTVGVAPASSTGSDDGVANSSDGGSGSNDEESEREKGASSAGRRETEELGRRTNAWVVARVAGLRPWASGPGRGASVAAWTGRRAA

SEQ ID NO: 63654 - protein, 76 aa, Zea mays
  Coding DNA Sequence Number=SeqID_21875
MCEANLWAEEVESTLRATNAHLEEANSDLLREHRAARGLNEHGLNEIDAVVIVEGFAADWSDEELDSIEEQMSPHA

SEQ ID NO: 63655 - protein, 109 aa, Zea mays
  Coding DNA Sequence Number=SeqID_21876
  Subcellular localization annotation: CTP_CleavageSite=30; ConfidenceScore=5.57e-01
MQSMMKVQKVVPKGTQRKFSAQKSFLRECRAKSMTKLQKVVPKGAQPASSIFEMSFGLLTFGIVIQYTTKKYKASGLVTSQFSTTLRPNLRYKSAPCASGYIGDVNQIR

SEQ ID NO: 63656 - protein, 225 aa, Zea mays
  Coding DNA Sequence Number=SeqID_21877
  Subcellular localization annotation: CTP_CleavageSite=64; ConfidenceScore=5.44e-01
MAAVDCPWTVSSALVFLWLQLAVDFPCRACLGPSSPMSSSLGVPPMPALAQVTRRRPAHPQPWTCQAASSLAGRREPLRGLLPIQFGAAAPQPRSVVPLLTVNPPRPSLPVPAVAGCRSSLHRVYSNVVDSSMVLVVKLRFIDSLPSVRSCPTIDAVVVRLHVVCDNIVVFPSCAPPRSLPRHHPLSQHRVDDLRFSPLCSHLARCCSSTHQLDAELKKAPVRRH

SEQ ID NO: 63657 - protein, 314 aa, Zea mays
  Coding DNA Sequence Number=SeqID_21878
  Gene Ontology: Mol. function=cysteine-type peptidase activity; Biological process=ubiquitin cycle
  Homolog annotation: Hit_ID=Q2QTR5; Match level="QueryCoverage=99%, HitCoverage=73%, E-value=8e-39, Identity=43%"; Hit description =Expressed protein
MDAFVAGSRGRPALSFLCPKISLFSPPSHSWFRWLVDEIRGLLPRGFDIIGVLLVGGEGSDADVTRALEQARALRELLFGVAASHGLVGGHMDAATGEIRFVVSESGWTNSVEGSVVTWEDEPGRLLWEKGCLLRCELLLKLPLYLRPDVNSDAIAITVNQSAPSLKPGGTPVVEYFPGLADQMIVMKRIIASEITQQAQLQPFHFIPSGWHVPVTAIYNTRYGETEERQSELRKELHLRLGLPLDRPLLRISNALTFGGMGRRKKSMPRSGSSLLRDIHRELPSSGVSGGVMSLIDGSYEYYHYLHDGIDDNV

SEQ ID NO: 63658 - protein, 103 aa, Zea mays
  Coding DNA Sequence Number=SeqID_21879
  Homolog annotation: Hit_ID=Q5SMJ0; Match level="QueryCoverage=40%, HitCoverage=3%, E-value=9e-07, Identity=60%"; Hit description =Putative salt-inducible protein kinase
MKPLKQWFLLSVRPGPWDALHMGGNIPTFGLARSSLATVVLLVLKVPKLFISAPREDLDSIISVSYPEDYNNMMEQYEKLTIAAPESSLCPGTGSGYRLEGGE

SEQ ID NO: 63659 - protein, 186 aa, Zea mays
  Coding DNA Sequence Number=SeqID_21880
  Gene Ontology: Mol. function=serine esterase activity; Biological process=alkaloid metabolic process
  Homolog annotation: Hit_ID=Q2R416; Match level="QueryCoverage=86%, HitCoverage=83%, E-value=1e-53, Identity=63%"; Hit description =Esterase PIR7A, putative
  Pfam annotation: Domain name=DUF1234; Domain location=14-166; Score= -91.0; E_value=0.085; Accession=PF06821.4; Description=AlphaBeta hydrolase family of unknown funct
MESGTERRRRRHHFVLVHGTCHGAWCWYKVATLLSSAGHRVTALDMAACGASPGRAEEVPSFEEYSRPLLATVAGLAPEEKVVLVGHSFGGVSLALAMEQYPDRVAVAVFVATGMPSAGKPMAFVFEQFLQEEYPADRYMDCEFETSGDPQRPVETFRFGPQYLKQRLYQLSPPEVGDNGQWPLAH

SEQ ID NO: 63660 - protein, 96 aa, Zea mays
  Coding DNA Sequence Number=SeqID_21881
MGKSKKGGSSSHHSGDKRKREPTRPLEDFGDSEYSEEEFSSESKGSPGSDGDDGGEGDGGDDDGDGDGSRGGDKGDGGNGKAAAAAARPVSRHHWA

SEQ ID NO: 63661 - protein, 652 aa, Zea mays
  Coding DNA Sequence Number=SeqID_21882
  Gene Ontology: Mol. function=sequence-specific DNA binding; Cellular component=nucleus; Biological process=regulation of transcription, DNA-dependent
  Homolog annotation: Hit_ID=Q9SWE0; Match level="QueryCoverage=93%, HitCoverage=51%, E-value=0.0, Identity=91%"; Hit description =Flowering-time protein isoform alpha
  Pfam annotation: Domain name=Homeobox; Domain location=76-132; Score =1.7; E_value=0.0033; Accession=PF00046.19; Description=Homeobox domain
MELVLVKPAAGALVEVGSGSVAGAGSIPAMVAAQQEILHEQVDQLQRLVVAQCRLTGVNPLAQEMAAGALSIKIGKRPRDLLNPKAVKCMQSLFALKDILGKKETREISLLCGVTVTQVREFFTVQRSRVRKFVRLSQEKALRIETPKEQDNSYSINTEQIPPDIEAQAEVIEPLRTLEPVVLQSSLQPTCVPQISSQSMELQQSDLQHMEVFQNSLQQAEAQHNIAAPIMPSGAMVMQPTDAKISSDSVQKEVKQEGVHSGVASEDKKFLESIFALMQKEETFSGQVKLMEWILQINNVTVLSRFVTMGGLTIMSTWLSQAAIEEQTSVIHVIFKVLLHLPLHKALPVHMSVVLQTINKLRFYRTQDISSRARNLLSRLSKVLVRIQALKKPQKDLICKQRISEILRDESWKSEVDITEEVLALTDGANESRKPEPRKTPMLLTASAIETNKRSSVQTKSKQKRKVLLVEQPNKKATWKNANSVRNTSTNNSRPLSADDIQKAKMRAMFMQEKRGKIDINKLSDKPQAMDTKKAAGLVNSNPSAMPISPHTSAAQPVDPSPSTSKQSTDPQPDNTEISGGLKLNIGSKNNVIEKLDCKRVLWQIPPVLSCLLDDKNQQIGVQKFQELSMLSPVQASEVFTLVTVLQISMFL

SEQ ID NO: 63662 - protein, 119 aa, Zea mays
  Coding DNA Sequence Number=SeqID_21883
MALGPLVIGTRRSSSTSSHLLHAREQRRPAGLGGEGGETTMDGGGCHGEEGGAPCSAKIEKGREWCMGEGRGWAAIYRAKLWTCQTAPADALEVIRALVREIKTHKNWFVSGLENSGNS

SEQ ID NO: 63663 - protein, 179 aa, Zea mays
  Coding DNA Sequence Number=SeqID_21884
MESLGVDACALASRCRNRAPRARRGRKRDAKRAVAIDSRTYGRSEHEDRSMGFARCSGTCSMRHWEQRPAGCRGISHRRSCAAIDPPRPWSGYLDFLATGSFIHDPAAYITLYPFRQFILHKNPSVYLKTTRGPRSWVLFLGGTCAEAPGFPFISVRGPESDEFILEMIFNTNFRQKLI

SEQ ID NO: 63664 - protein, 127 aa, Zea mays
  Coding DNA Sequence Number=SeqID_21885
MESLGVDACALASRCRNRAPRTRRGRKRDAKRAVAIDSRTYGRSEHEDRSMGFARCSGTCSMRRWEQRPAGCRGISHRRSCAAIDPPRPWSGYLDFLAADHYVNWNMERPPGKTVLPQGYNGTPLAD

SEQ ID NO: 63665 - protein, 130 aa, Zea mays
  Coding DNA Sequence Number=SeqID_21886
  Gene Ontology: Mol. function=translation initiation factor activity; Cellular component=protein complex; Biological process=translation
  Homolog annotation: Hit_ID=Q75M19; Match level="QueryCoverage=81%, HitCoverage=27%, E-value=2e-17, Identity=50%"; Hit description =Putative 26S proteasome regulatory subunit
  Pfam annotation: Domain name=Mov34; Domain location=17-129; Score =35.0; E_value=2.7e-07; Accession=PF01398.11; Description=Mov34MPNPAD- 1 family
  Subcellular localization annotation: CTP_CleavageSite=33; ConfidenceScore=5.31e-01
MATSPALLFPSPSSASSAPSSARVEAVVLFNVCDSYVRRPDQADRVIGTLLGSLLSDGTVHVRNSYVVPHSESADQVGSDHISNELTRSFALGYLLMIGADAGRHRHRLTTINMYASHQKVNPKEASVRM

SEQ ID NO: 63666 - protein, 55 aa, Zea mays
  Coding DNA Sequence Number=SeqID_21887
MEDLSQMTSIIVIGCDCFYFDICGTDPKSPMTQGKPRCIYPFLVVLNSLSLEMMH

SEQ ID NO: 63667 - protein, 125 aa, Zea mays
  Coding DNA Sequence Number=SeqID_21888
MSREHTKREMVTGEKPEASGKKNKEWTPLKEAGDKHKEESTGSIKSQRKGDKKKKKIKKVVYYENDSSSPSTSGAESTSSKRQERKKYKRGNQKKKKKKKATWADYLLSSPIHVYTRAAQLRMRV

SEQ ID NO: 63668 - protein, 69 aa, Zea mays
  Coding DNA Sequence Number=SeqID_21889
  Subcellular localization annotation: CTP_CleavageSite=31; ConfidenceScore=5.49e-01
MVGMPTFAQPPRALASAHGQTPRRRQALPPPCAARATPTTSDRHQPIDVFARTSPTSVDTSPELDHRRY

SEQ ID NO: 63669 - protein, 334 aa, Zea mays
  Coding DNA Sequence Number=SeqID_21890
  Gene Ontology: Mol. function=protein binding; Cellular component =integral to membrane; Biological process=defense response
  Homolog annotation: Hit_ID=A0AAQ1; Match level="QueryCoverage=93%, HitCoverage=90%, E-value=2e-93, Identity=56%"; Hit description =Polygalacturonase inhibiting protein 2 precursor
  Pfam annotation: Domain name=LRRNT_2; Domain location=26-64; Score =40.5; E_value=5.9e-09; Accession=PF08263.3; Description=Leucine rich repeat N-terminal domain
  Pfam annotation: Domain name=LRR_1; Domain location=119-141; Score =8.1; E_value=8.9; Accession=PF00560.23; Description=Leucine Rich Repeat
  Pfam annotation: Domain name=LRR_1; Domain location=143-165; Score =12.7; E_value=1.2; Accession=PF00560.23; Description=Leucine Rich Repeat
  Pfam annotation: Domain name=LRR_1; Domain location=167-190; Score =16.3; E_value=0.11; Accession=PF00560.23; Description=Leucine Rich Repeat
  Pfam annotation: Domain name=LRR_1; Domain location=195-217; Score =3.4; E_value=67; Accession=PF00560.23; Description=Leucine Rich Repeat
  Pfam annotation: Domain name=LRR_1; Domain location=265-287; Score =11.5; E_value=2; Accession=PF00560.23; Description=Leucine Rich Repeat
  Pfam annotation: Domain name=LRR_1; Domain location=289-310; Score =6.6; E_value=16; Accession=PF00560.23; Description=Leucine Rich Repeat
  Pfam annotation: Domain name=LRR_1; Domain location=94-117; Score =8.5; E_value=7.4; Accession=PF00560.23; Description=Leucine Rich Repeat
  Pfam module annotation: Pfam domain module=LRRNT_2::LRR_1::LRR_1::LRR_ 1::LRR_1::LRR_1::LRR_1::LRR_1; Domain location=26-64::119-141::143 -165::167-190::195-217::265-287::289-310::94-117
MRSLSVAVLLLVAAAASASAAKDRCHSGDKAALLAIKAALGNPYHFASWTPDNPCCDWYDVDCDATTGRVVGLAVFQDANLTGTIPDAVAGLVHLQNLMLHHLPGISGPIPPAIGRLSNLSFLTISWTGVSGPVPSFLGTLTRLNQLDLSFNALTGAVPASLAALPSLYSIDISRNRLTGSLPPLLFSRLDKAQQEAYLRLSHNNLTGSVPPEFSAVAFAQVDLSRNAFAGDASGLFGRAKPVQQMDLSRNAFSFNLSAVELPEQLNSLDLSHNAIYGGIPAQVVNLTNLQLFNVSYNRLCGAVPTGGNMASFDAYSYQHNRCLCGPPLADPCK

SEQ ID NO: 63670 - protein, 172 aa, Zea mays
  Coding DNA Sequence Number=SeqID_21891
MDPCIGAIIIGAENLLKFRKGPLTGTAFDPLPLPTGDKERIEKRREELAAEQQWVDVQEMRRVAECREKEKKHELQKVEDQHSCYDKNSSNMDMSILAPNKYSTKVVKIEYMAFRQKAPLVALVVERVEEVELCHPTKLNSGLGAKIYGVDPCHVRVHVRLIEANAIGVALR

SEQ ID NO: 63671 - protein, 209 aa, Zea mays
  Coding DNA Sequence Number=SeqID_21892
  Gene Ontology: Mol. function=nutrient reservoir activity; Cellular component=apoplast; Biological process=auxin mediated signaling pathway
  Homolog annotation: Hit_ID=Q6Z964; Match level="QueryCoverage=82%, HitCoverage=79%, E-value=5e-51, Identity=58%"; Hit description =Putative adenosine diphosphate glucose pyrophosphatase
  Pfam annotation: Domain name=Cupin_1; Domain location=49-196; Score =112.9; E_value=9.2e-31; Accession=PF00190.13; Description=Cupin
  Pfam annotation: Domain name=Cupin_2; Domain location=84-160; Score =46.6; E_value=8.6e-11; Accession=PF07883.2; Description=Cupin domain
  Pfam module annotation: Pfam domain module=Cupin_1::Cupin_2; Domain location=49-196::84-160
MKETLSYCRFYGPNILEDYMWTYGSSQTRRPGYPCKPKGLVSSDDFYSDALARPGPVIAPFNTSLASAAVKQLPGLNGLGISATRVDVQPGGVVPMHTHPEASELIFLLEGTLFAGFISAETNKAYVKILKKGDLYVFPQGLLHFQFNTGNTTATAIAAYSNQNPGLQIAVYALFGNTLTVETVNKTTFVTKEEVMRLKDLFGQSSVPS

SEQ ID NO: 63672 - protein, 266 aa, Zea mays
  Coding DNA Sequence Number=SeqID_21893
MAWWRVHHDTLLLMWTLLHNHRGLHRYLSFLVRALEIDLALSRRAMDPPEAVEVMSSILVEGHREEERHSVNRPTMTRLGGIRRSSSQSPRAPNGNPTIRRLPSRSTTKISQRRRIHRSNFRPSQTLSGETTLFAVGSFLGQSARRTRHAGDMPVLGETLSISSNRPRTPALDKTSHVSTTHAKCHHYGFLSHQVAIVAVTAIGQQAKKRPNDSEELHNGSGATSKPSSNSNEFHEGSRATDGYPRIGYLKFRRATLDGEPANKYR

SEQ ID NO: 63673 - protein, 131 aa, Zea mays
  Coding DNA Sequence Number=SeqID_21894
MAERREGGSLQPLAVVLLEYIVFVPPTRASDSAAVPAATTPAPKITASSRHAINSKVSWCSRRLCTTVVQLSFRHGSSAQQQQGVMMSRCSDQPTILALPRWLTVCDVDTSRNINAKRSRITVAWCCGAAV

SEQ ID NO: 63674 - protein, 73 aa, Zea mays
  Coding DNA Sequence Number=SeqID_21895
MDRGGFVGVGACLNDLWKGQGDTAKCAATGQVTGTTTWAVGVKRSAGMKVASAAGVAMGMGNHVLYMLAPVPL

SEQ ID NO: 63675 - protein, 143 aa, Zea mays
  Coding DNA Sequence Number=SeqID_21896
MHKNRLGPRQQRPKRTARQGSRESSELGRQYVTQTAEPLWGEQETDCRSRTAGAPGALEFPFQSGAAPARPCLAPVPSEEPASASYAVVVTDKPDTPADDKAEEVSAAPSGSAEAPMAELVPSEASSSPDDGGLDEILSKEGI

SEQ ID NO: 63676 - protein, 133 aa, Zea mays
  Coding DNA Sequence Number=SeqID_21897
  Gene Ontology: Cellular component=chloroplast thylakoid membrane
  Homolog annotation: Hit_ID=Q8LCA1; Match level="QueryCoverage=47%, HitCoverage=36%, E-value=1e-07, Identity=39%"; Hit description =Thylakoid membrane phosphoprotein 14 kDa, chloroplast precursor
MAGTVEGVAFCGIRGGQLAEAELERDGVCSEAGAGFGETRIFYEFLILRYWFYNVLLNIEVTPTLILTGFGAFIALWILSSVVAAVDSVPLLPKLLELIGTAYTIWFIARYLLFKESRDELFAKFEDLKQRII

SEQ ID NO: 63677 - protein, 577 aa, Zea mays
  Coding DNA Sequence Number=SeqID_21898
  Gene Ontology: Mol. function=protein binding; Cellular component =nucleus; Biological process=embryonic development via the syncytial blastoderm
  Homolog annotation: Hit_ID=Q6K8D9; Match level="QueryCoverage=99%, HitCoverage=100%, E-value=0.0, Identity=71%"; Hit description =Putative GAMYB-binding protein
  Pfam annotation: Domain name=SKIP_SNW; Domain location=177-343; Score= 399.0; E_value=7.1e-117; Accession=PF02731.6; Description=SKIPSNW domain
MATLKDLLPAPKTSASTFYDHSSDPWFKERYGGESAQAAAAARPAAAARLMPPYGKRAGFVPRRPEDFGDGGAFPEIHVAQYPLGMGRRDDKGGSRILALTVDAHGSVAFDAVVKQGENAGKIVYSKHSDLVPKIATADSQAMSDDDEEQKQIEETTERTKAALEKPKNVPTHDSESKFIKYKPSQQSAAFNSGAKERIIRMSEVAVDPLEPPKFKHKRVPRASGSPPVPVMHSPPRPVTVKDQQDWKIPPCISNWKNPKGYTIPLDKRLAADGRGLQEVQINDNFAKLSEALYVAEQKAREAVQMRSKVQRELMLKEKERKEQELRALAQRARMERTGAPPAPSGVPAGGGRGARRESREEREARIERDKIREERRRERERERRLEAKDAAMGKKSKITRDRDRDISEKIALGMASTGAAKAGEVMYDQRLFNQDKGMDSGFATDDQYNIYSKGLFTAQSTMSTLYRPKKDGDSDVYGDADEQLEKVMKTERFKPDKGFTGASERTGKRDRPVEFDKQEENDPFGLDQFLTEVKKGKKAVEKIGGGGSMKASGGSSMRDDYDGGSGRSRINFERGR

SEQ ID NO: 63678 - protein, 163 aa, Zea mays
  Coding DNA Sequence Number=SeqID_21899
  Homolog annotation: Hit_ID=Q6QP51; Match level="QueryCoverage=25%, HitCoverage=19%, E-value=4e-12, Identity=78%"; Hit description =Putative growth-regulating factor 1
MAGFFAGAGGHLMAEATRRGALGGNRAGEGWAREKGADSVFCFLTKNSLNELGDKYGLCEVLQTILSGPGKGDTPERILPYEGTRLRASLLIRGSKAGPSEGFNSRLRARGLHTHYWSEVQRPAPRKGSTAASGYSGSAPTSDQGFEGWPPKGSQPPQTQSEG

SEQ ID NO: 63679 - protein, 641 aa, Zea mays
  Coding DNA Sequence Number=SeqID_21900
  Gene Ontology: Mol. function=RNA-directed DNA polymerase activity; Cellular component=intracellular; Biological process=RNA-dependent DNA replication
  Homolog annotation: Hit_ID=UPI00004C1733; Match level="QueryCoverage =95%, HitCoverage=44%, E-value=0.0, Identity=95%"; Hit description =UPI00004C1733 related cluster
  Pfam annotation: Domain name=RVT_1; Domain location=56-225; Score =143.2; E_value=7.2e-40; Accession=PF00078.17; Description=Reverse transcriptase (RNA-dependent
  Pfam annotation: Domain name=RnaseH; Domain location=455-582; Score =10.8; E_value=5.8e-06; Accession=PF00075.14; Description=RNase H
  Pfam module annotation: Pfam domain module=RVT_1::RnaseH; Domain location=56-225::455-582
MPGIPRDVAEHSLDIRAGARPVKQPLCRFDEEKRRAIGEEIHKLMTAGFIKEVFHPEWLSNPVLVRKKGGKWRMCVDYTGLNKACPKVPYPLPRIDQIVDSTAGCETLSFLDAYSGYHQIRMKESDQLATSFITPFGMYCYVTMTFGLRNAGATYQRCMNHVFGEHIGRTVEAYVDDIVVKTRKASDLLSDLEVTFRCLKAKGVKLNPKKCVFGVPQGMLLGFIVSERGIEANPEKIAAVTSMGPIKDLKGVQRIMGCLAALSRFISRLDERGLPLYRLLRKAECFTWTPEAEEALGNLKALLTKAPILVPPATGEALLVYVAATTQVVSAAIVIERQEEGHALPVQRPVYFVSKVLSETKIRYPQVQKLLYAVILTRRKLRHYFESHPVTVVSSFPLGEIIQCREASGRIAKWAVEIMGETISFAPRKAIKSQVLADFVAEWVDTQLPTAPIQPELWTMFFDGSLMKTGAGAGLLFISPLGKHLRYVLRLHFPASNNVAEYEALVNGLRIAIELGVRRLDARGDSQLVIDQVMKNSHCRDPKMEAYCDEVRRLEDKFYGLELNHIARRYNETADELAKIASGRTTVPPDVFSRDLHQPSVKIDDTPEPELPSAQPEAPSARPEAASVQPEVLRAPRGGGE

SEQ ID NO: 63680 - protein, 93 aa, Zea mays
  Coding DNA Sequence Number=SeqID_21901
MEALPVLEKKECRGPSGSVASFRSRCRKYRRSESRSEDWDVGEQEGKGSSRRVSINEQLAPCSLKNVGRERGTGRGRLLRLLLIKEIGEQDGS

SEQ ID NO: 63681 - protein, 79 aa, Zea mays
  Coding DNA Sequence Number=SeqID_21902
MTERVRQARPHVPSSAGRYGRGRRQANHRAAWVWVAKHDFFAAATFVFVAPDSGSVEAAPFVLSDLLVGNEVLRQDNWS

SEQ ID NO: 63682 - protein, 228 aa, Zea mays
  Coding DNA Sequence Number=SeqID_21903
  Homolog annotation: Hit_ID=Q75IM5; Match level="QueryCoverage=36%, HitCoverage=29%, E-value=3e-27, Identity=66%"; Hit description =Putative senescence-associated protein
MRGGAKTRTRTEGAAIAGRAFYTDGQTILISRAASATGKPASHPLSPPDTTLPLPLLGSDALGSRRTLRSLHLIPFPYSPSHDVRRCEDRPWHQRPRCLEQCREEEREKRQERSRHEADDRSGEGSSEDEREQEKEEKQKDRQSGGMPVGAQDEDCYRWNAPDILCYRCDSCRAGVMEQVRQDWHKIFVLDVAVLAALVCICSCGCCAFRNARHSRSQYPYGVAMMGW

SEQ ID NO: 63683 - protein, 120 aa, Zea mays
  Coding DNA Sequence Number=SeqID_21904
MPYTPTRTERIGREAGVVDPPVGTRIPSLGYVDAGVDWAARNEERSWMGDAEPGSWPSREHNYNYQQIVVWISDKRNSLWFDIRRSAFGNIFSANLRQAPARQAALGTGIPNTAVCAFYD

SEQ ID NO: 63684 - protein, 121 aa, Zea mays
  Coding DNA Sequence Number=SeqID_21905
  Gene Ontology: Mol. function=RNA polymerase II transcription factor activity; Cellular component=transcription factor TFIID complex; Biological process=transcription initiation from RNA polymerase II promoter
  Homolog annotation: Hit_ID=Q6JAD5; Match level="QueryCoverage=97%, HitCoverage=47%, E-value=2e-41, Identity=63%"; Hit description=TATA sequence-binding protein 1
  Pfam annotation: Domain name=TBP; Domain location=32-118; Score =137.5; E_value=3.7e-38; Accession=PF00352.12; Description =Transcription factor TFIID (or TATA-binding protein, TBP)
MRIREPKTTTLIFASGKMFARIVQKLGSPARFKDFKVQNIVGSCDLKFPIRLEGLALASGLSATYEPEIFPGLVYRMVDPKVVILVFVSGKIVLTGAKVREEICAAFEKIHPMLVQFRKRS

SEQ ID NO: 63685 - protein, 621 aa, Zea mays
  Coding DNA Sequence Number=SeqID_21906
  Gene Ontology: Mol. function=calcium ion binding; Cellular component =cell cortex; Biological process=epidermal growth factor receptor signaling pathway
  Homolog annotation: Hit_ID=Q10S92; Match level="QueryCoverage=96%, HitCoverage=57%, E-value=0.0, Identity=66%"; Hit description=EF hand family protein, expressed
  Pfam annotation: Domain name=efhand; Domain location=41-69; Score =17.0; E_value=0.069; Accession=PF00036.22; Description=EF hand
  Pfam annotation: Domain name=efhand; Domain location=421-449; Score =15.3; E_value=0.23; Accession=PF00036.22; Description=EF hand
  Pfam annotation: Domain name=efhand; Domain location=455-483; Score =23.0; E_value=0.001; Accession=PF00036.22; Description=EF hand
  Pfam annotation: Domain name=efhand; Domain location=7-35; Score =17.5; E_value=0.049; Accession=PF00036.22; Description=EF hand
  Pfam module annotation: Pfam domain module=efhand::efhand::efhand::efh and; Domain location=41-69::421-449::455-483::7-35
MAAGTEAFEAYFRRADLDQDGRISGQEAVAFFQGANLPQPVLAQVWMHADQNKTGFLGRPEFFNALRLVTVAQSGRQLTPDIVQSALYGPAAARIPAPKIAAGAARSQMGAAGAPRPQGSAAMTPGQVGAAQMNPAGTPRPQGSGMMPTSTQVSMLQVNPGAAPRPQGISSMMPAASQGGALQATQFAAPRAMQPQPPNLGITQQQPSSTGFMRPPQVGTPAASFQAQAPGINQGLVHGGSMEGSISWQGGNAASVGGIPRAIPGAAPSQTTRGFGPGLPSTMGMVPGQQVQAMSSSPLPPQSNSAVLPQNSKALVLSGNGPASSSGSSTDIFSALTQPKPSLSAPQTSSIPSSSSFMATPTGSQNLTNLTQFGSLQGSSQPQQTQPIVKSIPAPATPVVSAGISNSASQWPKITQPDIQKYMKVFGDVDRDRDGKITGAEARTLFLSWRLPREVLKQVWDLSDQDNDGMLSLREFCIALYLMERHRAGIPLPPALPDSFRHDETLLRVTGLPSTAYNSPSWQHNQGSGGLPQRGPGAPGVPAGGVRPPLPSHLHSQTDGASKQGQPRSHMPGMDNHVVIQGNKDDKSALNQAAQEVVDAPKKVGSGFEVWIIMCVISGLV

SEQ ID NO: 63686 - protein, 259 aa, Zea mays
  Coding DNA Sequence Number=SeqID_21907
  Gene Ontology: Mol. function=nucleoside-triphosphatase activity; Cellular component=membrane; Biological process=proteolysis
  Homolog annotation: Hit_ID=UPI0000660386; Match level="QueryCoverage =69%, HitCoverage=97%, E-value=7e-19, Identity=34%"; Hit description =Homolog of Homo sapiens "Probable UPF0334 kinase-like protein
  Pfam annotation: Domain name=DUF265; Domain location=56-190; Score =175.5; E_value=1.3e-49; Accession=PF03266.5; Description=Protein of unknown function, DUF265
  Subcellular localization annotation: CTP_CleavageSite=40; ConfidenceScore=5.30e-01
MAAVPSGFLLITGPPGVGKTTLVMRVFETLRGSHPNLNIRGFYTRTALPRLLELRRGERGRRKDRVRGCHARRPESVRWPTVGKYKVDVASLESLAVPELQVKEETDLFIIDEVGKMELFSSAFFPAVMRVIESNIPVLATIPIPRQGRDIPGVARLRNHPGAAVFTLDTGNRDTMRDTICSQLRSLLQRLFNGEDIMQCYGSQSAESSGSPLSSQFPLSLSPSGKAPLNANAASFVSMKAESARANLTGDTLATPFFV

SEQ ID NO: 63687 - protein, 305 aa, Zea mays
  Coding DNA Sequence Number=SeqID_21908
  Gene Ontology: Mol. function=phosphotransferase activity, phosphate group as acceptor; Cellular component=chloroplast; Biological process=nucleobase, nucleoside, nucleotide and nucleic acid metabolic process
  Homolog annotation: Hit_ID=Q10S93; Match level="QueryCoverage=99%, HitCoverage=100%, E-value=1e-123, Identity=76%"; Hit description =Adenylate kinase, chloroplast, putative, expressed
  Pfam annotation: Domain name=ADK; Domain location=62-256; Score =140.5; E_value=4.6e-39; Accession=PF00406.12; Description=Adenylate kinase
  Subcellular localization annotation: CTP_CleavageSite=35; ConfidenceScore=5.34e-01
MAAVQRLLRAVAPGGSAAAAVRRRMTSLAPEQAPSAAAGFPFAAEQRARRPVAAERNVQWVFLGCPGVGKGTYASRLSRLLGVPHIATGDLVRDELASTGPLATQLAEIVNQGKLVSDEIIINLLSKRLKKGEDQGESGFILDGFPRTVKQAEILDGVTDIDMVVNLKLREDVIVEKCLGRRICGQCGKNFNLACIDVKGENGLPPIYMAPLLPPNNCMSKLITRADDTEEVVRNRLQIYNDMVWLYVQFILTIDNKIVNLWKVSTESRGKLLEFDLPGGIPESWPKLLQVLNLEDQEELRLAAA

SEQ ID NO: 63688 - protein, 414 aa, Zea mays
  Coding DNA Sequence Number=SeqID_21909
  Homolog annotation: Hit_ID=Q1RV57; Match level="QueryCoverage=93%, HitCoverage=85%, E-value=2e-74, Identity=37%"; Hit description =ENSANGP00000004406, related
MDATVVAIADDHDDSDCRRPLLAQNEEIHLYTEPPNRQHPPLDAAATQLEEQRKPERVASLDVFRGFTVAMMILVDDAGGGVAGHQPRAVVRGYGGGLRHACLPLHHRRLRRTRIQGNVRLQKMANKTAATKKAAIRASKLFILGVILQGGYIHGRHKLTYGVDLDHIRWLGVLQRIAIGYFVAAMSEIWLVNNNLVDSPVPFVKKYFIEWIAIGYFVAAMSEIWLVNNNLVDSPVPFVKKYFIEWFMAIAITVLYVALVFGLYVANWEFEIQTSNSTLSIPSNSIETKMIQCGVRGSLGPPCNAVGLVDRVLLGENHLYKNPVYKRTKECSINSPDYGPLPPNAPDWCLAPFDPEGLLSKPLYTVNYMLLTGGVSGFLLLLLYYIVDVIHIKKPFVLFQWMGMNALIVYVSLL

SEQ ID NO: 63689 - protein, 67 aa, Zea mays
  Coding DNA Sequence Number=SeqID_21910
MGAKSAIGPWRGTRLISGVFQGDAWHRRVEGVPSAAPITHRSAAVVLGTLLVVCRPSRYTVNFDGIQ

SEQ ID NO: 63690 - protein, 178 aa, Zea mays
  Coding DNA Sequence Number=SeqID_21911
  Gene Ontology: Mol. function=RNA-directed DNA polymerase activity; Biological process=RNA-dependent DNA replication
  Homolog annotation: Hit_ID=UPI00004C1733; Match level="QueryCoverage =23%, HitCoverage=3%, E-value=1e-11, Identity=80%"; Hit description =UPI00004C1733 related cluster
MVAGTYDMHGCEDMAEQIMLSAWLMAGRTHVYVLPNEPELVDTEMWRLTNVVEGLGSSLARHFEAEVVPPPPSLTAVSLYVPGFNTLAMIKGPSQGGTPFVVASKGLLIFGRMMECYFSSFLQLVKRIFTVDLIVGFVSWDPEAMDDVREECYRMLGFDVGEGSDLDPLGEFVDGDHQ

SEQ ID NO: 63691 - protein, 189 aa, Zea mays
  Coding DNA Sequence Number=SeqID_21912
  Subcellular localization annotation: CTP_CleavageSite=46; ConfidenceScore=5.36e-01
MGGPTGWSGWALAHPKPGPPGPHPVIRFGGRPTAVPTSISESPIVRLPTAPKRSILLRKTDVPSGWLPARPQPQDNPFSCAAIPGDWLPARLTGCSGLPALVSSREIRSAKLSLSSLPARTGAPLAEPSDHPSSAPSSAFAPEPRPDRLRPPSTPSPRAPEFACLAAPFAIRRTVCTLPHRAPAGRASP

SEQ ID NO: 63692 - protein, 89 aa, Zea mays
  Coding DNA Sequence Number=SeqID_21913
MPPRLRLLLRRRGRVLLLLLLASALLLLVQVVMQSLQVARLTYHYAARRALHKARGAHRSPGNPQSPPCCLHLLLSIEYSGDNLGWSGF

SEQ ID NO: 63693 - protein, 177 aa, Zea mays
  Coding DNA Sequence Number=SeqID_21914
MAGLGWVTGLLAVRVLGTEEGLKRTRGDTADSAMGTTPAQRLQRVRSAAEQPNGGANHSGERLRGQQGITQEIKGVGELLTSRGDSGALEQRWGHMEAFGRRQRSSGCTGRRPVSVDWAKQRGWGQTRGCLALLARRRSSPRQQTRQKLDDGEGTDGGPQRSSTGARAVRERARVFG

SEQ ID NO: 63694 - protein, 70 aa, Zea mays
  Coding DNA Sequence Number=SeqID_21915
MQKPDSDRRDSKHTSLQHWNTVESELRGQEEKIQGKQPKKSQARDPRVLAHPQKHPWGLGCGGTDRIIPA

SEQ ID NO: 63695 - protein, 443 aa, Zea mays
  Coding DNA Sequence Number=SeqID_21916
  Homolog annotation: Hit_ID=Q2QMH3; Match level="QueryCoverage=61%, HitCoverage=61%, E-value=1e-47, Identity=47%"; Hit description=IQ calmodulin-binding motif family protein, expressed
  Pfam annotation: Domain name=IQ; Domain location=138-158; Score=27.7; E_value=4e-05; Accession=PF00612.17; Description=IQ calmodulin -binding motif
  Pfam annotation: Domain name=IQ; Domain location=160-180; Score=16.2; E_value=0.12; Accession=PF00612.17; Description=IQ calmodulin-binding motif
  Pfam module annotation: Pfam domain module=IQ::IQ; Domain location =138-158::160-180
MGKASQWLRNLLLSGRKGRKAKDRAEADCQSVLSAPLPSHAQAAATPHGREKRRWSFRRPGAAASSSQGPLASSSSHCFSEAELHVVVVQQEQGQQQAAAAAVPEAASTSGTVVALPASGRRTRRRNARGGGRGGEAAAAAVKIQSAFRSYLARKALCALRGMVMLQAIVRGQLVRRQASLTLRRMQALVYAQRRARAERLRLLDVVEDDASRQQAASATPPRRRSPSPQHPRSWKPLEAVERRLEENVRTVEVDDGAPRAGARRNSCGHCSASTTPSRTPMPKAEPRQKVSPSPSPSALTDGSARTPSGRLDDASFTSTSEPMPSLRAAPPSYMANTESSRAKARSQSAPRQRLSSAPETAPAATAVLSPSCCDRPPSQGGGSARRRASLDPLDLPGGAPSRRMERCASRARATTMSSVPGSECGSSSTVGHRGSAHGPWLG

SEQ ID NO: 63696 - protein, 209 aa, Zea mays
  Coding DNA Sequence Number=SeqID_21917
  Gene Ontology: Mol. function=transferase activity; Biological process= flavonoid biosynthetic process
  Homolog annotation: Hit_ID=Q7XXN5; Match level="QueryCoverage=91%, HitCoverage=44%, E-value=2e-92, Identity=85%"; Hit description =Putative anthranilate N-benzoyltransferase
  Pfam annotation: Domain name=Transferase; Domain location=1-208; Score=-189.6; E_value=0.09; Accession=PF02458.6; Description =Transferase family
SSSQGALHKESSRGSLRASEGRGRPFSRFETILAHLWRTLTRARALSPDETSQIRLSVDGRHRLGLPAEYFGNLVLWAFPTATVADLLAQPLKHAAQVIHDEVARVDGNYFRSFIDFATSGAVEKEGLAPSAVCKDVLCPNVSVDSWLTFPFCELDFGTGSPTYFMPSYYPSEGTLYLVPSFGDGSVDAFVPVFKHNLEAFKECCYHVE

SEQ ID NO: 63697 - protein, 578 aa, Zea mays
  Coding DNA Sequence Number=SeqID_21918
  Gene Ontology: Mol. function=two-component response regulator activity; Cellular component=nucleus; Biological process=two -component signal transduction system (phosphorelay)
  Homolog annotation: Hit_ID=Q689G8; Match level="QueryCoverage=91%, HitCoverage=66%, E-value=1e-136, Identity=52%"; Hit description=Two -component response regulator-like PRR37
  Pfam annotation: Domain name=CCT; Domain location=531-569; Score =75.6; E_value=1.5e-19; Accession=PF06203.4; Description=CCT motif
MRLLLDPIDYQVSTRLDTVENTAVAVIPNGPSCKNDQGIQTLVQPLAQNSWTKLAVEIDSPQAMSLDQLADPANSTCAQVIHSKSEICSHRWLPGSSNRNCKKQKYTNDDFKGKDLEIDGPGNLYMDHQSSPNERPIKAADHENNSKESMMGNLGDATVRAADLIGSMAKNMDAQQAARAADTPNFSSEVPEGKDDFKGKDLEIGGPRNLYMDHQSSPNERPIKAADHENNSKESMIENLEEPTVRAADLIGSMAKNMDTQQAARAAEDTPNFSSKVPEGKVTTFIARYHTSAASNQGGTGLVGSCSPHDNSSEAVKTDSTYNMKSNSDAAAIKQGSNGSSNNNDMGSTTKDVVTKPSTNNERVMLPSAIKANGYTSTFHPVQQWMVPDNATAGKAKADEVANNAGRNSHPGDVQSNLTQQHRPTLHYVHFENSGSGALQCGSSNVFDPPLEGQATNNYGVKAGSNSGSNKGQNNGSTAGASTAAANAGRTDTEIRAIDKSGPGGGSGSGNDTYVRRLAASMTPRQEQLKKYREKKKDRNFGKKVRYQSRKRLADQRPRVRGQFVKQAVQNQEGDGER

SEQ ID NO: 63698 - protein, 104 aa, Zea mays
  Coding DNA Sequence Number=SeqID_21919
  Homolog annotation: Hit_ID=Q689G8; Match level="QueryCoverage=38%, HitCoverage=5%, E-value=2e-09, Identity=72%"; Hit description=Two -component response regulator-like PRR37
MRLMGGACQQLSVDGDARTPANDRDPAGLLQHDDTENQQQQQACWERFLLKETLNVLLVESDDSTRQVVSALLRCCMYQAEEGALGVTVVYGLDCSRSVEQGER

SEQ ID NO: 63699 - protein, 109 aa, Zea mays
  Coding DNA Sequence Number=SeqID_21920
MAPPVDVVGPRPRLGDVEAPPRSRSSPSSVAEVESEPLGWARRRPLAEARAEFESWGRAKRSSSSSRAEPKSEPCAGRSGIRHLLQLSPSPSPGSGGTEFAVFQGLARV

SEQ ID NO: 63700 - protein, 114 aa, Zea mays
  Coding DNA Sequence Number=SeqID_21921
MANRRDLKRLREKAVANGACKGEDALDHRNSTSSGDAPSDLSTQGAPKISSLRGRDLGSSEEEDDPAPSRTVRCDTGKASLLRPSRGPSGPEPRTVRAAAVGIARRYTRMIGAA

SEQ ID NO: 63701 - protein, 77 aa, Zea mays
  Coding DNA Sequence Number=SeqID_21922
  Subcellular localization annotation: CTP_CleavageSite=34; ConfidenceScore=5.37e-01
MPTAAARTVRGSGPDGPRLGRRSDAFPVSHRTVRDGAGSSSSSLEPRSRPLREEILGAPWVDRSLGASPDDVELPRN

SEQ ID NO: 63702 - protein, 93 aa, Zea mays
  Coding DNA Sequence Number=SeqID_21923
MATFRLAMAVVLSSSEPHWQTIFLLEPENVHLGSYLSSESHHRPALLVLEAASASAPRSGDAVARTHLARVASREEPDLVCFILKQPWEFKKD

SEQ ID NO: 63703 - protein, 351 aa, Zea mays
  Coding DNA Sequence Number=SeqID_21924
  Gene Ontology: Mol. function=DNA-3-methyladenine glycosylase I activity; Cellular component=cytoplasm; Biological process=base -excision repair
  Homolog annotation: Hit_ID=Q10QF1; Match level="QueryCoverage=87%, HitCoverage=74%, E-value=1e-76, Identity=52%"; Hit description =Methyladenine glycosylase family protein, expressed
  Pfam annotation: Domain name=Adenine_glyco; Domain location=88-272; Score=163.7; E_value=4.9e-46; Accession=PF03352.4; Description =Methyladenine glycosylase
MPGVRSESPSPEVSRVRMALPTASAKIASARAKVGERAKTPANSKAKGRSDAQEKRGRNGRLVPSLGCMSSPPLVPIGPDSEKRRCSWITANSEPHYVAFHDGEWGVPVHDDRMLFELLTLSQALGELTWPSILSKREELRCVRVFTDGSSLCTREIFCGFNLVLVSEFSENKINLLRSNGIVPLSEQKIRAVVTNAKQIQKVVEELGSFSNYCWSFVNHRPIANGFRYARQVPTKTPKAEAISKDLMRRGFQLPGSLTTICHVASDFRLAASTRPVKSENGARAEPALPDRRLGSAASEGSDIREDSLTVHWDATEQVVHTVYALYKIVQLSGECTLIGLDVKATPAVVF

SEQ ID NO: 63704 - protein, 268 aa, Zea mays
  Coding DNA Sequence Number=SeqID_21925
  Gene Ontology: Mol. function=methyltransferase activity; Cellular component=nucleus; Biological process=nucleobase, nucleoside, nucleotide and nucleic acid metabolic process
  Homolog annotation: Hit_ID=Q8LFA9; Match level="QueryCoverage=82%, HitCoverage=67%, E-value=3e-54, Identity=43%"; Hit description =Methyltransferase-like protein 2
  Pfam annotation: Domain name=MT-A70; Domain location=111-267; Score =70.0; E_value=7.8e-18; Accession=PF05063.5; Description=MT-A70
MEVCDELRSFEATGVYRLNGTCTSAGATYLDPEAKPLLLNAHESLVKAKHLLEYISKTIKGNEHTLDAGSGSENNFVELGTSWRAPFYEITICFRNPHVLGNEEGSPNQGYNLIVVDPPWENGCVRQKEVYPTLPNKNFLYLPVQQLAHPTGALLVLWITNREKLRAFVEKKLLPSWGVEDSTVFYWLKVKPDGSLIGDLDLFHHRPYECLLLGYINVNANAKKGSNFKLLERSQVIMSVPGAHSRKPPLESILPCNTQMQYDLFSWI

SEQ ID NO: 63705 - protein, 147 aa, Zea mays
  Coding DNA Sequence Number=SeqID_21926
  Homolog annotation: Hit_ID=Q6Z8M5; Match level="QueryCoverage=61%, HitCoverage=13%, E-value=2e-08, Identity=37%"; Hit description =Putative lectin-like protein kinase
  Subcellular localization annotation: CTP_CleavageSite=43; ConfidenceScore=5.04e-01
MAQGEQLRSSRGPRRISGRPSGHTRRQRRRKRNGREDRRCAARCGQGGEKSCPTSVNAGDRPAILHVLSKASPPPEVSPFKPQFMWSLEGELNFGSATSSGPRPAPATPTPDGTSTQATRNTSYDSFRSHNTADSSDGYFLALSSGR

SEQ ID NO: 63706 - protein, 84 aa, Zea mays
  Coding DNA Sequence Number=SeqID_21927
MATRLAAAAAATFMRRLAPARPPVPILAAASTAEAVTCGRGDKKTKRGKRFKGSYGNARPKREKKIERIKDRVEGYIFTVATSL

SEQ ID NO: 63707 - protein, 218 aa, Zea mays
  Coding DNA Sequence Number=SeqID_21928
MAMMGSTSKKMYLCQNRRQPTLKRTARELRRHEQRAASFARTTEELDNTQHGQTQSEQGRKLRAGTRAGRMERARREKHQRDAATRHGNRKLAARARSLQGTRSGTSYRNKERGQSELSAMGDGGRCRCSYPATGGAQRLRGERKTEMPVAGQREPPWEMGVGRSRAESGAGAWHRRSELREKKRAHGAKLDRTRLGRGRCVKGRWSRGSGAPGNSAE

SEQ ID NO: 63708 - protein, 140 aa, Zea mays
  Coding DNA Sequence Number=SeqID_21929
  Gene Ontology: Mol. function=DNA binding; Biological process=DNA integration
  Homolog annotation: Hit_ID=O24587; Match level="QueryCoverage=86%, HitCoverage=11%, E-value=6e-38, Identity=73%"; Hit description=Pol
  Pfam annotation: Domain name=rve; Domain location=15-138; Score=18.2; E_value=0.00018; Accession=PF00665.16; Description=Integrase core domain
WETGGNNSSYQECDDNVGPLELLHMDLFGPVAYLSTGGSKYGLVIVDDVSRFTWVFFLQDKTKTQGTLKCFLRRAKMSFELKVKKIRSDNGSEFKNLHVDDVVSLESCLEFIPHYYMACWLPAPTSWEAVVAAEELARSV

SEQ ID NO: 63709 - protein, 239 aa, Zea mays
  Coding DNA Sequence Number=SeqID_21930
MDDSGYVRYMAEAQATLPRRIQCEERLTPYPDTCASVGKVEPQAQQEAPPRPTLGLGLRRRSPPRPTLGLGFALGLGRWSPPHPTLGLGLTLGLGRWSLPRPTPGLDLDLGRNCVLARPRPKEESPPRPTLGSDRPRHRGYIITLPLSSSGYSGTRPASHPGSPRPDSCASTGLQRSSDGHDTALAPRKGSTADPEHSGFKLITDQGFEEGFDSRLRARRARDDPRYVRYMAEARATLP

SEQ ID NO: 63710 - protein, 181 aa, Zea mays
  Coding DNA Sequence Number=SeqID_21931
  Homolog annotation: Hit_ID=Q6QP51; Match level="QueryCoverage=99%, HitCoverage=39%, E-value=4e-28, Identity=77%"; Hit description =Putative growth-regulating factor 1
MMTASKKGSTAAPEHSGFKLITDQGFEGWPLERVRQPPQSTRAPHPLLIRGSKAGPSEGFDSRLRARRARDDSWYVRYMAEARATLPRLWKPKQKASSRVKNHCRALFQGKHHLWQAKQASFHLRHDDRVKKGTEKGDISKGILLREGSGPRALLLIRGSKAGPAKGFDSRPRALGLRAHY

SEQ ID NO: 63711 - protein, 71 aa, Zea mays
  Coding DNA Sequence Number=SeqID_21932
  Subcellular localization annotation: CTP_CleavageSite=48; ConfidenceScore=5.19e-01
MGAANHGARLFQSFLSPALAAISSTSSTTGQTYVLDAHQMFDGRFVTRDAEDKSRVDLKMMLVNEPAEWMI

SEQ ID NO: 63712 - protein, 55 aa, Zea mays
  Coding DNA Sequence Number=SeqID_21933
MGAANPGARLSQSFLSPVLAVISSTSSTPGQTYVLDAHQVFDGRFELEFIITFHP

SEQ ID NO: 63713 - protein, 80 aa, Zea mays
  Coding DNA Sequence Number=SeqID_21934
  Subcellular localization annotation: CTP_CleavageSite=34; ConfidenceScore=5.17e-01
MAMNQAIDEVSTAVYCDVLSLPNTWRPGGKRRTPAMVISTGRRESGGVTSFPPQKNLVPRFKVLGLHEAKNLGNFFSKKS

SEQ ID NO: 63714 - protein, 70 aa, Zea mays
  Coding DNA Sequence Number=SeqID_21935
  Gene Ontology: Mol. function=3-deoxy-manno-octulosonate cytidylyltransferase activity; Cellular component=cytoplasm; Biological process=lipopolysaccharide biosynthetic process
  Homolog annotation: Hit_ID=Q9M4G3; Match level="QueryCoverage=95%, HitCoverage=17%, E-value=3e-12, Identity=61%"; Hit description=CMP -KDO synthetase precursor
GFHSRFLKIYLELPPIVQPLQMEEDLEQLKVFENSYRMKFKNELADDKYLRTEVIKVEQNARGVDAPEVH

SEQ ID NO: 63715 - protein, 140 aa, Zea mays
  Coding DNA Sequence Number=SeqID_21936
  Homolog annotation: Hit_ID=Q94IQ6; Match level="QueryCoverage=43%, HitCoverage=20%, E-value=7e-20, Identity=78%"; Hit description =Putative methyl-binding domain protein MBD111
MGSSRSGPTQQPAAELGVCCEDSGVVLLCAIEEDAPDIRVPRDIPSWIKILTYETYLHNFTAFSELNMFVNPVMDGYCSVNPIAWAVPTKHEGDASEEASLADETLASEVVLTRKRKIGSSLSVEPNHLFDEFEPKFEDA

SEQ ID NO: 63716 - protein, 139 aa, Zea mays
  Coding DNA Sequence Number=SeqID_21937
MAAAELDLVVVSLSACCVIAPEGFGDHGTTMRHGRAKPSPATSVGHPCLCSLGQRVGGRANHEGLDGYWRWRKGGQALGNRSPSHCGCHRSAARVVRGSEWFESKIRRSRYPFSNEIRATGFRSDGSRSLPIHTHRDLI

SEQ ID NO: 63717 - protein, 79 aa, Zea mays
  Coding DNA Sequence Number=SeqID_21938
  Homolog annotation: Hit_ID=Q6K2K4; Match level="QueryCoverage=38%, HitCoverage=3%, E-value=8e-08, Identity=83%"; Hit description =Putative 5'-3' exoribonuclease
MAEGIARRGYTAVTFDMRDEGRNAFYPFVGSICSFVTAIIGTIGRFLNMWVLREYLEIEFKILEPFCESDIERLIDGTL

SEQ ID NO: 63718 - protein, 217 aa, Zea mays
  Coding DNA Sequence Number=SeqID_21939
  Homolog annotation: Hit_ID=Q40853; Match level="QueryCoverage=38%, HitCoverage=42%, E-value=4e-09, Identity=41%"; Hit description=Late embryogenesis abundant protein
DDGVGPKEDEEGIGGRCCSSVWSEVVEASCVEWRHLVGGHRGVGLQPPSPKSLDGERKAKQATLSKMHRNPRAVIRAAVSLTRRPPAVPAAEALQTLPKATPSPALGAWRPDQAVGPLGSVSRRRAFSSSAAEYGKDVDEVNRKFAEAREEIEAAMESKETVYFNEEASIARDAANEALAAFDALLARLPPTDADALRRSMGLKMEQLKAELKQLED

SEQ ID NO: 63719 - protein, 138 aa, Zea mays
  Coding DNA Sequence Number=SeqID_21940
  Pfam annotation: Domain name=zf-CCHC; Domain location=111-127; Score =7.6; E_value=0.056; Accession=PF00098.13; Description=Zinc knuckle
MLAKSLAARWFVQSTTKHNGLYKFGPLKQVIPYILCALKMGQEGPTSLRLYAFTCEENRNMKGKKKVESSREEEESEEEEEEDGDAEEDDQPSTSSSEYDDTIRQVEKVEGGCFTCEKDHFQENCPNKAAPKKRRSKD

SEQ ID NO: 63720 - protein, 93 aa, Zea mays
  Coding DNA Sequence Number=SeqID_21941
MGSLPMRPSKAGASIQARTAKVLLKPMQAGTTLAVIEPKQAALLLSAPDPDPRREDGGKGAAAVVRAQRTPRRQPIRDCRMVRDGSKVRDGGS

SEQ ID NO: 63721 - protein, 149 aa, Zea mays
  Coding DNA Sequence Number=SeqID_21942
MERAGEGHAAGHQRTEQMNATARRELRRRRLGISDHGGWASDREQREQGEGRGEGKPSWSTSAGRWATWRGWGKGRVPASWRRREPDAAPGSSASELSASSGTPGWEPARRTENQGAVAMGREKLGEGAALLEQDAEQEAEGSFGRARE

SEQ ID NO: 63722 - protein, 140 aa, Zea mays
  Coding DNA Sequence Number=SeqID_21943
MADGGDPSILASNSPPDDGSRARLPTRVRSTQNGDPLVNSSANEQHRAWDEHMAARWNAEGKQQQRPTWESLEQAGDLLSLSYFSRVGWFNGGYPARLKSSKACEERWRLIFTSARTPQRPEKGEETRTGLGGRPMAMRG

SEQ ID NO: 63723 - protein, 41 aa, Zea mays
  Coding DNA Sequence Number=SeqID_21944
ESPIRALDHYCPHGQQLLPVEDHVLGARQESQEACGLEPNG

SEQ ID NO: 63724 - protein, 141 aa, Zea mays
  Coding DNA Sequence Number=SeqID_21945
AVPPALKNIALITEADEQLETWRRDRGQFPSATGASVLAGIGGTASSRPPETCSNKTEESEMGFCGGGPFRRYATDRSLLASRHQEWTEAFGSPLLCCQGPAEHTLTVRLDSSMLQLLLLPNPLLQNQFPKTQPKALKVHF

SEQ ID NO: 63725 - protein, 169 aa, Zea mays
  Coding DNA Sequence Number=SeqID_21946
  Homolog annotation: Hit_ID=Q53NY5; Match level="QueryCoverage=72%, HitCoverage=52%, E-value=5e-39, Identity=65%"; Hit description =Expressed protein
  Pfam annotation: Domain name=DUF1685; Domain location=14-128; Score =118.9; E_value=1.4e-32; Accession=PF07939.2; Description=Protein of unknown function (DUF1685)
  Subcellular localization annotation: CTP_CleavageSite=45; ConfidenceScore=5.68e-01
MAAVSSTATASSQPELPTSTAHPTANAAANSRLARRPRRNNSFVMVEEASYASGGGDGGVARTKSLTEDDLEELKGCVDLGFGFAYSEIPELCGTLPALELCYSMTRRFLDEQRAPGQDEEEEEPASPPLPNWRIFAPASVLAGDDPEEVKARLKYWAQAVACTVKLCS

SEQ ID NO: 63726 - protein, 552 aa, Zea mays
  Coding DNA Sequence Number=SeqID_21947
  Gene Ontology: Mol. function=triacylglycerol lipase activity; Biological process=lipid metabolic process
  Homolog annotation: Hit_ID=Q5N8V4; Match level="QueryCoverage=68%, HitCoverage=85%, E-value=1e-113, Identity=62%"; Hit description =Putative DAD1
  Pfam annotation: Domain name=Lipase_3; Domain location=306-453; Score= 156.7; E_value=5.9e-44; Accession=PF01764.16; Description=Lipase (class 3)
  Subcellular localization annotation: CTP_CleavageSite=39; ConfidenceScore=5.44e-01
MPVPPTQVIDKSARVWAWRAWPRPLQLSSQVSTLNFLPSCSSDTTGGFGGIATCVQASTGEFLSTPCSLYKPPLPARLAPSMQHSPPPLLLVVYGLRVPTANNTSAPRLLAHHGLGIHRKGGSGSGGDGDSSAMRGSDGRAYAAAASPVPRGGCQRRRGVRAGEGSGATARGAEHHGHGARGGGHVAAAAGVRRLAGAAGSGGGRRTRCCAPRWRATGELVHACYKAFDLDPASRRHLSCKYGRGRLLEEVGMAGAGYEITRYVYAASDVAVPTMEPSTSGRGRWIGYVAVSTDEMTRRLGRRDVLVSFRGTVTPAEWVANLMSSLEPARLDPCDPRPDVKVESGFLSLYTSVDTTCRFGGAGSCREQLLREQARTSASPWRGHSMGSALALLFAYDLAELGLNRGAPVTVFSFGGPRVGNAAFKARCDELGVKALRVANVHDPITKLPGIFLNEATAGVQALRPWRASCYTHVGVELPLDFFRMGDLASVHDLGTYVALLKSGDKAGAAWRGDCGVLAKVVEFVGRQRAGALPWQDAALQMGGLVQTLGLI

SEQ ID NO: 63727 - protein, 513 aa, Zea mays
  Coding DNA Sequence Number=SeqID_21948
MTWEPSWNNRRHHRHADFDADVDARSAASARNLASAFEEDLEEEGDVGWDAAAKRRSCSDHRCSASVEVLSKLSRRKTRAFKDGDGGRSWHNGRAHGHCFSDASAITSGGGGSVGGRTPARQGDNRTEQMQELYNSLTASNELVRVLANVLGPAGALNPTAASVLAALRSELDAARQLVKQQRRRGVDGEERLLRRQLAEEVRAWKCRHREKAAAAARLVASELDGERRARRRAERVGTKLAEALAGAEASLRAATRELGLERAARARLEKVCDELASRDVGGGTEAEAEDDDGLRREAAATALEELEREREMLQVADELREERVRMKLAEARLHFEEKNAAVDRLRQELEAFLGNERREQTPAHHEMAKEEEEEDHQLQIRRADRKKMPKAGDDDDDSEGSDIELNMDGNSWSYTTTSRSRDTSAKNATSAHGSLSDRATECGADAGAFDRRSEATRDAPEQDWAADGCSDGGTTGRDEDEDAERYEAIKNLREQMLTGPRLPLPVQGRGRR

SEQ ID NO: 63728 - protein, 95 aa, Zea mays
  Coding DNA Sequence Number=SeqID_21949
MGSVLTGVRDEGAAIHGEGRIWGGGSLRRGILPIPGTNLSGATSLPYPIAGDNPTARDDADMLQELNGGVDGGRGGVDKLAGSEGIVTDVAREQR

SEQ ID NO: 63729 - protein, 49 aa, Zea mays
  Coding DNA Sequence Number=SeqID_21950
MPRLPLSLRMKRDLGEAMGFWGQRLIPVLVLDAKGGENKAKATNGSATT

SEQ ID NO: 63730 - protein, 199 aa, Zea mays
  Coding DNA Sequence Number=SeqID_21951
MTKVMLAEGVEKLKKWKKPGASAKSTQDSGPTRGGLRVSFLETEGSICKVARPKGYPKIPTVGSDPRDQISLRCGRRRPGHEHRCLLNGGVKEGEDGGEHHPRSGLELDLPCYLWYSGGGPIRCPVPYASSPVMACAKGGAANGSQRSGSRLYGSRGSNNHPGIHGFRWEFPVMEEGVRRAGAPAKLVPPSGKTTHGAD

SEQ ID NO: 63731 - protein, 199 aa, Zea mays
  Coding DNA Sequence Number=SeqID_21952
MANHRGPLRHIRRPDRLTVPIKPEPRPGTQAIAEPTTMGESSVCTGWVGERGLPPPSRARLATSWTSAWGSDRAPGRLEARAAANSTIMQRKPGHEDCALGEATTGVRGAANAVRPRRSLVTNLGCSRSLGEIVGSVPTKMGAGRVSICTSVVLRRFNTAMQRRRASSAPNPGMGWGKGSAAAVKGTIGHLVDLSMGFG

SEQ ID NO: 63732 - protein, 170 aa, Zea mays
  Coding DNA Sequence Number=SeqID_21953
  Homolog annotation: Hit_ID=Q8LQY2; Match level="QueryCoverage=36%, HitCoverage=7%, E-value=9e-07, Identity=45%"; Hit description =Fertility restorer homologue-like
MEITLKGLLTYQSDFEKGRPGIEAEEVGMMEAPKSVQNLVANAISARVISIEKDGSVSDTPATSMPSPASDPRHDTSFTTTRTCLGTDHAVTAASRRAAIVRAVTGSKGCYTDAKMCEVVTRPCVRGGMHSDAVRVFGEMTGAWVKPDEHVYATTITCLGRLHDADHALQ

SEQ ID NO: 63733 - protein, 152 aa, Zea mays
  Coding DNA Sequence Number=SeqID_21954
MAAPVATAPAKGGGGVAPVLQRGGEGRARRRQTRSASADLGRAGWGHRGGGDCEKEAAGWEVRARALSGAGEGGPGRTAVRRRGGAATLRAEEGARLGELRRWMGKRGGAGGCWVEGPPREGWMSLPGRRRGSRWLWGWAGRRWLWGWEEKP

SEQ ID NO: 63734 - protein, 309 aa, Zea mays
  Coding DNA Sequence Number=SeqID_21955
  Pfam annotation: Domain name=Extensin_2; Domain location=1-290; Score= -139.9; E_value=0.078; Accession=PF04554.4; Description=Extensin-like region
  Subcellular localization annotation: CTP_CleavageSite=99; ConfidenceScore=5.82e-01
RRSSPSRAPSSARSVAAPPRRRTAVRPGPPSPAPLRARARTSQPAASFSQSPPPLCPHPARPRSALADRVCRRRARPSPPRWSTGATPPPPFAGAVATGAAMGSAAPAPPDPRAPSMRHAANRPPLRGPPPRRVLPWMPPPRRADARPTTAGCAPPRPYLPGSGALSLPHHVVAALEADVSAEQAANAAAALAARPAAPMGASTPSPAVVVAFPFLSGADVTGPYTSSDAAACTASPPAPTAAAAAAANARGWAPTTVPPASNLLSSRLQQLSVRANRSLFGALPPPLASMQSLQVALLPSPTLAALIR

SEQ ID NO: 63735 - protein, 165 aa, Zea mays
  Coding DNA Sequence Number=SeqID_21956
MEEMARTGHSTSGQAQSNDDPGHTSASRNQFPAAHIMATERLAGGTVDPGQITGVGHGQNTAHMPRPGSNGRGTTSHMLTRATRSPSPASGVPMGHAGTGTWRIGARLVESRQGKGPHSQPATVSNARLRMSRPLLSSLPIPPFPGDPSVKSPACSCTWPWQHRG

SEQ ID NO: 63736 - protein, 79 aa, Zea mays
  Coding DNA Sequence Number=SeqID_21957
MTHAFHRRQHTVINIKEWERGAISDAVTQHEDNVGGRRPFPQRDLERPSDGGCMQIKDQALRRPPAQRITTQDYVRFRH

SEQ ID NO: 63737 - protein, 112 aa, Zea mays
  Coding DNA Sequence Number=SeqID_21958
MVRDYAEACKLTRLIQARNNVLMGHKGNTCSDLNMFGFRANFLQTPRKYNIRSDMFEFLNQFGNKQQVFGSVSVIGSLEFLWVDYMDSGSEDGSASNDGSTMFLIVEKGSSK

SEQ ID NO: 63738 - protein, 131 aa, Zea mays
  Coding DNA Sequence Number=SeqID_21959
  Gene Ontology: Cellular component=integral to membrane
  Homolog annotation: Hit_ID=Q338C3; Match level="QueryCoverage=64%, HitCoverage=19%, E-value=8e-10, Identity=45%"; Hit description =Transmembrane amino acid transporter protein, expressed
MTKKKIATAERSIFTAHCNPRLSVIVCLDKCHCRQHKVHRVKNPTAQQTDTKSPEKSIATKMTVIISMYADVYVRRHRKDLQLLFFFVCADIIFDGSSHALIAKFSDTMNTKFEMSIMPSIRISHKHASKG

SEQ ID NO: 63739 - protein, 64 aa, Zea mays
  Coding DNA Sequence Number=SeqID_21960
MSGEAEASPEAEAKVRRGGDLLPRPKLRLRPGVGQGGDLLPRPRPEDKVSDDPRIKCACDTVGW

SEQ ID NO: 63740 - protein, 270 aa, Zea mays
  Coding DNA Sequence Number=SeqID_21961
  Gene Ontology: Mol. function=glutathione dehydrogenase (ascorbate) activity; Biological process=tRNA aminoacylation for protein translation
  Homolog annotation: Hit_ID=Q67UK9; Match level="QueryCoverage=59%, HitCoverage=61%, E-value=7e-70, Identity=80%"; Hit description =Putative dehydroascorbate reductase
  Pfam annotation: Domain name=GST_N; Domain location=60-132; Score =20.0; E_value=0.0088; Accession=PF02798.10; Description=Glutathione S-transferase, N-terminal domain
  Subcellular localization annotation: CTP_CleavageSite=36; ConfidenceScore=5.72e-01
MAVLLRSTSAAASTAGPSSALLATTFRRSRGCLLPRAAPQRRLYVARASAQPLEVCAKESITIPGRLGDCPFTQRVLLTIEEKHLPYDLKLVDLANKPDWLFEINPEGKVPIVKLEEKWIGDSDVITQALEEKYPEPPLATPPEKASVGSKIFSTFIGFLKSKDPSDGTEEALLNELTSFDSYLKDNVHWCRDPDQRGLHRAGPALRGRARRQRNDKDFATSRERSPCHPWRRIERGALAKPPFSPAGQRASGDSIILRRRLFPYPLSSR

SEQ ID NO: 63741 - protein, 54 aa, Zea mays
  Coding DNA Sequence Number=SeqID_21962
MAMDSIMIGAADVDEDAIGEVEIGRAAEEEIISNNSNYDKLGFKPYGASGHISD

SEQ ID NO: 63742 - protein, 203 aa, Zea mays
  Coding DNA Sequence Number=SeqID_21963
MTATYRVRPPRADNWTRWLALHPSLAYPRSVADPLVSGALVIFSDALTAGAADADPTPISRWLQPPMSWPCLAPDGYGWNHFFLDSWRPGYLDPFGVLDALFSLRRRHGLAGIARRTQCLPPGRFAPWSCSTAYVKPSVVDPGGSTVHMYALCGLVWAESSSGPPRFLAGTRRSLGFWEKGVGVPGQCSPAGALPCGPVRRHG

SEQ ID NO: 63743 - protein, 56 aa, Zea mays
  Coding DNA Sequence Number=SeqID_21964
MAPSSTTGMPPLGWGGVVGEHRTWDKAVHEMKGVVQEKDEPMPKLPVEKLRLSSGK

SEQ ID NO: 63744 - protein, 66 aa, Zea mays
  Coding DNA Sequence Number=SeqID_21965
MGINPEKSIAYSMIYEAQKSFLRKCRVNINKATKVVPKGAQRKFFAQKLFLRECKAKIDDATKSRS

SEQ ID NO: 63745 - protein, 81 aa, Zea mays
  Coding DNA Sequence Number=SeqID_21966
MGPLDPKKGGLEQLHCPEVKAFVDYKISFGPPGVVPDPAYAIWTSSQVRSGAAMCPDHYDLGPDPLKHDNRPQARKGLGGA

SEQ ID NO: 63746 - protein, 140 aa, Zea mays
  Coding DNA Sequence Number=SeqID_21967
MSRAPLGNPCGGYADYRRAADHETKLHQACTSRAGPFLWLLGGDQLVSFILSTPRSMDTRALADARSRCAIVPTIRPRFKRIQPPGIRHHKHQAVREKIVVSTAIGYHRRYARAGGLGDSLGCLGDVRGIVVLGVGAGIG

SEQ ID NO: 63747 - protein, 45 aa, Zea mays
  Coding DNA Sequence Number=SeqID_21968
MERLTRGVGVSAPTTVRADDRDGPRDNEQFEVPECVVGDLPEQQP

SEQ ID NO: 63748 - protein, 50 aa, Zea mays
  Coding DNA Sequence Number=SeqID_21969
MANFNLYFVDQPYTSHELPPLEKNKWFKRSHTTRSSIRSRWRFPVDLRQG

SEQ ID NO: 63749 - protein, 80 aa, Zea mays
  Coding DNA Sequence Number=SeqID_21970
MGLGVCGSLCQGGDEDDGFDYDYGNASPLQPNGTIAEYVDVYSPSLYTPNHPGYPRCNHCSGEDEVVEEDFQGFQEYDEF

SEQ ID NO: 63750 - protein, 121 aa, Zea mays
  Coding DNA Sequence Number=SeqID_21971
MKLWKETSRSSKTTTSSRCGLAVTPSRLPVKAAVIYISFPHFDLLKFQGINEITKDVRNKTNAHGSSRNKGAQGHVSVKNKSMKDFKEMSIPIPRDKKLPKDSDLTTEEERVSKDQKVMDI

SEQ ID NO: 63751 - protein, 487 aa, Zea mays
  Coding DNA Sequence Number=SeqID_21972
  Gene Ontology: Mol. function=cysteine-type peptidase activity; Biological process=proteolysis
  Homolog annotation: Hit_ID=Q53MK8; Match level="QueryCoverage=75%, HitCoverage=45%, E-value=5e-18, Identity=22%"; Hit description=Ulp1 protease family, C-terminal catalytic domain, putative
MKSVDHPPSNPKKITIESSQEVFTVEIPRPGNNANKPRQSIAPDVDTPKQMKQLYVRRNTKRSAGRGKNKLIHVIYHSPNPPKQKNIVEEATIKQTNVVKNKNKKKTRDRRKQKLNIWCIPYDVIMPMWIMNNRQREAVVRKGFQSILQMSTDGLVVGSLMNWLMDKVDPVDMTIRPGPGKELKITKKSVRLILGLPSAGGGKSFMDWYGEVDAAGRLRKQLKISKDEFDIATLQEIIVTGRDDDLTIRCFFLILFNRLLFPTSSWSISNNEVLMTEDMDRFRDIDWCQLVFCIYYLDHLHHEAAPENKYGTPRIKYFDKETIDALTKADRRKPRHAGETYGHCHFHSRTDTCYVAAPEQPTNDMFHIHVSRMKDLISSNVICLLPPYRSCFDSLLKAHDKDVDKYCATLERAHRKLVSKQLQLAETFADMIDGVIRLGSQVQESQQRDTQKEQPSQFDVNMPNDLHMGVAHDVMPEANTQSKNFDV

SEQ ID NO: 63752 - protein, 151 aa, Zea mays
  Coding DNA Sequence Number=SeqID_21973
  Gene Ontology: Mol. function=cysteine-type peptidase activity; Biological process=proteolysis
MALRSGGGRFRAGDILDSNPYGPAIGGTNWKHYYNEIITFEKKKYAWSRLMMSRLSMGMQLARPKAMLSKFGNFKIDLVKDCPTMPVGSNDCGFFVTRYIIFYEYTEGYMPDEIDTDLSLENRATLLHYLTFHSLNKIKPLPSDIRRFSYD

SEQ ID NO: 63753 - protein, 164 aa, Zea mays
  Coding DNA Sequence Number=SeqID_21974
MGVPKGCLGVQSVYRVVLKYSGVLALHQARRLGGPDDSKEVSSEEVESSDSSEEWSGSEGDDREDDGISSDDDGKGGNGEGDGDGNGEDDGEGDGEDDDGDGEGEGDSKGDGDGKGDGDDGDGGNGDGNDGDGGKGNSDGSKGDDDGGKGNSGDGKASGIMLLV

SEQ ID NO: 63754 - protein, 122 aa, Zea mays
  Coding DNA Sequence Number=SeqID_21975
MGKNKKGRDSSHHSGDRRKLYASPPVSSDDSNDSQGIATVVWTYIQAIKHSGLEVSDESEVSSDEENSSDSSKGESGGDGDDEGDGGDGGDVGDDGDDDGKGDGNGKGSGDSRKASGKAPLV

SEQ ID NO: 63755 - protein, 86 aa, Zea mays
  Coding DNA Sequence Number=SeqID_21976
  Subcellular localization annotation: CTP_CleavageSite=73; ConfidenceScore=5.52e-01
MGAPGSPVRHRTGTVPCPMRRHVTQPLGFGAGSTVGDLSSCGTGQSGAPLTSCSNFCRDTVYFVESTVGADSRCFAGTPDNLVTWN

SEQ ID NO: 63756 - protein, 52 aa, Zea mays
  Coding DNA Sequence Number=SeqID_21977
MARNLAVLEWRPGHGRSATREEDATPRPGSSARPAAGHEGEEGDLNEANDNI

SEQ ID NO: 63757 - protein, 145 aa, Zea mays
  Coding DNA Sequence Number=SeqID_21978
  Homolog annotation: Hit_ID=Q6ZLH2; Match level="QueryCoverage=66%, HitCoverage=18%, E-value=3e-27, Identity=67%"; Hit description =Lipase-like protein
  Pfam annotation: Domain name=DUF620; Domain location=49-145; Score= -104.2; E_value=1.4e-07; Accession=PF04788.3; Description=Protein of unknown function (DUF620)
MLDAALRVRVLRRRRSHRVRRRGRRSLDRVGDDDDDEGGREPVLLVSGMGGSVLHARRRSNSKFDLRVWVRILFANLDFKKYLRVQGLDPLTTAGLFAEARCVGEKKVNGEDCFILKLSVDPQMLKLRSEGPAEIIRHVLFGYFS

SEQ ID NO: 63758 - protein, 163 aa, Zea mays
  Coding DNA Sequence Number=SeqID_21979
  Gene Ontology: Mol. function=DNA binding; Cellular component =nucleosome; Biological process=chromosome organization and biogenesis (sensu Eukaryota)
  Homolog annotation: Hit_ID=Q6WLH4; Match level="QueryCoverage=99%, HitCoverage=100%, E-value=3e-42, Identity=73%"; Hit description =Single myb histone 3
MGAPKQKWTSEEEDALRRGVRKHGAGKWRTIQKDPQFSPILSSRSNIDLKVDNFYRLPDSFATRTPAQIKVSDPKQKDPSKASKTIGLFAASSPALEAAMAAAVKVTDAEAKAHDAHDQMMEAERMLKMAEDTESILTIAAEIYDRCSRGEITTLVPVAQREF

SEQ ID NO: 63759 - protein, 222 aa, Zea mays
  Coding DNA Sequence Number=SeqID_21980
  Homolog annotation: Hit_ID=Q8SA97; Match level="QueryCoverage=28%, HitCoverage=12%, E-value=3e-13, Identity=67%"; Hit description =Ornithine carbamoyltransferase
  Subcellular localization annotation: CTP_CleavageSite=42; ConfidenceScore=5.48e-01
MQAACNRAKWARFSDFQHAQHGGPGPRVMQPARRMLRASNCTATHATAMPPRLRNQYRDSRQPYARPGGASLARWGSERRFAFAIMTASRKKAGPSEGFNSRLRACGLHTHYWSEVRRPAPRKGSTTTSGYSGSAPTTDQGFEGWPSKGSHPPQTQSEGLLSGTIIRGTLKAPNSQLGSDSGSAPEDGELRSARPKARTRAKPRKTANTAPPDPGLGLGLSP

SEQ ID NO: 63760 - protein, 210 aa, Zea mays
  Coding DNA Sequence Number=SeqID_21981
  Homolog annotation: Hit_ID=Q6QP54; Match level="QueryCoverage=22%, HitCoverage=16%, E-value=1e-13, Identity=83%"; Hit description =Putative kinase
MAHHGQKGQEEGSWLTTDKRFVISITTLPQEFIEEVMALVELDRLRYALVGKQSSTGLSIEQRKRLTNCRRFETGGSLGRRVKCRRVPQPRWVGTGPSAKGGRKVAGDGRERGGNPAAFVFIPRPGRPESAWGRVIMAPPVDVAGSRLRLGDVEAPPRSRSSLSSMAVVESEPLGRARRRPSAEARAESEPWGWAKRSSSSSGAEPKSEP

SEQ ID NO: 63761 - protein, 72 aa, Zea mays
  Coding DNA Sequence Number=SeqID_21982
MGKMIRPPEKSEQGAAEKNLRAIEIKLGQEMSTALRARRGWPGRRELGVVLVNTLQSDEATPVIYIRTVGPG

SEQ ID NO: 63762 - protein, 76 aa, Zea mays
  Coding DNA Sequence Number=SeqID_21983
MGKMIRPLEKSEQGAAEKNLRAIEIKLGQEMSTALRAGRGWPGRRVRTSARRPACSTSTDAACGKKNPTPDEDDCA

SEQ ID NO: 63763 - protein, 81 aa, Zea mays
  Coding DNA Sequence Number=SeqID_21984
MKVGSPVKVVVHLGRALRVSAMAGVGDLTRAKEVTGQFDHGQGQWGGLAVVDLRLKRCGSERASASSGTGGWSLGGRAEVE

SEQ ID NO: 63764 - protein, 205 aa, Zea mays
  Coding DNA Sequence Number=SeqID_21985
MSTIRDVLLHGAKANDDNLRRQERKTWSRRGPSVQSFYRGRNWRAARRHASTTGQAGARARCGPWGEGRENSGQGAEGRASAMAGGRARGWDAALGNRAGPNREQRARREKDRACGAGAERKKQSACIGRRWSAAESSGELEELREQSTTLELTQPWRAEDAGHRKSESGAVRAGAPRHGRARQGVARATSREASGALKERQGAR

SEQ ID NO: 63765 - protein, 160 aa, Zea mays
  Coding DNA Sequence Number=SeqID_21986
MPIGIKQGSSWSHRSERRRCLGLRKNSEHTEGITACCPLAPQNREPTARVDDGAAAHFVEHLASTMGTAQQHASREDTESRAMARMLQGVCCSTPWGVGGVAGALSAGHGENGRSCCCNFWAPWRKNRGIASFPGRVSAGLLLLAGVEAWVCTEGRRTRQ

SEQ ID NO: 63766 - protein, 108 aa, Zea mays
  Coding DNA Sequence Number=SeqID_21987
MPLAGPDCPSVSLCQVTLQSEWRRRRCPSVRPLAYIELETSVARLLMRRSSSQWRHWIRHGILEASSSIDTKGARHMKNIGFNEDQHHGDRSSGIRYGRRKRKNLFAI

SEQ ID NO: 63767 - protein, 778 aa, Zea mays
  Coding DNA Sequence Number=SeqID_21988
  Gene Ontology: Mol. function=protein dimerization activity; Cellular component=nucleus; Biological process=regulation of transcription, DNA-dependent
  Homolog annotation: Hit_ID=Q6L3Y1; Match level="QueryCoverage=95%, HitCoverage=93%, E-value=1e-162, Identity=41%"; Hit description =Putative hAT family dimerisation domain containing protein, identical
  Pfam annotation: Domain name=hATC; Domain location=663-754; Score =32.2; E_value=1.9e-06; Accession=PF05699.5; Description=hAT family dimerisation domain
MERFFKRKAPEPDSANIASNLCLDDINWEEEIKYDPGLRKQIDDYHPNLREMVRRKYLEKGPCQPRTCSFPVTNIGGGPRRFIPDWFDEFGSWLEYSESKDRAYCFSCFLFRGKKDGGYEAFVKNGWNGFHRKQRLREHVGDVGRSHYLAMKKCDDLLQTRQHINVAFRGVSESAKRDYMIRLNGSIDVARMLAKQGLPFRGHDESKDSLNRGNFREFRDFAAEQNPVLRKATGKGKSENSLLVSPEIQRDIVHCFAKEVLQAILEEIRNDVFCLLVDESRDVSWKEQMDVVLRYVDKCGIVKERFVGLVHVSETTSAHLKTSIDALFAELNLSLKQVRGQGYDGASNMRGEFNGLQSLIMRENSSAYYVHCFAHQLQLVLVAIVRKHKGVSDFFTKVSILLNVVGGSSKRREMIRDINLKEMSKALGCGQLQTGTGLNQEQSVQRPGDTRWSSHYKSLKSIVDMFSTIMKVLEIVEKDKDWKIRDQASNLREYFQSFDSIFYLHLMLTILGITNTLCLALQRKDQDIVNAINCVRATRCQLDDLRREKWEKLIDDVYEFCEKNDIAKLEMEDEYIDPKKRRHKSGITNKHYYQVDCFNDIIDWVLQELDSRFNETSSQLLVCSASFSPRDSFCDFNVDKLLSLAKLYPHDFDSGNLRDLSNELGLYIFDVRNDDRFSNIQTIAELSQKMVETRKHDRYPLVYRLLKLVLVLPVATATVERIFSGMKIVKTNLRNRIGDQFMSDCLICYVEKEEMMKVTNESVIRRFMKMQERRFDDN

SEQ ID NO: 63768 - protein, 1074 aa, Zea mays
  Coding DNA Sequence Number=SeqID_21989
MAVEFNWSVRGALPGDAEAVRTRNLRIVQRLTRSTLSGGRRKSGEGLGKLHESLVKLSEQLAWVRGGWGELATVARARVARRAVSSRFTVRAPVIEREFLTNFSWIPWRKSVTFPMQYNHRSRLPPPPLPFGRGGHPRGPKQPCYAPLPPPPFPPAPPPPPPSLERKYEVLMEAGRLATEYLVAQGVLPPAALQRGAGISGAWPDHPLPPPPQLQQQEPRGGYGRRRYKDEYNNNPRRANDTSSSTSSRDDCSRGSYNGRGKMKYGKYRRGYLDSGRDREKERRRPFPNGRRYEEDKDEDGAPGFRRERHGNRGSDEVRPHDTEALREGTPLTAKAVEGFCMEDATSKIMSSFKDTIKDSNDAPKVPEETEEGEVEDDRETQNSETEVVKQGIDTDVNHASCYVITESNPNQLSDGKIQDEIPDEEAEDDKKVMDEATLDHNTCDGEVTNMEVEMHVGKESLIDYCNFTRTPTRPRSARAHRNAASIPGEPAVVETFDLVSSGQASHMVSAESAERFFTKIVSENTEDKFCQENTSSGDVRAPPKELMLLQENGITVVTENMAEDNVDAEPHVVVQQYKEETNLSPLTDALEKSLRQEITLSPFAASHKDSLMQEGGLMQEVDLSPLTANHRESFTEETELPPSTASHKDSLIEGTDLTQTISSYNNNLKLQFKEGTQVCDIDMLPQDVNLIELPDQRKIIGRDVGAKAVTGMEEGKLDQSSSLNLSDVDLVGGTEVAAIHNNPVLVQLSAAGSSTESNNKQQQDPETFTGANASPTDDLCQLPLDNKDVQVVNIECGTPVEVGGFGLSKSIHNNPVLVQMSVAGSSAELINKQQEDPETFTGANANPTDDLCQLPLDNKDVQVIDIECGTPVEVGGFDLSKSNSDIPCYPSMQSDLHAGISANDSEVRREASCSASGRASRRIWHLLSSLDPPHHNRRRLKCCPSEASKGGEAATAASTPSSSSNCTLPSNPNDGGKLLVHAYYSTASCLYECCFGFTTSPCPLLPPDACHQAHLPQVEQQMLRHACACSRTVCQQHQRAVVSLAAIEEKPRNREEMGLQTKTRIEDDLIRAE

SEQ ID NO: 63769 - protein, 130 aa, Zea mays
  Coding DNA Sequence Number=SeqID_21990
  Gene Ontology: Mol. function=carbon-sulfur lyase activity; Cellular component=nucleus; Biological process=metabolic process
  Homolog annotation: Hit_ID=Q6ERD5; Match level="QueryCoverage=82%, HitCoverage=71%, E-value=1e-48, Identity=79%"; Hit description =Putative nuclear protein p30
  Pfam annotation: Domain name=DUF636; Domain location=36-128; Score =80.6; E_value=5e-21; Accession=PF04828.4; Description=Protein of unknown function (DUF636)
MTSSAGSHDVVVVHTGGCHCRRVRWRVEAPASIVAWVCNCSDCSMRGNTHFVVPAAKFRLQAGADESVTTYTFGTHTARHTFCKVCGITSFYTPRSNPDGVAVTVACVDPERDVSIYHYRPLTMASRGSW

SEQ ID NO: 63770 - protein, 651 aa, Zea mays
  Coding DNA Sequence Number=SeqID_21991
  Homolog annotation: Hit_ID=Q1SQX3; Match level="QueryCoverage=19%, HitCoverage=19%, E-value=6e-18, Identity=34%"; Hit description=IMP dehydrogenase/GMP reductase
  Pfam annotation: Domain name=PPR; Domain location=515-549; Score =16.3; E_value=0.087; Accession=PF01535.11; Description=PPR repeat
  Pfam annotation: Domain name=PPR; Domain location=550-584; Score =31.1; E_value=3.8e-06; Accession=PF01535.11; Description=PPR repeat
  Pfam annotation: Domain name=PPR; Domain location=585-619; Score =31.5; E_value=2.9e-06; Accession=PF01535.11; Description=PPR repeat
  Pfam module annotation: Pfam domain module=PPR::PPR::PPR; Domain location=515-549::550-584::585-619
MTGAVISSLTIALEEQSRLLRAICDRFSAQDLRYEEPVTTDDWGGMFEHSDPIPSRADLEIQLSATIEHLDAVEHAVATRVGSLESWRPRVEAHALVHLCGFFDGADATKLPTTCSTSGFTAELARAHYSWHLPSDKGGFVTAWQPVRSLALAVRVESQCQQASFVRGTSAMATMAKMSIGDLTEANLKGMRVFVCVELHETPDENQNNTNEILPTSCDTVMDVVKRLDQRVRRGHGGAGDPDGRVIADQERHAHRLLTQEHVVLVPVRQQEQQAAVAWQVVVGWVVVGLTVIQGRHAVEATVGVLRVPHGGGKPPAPPVHQAGSVKAWHDGHERAHARRRARADCGGWPRRIGEEVERQQPRVMLAYRAITGRVKWPNEEEQAASVPEVVAGADVEGKEEYNSVARLAGELKLTDSLCALTLIDAQVVFEEMQQSATSVEQLISGKEDRANNFAHGYYTIGKGMVLLANNFGNGLIAAHSEIKESWPPPRELACLDLTIMVVFMFLATSDLHAMTYMSLLYALSRKGQVQESDRLFKVAEKNGIGTGVVMYNALSNHHCTDGNMERAYEIMAEMEKNRIAPDNVTYNMLMQEFCLLGKLDEAHTLIDEMTQRGTAVSRDQGNCSVFVWDPSGDANSSLGARCISRRGKCQ

SEQ ID NO: 63771 - protein, 56 aa, Zea mays
  Coding DNA Sequence Number=SeqID_21992
MAQKVVFFTADLDLASREGTRRKEEILGCLGVGRPHKTPLVDTEPKRGEDLRIIRI

SEQ ID NO: 63772 - protein, 83 aa, Zea mays
  Coding DNA Sequence Number=SeqID_21993
MAGSKDRIDVSQNNILRPILESLSVNEHRVEDLMNRARETAKDKFLLHFKVDQHQKITNQGEMNLEPLPHLPPTVTISKSDDT

SEQ ID NO: 63773 - protein, 105 aa, Zea mays
  Coding DNA Sequence Number=SeqID_21994
MERLTSHLFYLRFKSPTEGEEEAARVKKRKSEEEAAAGTRVERRQQRLHEGDKETAMGTPGNWTRGFQGQGISRNPSGIPDYQRRPRDRGAAESLPPTAEERVTS

SEQ ID NO: 63774 - protein, 109 aa, Zea mays
  Coding DNA Sequence Number=SeqID_21995
MPRPATITVDFRIRQSLNYAAVNTTLPMGGHTIVGGVKVQRRRRRFRDHKCGRMGKGGVAFSIYVGTERSPNLNKLRPESKDRNNHGARLHRDEDETGTGDPHTSDSVR

SEQ ID NO: 63775 - protein, 517 aa, Zea mays
  Coding DNA Sequence Number=SeqID_21996
  Gene Ontology: Mol. function=oxidoreductase activity; Cellular component=integral to membrane; Biological process=electron transport
  Homolog annotation: Hit_ID=Q69P73; Match level="QueryCoverage=99%, HitCoverage=98%, E-value=0.0, Identity=84%"; Hit description =Putative elicitor-inducible cytochrome P450
  Pfam annotation: Domain name=p450; Domain location=35-503; Score =360.2; E_value=3.3e-105; Accession=PF00067.12; Description =Cytochrome P450
MELPTWASFLGVVLATVMLLKAILGRRSRRVYNLPPGPKPWPIIGNLDLVGALPHRSIHELSRKYGPLMQLRFGSFPVVVGSSVDMAKFFLKTHDVVFTDRPKTAAGKYTTYNYRDITWSPYGAYWRQARKMCLTELFSAKRLESYEYIRAAEVRVLLRDLHSASGSGRAVMLKDYLSTVSLNVITRMVLGKKYLDREEAAAGAVTTPEEFKWMLDELFLLNGVLNIGDSIPWLDWMDLQGYIKRMKKLSKMFDRFLEHVVEEHHQRRLSEGKGFVAKDMVDVLLQIADDPTLEVELDRESVKAFTQDLIAGGTESSAVTVEWAISELLKKPEVIAKATEELDRVIGRGRWVTEKDIPSLPYVDAIVKETMRLHPVAPMLVPRLSREDTAVAGYDIPAGTRVLVSVWSIGRDPALWDAPEEFMPERFLGSRLDVKGQDYELLPFGSGRRMCPGYSLGLKVIQVSLANLLHGFAWSLPDGVTMEELSMEEIFGLSTPRKFPLEAVVQPKLPAHLYAEP

SEQ ID NO: 63776 - protein, 70 aa, Zea mays
  Coding DNA Sequence Number=SeqID_21997
  Homolog annotation: Hit_ID=Q7F1M0; Match level="QueryCoverage=81%, HitCoverage=8%, E-value=2e-12, Identity=65%"; Hit description =Putative ATP-dependent DNA helicase II 70 kDa subunit
MDLDLEGIFRDDSDEDEDNCFLGNQEREANKEIVVYLVDASPKMFTLPPPRAMKSRRHISIPFLTASQSI

SEQ ID NO: 63777 - protein, 672 aa, Zea mays
  Coding DNA Sequence Number=SeqID_21998
  Gene Ontology: Mol. function=RNA-directed DNA polymerase activity; Cellular component=mitochondrion; Biological process=RNA-dependent DNA replication
  Homolog annotation: Hit_ID=UPI00004C1731; Match level="QueryCoverage =99%, HitCoverage=57%, E-value=0.0, Identity=83%"; Hit description =UPI00004C1731 related cluster
  Pfam annotation: Domain name=rve; Domain location=488-647; Score =119.0; E_value=1.3e-32; Accession=PF00665.16; Description=Integrase core domain
MPGIPREVAKHSLDIRAGARPVKQPLRRFDEEKHRAIGEEIHKLMAAGFIKEAKGVKLNPEKCVFGVPQGMLLGFIVSERGIKANPEKIAAITSMGPIKDLKGVQRVMGCLAALSRFISRLGERGLPLYRLLRKAECFAWTPEAEEALGNLKALLTNVPILVPLAAGEALLIYVAATTQRPVYFISEVLSETKIRYPQIQKLLYAVILTRRKLRHYFESHPVTVVSSFPLGEIIQSREASGRIAKWAVEIMGETISFAPRKAIKSQVLADFVAEWVDTQLPTAPIQPELWTMFFDGSLMKTGAGAGLLFISPLGKHLRYVLRLHFPASNNVAEYEALPEVPSAPEGEALRVEEERSGVTPNQNWQTSYLQYLHRGELPLDQAEARRLARRAKSFVLLGDGKELYHRSPSGMLQRCISIAEGQELLQEIHSGACGHHAAPRALVGNAFRQGFYWLTAVADATRIVRICEGCQFYARQTHLPAQALQTIPITWPFAVWGLDLVSPLQKAPGGYTHLLVAIDKFSKWIEVRPLNSIRSEQAVAFFTNIIHRFGVPNSIITDNGTQFTGRKFLDFCEDHHIRVNWAAVAHPMTNGQVERANGMILQGLKPRIYNDLNKFGKRWMKELPSVVWSLRTTPSRATGFTPFFLVYGAEAILPTDLEYDSPRTRAYADQSN

SEQ ID NO: 63778 - protein, 66 aa, Zea mays
  Coding DNA Sequence Number=SeqID_21999
MGVDWKRTYCHTGCFLNCFGFQMGGEVPADSASGIDLLLTECSGDSADGAGGTASETTAEADTDSA

SEQ ID NO: 63779 - protein, 524 aa, Zea mays
  Coding DNA Sequence Number=SeqID_22000
  Gene Ontology: Mol. function=protein serine/threonine kinase activity; Cellular component=integral to membrane; Biological process=protein amino acid phosphorylation
  Homolog annotation: Hit_ID=Q8RZV7; Match level="QueryCoverage=97%, HitCoverage=78%, E-value=1e-131, Identity=34%"; Hit description =Putative extra sporogenous cells
  Pfam annotation: Domain name=LRR_1; Domain location=110-132; Score =11.1; E_value=2.4; Accession=PF00560.23; Description=Leucine Rich Repeat
  Pfam annotation: Domain name=LRR_1; Domain location=134-156; Score =15.3; E_value=0.22; Accession=PF00560.23; Description=Leucine Rich Repeat
  Pfam annotation: Domain name=LRR_1; Domain location=15-37; Score =12.6; E_value=1.2; Accession=PF00560.23; Description=Leucine Rich Repeat
  Pfam annotation: Domain name=LRR_1; Domain location=158-180; Score =18.5; E_value=0.024; Accession=PF00560.23; Description=Leucine Rich Repeat
  Pfam annotation: Domain name=LRR_1; Domain location=182-205; Score =10.9; E_value=2.6; Accession=PF00560.23; Description=Leucine Rich Repeat
  Pfam annotation: Domain name=LRR_1; Domain location=218-240; Score =0.2; E_value=2.7e+02; Accession=PF00560.23; Description=Leucine Rich Repeat
  Pfam annotation: Domain name=LRR_1; Domain location=242-264; Score =13.9; E_value=0.58; Accession=PF00560.23; Description=Leucine Rich Repeat
  Pfam annotation: Domain name=LRR_1; Domain location=266-289; Score =6.0; E_value=22; Accession=PF00560.23; Description=Leucine Rich Repeat
  Pfam annotation: Domain name=LRR_1; Domain location=39-61; Score =17.0; E_value=0.068; Accession=PF00560.23; Description=Leucine Rich Repeat
  Pfam annotation: Domain name=LRR_1; Domain location=62-81; Score=6.5; E_value=17; Accession=PF00560.23; Description=Leucine Rich Repeat
  Pfam annotation: Domain name=LRR_1; Domain location=86-108; Score =10.9; E_value=2.6; Accession=PF00560.23; Description=Leucine Rich Repeat
  Pfam module annotation: Pfam domain module=LRR_1::LRR_1::LRR_1::LRR _1::LRR_1::LRR_1::LRR_1::LRR_1::LRR_1::LRR_1::LRR_1; Domain location
MLSGSIPSEICQANSLQSLMLHNNNLTGNIMEAFKECMNLTELNLQGNHLHGEIPHYLSELPLVIVELSQNNFTGKLPEKLWESSTILEITLSYNQLTGPIPESVGRLSSLQRLRIDSNYLEGPISRSIGALRNLTNLSLWGNRLSGNIPLELFNCRNLVTLDLSSNNLSGHIPSAISQLTFLNNLNLSSNQLSSAIPAEICVGFGSAAHPDSEFIQHHGLLDLSYNRLTGNIPTAIKNCVMVTVLNLQGNMLSGTIPPELAELPNVTAIYLSYNTLVGPMLPCYLNYLDLSSNDFHGPAPCGICNVVGLTFANFSGNHIGMSGLADCAAEGFCTRKGFHRKALHSSDRVRRAAIVCVSILAVTVVLVLLVLYLRRKLLRSRPLALLPVSKAKATIEPTSSDELLGKKFQEPLSINLATFEHSLLRVTADDIQKATENFSMVHIIGDGGFGTVYRAALPEGRRVAVKRLHGGHQFQGDREFLAEMETIGKVKHPNLVPLFGYCVCGDERFLIFYITKPVRNNVD

SEQ ID NO: 63780 - protein, 137 aa, Zea mays
  Coding DNA Sequence Number=SeqID_22001
  Gene Ontology: Mol. function=protein serine/threonine kinase activity; Cellular component=integral to membrane; Biological process=detection of brassinosteroid stimulus
  Homolog annotation: Hit_ID=Q8RZV7; Match level="QueryCoverage=84%, HitCoverage=8%, E-value=3e-42, Identity=70%"; Hit description =Putative extra sporogenous cells
MKSSTKGDVYSFGVVMLELLTGRPPTGQEEGEGEEGGNLVGWMRWMMAHGKEEEVFDPCLPDSSVWREQMARVLAIARDCTVDEPWKRPTMLEVMKGLKMAETIECGPILAAFGRGLPKGPLRCQCQPSKKRGALPA

SEQ ID NO: 63781 - protein, 68 aa, Zea mays
  Coding DNA Sequence Number=SeqID_22002
MAGSKNHTNFSTTNIIKPTLEVLPADDQYPFEDLVGREEKEEQHNVTMVRLTTYGSGFRRQPNMPKII

SEQ ID NO: 63782 - protein, 271 aa, Zea mays
  Coding DNA Sequence Number=SeqID_22003
  Gene Ontology: Mol. function=metal ion binding
  Homolog annotation: Hit_ID=Q8RZV3; Match level="QueryCoverage=99%, HitCoverage=96%, E-value=8e-24, Identity=50%"; Hit description=Zinc finger (C3HC4-type RING finger)-like
  Pfam annotation: Domain name=zf-C3HC4; Domain location=223-260; Score= 26.8; E_value=7.6e-05; Accession=PF00097.15; Description=Zinc finger, C3HC4 type (RING finger)
MTLSEQLSTPDPLIRDFLKIPHDADAGEGDSPLGRRRAGGRQDDRLEAAARPAPAPARGGRLAEANISSANNRSNKYNYNPGEAEAAFSRTFSRAPSLRATPTFSRVASTRVGPASCRSSSRRLSTYDFRDVEERRHEDEDEDGDGEEEEDGEDEGDEEKTAAPAAQMSLMALLGQTDNQWDDDEDEEEESGGGAFKKGGAGAVGDEDEDDCDSREDEMVHVCCVCMVRHKGAAFIPCGHTFCRLCSRELWVSRGNCPLCNGFIQEILDIF

SEQ ID NO: 63783 - protein, 87 aa, Zea mays
  Coding DNA Sequence Number=SeqID_22004
  Subcellular localization annotation: CTP_CleavageSite=16; ConfidenceScore=5.46e-01
MTKLSCAQLRDQLVLRRNHPSSRSGFVPTMLSVSHMLVIRVRRTFEGRRPPTGTLINHVMRKTIQVDPKHGLICMAMLMDEPEDRMI

SEQ ID NO: 63784 - protein, 132 aa, Zea mays
  Coding DNA Sequence Number=SeqID_22005
MEDAASSSIEVFGIEVMLKGGTYKDAEPRHVGLGAKRREYIIEVTNVSTPEQSPGAMMSVVPAVLISCSCLLGNARVMMSIVHAAAWAYCLPVEWIGTPPTEWTGRRLPAEWIGLIKCGGGTSPANGMDRAQ

SEQ ID NO: 63785 - protein, 82 aa, Zea mays
  Coding DNA Sequence Number=SeqID_22006
  Subcellular localization annotation: CTP_CleavageSite=29; ConfidenceScore=5.21e-01
MAIALLIQPLKIIVRGKAITNQACNTLVRVGPVTMGRIPRRPPGQRVDERPGVKGSVFAFAPTFALQGTSSTESSGAEDVAR

SEQ ID NO: 63786 - protein, 101 aa, Zea mays
  Coding DNA Sequence Number=SeqID_22007
  Gene Ontology: Mol. function=transition metal ion binding; Biological process=electron transport
  Homolog annotation: Hit_ID=Q6ZHH7; Match level="QueryCoverage=50%, HitCoverage=5%, E-value=7e-11, Identity=63%"; Hit description =Putative nitrate reductase [NAD(P)H]
MSQRRVSHCMDVEMALRPVQAHFLAHPVMLLVLVGHAYQRHGEFQGLELRHQLLHGQFGGASHESHEPHHHVCRLSMSTFSLTMVHLMLRPLISREMLENV

SEQ ID NO: 63787 - protein, 135 aa, Zea mays
  Coding DNA Sequence Number=SeqID_22008
  Gene Ontology: Mol. function=protein serine/threonine kinase activity; Cellular component=integral to membrane; Biological process=protein amino acid phosphorylation
  Homolog annotation: Hit_ID=Q6ZGM3; Match level="QueryCoverage=57%, HitCoverage=9%, E-value=2e-07, Identity=48%"; Hit description =Putative Phytosulfokine receptor
  Subcellular localization annotation: CTP_CleavageSite=49; ConfidenceScore=5.17e-01
MDIKVLLSCLSIGGGVDNYGLSSSANARSITSWHTPGTTTSSGEPSLARTEKSWSIGSSRGDLGNLSQIMQLDLSYTKFTGSIPDVFGEMRRLESVNLATNRLDGIVSQPGIDIAGLATPAQPDKLGADQEFPRR

SEQ ID NO: 63788 - protein, 176 aa, Zea mays
  Coding DNA Sequence Number=SeqID_22009
MECEEAPRRGNGTRSRGLCGISAGNTRQQVGMEGDCVERGEDEAVAVKEVPSIDKERGTHEDGKGGHALGKDFVECHSVLSKEKSSSRRLVTETAPLPMSAGLHSAKVPPVGPFVSFFAECARRHSAKLASLPSVKVTALCKEALPVPRCSFFVECYDPDTRQRGSLLSVTLGKVT

SEQ ID NO: 63789 - protein, 134 aa, Zea mays
  Coding DNA Sequence Number=SeqID_22010
MPSQYVGDLAEGEGEVFSEPSSQKEGIINIVKMKEVIYKPYTPTKVPINTHANEIAKEANDLLYVKLLEDYYKFPPIESLYKVLAKIYRMGTIFSSQHHEVELMALEGQEREVDELHQLKINNPKMCMIMPHNL

SEQ ID NO: 63790 - protein, 158 aa, Zea mays
  Coding DNA Sequence Number=SeqID_22011
  Homolog annotation: Hit_ID=Q6QP51; Match level="QueryCoverage=24%, HitCoverage=17%, E-value=6e-09, Identity=74%"; Hit description =Putative growth-regulating factor 1
MAVAGGQEQQPRRQPNSRPVRGQQENPLARREDNAPVIRSSNGSRTRNDRPANHSPRRINSAGPGKGNTPKRILPHEGTRLRAPLLIRGSKAGPPEGFDSRLRSRGPYTHYWSEVRRPAPRKGSTAASGYSGSAPITDQGFEGWPSKGSQPPQTPSEG

SEQ ID NO: 63791 - protein, 134 aa, Zea mays
  Coding DNA Sequence Number=SeqID_22012
MGSAMLSTAPGCPTAEIYLRHRAPTEVRIYGGATRRSLRTDDFALLLAILALAFGVRERKRGGRTRCSISMIAQRSAWGQLARIPHGGELFGNDRCGREDSTNRWGHGDSDRRDQRYDMWAPGASVTRFRSERA

SEQ ID NO: 63792 - protein, 401 aa, Zea mays
  Coding DNA Sequence Number=SeqID_22013
  Gene Ontology: Mol. function=hydrolase activity; Cellular component =integral to membrane; Biological process=hypersensitive response
  Homolog annotation: Hit_ID=Q69L47; Match level="QueryCoverage=84%, HitCoverage=99%, E-value=1e-140, Identity=72%"; Hit description =Putative phosphatidic acid phosphatase beta
  Pfam annotation: Domain name=PAP2; Domain location=190-340; Score =146.5; E_value=7.1e-41; Accession=PF01569.12; Description=PAP2 superfamily
MSPLSLSLSLSLSLLLLPTVSVSWLIHSRILVGDDEAPIRSGAEGDIEEPLVSRRTETMADQLGSYTIRSHGMILARLHMYDWIILLLLAVIDGLLNIIEPFHRFVGKDMMTDLRYPMKGNTVPFWAVPLIGIILPWAIFVGIYFKKNNFYDLHHGILGSLHIYCDSFDSLISTRENISSTRKTYLKNGNFVGILYSVLITAVITDAIKDGVGRPRPDFFWRCFPDGNDVYDNITTGVICNGVKSVIKEGHKSFPSGHTSWSFAGLGFLAWYLAGKLTAFDRKGHIRKLCIVFLPLLTAALVAVSRVDDYWHHWQDVFAGGLIGLTVASFCYLQFFPYPFDGDALWPHAYTVQLAEEGSSRNTNSYSVRPAEIETVNIPGHGGITLRDTLNDMESGSGRRL

SEQ ID NO: 63793 - protein, 155 aa, Zea mays
  Coding DNA Sequence Number=SeqID_22014
  Gene Ontology: Mol. function=transcription regulator activity; Cellular component=nucleus; Biological process=regulation of transcription
  Homolog annotation: Hit_ID=Q8S490; Match level="QueryCoverage=50%, HitCoverage=52%, E-value=1e-36, Identity=96%"; Hit description =Transcription factor RAU1
  Pfam annotation: Domain name=HLH; Domain location=27-75; Score=39.5; E_value=1.2e-08; Accession=PF00010.16; Description=Helix-loop-helix DNA-binding domain
MATIEKFLQFQDAVPCKIRAKRGCATHPRSIAERVRRTKISERIRKLQELVPNMDKQTNTSDMLDLAVDYIKDLQKQVKTYLKYTLGTQNLRVRFCYLFTEVAPAVNVPQINSGEAWRCSVRAIVFQLYEHIIVGLMGIIYWGLGIALLPLGPQA

SEQ ID NO: 63794 - protein, 306 aa, Zea mays
  Coding DNA Sequence Number=SeqID_22015
  Gene Ontology: Mol. function=transcription regulator activity; Cellular component=nucleus; Biological process=regulation of transcription
MPSPWSRSSSVARILVQSVDGGKTGGAVCLSGCDAMLMWRDGQKCLFRSPFALVQELNLPGEPMYGSPVSKDLNLPVQPPMASSGLLRYRSAPSTVLGDLCEDFLSSAPRAASPDAGADNVFSRFLADHHIRDDKPSPLASAAVHFPTETDTASQQQQQQMMFHSQQQQEMVSAKSGLYRTVNSGVETAAAAGAGGASSSDNASNLIRQSSSPAGFLDHLNMENGWPLPNSPSFSTTVVTIPCLFASLPSIIDVIGGRFSSGDISIFWTDTERVPTYANLLNSRYRGHADGGYGHGGFPRRRRKQA

SEQ ID NO: 63795 - protein, 57 aa, Zea mays
  Coding DNA Sequence Number=SeqID_22016
  Subcellular localization annotation: CTP_CleavageSite=35; ConfidenceScore=5.03e-01
MAVAVVDPRGTTASNTGDRAGYDPVFEVMVRNACRCAVRVVRLRFEGFASSVPVDPR

SEQ ID NO: 63796 - protein, 342 aa, Zea mays
  Coding DNA Sequence Number=SeqID_22017
  Gene Ontology: Mol. function=nucleoside transporter activity; Cellular component=membrane; Biological process=transport
  Homolog annotation: Hit_ID=Q69S29; Match level="QueryCoverage=49%, HitCoverage=41%, E-value=2e-43, Identity=57%"; Hit description =Putative equilibrative nucleoside transporter ENT8 splice variant
  Pfam annotation: Domain name=Nucleoside_tran; Domain location=101 -331; Score=-134.8; E_value=0.022; Accession=PF01733.8; Description =Nucleoside transporter
MVDGERSAVGVGVRVGTGRGGGGVKREEKERRGGERAGWGQGRSAVGSCVKERLRFTEGKERLRFTEGRTRGGSLPLTALICSKDFQITIAEEPPNQSPHAAFGIADAHAQGGMIGDLSLMCPEFVQVACFQRFFDVLRTDRNISVPIVGCSYVPISILVCSPTWQPMEDPKQHVRLSTKQLLLQNMDYVFDIFLICLDYLFSPDSHLKTHGLGTWYVQCVGSHRQIYVPFIAKLRSRKCTTAAALARFILVPAFYFTAKYGEQGYMIFLTSLLGLSNGYLTVCVLTVTVTEAPKGYKYNGPEQNALGNVLVVFVMTGLFSGVVLDWLWLIGKGTKDDGVDW

SEQ ID NO: 63797 - protein, 453 aa, Zea mays
  Coding DNA Sequence Number=SeqID_22018
  Gene Ontology: Mol. function=nucleoside transporter activity; Cellular component=membrane; Biological process=transport
  Homolog annotation: Hit_ID=Q69S28; Match level="QueryCoverage=89%, HitCoverage=97%, E-value=1e-178, Identity=75%"; Hit description =Putative equilibrative nucleoside transporter ENT8 splice variant
  Pfam annotation: Domain name=Nucleoside_tran; Domain location=154 -449; Score=41.0; E_value=2e-12; Accession=PF01733.8; Description =Nucleoside transporter
MAGSSSYSVLPLWYHPFNSCHFLLLFFLLLDLKDQTMDNDDAQIGVAKTQGKYWGIFICWLLGNGCLFGFNGMLTIEDYYVYLFPKYHPTRIITLTYQPFVLATTAIFTYHEAKVNTRVRNLAGYTLFFLSSFGVIILDVLSSGSGGIAPFVGICTIAAAFGIADGHVQGGMTGDLSLMCPEFVQSFFGGVAASGAITAALRFFTKAVFENSRDGLRKGAMLFSSISCFFELLCVLLYALVFPKLPIVKFYRSKAASEGSQTVTADLAAGGIKSLPNPLAEEDGVVERLNNKQLLHENMDYALDMFLVYVLTLSIFPGFLAEDTGSHSLGSWYVLVLIASFNVSDLIGRYLPLVEQMKLTSRTGLLTAAISRFLLVPAFYFTAKYGDQGWMIMLTSLLGLSNGHLTVSVLTEAPKGYKGPEQNALGNLLVLFLLAGIFVGAVSDWLWLIGKGW

SEQ ID NO: 63798 - protein, 424 aa, Zea mays
  Coding DNA Sequence Number=SeqID_22019
  Gene Ontology: Mol. function=nucleoside transporter activity; Cellular component=membrane; Biological process=transport
  Homolog annotation: Hit_ID=Q69S29; Match level="QueryCoverage=89%, HitCoverage=88%, E-value=1e-155, Identity=73%"; Hit description =Putative equilibrative nucleoside transporter ENT8 splice variant
  Pfam annotation: Domain name=MFS_1; Domain location=78-415; Score= -53.6; E_value=0.089; Accession=PF07690.6; Description=Major Facilitator Superfamily
  Pfam annotation: Domain name=Nucleoside_tran; Domain location=114 -420; Score=62.3; E_value=1.5e-15; Accession=PF01733.8; Description =Nucleoside transporter
  Pfam module annotation: Pfam domain module=MFS_1::Nucleoside_tran; Domain location=78-415::114-420
MTALPSLPQVKRAAPTSYGEPSKRHTAGEAMSMEVAGAEAPVKDYHPTRVLTLVYQPFAFGITLIMTYYEAKMNTRLRNLAGFSLFFLGSFALIILDVATKGHGGLGVFVGVCIISAIFGTADANCQGALVGDLSLMCPEFIQSFHDMYCALSFQSFMAGLAASGVLTSALRLVTKAAFESSKDGLRIGAILFFSITCLFELVCLLLYTFVFGKLPIVKYYRAKAAAEGSKTVASDLAAAGIISEQQGQMEEDPEKYKRLTTKELLMQNIDYALDIYLIYVLTLSIFPGFLSEDTGAHNLGTWYALVLIAMYNVWDLIGRYVPLIPCLKLTSRKGTLAAVLARFLFIPAFYFTAKYGDQGYMIFLTSFLGLTNGYLTVCVLMEAPKGYKGPEQNALGNVLVVCLLGGLFSGVVLDWLWLIGKGW

SEQ ID NO: 63799 - protein, 74 aa, Zea mays
  Coding DNA Sequence Number=SeqID_22020
MAAAADTSEASAAGIALAEANINWERARMRNGQPGSVGYRKASRVACYFGNVMLATWQQQQQQQQSLFVPSTLG

SEQ ID NO: 63800 - protein, 87 aa, Zea mays
  Coding DNA Sequence Number=SeqID_22021
  Gene Ontology: Mol. function=binding; Cellular component=integral to membrane; Biological process=transport
  Homolog annotation: Hit_ID=Q5ZDR4; Match level="QueryCoverage=62%, HitCoverage=16%, E-value=1e-23, Identity=90%"; Hit description =Putative mitochondrial carrier protein
  Pfam annotation: Domain name=Mito_carr; Domain location=10-82; Score=- 2.8; E_value=0.0063; Accession=PF00153.17; Description=Mitochondrial carrier protein
MGGSINRFSKWVRPITLRGKTVMDNYGNGRPSVMKTTRLLLDEDGWRGLYRGFGPRFLNMSLWGTSMIVTYELISRPFFSNQVSLPR

SEQ ID NO: 63801 - protein, 114 aa, Zea mays
  Coding DNA Sequence Number=SeqID_22022
MGAKQLAEVMGFVEQLGYPSGSKIFGGGPDDYLYYCQAKWRPNQTEVQPISKEKNKLKEMIGKKISDLEALDAEKDKRITLLEAELKQAKKEFEAETTRIRQASAEAVVNLSAA

SEQ ID NO: 63802 - protein, 192 aa, Zea mays
  Coding DNA Sequence Number=SeqID_22023
MGLLHMQVVLCFWLLSDAPRHLHYRASSRNATGLVPSEEGGNHEVEHNFEDKTWVNSSSFGENSGIAALEAEMPATIEEIPSSLETQETKIEDAIALIAKKFTPPKLLSESEEEEERIAPVTRSFFDINEDGSKEKKYYQHHFGAKGCYFACYRCVDIKESECLIDACSGDTFGNHNGRGESRFFNAYADEE

SEQ ID NO: 63803 - protein, 76 aa, Zea mays
  Coding DNA Sequence Number=SeqID_22024
MDQVEDLPDRGPHEPVIALPGAHTPMQQKGVTDGVTPRVNDSAKVVHGSGTGLAGEIRPIWSILGFTVPPVRIIFT

SEQ ID NO: 63804 - protein, 69 aa, Zea mays
  Coding DNA Sequence Number=SeqID_22025
MSKYCWSESGRGVTNGTNDSTGDPYSHGYEYDVNLYLPVDMSDLTESQDYFFIVSICTVAERPLWLSVA

SEQ ID NO: 63805 - protein, 417 aa, Zea mays
  Coding DNA Sequence Number=SeqID_22026
  Gene Ontology: Mol. function=RNA-directed DNA polymerase activity; Cellular component=mitochondrion; Biological process=RNA-dependent DNA replication
  Homolog annotation: Hit_ID=UPI00004C1732; Match level="QueryCoverage =99%, HitCoverage=25%, E-value=0.0, Identity=86%"; Hit description =UPI00004C1732 related cluster
  Pfam annotation: Domain name=RnaseH; Domain location=1-123; Score= -12.7; E_value=0.00088; Accession=PF00075.14; Description=RNase H
  Pfam annotation: Domain name=rve; Domain location=223-382; Score =111.0; E_value=3.5e-30; Accession=PF00665.16; Description=Integrase core domain
  Pfam module annotation: Pfam domain module=RnaseH::rve; Domain location=1-123::223-382
MFFDGSLMKTGAGAGLLFISPLGKHVRYVLRLHFPASNNVAEYEALVNELRIAIELGVRRLDARGDSQLVIDQVMKNSHCRDPKMEAYCDEVRRLEDKFYGLELNHIARRYNETADELAKIASGRTTSFVLLGDGKELYHRSPSGILQRCISIAEGQELLQEIHSGACGHHAAPRALVGNAFRQGFYWPTAVADATRIVCTCQGCQFYARQTNLPAQALQTIPITWLFVVWGLDLVGPLQKAPGGYTHLLVTIDKFSKWIEVRPLNSIRSEQAVAFFTNIIHRFGVPNSIITDNGTQFTGRKFLDFCEDHHIRVDWATVAHPMTNGQVERANGMILQGLKPWIYDDLNKFGKRWMKELPSVVWSLRTTPSRATGITPFFLVYGAEAILPTDLEYGSRGRGPTPTKAIDLIEKTHWTS

SEQ ID NO: 63806 - protein, 181 aa, Zea mays
  Coding DNA Sequence Number=SeqID_22027
MTRISYPPRSIDLRDSRHPPPSFGTMIGTWHPHAQQIPPPGDAHGTLNRHRQRQGVIVPPLPPSYASLGLSLGLDGGMTDLRLHDGASLCGSLASKLTLAKFRFSKAKFPDSEMYATHSIGDYVLQLVVGQPSKNLTLLETGEPIYSLTLQLVGPYLKTKSDSDKNMSVIFDLLRKKKIAG

SEQ ID NO: 63807 - protein, 74 aa, Zea mays
  Coding DNA Sequence Number=SeqID_22028
MQESLAGPPSQQNAPEGLPTLTTLLLPLPLSGKIHGAERFFIPAVPVRGAELAAAAELTGVNASQSLVLDCGVC

SEQ ID NO: 63808 - protein, 235 aa, Zea mays
  Coding DNA Sequence Number=SeqID_22029
  Gene Ontology: Mol. function=DNA binding; Cellular component=nucleus; Biological process=regulation of transcription
  Homolog annotation: Hit_ID=Q6K5X2; Match level="QueryCoverage=71%, HitCoverage=55%, E-value=9e-78, Identity=77%"; Hit description =Putative NAC domain protein NAC1
  Pfam annotation: Domain name=NAM; Domain location=10-140; Score =263.1; E_value=5.6e-76; Accession=PF02365.6; Description=No apical meristem (NAM) protein
MGLRDIELTLPPGFRFYPSDEELVCHYLHGKVANEQLAGAGAAMVEVDLHTHEPWELPDVAKLSTNDWYFFSFRDRKYATGQRANRATRSGYWKATGKDRAIHDPRSAIVVGMRKTLVFYRGRAPNGVKTSWVMHEFRMVEDPHAPPKEDWVLCRVFYKTKADDATADSEQDAHSSGMFDFHGGQPRPHDGVVLAGPAAAAAAPASRDGGDQCGSGALIDLGLDEHYTYNSLLQM

SEQ ID NO: 63809 - protein, 126 aa, Zea mays
  Coding DNA Sequence Number=SeqID_22030
MSPPAGVPPLLQLAAALGELRQRLPLHDRHTQRWRGRDIANTAGGGGLGSPYTALVATSFIEGQYSAVRSDSSGCAELGGSGSGGVGSGSGRLGGGGVGGGKADEAVGARVAHICIHAHVSCNRCR

SEQ ID NO: 63810 - protein, 292 aa, Zea mays
  Coding DNA Sequence Number=SeqID_22031
  Gene Ontology: Mol. function=voltage-gated potassium channel activity; Cellular component=integral to membrane; Biological process=potassium ion transport
  Homolog annotation: Hit_ID=O65816; Match level="QueryCoverage=98%, HitCoverage=41%, E-value=1e-116, Identity=69%"; Hit description =Putative calmodulin binding transporter protein
  Pfam annotation: Domain name=cNMP_binding; Domain location=81-181; Score=41.4; E_value=3.1e-09; Accession=PF00027.19; Description =Cyclic nucleotide-binding domain
MEQWMSYRLLPEHIKERILRHHQYRWQETQGVDEEGLLVNLPKDLRRDIKRHLCLSLLKRVPMFENMDDQLLDAMCDRVKPMLYTEGSHIVREGDPVNEMFFIMRGRLESTTTDGGRAGFFNSNVLEGGDFCGEELLTWALDPASGSNLPSSTRTARTLSEVEGFSLRARHLRFVASQYRRLHSKQLRHTFRFYSHQWRTWAACFVQAAWHRYCRRRLEEGVREKERMFRAAAVTDISSSRSLGAALYAAHFARNMVRTLRRNAARKARLLDTVSSRLLQKPAEPNFFAEED

SEQ ID NO: 63811 - protein, 374 aa, Zea mays
  Coding DNA Sequence Number=SeqID_22032
  Gene Ontology: Mol. function=voltage-gated potassium channel activity; Cellular component=integral to membrane; Biological process=potassium ion transport
  Homolog annotation: Hit_ID=Q6EN46; Match level="QueryCoverage=87%, HitCoverage=68%, E-value=1e-126, Identity=69%"; Hit description =Putative cyclic nucleotide-gated calmodulin-binding ion channel
  Pfam annotation: Domain name=Ion_trans; Domain location=62-329; Score= 32.3; E_value=1.7e-06; Accession=PF00520.21; Description=Ion transport protein
MKPTSARVLDPRGSFLQTWNKVFVISCLVSVSVDSLFLYAPAIDGDIGCLYLDDKLEKIACLLRSLTDALYLLRMAFQFSTAFAAPTPPGAFGRGVLVDDLLAIAKHYLSTYFLVDVLAILPLPQVFVWVVRPHLQSSEVMNAKNVLMFMILLQYVPRLVRIIPLYLEITRSAGTVVDTAWPGAAFNLLVYILASHDVLGALWYILAIQREDTCWREACNSQEGCDLASLYCGSTASGNNSTFLQDACPTDGDGADVDPIFGIYLPALQNVSQSSGFFQKLFYCFWWGLQNLCSYGQNLKTSTYIWENLFAVFVSMSGLVLFALLIGNVQGRGNGSPGLPLVLGSPSQQMRPELRRENRVRPIERGFWLEWISA

SEQ ID NO: 63812 - protein, 152 aa, Zea mays
  Coding DNA Sequence Number=SeqID_22033
  Subcellular localization annotation: CTP_CleavageSite=48; ConfidenceScore=5.07e-01
MGPCAVTCPHPFVSVARVLHVRLLRARVADLAFSLRVGPGCQAPPPSLASNLAESGDVGSGARVAVVVNQRIPLRRNSIKIRSTPCCAIPPISSALIATRKSPPPVLRSQEARSATVDRALHCSRGPVVRLGSFTESPRSCGSPWWKERTTR

SEQ ID NO: 63813 - protein, 77 aa, Zea mays
  Coding DNA Sequence Number=SeqID_22034
MTWALDAKIMTAGPPMSASHNVDAARLRLLEANDRWALCVTLYSPSALSQPLPCGPHLSAVRSQEYEDQLGTWESQV

SEQ ID NO: 63814 - protein, 86 aa, Zea mays
  Coding DNA Sequence Number=SeqID_22035
MKAIGTVLLHKTGISGARHMYDPTYRFTTIAKVGPGASIGTLNMGYPLVLCQGETSVAAIEDFTGNQPNAGLRPTIWSCGQTKLIS

SEQ ID NO: 63815 - protein, 102 aa, Zea mays
  Coding DNA Sequence Number=SeqID_22036
  Subcellular localization annotation: CTP_CleavageSite=50; ConfidenceScore=5.14e-01
MTLPVDVAGPRPRLGDVGASPRSRSSPSSVAEVEPEPLGRARRRSLAEARAELVGRSGVSSSSGAKPKSEPWVGRSRIRRLLGLSPSPSPASGGAEFVVFWG

SEQ ID NO: 63816 - protein, 249 aa, Zea mays
  Coding DNA Sequence Number=SeqID_22037
MGTTSRHPDAILWDAAFGTCTDASTFATFPYVIETTPMVPEYGRAWSSLLLLLATVLATTAAEARLARATCRHDPIPAVHPFSSLLGQATRVQIPTLIQAHAIRPKSSSVASQDALAQSERSLARVFSRPRALRLSPRLLSPLSSPPLPPSPLAVELSPRLLSPSSSPPVSSRPRALCPLSPLALELSHPVSYRPRALTPPSLVVLELSHPPLSSLVRISILQGASKDLRIWEFYVLRNVGSELHLPAL

SEQ ID NO: 63817 - protein, 135 aa, Zea mays
  Coding DNA Sequence Number=SeqID_22038
  Gene Ontology: Mol. function=protein binding
  Homolog annotation: Hit_ID=Q7XAK8; Match level="QueryCoverage=53%, HitCoverage=9%, E-value=7e-17, Identity=64%"; Hit description =Protein phosphatase regulatory subunit-like protein
  Pfam annotation: Domain name=LRR_1; Domain location=105-123; Score =7.9; E_value=9.5; Accession=PF00560.23; Description=Leucine Rich Repeat
  Pfam annotation: Domain name=LRR_1; Domain location=60-80; Score=8.4; E_value=7.5; Accession=PF00560.23; Description=Leucine Rich Repeat
  Pfam annotation: Domain name=LRR_1; Domain location=82-103; Score =13.9; E_value=0.61; Accession=PF00560.23; Description=Leucine Rich Repeat
  Pfam module annotation: Pfam domain module=LRR_1::LRR_1::LRR_1; Domain location=105-123::60-80::82-103
MALFSRRLLSLGAPDCPVVHRTVSGGAPDSVRCARLARANWPLSGIHRRLRVITGALLKGLHMLILSKNNISIIERLRELTRLRLLDISCNRISRIGHGLASCSSLKELYLVGNKISEAQSMLGKYSIIMVHVQF

SEQ ID NO: 63818 - protein, 106 aa, Zea mays
  Coding DNA Sequence Number=SeqID_22039
MASSKDHTDISPDNILRPAIESLLADEQQLYEDLMSQMREDARRQIAKAEEEATEKFLSYFTVDHHHKITKHGEIEIASLLPSLQISNVSKSNDIQSIKQQQDEMK

SEQ ID NO: 63819 - protein, 70 aa, Zea mays
  Coding DNA Sequence Number=SeqID_22040
MALQKGEQFGADVPLAPSFEDSDNIGIEEDSTTIRPTKPSHMDFSKSKIKGGHIEVLNCFGYIDNVDWCG

SEQ ID NO: 63820 - protein, 50 aa, Zea mays
  Coding DNA Sequence Number=SeqID_22041
MEGPRPGRRSGSSFAYVQTVHVWGSKKSAMAQPPKTPLVDVEPKIGEDLR

SEQ ID NO: 63821 - protein, 56 aa, Zea mays
  Coding DNA Sequence Number=SeqID_22042
MAQCVVFFAADLDLTSQEGSRRGREILGEEVWIRYKSVPELIPQVLVTNPTRNPEP

SEQ ID NO: 63822 - protein, 57 aa, Zea mays
  Coding DNA Sequence Number=SeqID_22043
MVVDQVMNVMEPHYPSMCTYYDKVNPSSGSVTTSTSALTGLSWHTHEPTTGSSALTA

SEQ ID NO: 63823 - protein, 81 aa, Zea mays
  Coding DNA Sequence Number=SeqID_22044
MALHELCDDGGSQLSYGSRATSARTRPLQQLSLRQAPSLLRQPRHHASKVIYASKGSSELAVLNRRKGESSWNGFWLHRLA

SEQ ID NO: 63824 - protein, 154 aa, Zea mays
  Coding DNA Sequence Number=SeqID_22045
  Subcellular localization annotation: CTP_CleavageSite=38; ConfidenceScore=5.60e-01
MTGAGMKLKINKACDLSSISVLPPRRTGGSGGAGSSAAAAAVAAGSQQRSQPLSQQSFSQGAVGSGGASSLLHSQSQLSQASLDENLLTLHLASPARDQVPSEPIPPSRRRRRHRCTIVIGDVSRCAVVMCDQRDYRFCFVIPPSRRCPTVIGM

SEQ ID NO: 63825 - protein, 176 aa, Zea mays
  Coding DNA Sequence Number=SeqID_22046
  Gene Ontology: Cellular component=integral to membrane
  Homolog annotation: Hit_ID=O80832; Match level="QueryCoverage=89%, HitCoverage=50%, E-value=6e-26, Identity=38%"; Hit description =UPF0187 protein At2g45870, chloroplast precursor
  Pfam annotation: Domain name=UPF0187; Domain location=2-176; Score= -59.4; E_value=4.2e-07; Accession=PF05249.2; Description =Uncharacterised protein family (UPF0187)
  Subcellular localization annotation: CTP_CleavageSite=25; ConfidenceScore=5.04e-01
SRHHLRHLLTSLSSRAILSLAPPVSAFTAFAAAIATYNTLLPAYALTASSLPYELTAPALALLLVFRTEASYARFDEGRKAWMRVLASAADLAGMLMRHPFPNNLHTGGAPNPGPGGRQADDEPLRRALVNYVLAFPVALKVSKLSCFLEGIGVCEQLMGIPIPLAYTRLTSRWVF

SEQ ID NO: 63826 - protein, 152 aa, Zea mays
  Coding DNA Sequence Number=SeqID_22047
MEEKIAKTTPDKSEVHPLNVIKVTTEDLIEADMEIEEEIEADMEIEEEIAREMEKRNERLACFRKTKNGVIKWGKHIQQVLELASSSQCTHHPRTHGAGMRACRLQHAVSLSSPRGHAASTGMCGAMDPVTMRTELGPDARVDLLSGMAMAY

SEQ ID NO: 63827 - protein, 178 aa, Zea mays
  Coding DNA Sequence Number=SeqID_22048
MNIAYVELGVHNLETTGQAKDGGSGTPARPGSPGVGMPCCPPSLLGVGPRLRSFLRDYDALQSLALVLIYLQIGCALIGSLGALFNGVLVINLVIGLFAVVAIESSSQRLGRTYAVLLFFAVVLDVAWFILFSHAIWTINPDDKYGQLFVFSLRLALWMQIIGFFSQVFVFVLMDSDV

SEQ ID NO: 63828 - protein, 203 aa, Zea mays
  Coding DNA Sequence Number=SeqID_22049
  Gene Ontology: Mol. function=oxidoreductase activity, acting on the aldehyde or oxo group of donors, disulfide as acceptor; Biological process=metabolic process
  Homolog annotation: Hit_ID=Q9ZQY1; Match level="QueryCoverage=46%, HitCoverage=25%, E-value=2e-43, Identity=94%"; Hit description =Pyruvate dehydrogenase E1 beta subunit isoform 3
  Pfam annotation: Domain name=Transketolase_C; Domain location=9-126; Score=116.2; E_value=9.7e-32; Accession=PF02780.10; Description =Transketolase, C-terminal domain
MAQGHISLSDGRTQCRRLPALCGVWGRAADILAKEGISAEVINLRSIRPLDRATINASVRKTNRLVTVEEGFPQHGIGAEICMSVVEDSFEYLDAPVERIAGADVPMPYAANLERMAVPQYSTWEMQIFLSRIGFWSLGWEKVNVVAVILACGIESRLTAHAIDHLSVSPFDSLLLPHLQVDDIVRAAKRACYRAAVPMAATA

SEQ ID NO: 63829 - protein, 362 aa, Zea mays
  Coding DNA Sequence Number=SeqID_22050
  Gene Ontology: Mol. function=pyruvate dehydrogenase (acetyl -transferring) activity; Cellular component=mitochondrion; Biological process=glycolysis
  Homolog annotation: Hit_ID=Q9ZQY1; Match level="QueryCoverage=66%, HitCoverage=60%, E-value=1e-114, Identity=86%"; Hit description =Pyruvate dehydrogenase E1 beta subunit isoform 3
  Pfam annotation: Domain name=Transket_pyr; Domain location=61-256; Score=215.4; E_value=1.3e-61; Accession=PF02779.14; Description =Transketolase, pyrimidine binding dom
  Subcellular localization annotation: CTP_CleavageSite=14; ConfidenceScore=5.39e-01
MLGVARRRLGSGCVSALPPPGSPPSLRSHRDPFLSPQVLAQLAQALRPAAAPARTYSAAAKEITVREALNTALDEEMSADPSVFLMGEEVGEYQGAYKISKGLLDKYGPDRVLDTPITEAGFTGIGVGAAYHGLRPIVEFMTFNFSMQAIDHIINSAAKSNYMSAGQISVPIVFRGPNGAAAGVGAQHSQIGILLYYDGITNCLSMQCYAAWYAHVPGLKVLAPYSAEDARGLLKAAIRDPDPVVFLENELLYGESFPVSAEVLDSSFCLPIGKAKIERQGKDVTITAFSKMVGYALQRSRPLQMREPLAHRTCPVHTGQSGAPFRPLAWPRVPRRSRGRPLALPTVGSPDSPVHTGQSGEF

SEQ ID NO: 63830 - protein, 200 aa, Zea mays
  Coding DNA Sequence Number=SeqID_22051
  Homolog annotation: Hit_ID=Q5GAV3; Match level="QueryCoverage=56%, HitCoverage=8%, E-value=1e-20, Identity=51%"; Hit description =Putative integral membrane protein
MHGDGLSVSLPDGLQSEAQQQEVEIQPDAQEQVAQVADERRRRQLHANPRVQGLEWLTIGIRGTFLAMSSATPIEGSLTLALENQTRALLSELDKRFLARDDQWNSRLGDLESRLSAMEQSWSEFPSSLRSDVEAHLTAADSAVDVRLLQIETETHSRVVALESSVQRLEAWRPRVESSLDALQSEAGGWRLDAAQRDSS

SEQ ID NO: 63831 - protein, 37 aa, Zea mays
  Coding DNA Sequence Number=SeqID_22052
KETLRQCKVGHCGLVNSKFSDHRLSLGILKITGLYIR

SEQ ID NO: 63832 - protein, 88 aa, Zea mays
  Coding DNA Sequence Number=SeqID_22053
MGKRIHPGSRSNTRGDIPRRAWNTRRAGELPTDEIHVGGHALCPARRRCIGSTARVRRHQYTRGAQASHPRPRVNCAMTLILRIKSDF

SEQ ID NO: 63833 - protein, 88 aa, Zea mays
  Coding DNA Sequence Number=SeqID_22054
MGKRIHPGSRSNTRGGIPRRAWNTRRAGELPTDEIHVGGHALCSARRRCIGSTARVRRHQYTRGAQASHPRPRVNCAMTLILRIKSDF

SEQ ID NO: 63834 - protein, 131 aa, Zea mays
  Coding DNA Sequence Number=SeqID_22055
  Gene Ontology: Mol. function=nucleic acid binding; Biological process= DNA integration
  Homolog annotation: Hit_ID=O24587; Match level="QueryCoverage=43%, HitCoverage=5%, E-value=3e-22, Identity=87%"; Hit description=Pol
MGKLNYFLGFQVKQLKEGTFISQTKYTQDLLKRFGMKHAKPAKTSMGIDGHLDLDKGETTLYELRVKEKQIGETKLLGQEGKEPDYFASDTDFLLVGCVGGTTAANEGTASGIAIDADADSGVDIPEGDSA

SEQ ID NO: 63835 - protein, 112 aa, Zea mays
  Coding DNA Sequence Number=SeqID_22056
  Subcellular localization annotation: CTP_CleavageSite=86; ConfidenceScore=5.26e-01
MPRIPERRPKVFPIPHPRSCQPWRTQFPLPAAGIACQSNFDSPRAPPLPSTRFQSRSHSRNAAIEFAGLPSLVLTNSGDPRSPGVRAYLISGDFTAMDGSSVDHRVVNPLGV

SEQ ID NO: 63836 - protein, 121 aa, Zea mays
  Coding DNA Sequence Number=SeqID_22057
MTGESEVYSNQAKSLGRRDRQGQAKALPNVSSFKNLPYWCAPHTIATAEQAMAKQDVFSFDFVGANLTTGLKSLPEAEVKASEQTRTCFIAQSGGDECEGNFPRELRIILIREEKRSKMDQ

SEQ ID NO: 63837 - protein, 563 aa, Zea mays
  Coding DNA Sequence Number=SeqID_22058
  Gene Ontology: Mol. function=microtubule motor activity; Cellular component=microtubule associated complex; Biological process =microtubule-based movement
  Homolog annotation: Hit_ID=Q93XF6; Match level="QueryCoverage=75%, HitCoverage=99%, E-value=1e-151, Identity=69%"; Hit description =Kinesin heavy chain
  Pfam annotation: Domain name=Kinesin; Domain location=29-287; Score =120.3; E_value=5.5e-33; Accession=PF00225.13; Description=Kinesin motor domain
MGEELGGLLRDDDAGSDAVRLGAWLWGVVRGSSQAGHAPWAWRTPASRARAGEAATGSGTRAAAVHAPREEVLERAIVGSVGSHEGSGDISGGGAGRTAVRGYIFILLLFCRQLLMREDGKKQIVKEYIEKGNAARSTGTTGANEESSRSHAILQLSVKKHIPVTETRRQRDRDAIEAKNTKHVGKMSFIDLAGSERGADTTDNDKQTRIEGAEINKSLLALKECIRALDNDQIHIPFRGSKLTEVLRDSFVGNSRTVMISCVSPSSGSCEHTLNTLRYADRVKSLSKGGNTKKEQFAVQSVSSGKESTYTSYPLSCEAEETMEQTQEIRPVDSSRKGVDSFTSNSSIEPEKNSYCMIPSYPHKGKEETSTRSGLNDRERGDLKYNQAGFNSKTHSLQESINSQEEVKVTKVSPPRRKANRDEKSERQVNYMKKESGPEISRTGVKQQQQLKQLQRPSSTSSSQVLSKQSEKEDMEINTILEEEALIAAHRKEIESTMEIVREEMNLLAEVDQPGSLIDNYVAQLSFLLSRKASGLVSLQARLARFQQRLKEQEILSRQKPLR

SEQ ID NO: 63838 - protein, 261 aa, Zea mays
  Coding DNA Sequence Number=SeqID_22059
  Homolog annotation: Hit_ID=Q8S6T7; Match level="QueryCoverage=26%, HitCoverage=9%, E-value=2e-09, Identity=40%"; Hit description =Putative activator-like transposable element
  Pfam annotation: Domain name=zf-BED; Domain location=197-252; Score =38.6; E_value=2.1e-08; Accession=PF02892.5; Description=BED zinc finger
MDVNHITEMEDVLNDDEMEYPFEGDANASNNDQIVEDHADDAPIASGENAIVQQQVGLRKKKYMYVNDHRVVKQRKLVPTVTVPAMNKDKGPMPMSISKMKTKKPIGTPTRSKLMASAFKVTSSKNELMVLMKKLAEVVQPAIASATTSANASASSSVRASASASIPASVSIPASAQASVGDDEKQVDGQIGKRLTSCVWQHFKRYEIDVEQTDGSSVKQKWAKCLRCSHKAKADASNGTKAFSNHLKLKHCLVKGQQQLS

SEQ ID NO: 63839 - protein, 114 aa, Zea mays
  Coding DNA Sequence Number=SeqID_22060
MEKAKRCKGVGAWGRGGGTYEQGRGGAPAKGPRRYQQGLGTKLASGAQVLQIANGWEMENEEEISDGRKRGEENGEGKTTVASPVPTATVALTGEDNGAWTDSDGGWLFVLLNG

SEQ ID NO: 63840 - protein, 88 aa, Zea mays
  Coding DNA Sequence Number=SeqID_22061
  Subcellular localization annotation: CTP_CleavageSite=36; ConfidenceScore=5.21e-01
MNDGAKKRDVSSNSMNVACRNTSLLGPTRLGGSYPTAAWRGERFGFRWDGKGGSQSKKRETSRPLNTNRETNLTWIAWELAVAPGFNV

SEQ ID NO: 63841 - protein, 121 aa, Zea mays
  Coding DNA Sequence Number=SeqID_22062
MDGVRAWIEGLAPKSQRRTRCFCYGARVEDEADNWDPLAELGVPKNSVSTRVGKAGQWAHGVGAMSFLGGWVKGNGSAEANSAHGAGSLEDMVAGVTWPSILPPGWIVEWDPTSAEEEHEE

SEQ ID NO: 63842 - protein, 112 aa, Zea mays
  Coding DNA Sequence Number=SeqID_22063
MRVQGRDSDNSHKVTAPPQHLGSLVLRMLLKMSLTPLKNVPEAQAEEIILTMGAAAPQTEVGSLNQSEDSVEMDFEEDNTVIHPTKPSHVDFGKSKIKEGHIEVLNRFGYID

SEQ ID NO: 63843 - protein, 345 aa, Zea mays
  Coding DNA Sequence Number=SeqID_22064
  Gene Ontology: Biological process=protein modification process
MTTAGEVDSAAGGEDLEPLFDYKRVQPRMTFCFDDSDLEVADIFKYCNKRPKVHTSTEEEGKPDEEVAAAKVVVLDEEDWLQPPPPKAAFRATAEEDSAFRELRLKKQEWAKFAESAEDILQKLDEITNKEVGPKEPPEQIILDEESEPQVEKAREKIVISIQDKDGQQQMRVYKFKNELAGDKYSRTDVVITGAYATLFRQFRLSDDEKFDKLLKVYAKKAKLNPSDLSFVFDGEKINPSSTPQDLDLEDEDMIETNSAFSLSSFASNKGLFVYISYNKDVEAILDICVKPSRYIAAVPCTWGFGWQKPSAEMPEQPLLLDVSIQDASQLAMPTEVTKDGANCS

SEQ ID NO: 63844 - protein, 392 aa, Zea mays
  Coding DNA Sequence Number=SeqID_22065
  Gene Ontology: Mol. function=amino acid transporter activity; Cellular component=integral to membrane; Biological process=amino acid transport
  Homolog annotation: Hit_ID=Q5JKI7; Match level="QueryCoverage=93%, HitCoverage=71%, E-value=1e-132, Identity=58%"; Hit description =Putative GABA-specific permease
  Pfam annotation: Domain name=AA_permease; Domain location=1-366; Score=-108.7; E_value=0.0076; Accession=PF00324.11; Description =Amino acid permease
MKWAVTTSVDYSLAQLIQVIILLATGGKTGGGYVASKYMVLGFHAAILLSHAVINSLPISCLSFLGQFAAAWNVLGVFVLMIAVPTVATERASAEFVFTHFNTDNDGAGIRSSLYIFVLGLLMSQYTFTGYDASAHMTEETKNADKNGPIGIISAIGISILVGWGYILGITFAVKDIPYLLSPDNDAGGYAIAEVFYLAFKSRYGSGVGGIVCLGIVAVAIYLCGMSSVTSNSRMAYAFSRDGAMPFSSVWHKVNRQDVPINAVWLSAFIALCMALPSLGSLVAFQAMVSIATVGLYISYALPVLFRVTLARKCFVPGPFSLGRYGVMVGWVAVLWVATISVLFSLPVAYPVTKDTLNYTPVAVGGLFFLVIASWVLSARHWFTGPITNLDG

SEQ ID NO: 63845 - protein, 55 aa, Zea mays
  Coding DNA Sequence Number=SeqID_22066
MAPSSVVIAQNNPRVIDIGRRSGARSGMYMGIRMSFVEERIMRKETGRGESEREW

SEQ ID NO: 63846 - protein, 139 aa, Zea mays
  Coding DNA Sequence Number=SeqID_22067
MTPNFYFFPNYDPDHGVLAVHPGRDQFGGNRRCGVSGRNWEMGLGLYGRKELCFHRAQLIWEKVERSVGISSCARAYLKNSERLAVDHRAIYSHGDPTVDLRPRIASLVHAYHVGRRHSEGGRGMGDTAAKLLGHGGRR

SEQ ID NO: 63847 - protein, 197 aa, Zea mays
  Coding DNA Sequence Number=SeqID_22068
MQAACNRAKWAHPFDSNAPNMEAQAHTSCSRRAGCYVRETAPPLAPLPCLLDCGTSTTTRGNPAYDPTVPARHIDHGSVSRGRRRDGRYGQKWTKPEGQRRLRHSDCSATRQSESDRQSGLAKGAIGNSAPPDPRARTRAKTRKTANSAPPDPRARTRAKTRKTANSAPPDPQGSDSGSAPEDGELRSARPQGSDSG

SEQ ID NO: 63848 - protein, 350 aa, Zea mays
  Coding DNA Sequence Number=SeqID_22069
  Gene Ontology: Mol. function=enzyme inhibitor activity
  Homolog annotation: Hit_ID=Q8SB01; Match level="QueryCoverage=49%, HitCoverage=85%, E-value=2e-41, Identity=52%"; Hit description =Putative ripening-related protein
  Pfam annotation: Domain name=PMEI; Domain location=39-211; Score =73.1; E_value=8.8e-19; Accession=PF04043.6; Description=Plant invertasepectin methylesterase inhibitor
  Subcellular localization annotation: CTP_CleavageSite=11; ConfidenceScore=5.36e-01
MASAATFLLIIAAAAWTSLTDAAPSPPPFVPPPPCAPPQSAVAFLRARCATTLYAVACYESLLPYACIFQTSHVKLARAAGDVNAAWLRSISKRVKELVARGAAGGGGTAGGAKSAALRDCASTVSSAAGLAKQSAAELAKLDVAGTTAGRSQVRWAISNAQTWLSASMTNEATCADGLADTGAAASSPVAREVMVAVVGTKELTSNTLALVRGIPSRSDRSHFAAPLTGLTRGQRRLRRSDCCATRQSEADSSQVRPRGHRKLRLARPQGSDSGSGSAPEDDELRLALPQGSDSALASADGLRLARPRGSDSTSASEDRLDLDLGGASASPNPGLGPTTSQEGPSSPYP

SEQ ID NO: 63849 - protein, 67 aa, Zea mays
  Coding DNA Sequence Number=SeqID_22070
MGKSDVCARCARIKCTTGSRWRRREPLLRWCTGQSETTDQAKDGSKKCFEVPSAREKVEEAKEAKAR

SEQ ID NO: 63850 - protein, 145 aa, Zea mays
  Coding DNA Sequence Number=SeqID_22071
MASAWRGANKEVMKPMHGEKSEDVDGVTNATRSSALLRWDGDWSHSDFCRTLGIIPELFSSLLHFFLHMHRQPRGHATVARTWIGHVKMTRGALPPFFSQTTATPNFSHCCSISGSPDPLSSVYELKPKIARWRHVPVGRGSHRQ

SEQ ID NO: 63851 - protein, 586 aa, Zea mays
  Coding DNA Sequence Number=SeqID_22072
  Gene Ontology: Mol. function=nucleoside-triphosphatase activity; Cellular component=membrane; Biological process=DNA replication
  Homolog annotation: Hit_ID=Q84N07; Match level="QueryCoverage=54%, HitCoverage=90%, E-value=5e-49, Identity=33%"; Hit description =Replication factor C 38 kDa subunit
METPSPGATLSAVIAEDRRREARRRQGGFGQGGLLPYLVPACGRPAGQRGGRPLHSELMVKLHRWGATFLPKGGGAVARELEEPCRAPSPPPRPRPSFTPAASAAEPEVVPRHEAPAVSVVPTTGPSREREEPAAGSEAIAEADMSAGESAGSSDHQATPVVTVAGGSGGTWLRASPKTRARSPSLQTDSDESPRPLADSAALPVVADDKYVWADKYRPNVLNEFICNKTVAAELYQLVVAHQCRHFIFEGPPAVGKRSMVLALIRDAFGPHDLKIEEQTKRFELKGEIRKHIDVRVKTSEHHVEVSLADLHGYEKYIITTLLSESIPSPSSVCDHTNCRVIVIHDADKLSFDLQHYIGWFLGRYAGCNKIIFCCSDASNLEAIKHLCKVVTLQPPSFDEIINVLEYIATQESIDLPRDLARRITVGANNNLRQTIRSFEATWKANYPFIDGQVILTGWEEEISNVASNIMEEPSPKQLFLVRGKIRKMIEHDVSPHFIFSHLVAELKRDKDEDFQHSVDELASDLNHFQDSKGQCKGNKSREANFKTRYMNIEGFTAEAHDHVSYSILNFSLVKQLNLEFWQNSP

SEQ ID NO: 63852 - protein, 190 aa, Zea mays
  Coding DNA Sequence Number=SeqID_22073
  Gene Ontology: Mol. function=metal ion binding; Cellular component =integral to membrane; Biological process=ubiquitin cycle
  Homolog annotation: Hit_ID=Q9AYK4; Match level="QueryCoverage=54%, HitCoverage=42%, E-value=8e-30, Identity=61%"; Hit description =Putative zinc finger protein
  Pfam annotation: Domain name=PHD; Domain location=87-132; Score=-1.8; E_value=0.086; Accession=PF00628.19; Description=PHD-finger
  Pfam annotation: Domain name=zf-C3HC4; Domain location=88-129; Score =40.2; E_value=7.3e-09; Accession=PF00097.15; Description=Zinc finger, C3HC4 type (RING finger)
  Pfam module annotation: Pfam domain module=PHD::zf-C3HC4; Domain location=87-132::88-129
MLLPVFILFVLLLCFLSIFLLRDLLHFLSLWLRRRRRLRADADAASDATPDTHASHKPAGLDPAVLATFPTVRWFEETHRPASGQAECAVCLSEFAAGDAVRLLTVCRHAFHTACIDSWLGAHTTCPVCRSELDAPAATPRYGGGGRIAILVDDQGDGSAAVADTDHAASSPANGFTSDLNYNLDMMIKN

SEQ ID NO: 63853 - protein, 252 aa, Zea mays
  Coding DNA Sequence Number=SeqID_22074
MDHPLGLSKYSEPIYLFGIFNRHWIEYYYEEQVESLGDEELALVASQFVRFHNNHQNRWGRFNKEALENKYLYGKVKERAFLASLSDLDHDSNKSASSLSGEEPERRVEDKLNELCFITNTTRGLCTMALSHETVGDDDKDIDDDSTSEVSHFIDDLVAERRLARPKGALPHAARPQAVRPHGGYTRWSASRVPYGQEPCGLDQITFVEEEHDNADWGDLERTLPAVPIAIVYLCEWGSMPHPARSSSPDDW

SEQ ID NO: 63854 - protein, 815 aa, Zea mays
  Coding DNA Sequence Number=SeqID_22075
  Gene Ontology: Mol. function=transferase activity, transferring phosphorus-containing groups; Cellular component=chloroplast; Biological process=phosphorylation
  Homolog annotation: Hit_ID=P11155; Match level="QueryCoverage=99%, HitCoverage=86%, E-value=0.0, Identity=98%"; Hit description =Pyruvate, phosphate dikinase, chloroplast precursor
  Pfam annotation: Domain name=PEP-utilizers; Domain location=363-453; Score=167.6; E_value=3.2e-47; Accession=PF00391.13; Description=PEP -utilising enzyme, mobile domain
  Pfam annotation: Domain name=PEP-utilizers_C; Domain location=465 -815; Score=695.3; E_value=4.5e-206; Accession=PF02896.8; Description= PEP-utilising enzyme, TIM barrel domain
  Pfam annotation: Domain name=PPDK_N; Domain location=3-312; Score =421.2; E_value=1.5e-123; Accession=PF01326.9; Description=Pyruvate phosphate dikinase, PEPpyruv
  Pfam module annotation: Pfam domain module=PEP-utilizers::PEP -utilizers_C::PPDK_N; Domain location=363-453::465-815::3-312
QYQDAGCALPAGLWAEIVDGLQWVEEYMGATLGDPQRPLLLSVRSGAAVSMPGMMDTVLNLGLNDEVAAGLAAKSGERFAYDSFRRFLDMFGNVVMDIPRSLFEEKLEHMKESKGLKNDTDLTASDLKELVGQYKEVYLSAKGEPFPSDPKKQLELAVLAVFNSWESPRAKKYRSINQITGLRGTAVNVQCMVFGNMGNTSGTGVLFTRNPNTGEKKLYGEFLVNAQGEDVVAGIRTPEDLDAMKNLMPQAYDELVENCNILESHYKEMQDIEFTVQENRLWMLQCRTGKRTGKSAVKIAVDMVNEGLVEPRSAIKMVEPGHLDQLLHPQFENPSAYKDQVIATGLPASPGAAVGQVVFTAEDAEAWHSQGKAAILVRAETSPEDVGGMHAAVGILTERGGMTSHAAVVARGWGKCCVSGCSGIRVNDAEKLVTIGGHVLREGEWLSLNGSTGEVILGKQPLSPPALSGDLGTFMAWVDDVRKLKVLANADTPDDALTARNNGAQGIGLCRTEHMFFASDERIKAVRQMIMAPTLELRQQALDRLLPYQRSDFEGIFRAMDGLPVTIRLLDPPLHEFLPEGNIEDIVSELCAETGANQEDALARIEKLSEVNPMLGFRGCRLGISYPELTEMQARAIFEAAIAMTNQGVQVFPEIMELGHQVTLIRQVAEKVFANVGKTIGYKVGTMIEIPRAALVADEIAEQAEFFSFGTNDLTQMTFGYSRDDVGKFIPVYLAQGILQHDPFEVLDQRGVGELVKFATERGRKARPNLKVGICGEHGGEPSSVAFFAKAGLDYVSCSPFRVPIARLAAAQVLV

SEQ ID NO: 63855 - protein, 73 aa, Zea mays
  Coding DNA Sequence Number=SeqID_22076
MAEEQTVPGVLLAPSTDAPETAVEVTISQAEAGAVNPSGDSDDIDIEENITTIRPTKPSHVNFGKIKDQGRTY

SEQ ID NO: 63856 - protein, 509 aa, Zea mays
  Coding DNA Sequence Number=SeqID_22077
  Gene Ontology: Mol. function=hydrolase activity, hydrolyzing O -glycosyl compounds; Cellular component=cellulose and pectin -containing cell wall; Biological process=polysaccharide catabolic process
  Homolog annotation: Hit_ID=Q7XTH4; Match level="QueryCoverage=93%, HitCoverage=93%, E-value=0.0, Identity=72%"; Hit description =Endoglucanase 11 precursor
  Pfam annotation: Domain name=Glyco_hydro_9; Domain location=37-503; Score=770.2; E_value=1.3e-228; Accession=PF00759.9; Description =Glycosyl hydrolase family 9
MTRPAPPSSQALVLLAAVAVSLLLSRSSHVAAGGHPDYADALAKAILFFQGQRSGQLPPDQAVTWRSNSGLSDGSAANVDLTGGYYDGGDNAKFGFPMAFTTTMLSWSVLEHGGRMKARVRDARDAVRWGADYLLKAATQTPGRLYVGVGDPGADHRCWERPEDMDTPRAVYWVSASAPGSDVAAETAAALAAASMVFRAADRAYSRRLLAAARGVMELAVQHQGKYSDFVGGDVGAYYQSYSGYKVPRSMTSGIRVDELLWGSAWLLWATNSSSYLAYLYSLGDNDGVDMFSWDNKLAGARVLLSRRALVNGDTRLEPFRQQAEDFFCRILRDSPSSTTQYTPGGLMHKSGYANLQYVTSASFLLTTYAKYMAATKHTFSCQSLPVTATSLRALAKQQVDYILGANPQGMSYMVNFGARWPQRIHHRASSLPSVASHPAHIGCQEGFQSYFYSSGANPNVHTGAVVGGPDEHDEFPDDRADYARSEPTTYTNAPLVGCLAYLAGTYRT

SEQ ID NO: 63857 - protein, 545 aa, Zea mays
  Coding DNA Sequence Number=SeqID_22078
  Gene Ontology: Mol. function=RNA-directed DNA polymerase activity; Cellular component=chromatin; Biological process=chromatin assembly or disassembly
  Homolog annotation: Hit_ID=Q8SA91; Match level="QueryCoverage=56%, HitCoverage=13%, E-value=2e-92, Identity=54%"; Hit description =Putative gag-pol polyprotein
MTAEPERRMGRRSRSRGHSGDGFSGSSSVNQQWLLTSGIRLIFWSWRLLCTLREVHGWQARQILASRTQSKSIEAQSKTVANQSKILQHLCDRLESQDQRWSGLEKAVNANADNVAKLHEKMAEGEIQIGQWQADQRDRLDNFAADKTTRVAVLENVTKVFESWRPRIEGCVDMIKTSVDAVRVELARVARVLDHGASDVCTAGPVQDGSASERFPAAGCYVDGPDGHCQEEASELGRKLDYMRSYSSGALIQVANGTQLSCDSEVVNAVWSIGGRPFTSTLKVLPLSTYDLIIGMDWLEAHSPMLVNWSHKWLTIPFQNNIITLHGIASSVMTNSVVQVCNLLELSEKKHNILSQLPDAIQALVQQFSSVFEIPKGMPPVQDCDHQIPLLPRARPIQMRPYRYAPTLKDEIEKQVSKMLQSGIVQPSKSAFSSLVILVKKKDQTYRFCVDYRHLNALTLKTKFPVPVIDELHGASWFSTLDLRAGFHQIRMSLEDQHKIAFQTHHGHFEFRVMSFGLSGAPATFQSAMNNTLAPILRKFALVFF

SEQ ID NO: 63858 - protein, 152 aa, Zea mays
  Coding DNA Sequence Number=SeqID_22079
MGRGRRDRGWPRRVDGKCKHAPSPPSEDFGDSEYSEEASFESDRSHAPASPSASSEDSDDSMRLSTVARVYWRSIERAGLGGSDESGISSDEADSSNSSEEWSGGDGDDEGDDSGGDDSEGGSEGDNGSGNDDDSGDGGSKGNNGDDSSEST

SEQ ID NO: 63859 - protein, 91 aa, Zea mays
  Coding DNA Sequence Number=SeqID_22080
MGINERKKNNVNQGYPRTLVICALKCIKAIPIHYVILKENLSIKDCNLADGEYILVPEQGAAQEVAPDPAPEPAPEDLPATALEGKPRFYA

SEQ ID NO: 63860 - protein, 127 aa, Zea mays
  Coding DNA Sequence Number=SeqID_22081
  Subcellular localization annotation: CTP_CleavageSite=48; ConfidenceScore=5.07e-01
MTPRVLGASLLVLLLSVPINSACRAAPPHSTPQLGLLDSASARLGAPPAQLGSVCAIDGDVASALSALPVGALTAVEPLFMLFLATRISGLPPIAHRTLSPAVVPLHAVGGGYLRRSQSSCWSGGTA

SEQ ID NO: 63861 - protein, 90 aa, Zea mays
  Coding DNA Sequence Number=SeqID_22082
MELNQSGCDAPDRFGGAQVRVYKEQGQVAHWTGPVTCNGSLTRFSSEHWRLYELRWGCSGAQTASSRGTTRVVRPQDDGTRLEEATRVAS

SEQ ID NO: 63862 - protein, 59 aa, Zea mays
  Coding DNA Sequence Number=SeqID_22083
MAQRLTRFTFASERKKSGEVIRVLRYAMESIVKQGDDEVESVGEHISLMAWRLGADDGG

SEQ ID NO: 63863 - protein, 41 aa, Zea mays
  Coding DNA Sequence Number=SeqID_22084
MAAGWDCDRYGHHCVRLQIWYLLSRVLRFSWAPSLFASRMM

SEQ ID NO: 63864 - protein, 1005 aa, Zea mays
  Coding DNA Sequence Number=SeqID_22085
  Gene Ontology: Mol. function=small conjugating protein ligase activity; Biological process=protein modification process
  Homolog annotation: Hit_ID=Q8VY10; Match level="QueryCoverage=85%, HitCoverage=98%, E-value=0.0, Identity=41%"; Hit description =Putative E2, ubiquitin-conjugating enzyme
  Pfam annotation: Domain name=UQ_con; Domain location=628-777; Score =128.2; E_value=2.4e-35; Accession=PF00179.16; Description=Ubiquitin -conjugating enzyme
MDLFTIDSDSESYTGTSDSEDQECEFTYSDHAQNILSSLDESIGKIDNFLTFERGFLHGDIVCPVSDPSGQLGRVVGVAMFVDLETSSGDIIKDVNSKKLSRVRSFVSGDCVVMGPWIGRVIRAFDLVTLLFSDGAKCEILLRDSDVLKPIPPVLFEDAPYFYYPGQRVRIVDPSVSKSATWLCGSWRPSRDDGIVSHVDVGLVHVNWITSVTNVWGDKSSSPPNIQDPKKLTLLSCFPYANWQLGDWCALMTDNNGCLWMDSGKSCILSEDQKCDSHAHMYFESYGSDCSQTFVVAKTKSTVDVLWQNGTVSLGLEPQALLPVSTLGDHDFWPGQFVLEKLTVEDAARCPRTAIVSDVDALERTVNVKWIGPAHSDIVSYGSDPAVETVSVYELVEHPDFSFCTGEVVIRSAMNIDKSEADPTNGSLASKESLVTSSGFLSCTGNVLGYKDNGIEVQWANGVISKVQHFEIIGLDKLLDNSSVESMNEEHTIGDSLDEAEQEELNHEIALESTEDCTGSLCKATAFLFPKTAFDFLTNVAAKFLSEYVIQVLVDPRYEIVKMAEMQPCAEETPKEEQIVKFVAQIDKPILSSEDAISKRFDVVTDCLDHHFVKENGHESVTRGWLKKVRLEWNILQNDLPDGIHVRVYEERMDLLRACIVGAPGTPYHDNLFFFDIFFPPDYPHEPPSVHYHSGGLRLNPNLYESGKVCLSLLKTWTGTGNEVWNAESSTVLQLLLSLQALVLNEKPYFNEAGYDKFVGKADGEKNSITYNENAFLLSCKSMMYVLRKPPKHFETLVKEHFTCRAPHILDACEAYLGGDLVGHAHDKAYVAEDGNKNCSTGFKIMLGKLLPKLVTAFCEAGITSDRSSEKSPTPPHSSPQTTTLLLLPHPPRRNPSADRLPCPSTAIALLRPDGDPRLQTKGLFGPLSPPVSPPFNSDSDADLPPRRSGTRRRNCLCAGSSSFDDPDVVEVSPATAAAAGWASGHHKRKRSQVAVDKLIHVPCI

SEQ ID NO: 63865 - protein, 560 aa, Zea mays
  Coding DNA Sequence Number=SeqID_22086
  Homolog annotation: Hit_ID=Q1SL66; Match level="QueryCoverage=93%, HitCoverage=94%, E-value=1e-59, Identity=32%"; Hit description =Aldehyde oxidase and xanthine dehydrogenase, a/b hammerhead; Membrane attack complex ...
  Homolog annotation: Hit description=component/perforin/complement C9
MRGSSGARMTAQDAAEAAVGAVGCGYDLTGDLRLGRAKPGGRLVDLDGAGKGPGTSQSASPSPRELAFPGGAAVAGVPAGVVAGKGERARFRSDVLPFAQMAEEVNRSLSLPASKIPSGAFNAMFDYRGCWHRDAAATRSLCFDARLRRALQRRGRARQASPSGTTSGGDLPPVWDPAALAEFIDKYGTHVIVGVKMGGKDVVCVKQLKGSSLTQSDVQARLKELADDRFSEDSTAIWSGGVVWCVIVLCWMCYLIVGCSSGFPARNVEADKPAIEELQQFLEFQVPRLWAPEFGQLPLSLQRRKNILPSLQFTLMGPKLHVNTAKVDSCLRPVTGIRLFLEGKKSDQLGVHLQHLSATPGAITVLGEAASSADDAAAVNERAYIEPVRSPLLSHICTAPVQYNGALIDDCAAIVTSAWLEVRDACCLKKVLFLRLGFSGVADMKIRRSEWGGALVAPRRSGSLSARLSAALSGGLAPAPPAVEEKVEVNSAIFPKGPPVPLPVQKMARHIDTTEVSRGPDDLPGYWVVTGAKLCMEGGKVALKVKYSLLIAVQEDPEGH

SEQ ID NO: 63866 - protein, 561 aa, Zea mays
  Coding DNA Sequence Number=SeqID_22087
  Homolog annotation: Hit_ID=Q9LIL7; Match level="QueryCoverage=88%, HitCoverage=96%, E-value=6e-90, Identity=35%"; Hit description =Arabidopsis thaliana genomic DNA, chromosome 3, BAC clone:F4B12
MEPSPAAGELGAMLRAAADFASYPGNAPFPTSRRIWADEVNCSPQVVFAGAGLCLSPIVRTGLHSDDTVRQFLERCPLPKLLGALQSEEDVPGMVETVTECLDKIFSSRYGASLLPNYGAFIQAGLLTDSKQIRKLACKAVLHLLDKAEDGGAAVETVVQHNLYPLLIKCLIEGDEEISAIILDTVKRLAQIPKGAEVIFPPDGQGSVQLGKVAAQSSSLARIRILSLIAKLFTVSSYTATAIRDSNLLSIFEEEIKDRRDMLKTLSALEVLYELVEHPHSNIFLLKTNLLQLIIDIINDSSADSVIRSRAALVSGRLLSSADAFTAIDKSCVTNLLIAIGRILKMEESKNTDEIESALETLGLIGTTSQGAHFLLTSSNVARHVVESSFDRQGRGRQLAALHAFGNICGVGRQEDQMKLDSEAEENLKRLVYTTAANSPKLTPSALLLSVLQQDPDVRIAGYRVITGLVIREWCLREVCLNSEIIRFVTDPTMETTKLGMETRYGCCVAINKALSSSHLLHEASLSELVGKLNDAVKRGPYLSDRKRVEARPVVDTAERF

SEQ ID NO: 63867 - protein, 480 aa, Zea mays
  Coding DNA Sequence Number=SeqID_22088
  Gene Ontology: Mol. function=pepsin A activity; Cellular component =cellulose and pectin-containing cell wall; Biological process =proteolysis
  Homolog annotation: Hit_ID=Q9LTW4; Match level="QueryCoverage=77%, HitCoverage=77%, E-value=4e-78, Identity=43%"; Hit description =Chloroplast nucleoid DNA binding protein-like
  Pfam annotation: Domain name=Asp; Domain location=111-476; Score= -169.0; E_value=0.0013; Accession=PF00026.14; Description=Eukaryotic aspartyl protease
  Subcellular localization annotation: CTP_CleavageSite=49; ConfidenceScore=5.15e-01
MASRGHLLLALLVLASSSAAAASGARHQAHGRRGKPARPRPRPRLELVPAAPGASLPDRARDDARRHAYIRSQLLAASRTRGRRAAEVGASASASAFAMPLSSGAYTGTGQYFVRFRVGTPAQPFVLVADTGSDLTWVKCSGAGDGTGDAPRRVFRAAASRSWAPIACSSDTCTSYVPFSLANCSSPASPCAYDYRYNDGSAARGVVGTDSATIALSGSESRDGGGRRAKLQGVVLGCTASYDGQSFQSSDGVLSLGNSNISFASRAAARFGGRFSYCLVDHLAPRNATSYLTFGPPGPEGGAAASSSSSSAAARTPLLLDRRMSPFYAVAVDAVHVAGEALDIPADVWDVARGGGAILDSGTSLTVLATPAYRAVVAALSERLAGLPRVSMDPFEYCYNWTAAALEIPGLEVRFAGSARLQPPAKSYVVDAAPGVKCIGVQEGAWPGVSVIGNILQQDHLWEFDLRDRWLRFKHTRCAL

SEQ ID NO: 63868 - protein, 474 aa, Zea mays
  Coding DNA Sequence Number=SeqID_22089
  Homolog annotation: Hit_ID=Q2QYQ2; Match level="QueryCoverage=57%, HitCoverage=54%, E-value=2e-75, Identity=56%"; Hit description =Expressed protein
MRAPSRVVGLGRVTGDAFGELFLLLCDGRGRRGLFSNHSPLYFTNTKRFFSKMGLACHIAKIHSEASVEKNAWELKQYIEELYWGSGKQVLLLGHSKGGVDAAAALSLYWSELKGKVAGLALVQSPYGGTPVASDILREGQIADKETRRIMELIGDIRALEDLTYAKRKDFISQHKLPIDELPIISFHTEASTAPTALASLTRVAQAELLPWLPLPRFFLSASEFVESMLASLKVPVVAPVSAAMAVTALHLRLRYGERSDGLVTRRDAEVPGSVVVRPERRLDHAWMVYSTLKMGSAEADASEIHGVAALSPPLPLDPPRSSEISTSCADLDCDPDPNLFCPRPSGSPAPRALASPRLYYPSRCHFATRSSGDEDDGEDEEEHYDDEGSDGEWGDDEEVVAAKKPSGKTEEEKVAEAAEIGYKVLGPLGADDKPFKPYEPVFAVVQIGSHQFKVSNGDSIFTERLKFCDVNDK

SEQ ID NO: 63869 - protein, 427 aa, Zea mays
  Coding DNA Sequence Number=SeqID_22090
  Gene Ontology: Mol. function=structural constituent of ribosome; Cellular component=intracellular; Biological process=translation
  Homolog annotation: Hit_ID=Q018B0; Match level="QueryCoverage=55%, HitCoverage=70%, E-value=2e-38, Identity=34%"; Hit description=[S] KOG1685 Uncharacterized conserved protein
MSPPQPPHPVPRETVASAVASLTTWMKKRAAEARPNLLADERDDIVVLQLSLRRIPASRSTKPRLLPMPHPVVGHDGASVCVISDDRTKSRSPSASDLHASMSLHRFPVSEVIPLSTLRTDYRPYESRRRLAASHDLFVADRAILPLLPRVLGKAFYSTKKAPIGVDFTRIGWPEQVRRVLGSAFLYLRSGTCSGIKVGRLDMEEEDIVDNVMAAVEEAVEKVPKKWGNVRALHLKAVDSVALPIYQVVPELGMKIEVPEPDIVGSGEVIEKKANAGADGREVFANVSSKRKRNKKEQIEEGVVMQEEVQVDTEKKKKTKSIMVDDSQEVGKKGRVKGKRATEEGKKRKKSIKGDRRILAEFIHAVNHFKKNLEISFVVLPIIISVGILDEKTGTVFCNPIPPLQHSTSLMVNLMNLFGLNRTDIRL

SEQ ID NO: 63870 - protein, 106 aa, Zea mays
  Coding DNA Sequence Number=SeqID_22091
MCAAPNIMRINPINPYGKAKKNDSGHHSRFYKIKGATRHGCHDLRRSSKATLSRVSAMHLLVHDLLEVVRMNVPHIGMGVGVEAGDMIVIPIMCTLPPRCHLSSLS

SEQ ID NO: 63871 - protein, 477 aa, Zea mays
  Coding DNA Sequence Number=SeqID_22092
  Homolog annotation: Hit_ID=Q2QN73; Match level="QueryCoverage=8%, HitCoverage=6%, E-value=5e-15, Identity=92%"; Hit description =Diphosphonucleotide phosphatase 1, putative, expressed
DRLPFCRSTVIPSQPSVLRFCDLSHAIPPISPTSPADITLPPHETPFPQSTPLCAPDIHAASARRPAPSLRLPPHTASARRSPRSPRCLPPSPLPPARNSAMLPTSPPPIAHQPSPTSPHYLTPWMVATVPAPVPHTHQAGAGRSRRRKRRAQPRCQRARPPTHFRPPPAPPFARPPATSAPSATSARFSRHRPDLRAIRNRRASYPFSTAHSVWNNLRVGSLLPSPSPFPTTRFGDGELRAGATAGRFCCWCGGGGAARVVRRRLHGGGARAEFDWLALYCNLTRGDGPDGNNGKLVLEELLSVNHERDWPGTGSFYGNLDFGGECGVPVQTVFYTPTENRAKFCGDGSMVKDNAYVRSNFHFSFSFLESWKSRYSQGFHGGVVNLGHSNCPFAYLYHSVILSAIQLCTELSKASKDALEYLRKATLCSIRIARKVPDLAENFMGLDASLLKEKHHGSLYLQFSYAQNYAKQAKML

SEQ ID NO: 63872 - protein, 124 aa, Zea mays
  Coding DNA Sequence Number=SeqID_22093
  Homolog annotation: Hit_ID=Q94HJ7; Match level="QueryCoverage=24%, HitCoverage=7%, E-value=8e-07, Identity=76%"; Hit description =Putative RING-H2 finger protein
MVQQIIEEVLKEEKTEMGRWTLETKPIPAHAATDTARANSTEYRWNRGGLPGPGELTDQIGRQVKVARVGRIPRLFLPGGAFGNADAGGSPQGSIGGHLMAADGAGVAERELEQYEGGVVDVGA

SEQ ID NO: 63873 - protein, 180 aa, Zea mays
  Coding DNA Sequence Number=SeqID_22094
  Gene Ontology: Mol. function=transferase activity; Cellular component= membrane; Biological process=phospholipid biosynthetic process
  Homolog annotation: Hit_ID=Q6QP44; Match level="QueryCoverage=98%, HitCoverage=22%, E-value=7e-88, Identity=90%"; Hit description =Putative aminoalcoholphosphotransferase
MALALAMFGFATLLLETILPFIVLLAGVAIWCYLSPSSIMRNQPHLLVIGTGFNFGYLVGRMILAHLCDEPKGLKSGMFMSLVFLCFPIANALIAKINDGSPLVDELVLLLLYCAYTVGLYLHLAVSVVHEIKDALGIYCFRCGNWKPPCALTAQKPPSHVFNLSSAAAGIAYRITRKEA

SEQ ID NO: 63874 - protein, 102 aa, Zea mays
  Coding DNA Sequence Number=SeqID_22095
MGGGHEFGRDTRRSEVKKKHWPREFVANGVAVTPVSHGEFREGHGDTVKEWSHAAHGREAAVDGEPFTAGGEPRGGVSWPIGVASSPAVTTIFLPHGAIHKS

SEQ ID NO: 63875 - protein, 538 aa, Zea mays
  Coding DNA Sequence Number=SeqID_22096
  Gene Ontology: Mol. function=protein serine/threonine kinase activity; Cellular component=integral to membrane; Biological process=protein amino acid phosphorylation
  Homolog annotation: Hit_ID=Q69SP5; Match level="QueryCoverage=93%, HitCoverage=96%, E-value=1e-112, Identity=47%"; Hit description =Putative receptor protein kinase
  Pfam annotation: Domain name=LRRNT_2; Domain location=24-62; Score =41.3; E_value=3.3e-09; Accession=PF08263.3; Description=Leucine rich repeat N-terminal domain
  Pfam annotation: Domain name=LRR_1; Domain location=115-136; Score =14.9; E_value=0.3; Accession=PF00560.23; Description=Leucine Rich Repeat
  Pfam annotation: Domain name=LRR_1; Domain location=139-161; Score =17.0; E_value=0.071; Accession=PF00560.23; Description=Leucine Rich Repeat
  Pfam annotation: Domain name=LRR_1; Domain location=163-185; Score =14.9; E_value=0.29; Accession=PF00560.23; Description=Leucine Rich Repeat
  Pfam annotation: Domain name=LRR_1; Domain location=187-209; Score =8.0; E_value=8.9; Accession=PF00560.23; Description=Leucine Rich Repeat
  Pfam annotation: Domain name=LRR_1; Domain location=211-233; Score =10.9; E_value=2.6; Accession=PF00560.23; Description=Leucine Rich Repeat
  Pfam annotation: Domain name=LRR_1; Domain location=67-89; Score=6.9; E_value=14; Accession=PF00560.23; Description=Leucine Rich Repeat
  Pfam annotation: Domain name=LRR_1; Domain location=91-113; Score =12.8; E_value=1.1; Accession=PF00560.23; Description=Leucine Rich Repeat
  Pfam annotation: Domain name=Pkinase; Domain location=199-465; Score =21.8; E_value=7.4e-10; Accession=PF00069.15; Description=Protein kinase domain
  Pfam annotation: Domain name=Pkinase_Tyr; Domain location=181-465; Score=-22.2; E_value=4.2e-11; Accession=PF07714.7; Description =Protein tyrosine kinase
  Pfam module annotation: Pfam domain module=LRRNT_2::LRR_1::LRR_1::LRR_ 1::LRR_1::LRR_1::LRR_1::LRR_1::Pkinase::Pkinase_Tyr; Domain location
MTTTAARALAALVLVTAAAAAAAVADDGAALVEIKKSFRNVGNVLYDWAGDDYCSWRGVLCDNVTFAVAALDLKSNGLSGQIPDEIGDCSSLRTLILKNNQLIGAIPSTLSQLPNLKILSLQGNKFTGPIPSVIGLMQALAVLDLSYNQLSGPIPSILGNLTYTEKLELNDNQLTGSIPPELGRLTGLFDLNAYGNKLNGTIPRSLRKLESMTYFNLSKNDLVGFIPAEFGNLRSVMEMPHHPPAFKDATVSKPVSNGPPKLVILHMNMALHVFDDIMRMTENLKGSSKKNKLDWVTRLRIALGAAQGLAYLHHDCSPRIIHRDVKSKNILLDKDYEAHLTDFGIAKSLCVSKTHTSTYVMGTIGYIDPEYARTSRLNEKSDVYSYGIVLLELLTGKKPVDNECNLHHLILSKTASNEVMETVDPDVGDTCKDLGEVKKLFQLALLCTKRQPSDRPTMHEVVRVLDCLVNPEPPPQPQQQQQKAHAHHQLPPQPSPPAYVDEYVSLRGTGALSCANSSSTSDAELFLKFGEAISQNMV

SEQ ID NO: 63876 - protein, 541 aa, Zea mays
  Coding DNA Sequence Number=SeqID_22097
  Gene Ontology: Mol. function=oxidoreductase activity; Cellular component=membrane; Biological process=electron transport
  Homolog annotation: Hit_ID=Q84PV7; Match level="QueryCoverage=94%, HitCoverage=95%, E-value=1e-106, Identity=45%"; Hit description =Putative Reticuline oxidase
  Pfam annotation: Domain name=BBE; Domain location=474-539; Score =90.7; E_value=4.4e-24; Accession=PF08031.2; Description=Berberine and berberine like
  Pfam annotation: Domain name=FAD_binding_4; Domain location=82-232; Score=103.1; E_value=8e-28; Accession=PF01565.13; Description=FAD binding domain
  Pfam module annotation: Pfam domain module=BBE::FAD_binding_4; Domain location=474-539::82-232
  Subcellular localization annotation: CTP_CleavageSite=37; ConfidenceScore=5.34e-01
MYTNSSPTSLLLGILSILLSTHPHVIASQSPRDNGVRARSLSTCLLASGVRNFSMAGSPGYATIFDFSIQNLRFAAPGIRKPEAVVLPTSRRGLQRAVLCARSASLAIRVRSGGHSYEGQSYTVSGGVLDGKAPFVVIDLMNLNKVRVHAASATAWAESGATLGEVYHAVAHSSPSNRSSLALTAASCSTIGLGGHISGGGFGPVSRKFMLAADNVLDALLVDAVGRVLDRRAMGEDVFWAIRGGGGRQLGSRLRLEAPARPCSRHRDGVHAEKGKFVGPALPDEFYLSASLTIGSSSSSSQEDRDLRNVAFTGLVLGPKEMAMSVLNERFPELGLAEAEVSEMSWVESAARLAGLSSVDELTSRVSKTKYYGKNKSDYVQRPISRDSLAAILRYLSDGPPAGYVTMDPYGGAMARLSATATPFPHRAGNLYALQYGVTWDSDAGEASVSARIQWLRSLYAYMTPHVSSNPRAAYVNYIDIDLMGFDESLGPVRLASSVSHARATWGAAYFTVENFDRLVRAKTRIDPANVFYNAQSIPLH

SEQ ID NO: 63877 - protein, 61 aa, Zea mays
  Coding DNA Sequence Number=SeqID_22098
MGDTAAFQQVRELREGDSGRMVGWGPGSFSSHLHTRSETKLSGITTRSVNKEFVQRKCNSY

SEQ ID NO: 63878 - protein, 183 aa, Zea mays
  Coding DNA Sequence Number=SeqID_22099
  Subcellular localization annotation: CTP_CleavageSite=53; ConfidenceScore=5.59e-01
MARPPPAGAISSRWRPIILSGLWRSRQVLPPLPPGSGSSSSPILLSFSPLVPLAFMLVALLAAVFFLGARGIFGEGLWASCSCLANCGWRRPAVLVLALLARGIKEKEGGIGANELLSVRIVLAVVFLTKLLLALASGVVVLAILFGPGLVLLLVLGVVLAPARVKKKGRKKMMMMMMMMNSW

SEQ ID NO: 63879 - protein, 175 aa, Zea mays
  Coding DNA Sequence Number=SeqID_22100
MPHRHHDAAAGDEAPSPRPSAAGCYAFLTRSHRSAGAYRRLDSARALEAEADAAVAAVRVEVGTAAKGRARSVFHVDPAVLEAGPVRRLLAAAGRRAPGGGVAVDVDALLFEHLMWLATKARDGGGVGGDGDGDEDEGSAPAADDDLSEIVEFYSQDDEDDEEEGRDHGLSSLSF

SEQ ID NO: 63880 - protein, 126 aa, Zea mays
  Coding DNA Sequence Number=SeqID_22101
MASAGNSGGGDDDDAGENSEKLLADRYHEAPKPCRQRTCAAASVPRWWSFPVARAVRLAGSSTSSSIASTMASYFGVYESNVCSRFRLQPPPSNLYSPMLYGKLDVGSMLRRRRSSREKRLKMCEQ

SEQ ID NO: 63881 - protein, 521 aa, Zea mays
  Coding DNA Sequence Number=SeqID_22102
  Gene Ontology: Mol. function=nucleic acid binding
MARPPPAGAISSRWRPIILSGLWRSRQKKGRAFSYMRNLIAVLHAMEPQVLEDPHFLERCLILDGVPASVSSLDLFQSIVGVQTAVLVRDIQTGFRVALLVFDALDSTIQTPREGLFATCTPATWHGKEVSVRTSILDGVAEGSARRCTALVLRSLVPPQYILADQDRDFHLRCILIGARSGSTISQGAHGLCDMAWKVLFVRAYVVAAIVRSDREAGVLVYDDTESTELVARRAPPLMYKLGLKLYDSSLFPMRADPTDRDACMLRRLLPPCVADGEESYRHRVLLLVGMDTQKLDAAELAHFLQFEADLVHAAEAVIIHRSEGLVVVVLGSSEDTTRLRQTPEETWIRFFGQKPSCANVYGFGGPDISSEQKKKEQQHQPVMTMGDTAAFQQVRELREGDSDTIALVHCLIRFCALATPECVLRSGFPERCLLLSGVVHGTTLFDLSARLSAFGDHHVSLHDLERKALVVFVCWDGAARLLREPQDTWKGLGFLECTRVPGAAEHAGVIVQEVMDQLLQ

SEQ ID NO: 63882 - protein, 527 aa, Zea mays
  Coding DNA Sequence Number=SeqID_22103
  Gene Ontology: Mol. function=oxidoreductase activity; Cellular component=membrane; Biological process=electron transport
  Homolog annotation: Hit_ID=Q84PV7; Match level="QueryCoverage=93%, HitCoverage=95%, E-value=1e-100, Identity=44%"; Hit description =Putative Reticuline oxidase
  Pfam annotation: Domain name=BBE; Domain location=460-516; Score =16.5; E_value=0.00065; Accession=PF08031.2; Description=Berberine and berberine like
  Pfam annotation: Domain name=FAD_binding_4; Domain location=82-232; Score=103.1; E_value=8e-28; Accession=PF01565.13; Description=FAD binding domain
  Pfam module annotation: Pfam domain module=BBE::FAD_binding_4; Domain location=460-516::82-232
  Subcellular localization annotation: CTP_CleavageSite=37; ConfidenceScore=5.34e-01
MYTNSSPTSLLLGILSILLSTHPHVIASQSPRDNGVRARSLSTCLLASGVRNFSMAGSPGYATIFDFSIQNLRFAAPGIRKPEAVVLPTSRRGLQRAVLCARSASLAIRVRSGGHSYEGQSYTVSGGVLDGKAPFVVIDLMNLNKVRVHAASATAWAESGATLGEVYHAVAHSSPSNRSSLALTAASCSTIGLGGHISGGGFGPVSRKFMLAADNVLDALLVDAVGRVLDRRAMGEDVFWAIRGGGGGSWGVVYAWKLRLVPVPDTVTVFTPRREGSVDAMAGLVYRWQFVGPALPDEFYLSASLTIGSSSSSSQEDRDLRNVAFTGLVLGPKEMAMSVLNERFPELGLAEAEVSEMSWVESAARLAGLSSVDELTSRVSKTKYYGKNKSDYVQRPISRDSLAAILRYLSDGPPAGYVTMDPYGGAMARLSATATPFPHRAGNLYALQYGVTWDSDAGEASVNYIDIDLMGFDESLGPVRLASSVSHARATWGAAYFTVENFDRLVRAKTLPMSFTMPKAYHCISGR

SEQ ID NO: 63883 - protein, 495 aa, Zea mays
  Coding DNA Sequence Number=SeqID_22104
  Pfam annotation: Domain name=Extensin_2; Domain location=83-401; Score=-123.5; E_value=0.017; Accession=PF04554.4; Description =Extensin-like region
MGMSLPPSFAPFPQSQTPRSLEIRQDRWRLPHALTHPRVDPVELLRKLDELRDQIIPCKIVGQPRSTDTTASTLGDSGRMVGWGLGAFIPLAYKVGDKTKWNYHKSVFCLPRPQLCPVPTARPRLRRRKPRPQSPSSEQRPSILASLPAPASPARGNPLYPASQTSPPQLLPTPRHHRREIRICPPTPHHIWEPPAPRRRRLRPATPLPTPRRHLAMPSSRPRLRPHSRPTHPRTLAYARTRAHTRGFRLPQLPCSRLPPGPRDAAAHRACDCARCAHRPPPIPAQSPLVLKYGEEGKVVERVNLATRQLRLLPKPVVQIYGLLALDVSRDQLKVRYSIPRRQHRQDPRTTVPVASAPSPTRKTPPKGEEAEGSPRNKAPCMDDAAQTTVPVASAPSPTQKTTLKGGRRQREACGRNLHGPRRLCLWLRDPERGYCFKCNAEVLMLGKCGEDSNEGSLELICDIVSQLLDQPSVGKLSSDIALCGPMALLLESPV

SEQ ID NO: 63884 - protein, 58 aa, Zea mays
  Coding DNA Sequence Number=SeqID_22105
MGDTAAFQQVRELREGDSGRMVGWGLGAFIPLAYKVGDKTKWNYHKCTNIITFGDLIY

SEQ ID NO: 63885 - protein, 221 aa, Zea mays
  Coding DNA Sequence Number=SeqID_22106
  Gene Ontology: Mol. function=oxidoreductase activity; Cellular component=membrane; Biological process=electron transport
  Homolog annotation: Hit_ID=Q84PV7; Match level="QueryCoverage=98%, HitCoverage=41%, E-value=1e-60, Identity=55%"; Hit description =Putative Reticuline oxidase
  Pfam annotation: Domain name=BBE; Domain location=154-219; Score =90.7; E_value=4.4e-24; Accession=PF08031.2; Description=Berberine and berberine like
EMAMSVLNERFPELGLAEAEVSEMSWVESAARLAGLSSVDELTSRVSKTKYYGKNKSDYVQRPISRDSLAAILRYLSDGPPAGYVTMDPYGGAMARLSATATPFPHRAGNLYALQYGVTWDSDAGEASVSARIQWLRSLYAYMTPHVSSNPRAAYVNYIDIDLMGFDESLGPVRLASSVSHARATWGAAYFTVENFDRLVRAKTRIDPANVFYNAQSIPLH

SEQ ID NO: 63886 - protein, 552 aa, Zea mays
  Coding DNA Sequence Number=SeqID_22107
  Gene Ontology: Mol. function=binding; Cellular component =intracellular; Biological process=metabolic process
  Homolog annotation: Hit_ID=Q10K51; Match level="QueryCoverage=80%, HitCoverage=73%, E-value=3e-69, Identity=31%"; Hit description =Pentatricopeptide, putative
  Pfam annotation: Domain name=PPR; Domain location=175-209; Score =34.8; E_value=3.1e-07; Accession=PF01535.11; Description=PPR repeat
  Pfam annotation: Domain name=PPR; Domain location=270-304; Score =38.1; E_value=3.1e-08; Accession=PF01535.11; Description=PPR repeat
  Pfam annotation: Domain name=PPR; Domain location=371-405; Score =34.4; E_value=3.9e-07; Accession=PF01535.11; Description=PPR repeat
  Pfam annotation: Domain name=PPR; Domain location=406-440; Score =12.0; E_value=0.28; Accession=PF01535.11; Description=PPR repeat
  Pfam annotation: Domain name=PPR; Domain location=442-475; Score =13.1; E_value=0.21; Accession=PF01535.11; Description=PPR repeat
  Pfam module annotation: Pfam domain module=PPR::PPR::PPR::PPR::PPR; Domain location=175-209::270-304::371-405::406-440::442-475
MLPRKPLTALLKSATRPGHLLQLHALMLKCSHFPHHAFPTARLIASPLAPLPYALSLFAAVPRPTLFHHTAILRALSSCPSATSLAASLSVLASARARLPELNEFAFQPLLALCAKIPNDAEAASIGKQVHALVLQYGFLDIVSLRNVLCHFYCSSGSMADARRMFAEMPEKDAVSWNTMIGGYVNVGDVGTAVQMFTAMRWSGVDVNVTVVITLIGCGWQGESVHGFCAKAGLCDDVKVAAAMVRMYVREGSIECASKVFHETARRDLVLCNCMADGYAKAGQIQEAMDLIGGMRQLGMRPSSGTLVGVLSACGASGALAAGRSVHELAEEARLELDSTLGTAIMDMYFKCGCPSEAAAVFDAIRDRDVKAWTAMVMGFGVNGQPGSAVSLFYRMMEDGVAPNGVTFLALLTACSHGGLVQEGKEFLETMVQRYGISPSPEHYSCVIDLLGRAGRLHEAYELIQRVSSHGDATAWRALLAACRVYGNAKLGRMVQAQLDAIGHYHPSDAILLSNTYASEGRWDEIAQVRDSETQKISVKKEAGCSSVIVAC

SEQ ID NO: 63887 - protein, 263 aa, Zea mays
  Coding DNA Sequence Number=SeqID_22108
  Gene Ontology: Mol. function=transcription regulator activity; Cellular component=nucleus; Biological process=regulation of transcription
  Homolog annotation: Hit_ID=Q69V10; Match level="QueryCoverage=93%, HitCoverage=93%, E-value=5e-76, Identity=58%"; Hit description =Amelogenin-like protein
  Pfam annotation: Domain name=HLH; Domain location=34-84; Score=13.9; E_value=0.0048; Accession=PF00010.16; Description=Helix-loop-helix DNA-binding domain
MVPRDRGAQRRCCHRAPDGEARSRNNKCEKKAPKKVHKSEREKRKRDKQNDLFGELGNMLEPDRQNNGKACILSDTTRILKDLLSQVESLRKENNTLKNESHYVALERNELLDETNMIRGEISDLQNEMRMRLEDNSIWSHDTSRPNLTAPHPATTVFTLQHSPHPQVIATMTLPLQQPAVVEQSYAAPRRELQLFPEAAPTEDTEPPQNEGTSNHVMRPQARYPPAMTTLPGHVYPVLPRVEDEQRSSGTTGSREEGGVGNR

SEQ ID NO: 63888 - protein, 756 aa, Zea mays
  Coding DNA Sequence Number=SeqID_22109
  Gene Ontology: Mol. function=protein serine/threonine kinase activity; Cellular component=integral to membrane; Biological process=protein amino acid phosphorylation
  Homolog annotation: Hit_ID=Q10LZ2; Match level="QueryCoverage=98%, HitCoverage=88%, E-value=0.0, Identity=45%"; Hit description=Protein kinase domain containing protein, expressed
  Pfam annotation: Domain name=LRR_1; Domain location=116-138; Score =11.5; E_value=2; Accession=PF00560.23; Description=Leucine Rich Repeat
  Pfam annotation: Domain name=LRR_1; Domain location=140-161; Score =10.8; E_value=2.8; Accession=PF00560.23; Description=Leucine Rich Repeat
  Pfam annotation: Domain name=LRR_1; Domain location=170-192; Score =1.5; E_value=1.5e+02; Accession=PF00560.23; Description=Leucine Rich Repeat
  Pfam annotation: Domain name=LRR_1; Domain location=194-215; Score =13.2; E_value=0.98; Accession=PF00560.23; Description=Leucine Rich Repeat
  Pfam annotation: Domain name=LRR_1; Domain location=217-240; Score =16.7; E_value=0.085; Accession=PF00560.23; Description=Leucine Rich Repeat
  Pfam annotation: Domain name=LRR_1; Domain location=242-263; Score =3.1; E_value=74; Accession=PF00560.23; Description=Leucine Rich Repeat
  Pfam annotation: Domain name=LRR_1; Domain location=266-289; Score =8.1; E_value=8.7; Accession=PF00560.23; Description=Leucine Rich Repeat
  Pfam annotation: Domain name=LRR_1; Domain location=43-65; Score=1.0; E_value=1.8e+02; Accession=PF00560.23; Description=Leucine Rich Repeat
  Pfam annotation: Domain name=LRR_1; Domain location=475-497; Score =2.1; E_value=1.2e+02; Accession=PF00560.23; Description=Leucine Rich Repeat
  Pfam annotation: Domain name=LRR_1; Domain location=67-90; Score =10.3; E_value=3.4; Accession=PF00560.23; Description=Leucine Rich Repeat
  Pfam annotation: Domain name=LRR_1; Domain location=92-114; Score =9.6; E_value=4.6; Accession=PF00560.23; Description=Leucine Rich Repeat
  Pfam annotation: Domain name=Pkinase; Domain location=486-742; Score =132.1; E_value=1.6e-36; Accession=PF00069.15; Description=Protein kinase domain
  Pfam annotation: Domain name=Pkinase_Tyr; Domain location=486-755; Score=99.7; E_value=8.5e-27; Accession=PF07714.7; Description =Protein tyrosine kinase
  Pfam module annotation: Pfam domain module=LRR_1::LRR_1::LRR_1::LRR _1::LRR_1::LRR_1::LRR_1::LRR_1::LRR_1::LRR_1::LRR_1::Pkinase::Pki ase_ Tyr; Domain
  Pfam module annotation: Domain location=:43-65::475-497::67-90::92 -114::486-742::486-755
MEQLHEAALRSLMKRWKNVPASWGKSSPCDMPWDGILCDENGRVTSLNLFGMGMGGTLSDDIGSLTELTILDLSSNRDLGGPLPAAIGKLFKLESLALIGCSFSGPVPSELGNLSQLTFFALNSNKLTGSIPPSLGKLSNVTWLDLADNQLTGPLPTSRDNRTGLDQLLNAQHFLFDLNRFTGQIPASIGAIPSLTVLRLNNNGFMGPVPALNNLTNLQVLDISNNSFDPSNVPSWFSDLKSIMTLVLSDNELNGTLDMGNNMSKHLDLVDIQNNKITSVTVYNSFKNLKLEGNPLCNDSLLSDTSPCMGLQTEAPPQPYQFDVQCAYPFIETIVFRAPSFANVFEYLPELQKNLSKQLNSCTPNWLGLVPYFDEDAYLNVNIKACPVKQKRFNYSQVLNCFNLTRQTYKPPEMYGPYYVNAHPYAFHDKTSRAVLIGIVTGSVLLVVGLTLRLGDHWEKDIGAAPQLKSAKFFSLEELKLCTNDFREINAIGAGGYGTVYRGKLPDGQLVAIKRSKEGSMQGGLEFKTEIELLSRVHHNNLVGLVGFCFEKGEKMLVYEFIPNGTLSEALYGMKGIQLDWSRRLKIALDSAKGLAYLHDHANPPIIHRDVKSTNILLNEKMTAKVSDFGLSLLVTDSEEGQLCTNVKGTLGYLDPEYYMTQQLTAKSDVYSFGVVLLELIVGKPPIHNNKYIVREVKMALDEDDGTHYGLKDVMDPVLQKIGGLFGFPRFLKLALQCVEEVATRPALDEQHCEGD

SEQ ID NO: 63889 - protein, 45 aa, Zea mays
  Coding DNA Sequence Number=SeqID_22110
MGPRGGGTFKAGEQAAPLNVRVVTATHEARGSSGVTEGARFLRLS

SEQ ID NO: 63890 - protein, 309 aa, Zea mays
  Coding DNA Sequence Number=SeqID_22111
  Gene Ontology: Mol. function=hydrolase activity, acting on ester bonds; Cellular component=cellulose and pectin-containing cell wall; Biological process=lipid metabolic process
  Homolog annotation: Hit_ID=Q5Z787; Match level="QueryCoverage=97%, HitCoverage=76%, E-value=2e-55, Identity=40%"; Hit description =Putative lipase
  Pfam annotation: Domain name=Lipase_GDSL; Domain location=1-294; Score=53.0; E_value=1e-12; Accession=PF00657.12; Description=GDSL -like LipaseAcylhydrolase
  Subcellular localization annotation: CTP_CleavageSite=89; ConfidenceScore=5.49e-01
MQAAEALGVPLLPPFLSSRQPPQDMSRGANFAIVGGTALDVGFFLRRNAASVPPFRSSLRVQIGWFRRLKKRLLCNANATAPTRSLFVVGELGSNDYAYILAGGKSLREAKSFVPEVVKAICTGIEHLHMQRLVEEGARYVVVSGTLPAGCLPMALTKYGAEEKQLQAGTRGKNATEYYDRRTGCLRRLNGLAEYHNWMLREAVGRLRRKYPTTKLVFADFYRPVARLLRRPAKFGFTEEPIRACCGGGGPYNYNPGAACGSPGATVCRDPSAHVHWDGIHLTEAAYKYIADGWLSGLYAYPPVLDLLQ

SEQ ID NO: 63891 - protein, 522 aa, Zea mays
  Coding DNA Sequence Number=SeqID_22112
  Gene Ontology: Mol. function=transporter activity; Cellular component= membrane; Biological process=transport
  Homolog annotation: Hit_ID=Q6Z257; Match level="QueryCoverage=99%, HitCoverage=100%, E-value=0.0, Identity=85%"; Hit description =Putative permease 1
  Pfam annotation: Domain name=Xan_ur_permease; Domain location=33-440; Score=193.6; E_value=4.9e-55; Accession=PF00860.11; Description =Permease family
MEMTDMKPEEMSHPPMDQLLGMEYCIDSNPSWGGAVLLGFQHFILCLGTAVMIPTLLVPLMGGNAHDKAKVVQTVLFVTGINTMLQTLFGTRLPTVIGGSYAFLVPVMSVISDHSLIQIADNHTRFKMTMRAIQGALIISSCIQIILGFSQLWGVCSRFFSPLGMVPVIALVGLGLFERGFPVIGTCVEIGVPMLVLFVALSQYLKHVQVHPFPILERFSVLITIAVVWLYAHILTVSGAYKHSSQVTQLNCRTDRASLITTMPWFDIPYPLQWGPPSFSADHSFGMMAAVLVSLVESTGAFKAAARLASATPPPPFVLSRGIGWQGIGLLLDGLFGTASGSTVSVENVGLLGSTRIGSRRVIQISAGFMIFFSILGKFGGLFASIPFTVFAAIYCVLFGYVGAVGLSFMQFTNMNSMRNLFIIGTSLFLGISIPEYFFHYDHGPSHTRAGWFNDLINTIFSSPPTVGFIISVVLDNTLDVRNRAKDRGMPWWARFRTFRGDSRNEEFYNLPFNLNRFFPPS

SEQ ID NO: 63892 - protein, 219 aa, Zea mays
  Coding DNA Sequence Number=SeqID_22113
  Subcellular localization annotation: CTP_CleavageSite=51; ConfidenceScore=5.26e-01
MASNGSDVVMMYGTRRCWSRPSSPSQRVSPSRYHNSWIPNLRRMLMLTIIACTQSRAFYRIHAIRDSYLRFARSHTRIFTKMYVLRFLWLSYLHTFAWSKEMLMASMSDIKTTKWGSMWELDQNLDQPKDKDVSQLKDMNSFQILTTSSILGTSPLSMHRVTVYLRKRRCCFQCEAYKEKLEKHFQYLGVRRNYGKNEYSEDMGTRTRTICFKVLIHPF

SEQ ID NO: 63893 - protein, 54 aa, Zea mays
  Coding DNA Sequence Number=SeqID_22114
MSRTFDDYYIKDCGVILATEVTQRRTDNNDHLPSPRFKKGSLDIQSNDDDVQEN

SEQ ID NO: 63894 - protein, 130 aa, Zea mays
  Coding DNA Sequence Number=SeqID_22115
MANTTSQTRQTVADTELDRPPDRKYFILSMDESLLDGKSSLDLDEVEDGGDSQLPFDHPRNLLELMMCKCASEIWYYLLLLCFNMHAQMTDLLQYTWDCVEKSASWEADDDASFSIALPTVSIVIQYERA

SEQ ID NO: 63895 - protein, 348 aa, Zea mays
  Coding DNA Sequence Number=SeqID_22116
MGSVLPRQRSSSDQHAGGGHHQSLAPDDFRDVYGGPPRTVLLRSFAGEAADYHSPTGHRHTGYGGAEAFCRRPHADGRAAAAAAAAVPTEQGFFDDIFGARRHMRSRSRSKSKSSSAVSSDEFPSAAGFCRPVATGGSRADATLSSFTSRLRPVTIPSRRYDSSPQSSTSTRGTEYQSSFTCSTAAYPAAARYYYGGVAKNAGSRSTSNHSRAVGGGSPSPAATRNHRGGSSFCCFKSNPETSSDAPSFRQAAARGAAWSPAAETTVTDGDYGYGYYHSPPSATSSSSLFTNPLARTPRRLEDVVREVRERAPLLLMDDDDGDIDSVGAAAVDEAIAWAKERFWSEAR

SEQ ID NO: 63896 - protein, 185 aa, Zea mays
  Coding DNA Sequence Number=SeqID_22117
MKLLYNNYRFNNYKAAKCWQRYSSSSKEKVREAKVPSLESFAICRHGLVSSVGWWSTCMLAIATQKLAREQKPQQQPCCGAAPPLLAQNVALAAGEGDTGEPCASHPRCLCLACSRRVGHRIIPVLERCLRLLSPCSRSCKKLPAGAGPLAELRIQSGASSVDEELREAHACAWSQSSSTFDWDP

SEQ ID NO: 63897 - protein, 158 aa, Zea mays
  Coding DNA Sequence Number=SeqID_22118
  Homolog annotation: Hit_ID=Q653U4; Match level="QueryCoverage=37%, HitCoverage=8%, E-value=2e-25, Identity=100%"; Hit description=Zinc finger (C3HC4-type RING finger) protein-like
  Pfam annotation: Domain name=zf-CCCH; Domain location=57-82; Score =20.4; E_value=0.0026; Accession=PF00642.15; Description=Zinc finger C-x8-C-x5-C-x3-H type (and similar)
MDDSDGGLSFDFEGGLDSAPASGGGGPVPSSTDPGAGVGGGGDGLGMHGRGRGRGSYRQTVCRHWLRGLCMKGEACGFLHQFDKARMPVCRFFRDFGECREPRLRVQALVRRRQGVQHVRSLMPHESVDVNVWVGKTAFYKLGGGCGRRNLLTCPKNF

SEQ ID NO: 63898 - protein, 72 aa, Zea mays
  Coding DNA Sequence Number=SeqID_22119
MGTGTGTVSRPIGLDLSSGVRAVFRARMASTDQHAAAAMALGRGGLAGEKIATEPVEEDDVCAVHPWLNGGD

SEQ ID NO: 63899 - protein, 419 aa, Zea mays
  Coding DNA Sequence Number=SeqID_22120
  Gene Ontology: Mol. function=pectate lyase activity; Cellular component=anchored to membrane
  Homolog annotation: Hit_ID=Q5VP63; Match level="QueryCoverage=99%, HitCoverage=100%, E-value=1e-128, Identity=54%"; Hit description =Putative pectate lyase homolog
  Pfam annotation: Domain name=Pec_lyase_C; Domain location=152-336; Score=304.3; E_value=2.2e-88; Accession=PF00544.9; Description =Pectate lyase
  Pfam annotation: Domain name=Pec_lyase_N; Domain location=43-92; Score=29.8; E_value=3.3e-06; Accession=PF04431.4; Description =Pectate lyase, N terminus
  Pfam module annotation: Pfam domain module=Pec_lyase_C::Pec_lyase_N; Domain location=152-336::43-92
MAGSAVLRSPLSVLLYILAAVPATAAATPTDAAIDEAYAHLVNLTANQEYWAERAEAAHAYNRAAYQTDPVAVVQRFNDGVHRATATRSRSLAHRARGPCTATNPIDQCWRCRRDWARDRKRLARKGTLRHAVTRARALWITFARDMVIELCQELIVSSDKTIDGRGAQVHIVGAQITLQNVRNVILHNLHVHDAAAHGGGAIRDSQHHWGVRGESDGDGVSVMGSSDIWIDHLSMSSCADGLVDAVDGSTAITVSNGHFTRHDHVMLFGASDAASKDREMQVTVAFNHFGKGLVQRMPRCRHGFFHVVNNDYTHWLMYAIGGSRNPTIISQGNRFRAVDDSRFKEVTKREYTQYSEYKNWVWKSQDDLFLNGAFFNQSGGQNERKYDRLDLIQAKGGQYAESLTRYAGALNCRVGRKC

SEQ ID NO: 63900 - protein, 197 aa, Zea mays
  Coding DNA Sequence Number=SeqID_22121
MARVACTLRGKRLDGGVSVLLVGVNPFWWSPSGRMKTKNDLGKGVLPSCDATLDATRLLFGFYCPAPEDTTPASATFDPLAPELRDEDEAIHQFEDQGAVVDTSLDSDDEDLGILPPPSPPPVPPHSHDDEQQAHLEAKQAHQALIQQQMFKWMLSMVQTIRDRQDTLQQQLLADRAEHRIFMTHILQHIGVPVPLV

SEQ ID NO: 63901 - protein, 110 aa, Zea mays
  Coding DNA Sequence Number=SeqID_22122
MFIAQQVVGNNVHELTKERYSDSVNPGLDRGLLLESVRSLKQNVPSKGYLALTVVRLEAADPDHVYVLPEPALLTESSGDGKALGAAMRTGSGTNLQRTIKAAVDRLLAR

SEQ ID NO: 63902 - protein, 89 aa, Zea mays
  Coding DNA Sequence Number=SeqID_22123
MAKAWHSGIGEAWTGFGHVSGEADAQNRNQQGAWATSGNGTTIRYREDFHLRRNAIKYSKISYKQSKIIPKCYKSTPLKKNLVLEIKKG

SEQ ID NO: 63903 - protein, 108 aa, Zea mays
  Coding DNA Sequence Number=SeqID_22124
MAALGEEGARLELEGNRGERPWRGRAREERGLRVGEWHGGEGEGGGLSFMEAKLQSTAATFLHCSKFVEHVGTRDVDPNDTDFRLRRIRILKSDFYSVLMALFEILRD

SEQ ID NO: 63904 - protein, 50 aa, Zea mays
  Coding DNA Sequence Number=SeqID_22125
MNICELTLAMKPPQVKSGDEFIQLYRYAPEEVAEDEKKQELFLDGLIEAL

SEQ ID NO: 63905 - protein, 133 aa, Zea mays
  Coding DNA Sequence Number=SeqID_22126
MTAEAQGLDRATVVDSGCARKRSGECGPDETERERAHRRVSRVADGKAKLTVALDRARAQQRPRNRRWALAGGGGALGSCGQSEREGEGARQRAQMREGRWASRARGLGRGRRTCGHGRVHGEEIVGERLEMD

SEQ ID NO: 63906 - protein, 74 aa, Zea mays
  Coding DNA Sequence Number=SeqID_22127
MPSWREQLTVYAFVVRFFLSVMYNTVVMKLNLMLVREIINWNYCSGSASWFILSDPIRSPQEGPEGSLDGGLAY

SEQ ID NO: 63907 - protein, 147 aa, Zea mays
  Coding DNA Sequence Number=SeqID_22128
  Subcellular localization annotation: CTP_CleavageSite=82; ConfidenceScore=5.05e-01
MTRSRIVRTELDRVGSVPSGASHAGAKCRARRGAGVARAAGQGPRCRGRGPRAAGAKGRTAGGQGPRRRKGMGRTRTEGRGRATGRAGVTRVNGQGQGPHMPGRQGAGKGLRAPGRGGSAMGEREVVGYGNSPRAQQTAATAHLDHP

SEQ ID NO: 63908 - protein, 433 aa, Zea mays
  Coding DNA Sequence Number=SeqID_22129
MPMVPHEGMSRTAGPSSTPTALAGRDIALPPPVPTDLAMCHEERVRFGKDGEDRGPRGEGGASASQVLIHVASARVIPPVVPVGSPTVAASATLDTGTSLTPATQEAPRALVADVLVLEVHASLLDLEVVPVAIVSATGAPPMVDTAVASMLPPLPLPLLPALLPPGAAVAADAAGVMATAASAEHRDLLSLPLVVSSSHVPLTPLLPDSEGGLQDLPPFILEGSKGEEMEAEESHLIEAASNRADRSLEAVERFLLNFGETILITCSSMTRDIIPEALQATQREVEMLRVEVACIEEKDHELSNLRAKAESFESEATRLRSGHDEACGNTKCLHGERTQLQQDLSEATSRAEEVESTLRVVNARLEEANSELRRELEVVGGVIVEGFAADLSDEYLDTIEEQVCPHAQLLASQVDVKMLLRGPSSSEMPPSA

SEQ ID NO: 63909 - protein, 274 aa, Zea mays
  Coding DNA Sequence Number=SeqID_22130
  Gene Ontology: Mol. function=protein kinase activity; Cellular component=cell surface; Biological process=protein amino acid phosphorylation
  Homolog annotation: Hit_ID=Q6ZFR6; Match level="QueryCoverage=73%, HitCoverage=27%, E-value=1e-74, Identity=67%"; Hit description =Putative receptor-type protein kinase LRK1
  Pfam annotation: Domain name=Pkinase; Domain location=1-197; Score= -41.9; E_value=4.6e-06; Accession=PF00069.15; Description=Protein kinase domain
  Pfam annotation: Domain name=Pkinase_Tyr; Domain location=7-197; Score=-119.9; E_value=4.1e-05; Accession=PF07714.7; Description =Protein tyrosine kinase
  Pfam module annotation: Pfam domain module=Pkinase::Pkinase_Tyr; Domain location=1-197::7-197
MASRHLMEQYILLGAKGSKYQIILGLSSAVLYLHQEWDQCVVHGDIKPSNIMLDESFNAKLGDFGLARLIDHGMSLQTMTAVAGTPGYLDPECVITGKASPESDVYSFGIVLLEVACGRRPMAPPASTGEGKDGQVFRLVEWAWDMRGRGAALDAADERLGGAFDPWEMERVVSVGLWCAHPDPKMRPRIRQAAEALRSRSFRMPLLPPKMPVAVYLQPFGPSTLHFSDTTTSVGSSVTVPYTSTTSRATTATGTGMSNSSSPPAVTQHLSPRA

SEQ ID NO: 63910 - protein, 122 aa, Zea mays
  Coding DNA Sequence Number=SeqID_22131
MASYLPIPLPSSLCGYEGKWFYVRNLEGSALVFTSCIPDDVTVHRRGRLRSPFRCDLDEGGGGGPHPRRHTECDVGIHGREWSPTFNQARLSDLCFIIMRLRMGLGMSWFLCPIFMNTSVSS

SEQ ID NO: 63911 - protein, 195 aa, Zea mays
  Coding DNA Sequence Number=SeqID_22132
  Subcellular localization annotation: CTP_CleavageSite=33; ConfidenceScore=5.13e-01
ILSHGELLALFPVRPSLCPLLRFHRTAPLCSVAASSRAQLYSSLPCHGAPVCALFLLAERLFALRTVLPALSVRLPKSGAQLCSRVSPPRVLLALCLFPWRPVFCARFSAPDFLCSDCGIPARSSLMPSPSPSPWPRAAACALCARRASLPGSVVPARAAAKLPVQFAFVAFVVELLNPSSPARFPPHQLAPDFN

SEQ ID NO: 63912 - protein, 54 aa, Zea mays
  Coding DNA Sequence Number=SeqID_22133
MAILGSTTDTTDDSTDEAKGATIDVAFPNALGYPPMGQLGVGRERTSQGTWGRT

SEQ ID NO: 63913 - protein, 172 aa, Zea mays
  Coding DNA Sequence Number=SeqID_22134
  Homolog annotation: Hit_ID=Q6QP51; Match level="QueryCoverage=25%, HitCoverage=22%, E-value=1e-09, Identity=65%"; Hit description =Putative growth-regulating factor 1
  Subcellular localization annotation: CTP_CleavageSite=69; ConfidenceScore=5.61e-01
MQAACNHAKWARFSDSQHAQHGGPGPRVMQPARRTLRTCNRTATCATTAPPRLRNQYRDSRRPSARPSSASLARRSGPGKGDTPKKNLPREGTRLRATLLIRGSKAGPPEGFDSRLRSRGPYTHYWSEVRRSAPRKGSTAASGYSGSAPITDQGFEGWPPKGSQPPQTPSEG

SEQ ID NO: 63914 - protein, 68 aa, Zea mays
  Coding DNA Sequence Number=SeqID_22135
  Gene Ontology: Mol. function=nucleic acid binding
  Homolog annotation: Hit_ID=Q9SFB4; Match level="QueryCoverage=91%, HitCoverage=44%, E-value=3e-17, Identity=68%"; Hit description =Putative RNA-binding protein
  Pfam annotation: Domain name=RRM_1; Domain location=1-42; Score=2.6; E_value=0.083; Accession=PF00076.12; Description=RNA recognition motif. (a.k.a. RRM, RBD, or
MYDKNSGRSRGFGFVHFSNDNEAKCAKDAMDGKVMLGRPLRISFALGRVRGASVIVPRLSTKQKHACY

SEQ ID NO: 63915 - protein, 702 aa, Zea mays
  Coding DNA Sequence Number=SeqID_22136
  Gene Ontology: Mol. function=dolichyl-diphosphooligosaccharide -protein glycotransferase activity; Cellular component=oligosaccharyl transferase complex; Biological process=protein amino acid N-linked glycosylation via asparagine
  Homolog annotation: Hit_ID=Q5N7W3; Match level="QueryCoverage=99%, HitCoverage=78%, E-value=1e-119, Identity=75%"; Hit description =Putative ribophorin II
  Pfam annotation: Domain name=Ribophorin_II; Domain location=2-696; Score=285.2; E_value=1.3e-82; Accession=PF05817.4; Description =Ribophorin II (RPN2)
EQGHNVVLPDAESTFHAIKALSQSDGRWRYGTNSAESSTFAAGIALEALAGVVSLADAEVDPSMMVVVRNDIVKLFDTIKSYDDGTFYFDEKHVDATEYKGPIMTSASVVRGVTSFAAVASGKLDIPGDKILGLAKFFLGIGLPGSSKDCFNQIDSLSVLEDNRQVYFIVLGSTTAIGGLVFVPLILSLPTKVFSLSLKDQLKVEVTTVFGSAAPLLKELQYDLTKNVHYLDIAPLEIDVGKYSVVFEPGQKQRQSDRRALLWTAAEGPGGLPRASWTMYPSRNQPVGESATDSGRGGGYDGGAGVPSGRGNESGQERQSRTAWRGFLAGGATNPDRSGGAGPPGGQGRPTTAGELDDGVDLGHLAPDPDRAGLRQPSREDNAGRRRPVEEAATTANPDDGDGAKERPDKKMGLDPNLLWYHEQERETVYATGGRNTESVFVTGLIKVDKAEIGISDNDAGTVESVQKLDLLKDTKVSLSANHLQKLRLSFQLTTPLGLTFKPHQVFLKLKHESKVEHLFVDFLGLVEKFYYLSGRYDLELAVGDAAMENSFLRPLGHLELDLPEAPEKAPRPPAQAVDPFSKFGPKAEILHIFRAPEKRPPKELSLAFTGLTLLPFIGFLIGLVRLGVNVKNFPSLPGPAAFASVFHAGIGAVLLLYVLFWLKLDLFTTLKYLGFLGIFLVFVGHRTLSYLSSASAKQKTA

SEQ ID NO: 63916 - protein, 519 aa, Zea mays
  Coding DNA Sequence Number=SeqID_22137
  Homolog annotation: Hit_ID=Q8S0A4; Match level="QueryCoverage=97%, HitCoverage=71%, E-value=1e-130, Identity=50%"; Hit description =Heavy meromyosin-like
MASAQAPSSAAAPSRKDHLEAGKKRLEQFRKKKAAKKATAASAEQAKAPAPDVVENPPPIVNAGSLGDGLVSDVDPNQASTSSVPLSVYENGPASASRGAEFMSNGHQQDAVSDGGRKFYGNLSFSDLVNGHHENWRGDGARKKDEHSPYKDVESKSKLSAFGNGSSLNLPSTENMPSWGRNSLSSQVHDTEQSSSYSSSTLFGKSKNAYAQDYSTNSDIFGRLRATSEDSSKVEQSMYASTRDYGNAFNSSMIAGTVDHDTNVGITRTSADSTPVNSERQDPFLSSGYPTTYTRSRPSFLDMIGVQRAPLTTEASYREPAKANQLSSYSNYQSSFLQQSNQQSTGSNAADIPFASESQEYSHEKGSYGSSTPPDFLLPKEERSKHHGNQTFQNFTTHGKDDDFAALEQLSNIQGVLRINISYMLALESIRTEYANAQLECSAADERAKVLAAEVILLEDKGLRLRSSELKLEKEVEGLHSEISSYRLNLLSLMLQSRKVSSLEKERRHLQSTVKALQE

SEQ ID NO: 63917 - protein, 158 aa, Zea mays
  Coding DNA Sequence Number=SeqID_22138
MECLFSFQTSTYVSYIHTLSFLLPRLASKLSPESRGAQDDCKWRQVPAFGDWNLWDDMPVTQYFQAGTFFFAAPTTEKDDDEDLFKVPQFPATPYSYKKCVVRVKGEKGTAVPPAARKGGRRRRVNEQQKWKPKGAVDEDLYKISPQLLCKVKKARIL

SEQ ID NO: 63918 - protein, 481 aa, Zea mays
  Coding DNA Sequence Number=SeqID_22139
  Gene Ontology: Mol. function=transferase activity, transferring hexosyl groups; Cellular component=mitochondrion; Biological process= embryonic development ending in seed dormancy
  Homolog annotation: Hit_ID=Q6EPV3; Match level="QueryCoverage=61%, HitCoverage=62%, E-value=5e-19, Identity=24%"; Hit description =Putative pentatricopeptide (PPR) repeat-containing protein
  Pfam annotation: Domain name=PPR; Domain location=206-240; Score =16.3; E_value=0.088; Accession=PF01535.11; Description=PPR repeat
  Pfam annotation: Domain name=PPR; Domain location=241-275; Score=3.3; E_value=3.1; Accession=PF01535.11; Description=PPR repeat
  Pfam annotation: Domain name=PPR; Domain location=280-314; Score =17.7; E_value=0.042; Accession=PF01535.11; Description=PPR repeat
  Pfam annotation: Domain name=PPR; Domain location=349-383; Score =24.8; E_value=0.0003; Accession=PF01535.11; Description=PPR repeat
  Pfam annotation: Domain name=PPR; Domain location=420-454; Score =10.1; E_value=0.48; Accession=PF01535.11; Description=PPR repeat
  Pfam module annotation: Pfam domain module=PPR::PPR::PPR::PPR::PPR; Domain location=206-240::241-275::280-314::349-383::420-454
  Subcellular localization annotation: CTP_CleavageSite=33; ConfidenceScore=5.72e-01
MSPSPFRRRPAAARLPPPLCASPTFSSPSRPFRCRRARGRVFARLPEPAARDQKQGQMGATPVRWPRVLTPAQLAGAIRQQKDPLEAAHLYWDAPRRYPHSYRHNDDVRFTLLGTAAGSPVLPSLLRRVLPSSPSADSLLAASIPKLSPPDAVSIFRSSLPSSPSPSWSLSFTALLRHLVSQALLPEAARLFADFARRPEVSIASADLTLLIIGLCRVRRPDLALQVLDEMPNLCLAPERDAYRAIVPALCDAGMLDEATHVVYSMMWRVSQRGCDADVMVYRTLLAALCAAGRGEQAELVLDKVLRKGLRSPSSRRSLRVPMLAVLSVEDAREAIDQALAVRTGRTVCSFESMIFELYEEGRFDQADRLFQDMAKKGFRPTICMYEAKIGALCRERNVDDAVEVLEEELPKNDLVPTVTTYNLLMKGLCDTMQSMRALEYLKKMDKQLGCVAQKDTFSILVHAVCLPQFEALGAGLLETA

SEQ ID NO: 63919 - protein, 506 aa, Zea mays
  Coding DNA Sequence Number=SeqID_22140
  Gene Ontology: Mol. function=nucleic acid binding; Cellular component= intracellular; Biological process=metabolic process
  Homolog annotation: Hit_ID=Q5N7W0; Match level="QueryCoverage=94%, HitCoverage=81%, E-value=1e-166, Identity=47%"; Hit description =Pentatricopeptide (PPR) repeat-containing protein-like
  Pfam annotation: Domain name=PPR; Domain location=112-146; Score =24.2; E_value=0.00045; Accession=PF01535.11; Description=PPR repeat
  Pfam annotation: Domain name=PPR; Domain location=213-247; Score =15.3; E_value=0.11; Accession=PF01535.11; Description=PPR repeat
  Pfam annotation: Domain name=PPR; Domain location=250-284; Score=4.0; E_value=2.5; Accession=PF01535.11; Description=PPR repeat
  Pfam annotation: Domain name=PPR; Domain location=316-350; Score =27.4; E_value=5.1e-05; Accession=PF01535.11; Description=PPR repeat
  Pfam annotation: Domain name=PPR; Domain location=351-385; Score=7.2; E_value=1.1; Accession=PF01535.11; Description=PPR repeat
  Pfam annotation: Domain name=PPR; Domain location=417-451; Score =23.1; E_value=0.00097; Accession=PF01535.11; Description=PPR repeat
  Pfam module annotation: Pfam domain module=PPR::PPR::PPR::PPR::PPR::PP R; Domain location=112-146::213-247::250-284::316-350::351-385::417 -451
MTLRVILSRLRLTPLIHDGHHLRRSLSAAAAKLPDELPPGAPAPTSDSRLFVAGLSWSVDERSLTDAFSSFGTVTEDGAQCRSSAKCRGGREPLHRPQACSLFDEIPVRDVVTCSAAIYRHARSGLFHESAELFVGMMRAGVCPNSFTLVGVLLAAAGLGDVVLAQCIHGWAAKSRLESNHFVSSALVDAYAKCGRPMNALAFFNDLRDPNVVSWNAMISGLVHNVLFVEAVFVFKRLCCCFGSVPNNAVTMINVAQAYAGCGDLGMCKSVHAYAVKAGFDLDVLVTNSILGMYLSFGDIEIGREIFRKNIVRNVVTWTMMMGFLLKQVHAGEVIMLFVQMRSNGIVPDRVAMVSLVQACALLGDARRGKMVHNQMITGGFSSELPAVNSLITMYSKCKDLSSARVLFDGMRKKSLVSWTAMVSGYIGSGRALEGMLLFGKMRHENNFVIDSVALVSLLTGCYETAKFDLCVQLHGYSYKTRLYLYRLVLTTFIVDYVKSVMSFSA

SEQ ID NO: 63920 - protein, 73 aa, Zea mays; identical to SEQ ID NO: 57583
  Coding DNA Sequence Number=SeqID_22141

SEQ ID NO: 63921 - protein, 88 aa, Zea mays
  Coding DNA Sequence Number=SeqID_22142
  Subcellular localization annotation: CTP_CleavageSite=49; ConfidenceScore=5.38e-01
MRPLRPAFALPADAPLLLRACRSTSHAFLCHAPTPTSSIRATAPPPRCRAAALQPHRPRVPPGAAALACAVFARLPEPTARDPFPWNT

SEQ ID NO: 63922 - protein, 569 aa, Zea mays
  Coding DNA Sequence Number=SeqID_22143
  Homolog annotation: Hit_ID=Q9D2C9; Match level="QueryCoverage=41%, HitCoverage=54%, E-value=3e-32, Identity=32%"; Hit description=snRNA- activating protein complex subunit 3
MTGDGEGVESSAAGERQGVPFALGGPLFVPFMVGPITTIPEFMSSALHELQALEDELGDTRDEFSNELCVDELKVLSEEELVERALQEAMEDSDSGTQPQPEDQTLDGGMSANPTPTIQAPTLSPLAERESSGLQDMADVLNEPQSSNGKPRGKEANSRCRKGETGTFTLDSPVVGESHGSAIDMSIVPFEPEGSEGNGTMPSNPSAENGASESPVDGMSIVPHDPEGINGQTTCRKGKKRGRHFDREVRAEILQGSYLTKADKWVQIKAKQDEDKFAARLHSFSGNSVKPKGSKSSCEKIEMARSLNLIGAPWKNKALRSDEHRPVVRPEVILCVEIYQKTYASVKSQELLLLGSQFLTDLRDNIYCLTDKVMKVAGQHDHSGYFLIEDTFYNDTRHRSATDYSKPILDWLENSSDEVTEKWDAITSGVLKKRQKDLLRGLSISNVPEFKSEKMQTTRISDLHFRPGAGYLYCHQGNCKHTIVIRDMRLIHPDDTQNQAEYPLQTFQLQRRLQKCSVCQIYLATKVTVDDKWALNNPCYFCIKCYYLLHYKEDSTLLYPHTVYDFIQE

SEQ ID NO: 63923 - protein, 283 aa, Zea mays
  Coding DNA Sequence Number=SeqID_22144
  Gene Ontology: Mol. function=DNA binding; Biological process =transcription
  Homolog annotation: Hit_ID=Q1RY71; Match level="QueryCoverage=71%, HitCoverage=36%, E-value=5e-54, Identity=54%"; Hit description=Bromo adjacent region; Transcription elongation factor S-II, central region
  Pfam annotation: Domain name=BAH; Domain location=6-125; Score=27.7; E_value=4.1e-05; Accession=PF01426.8; Description=BAH domain
MGAPANGLYAGANPYVKHFNISCGLEHWNGYLDITETDGSLYVTGQWFYRPEEADKKEGGFWVARDTRELFYSFHTDDVPAESVMHKCVVHFIPQQKQIPSRKQHPGFIVQKVYDAVEKKLWNLTDKDYEDNKQQEIDLLVKKTIDRIGQLPDLEPEETPLENNYLSNKRGLRKKPVNPIDVTREPPVGKSEQFAKAETPGSDKIRNYDTLVKYKVLTGHSHRDRWLDKLIESIPLASKENAGTSADANSTAKSSISGSPAKDVGSALSSASAGLILDYWRDD

SEQ ID NO: 63924 - protein, 115 aa, Zea mays
  Coding DNA Sequence Number=SeqID_22145
MQGEKADKTWRLLVKKVRRARAMASLVERQVPEVVAMSWPRGRSTTAAANGRETETKIHYSSGMYGEVFCSFFALMNAIRRCHANKGAGQAVHISGEQFLPRTQVCPGRVGGNDG

SEQ ID NO: 63925 - protein, 227 aa, Zea mays
  Coding DNA Sequence Number=SeqID_22146
MSYFLPNELRLQNKKDREALRRISEKHLLEARYESVSYDHPDWWGPDLMCQRPGVENLATTVEVTALSGRSWRRGSHPRISTILTLKKTSLPIHHMKPSHVNFSKSKRKGGTIELRKSNTKLAIVLASDVASKGEEVPVIESVSLVGAAGASAHIDKGEPEDVLANFGEESDKGSLSLKRITTTFGHACFDKSIIMKDHIEVLEIHIILVTLIWLGLGRRYYLFARE

SEQ ID NO: 63926 - protein, 89 aa, Zea mays
  Coding DNA Sequence Number=SeqID_22147
  Subcellular localization annotation: CTP_CleavageSite=53; ConfidenceScore=5.06e-01
MAHRSWSGPPEAFSPPFPPLCPWIHGPLPAIEFAVAPSSSLPNSGEPGATLARASLNSGDLTAAERSGAARSRLFSPGPCNLADLALDF

SEQ ID NO: 63927 - protein, 144 aa, Zea mays
  Coding DNA Sequence Number=SeqID_22148
  Subcellular localization annotation: CTP_CleavageSite=23; ConfidenceScore=5.35e-01
MAKLGLVSVSPDSHLRRARANRRCARARTVLRRVVITLWRNATVSCPRMVSYVLGLCIPPSLASGASSRDYLGRVLTASGELWFRAGYGLKRAVASSVLLPRARYGLGRIVFGVPCDQRRTTVGLADEGNRLLIDNPMQADREG

SEQ ID NO: 63928 - protein, 388 aa, Zea mays
  Coding DNA Sequence Number=SeqID_22149
  Gene Ontology: Mol. function=transcription regulator activity; Cellular component=nucleus; Biological process=regulation of transcription
  Homolog annotation: Hit_ID=Q10FD6; Match level="QueryCoverage=82%, HitCoverage=88%, E-value=4e-38, Identity=35%"; Hit description=Helix- loop-helix DNA-binding domain containing protein, expressed
  Pfam annotation: Domain name=HLH; Domain location=175-217; Score =19.1; E_value=0.0013; Accession=PF00010.16; Description=Helix-loop -helix DNA-binding domain
MEDSSLFLQWAMSTLRHEQQPAAAVNDDCSSEATFPSLQALREASHAAEMVQELIGEAPANSWSSGDTTDGSIGGNSNSVPGPAAAAMEHDVWPAASSKTSPARRALSRSSSDTNPPVSWNFSAAASAQLAGSADGMLPEFAPKSALPPDQAYGSPRARRAGLKSLAGSMSSAAYAQDHIIAERKRREKINQRFIELSTMDKATILSDATKYVKELHGKLKDLEAGGSNRRKSIETVVLVKRPCLHAAPAPDDDASPLSASSGTPAETKTQLPEIEARFAENSVMVRIHCEDGKGVAVKVLAEVEELHLSIIHANVLPFVEGTLIITITAKAITLGKGYFTLGKGFAECNTRQRTLGKDFIGKGFFAECFFRTLGKDFAECQKAHSAN

SEQ ID NO: 63929 - protein, 48 aa, Zea mays
  Coding DNA Sequence Number=SeqID_22150
MESRLSISRVHIAFLVVASGSSLMIMLVGEPNMWLYSLKGLDSLTKQI

SEQ ID NO: 63930 - protein, 210 aa, Zea mays
  Coding DNA Sequence Number=SeqID_22151
MADFAEFGPQNSVATVRKGTSGDMWRHNERVWEVKVSAIFESPNCETLTVDELFSKLKSIKIDHQTLFKIENRGAPTMALEQVERLRDEELPLVASQFTWFQNNRQNHRNLNHDFDESTSYSSDEELERHIDEKHNRLCFLADTTGGLFTMALGDDVVGGDGKDLDDDSTSEVLPSTDDLVFEVEELTAALASQDKLLRLDAHERKDFNS

SEQ ID NO: 63931 - protein, 170 aa, Zea mays
  Coding DNA Sequence Number=SeqID_22152
MCERRECMHVQGVDEVDGDRQTSSMGRRTSSKPYLHAVHTRMWVRPRHEHDDKRGATTMQFGTGFDDLCRLRDGDKASACVGRGGGTAGWRRATNNNDIHSECAVTTVLAARDSHRKRAQTEVPGHAAQRSRAAQANTNGHPAVGTRVAGCALRHECWGHARPCRAGSEH

SEQ ID NO: 63932 - protein, 55 aa, Zea mays
  Coding DNA Sequence Number=SeqID_22153
  Subcellular localization annotation: CTP_CleavageSite=22; ConfidenceScore=5.06e-01
MSPPVATTPLAVPATPTPPNACAATPREAPVTPTPHCAGYHEAPNRTTLLPRYSV

SEQ ID NO: 63933 - protein, 35 aa, Zea mays
  Coding DNA Sequence Number=SeqID_22154
MTAVTSSTSLTTPLELYCRCYYFSQPWIAENLKNA

SEQ ID NO: 63934 - protein, 109 aa, Zea mays
  Coding DNA Sequence Number=SeqID_22155
MQLGCLMKILEAERWLKGANLHEVALLQQQDEGNAGAPHPGARKAKRASFHLRHDDRVKKGTGKGDILKGILLREGSGPRALLLIRGSKASLSEGFDSCPRALGLQAHY

SEQ ID NO: 63935 - protein, 227 aa, Zea mays
  Coding DNA Sequence Number=SeqID_22156
  Homolog annotation: Hit_ID=Q6ZIQ0; Match level="QueryCoverage=14%, HitCoverage=9%, E-value=2e-07, Identity=87%"; Hit description=Arm repeat-containing protein-like protein
MPLLDCCCHFVKVVATTLPNPGGISAWARGPAWNGAVPPEFLLFFCQWGVVWGQAMLNLGSGPRPPLGFRNQARGRAPSFPLPERIHGRSGGGKGKEKDFVLASATHLGLLVEKQAVELAARELNSVLEEIAEEEEEEDDDEWRRQGIVDEERVRDVTERAEELAAACRTLEETGSVLWRPTPCGPYWTSWPTRSPAWWTKPRTSSTPWIPPTAMQLNALELVYDVY

SEQ ID NO: 63936 - protein, 95 aa, Zea mays
  Coding DNA Sequence Number=SeqID_22157
MAGGGGERDADEETWNQMMQNLFGDQSEEEDDADDDVVDEDDGQQQQLQSPPHHHHEIEDDADEDGDDARSDAPARHGGYHSREVDESMNLFALY

SEQ ID NO: 63937 - protein, 560 aa, Zea mays
  Coding DNA Sequence Number=SeqID_22158
  Gene Ontology: Mol. function=signal transducer activity; Biological process=response to light stimulus
  Homolog annotation: Hit_ID=Q7XIJ3; Match level="QueryCoverage=80%, HitCoverage=96%, E-value=1e-166, Identity=68%"; Hit description =Putative phototropic response protein family
  Pfam annotation: Domain name=NPH3; Domain location=202-429; Score =172.9; E_value=8e-49; Accession=PF03000.5; Description=NPH3 family
MSGVGVVLKVDVNGEELFFVDKVRIRRLVVAGAASARRHPRPRVPLHGFPGGPEAFELVARFCYADGGRGGAVTAANACALRCAAEFLDMAAAADAPAPEAASTAAPSLVRMTEKALEEMPHWPWHAVVDAVKQCQRRLLPLADSTGAFDAAVAALVSQMAVPPPAGDATPTGSSPESTAFRFSCDTKSSGLSLRGGSCVSRTWWFEDLVALAPATVERVASALVARGTDHGVVARFLFYYLKCRIAGASADDKKAMLEASVAVMASLDRSAVSFKGLFGILRVAAPLRLADACQDRLVAMIGRKLDHATLDNLLVPAPPGTASLYDVSLVLRFLAAFLRGGASDEPAKLKKVGGLTDLYLAEVAPDPSLRPAKFLDLATALPAPARDCHDALYRAIDVYFQVHGRLTDEEKMNICRGLSYEKLSPECCKHMLRNGEFPTTAAVQALASQHTVLKSVVLREPGQLKSVSPSPTASTGKRRDGYDDDNGGGENDGQVILYARRLDLSVENQNLRSLLDGMHWRVVELEKVCSRMKTRMSKMKQARRGGGGRTARSLPRMCS

SEQ ID NO: 63938 - protein, 188 aa, Zea mays
  Coding DNA Sequence Number=SeqID_22159
MVETEFHYWKQRNCKSDSTYYMKPKGEFAKVEQKVEAMSINPSVERHESFAAGHRGPRNGDKKDHKWNTDRADAYRLTRREDNRRVARDMEKPQEQPRPEPETWRKPVEPPKLEVATPRFGKAATALELAQAFSTSMSDTAPQSRLTSAPSPRVPPSPGASRDQSGFSRLTDSRTLHSGPSQRKINGY

SEQ ID NO: 63939 - protein, 158 aa, Zea mays
  Coding DNA Sequence Number=SeqID_22160
  Gene Ontology: Mol. function=structural constituent of ribosome; Cellular component=ribonucleoprotein complex; Biological process =translation
  Homolog annotation: Hit_ID=Q75IN7; Match level="QueryCoverage=38%, HitCoverage=89%, E-value=4e-28, Identity=96%"; Hit description =Putative 60S ribosomal protein L38
  Pfam annotation: Domain name=Ribosomal_L38e; Domain location=41-107; Score=147.0; E_value=5e-41; Accession=PF01781.8; Description =Ribosomal L38e protein family
MTIEDEKDMSISYFDPNKASGISVVLPPTINDGIADFFTSPKQIHEIKDFLLTARRKDARSVRIKRAKDAVKFKVRCSRYLYTLCVHDADKANKLKQSLPPGPCSIVPTPYMLHPSTTALFYLIYWTFRIPVPHWAVRNCCVVIGYWLLKVVDRVAVV

SEQ ID NO: 63940 - protein, 62 aa, Zea mays
  Coding DNA Sequence Number=SeqID_22161
MAPSGSKSYQRPTYHSKRYVLLVLTETWEIHSSLQRNPLDKTMVRVAKRGKHDTNQVGMSCA

SEQ ID NO: 63941 - protein, 244 aa, Zea mays
  Coding DNA Sequence Number=SeqID_22162
  Gene Ontology: Mol. function=phosphatidylinositol transporter activity; Cellular component=intracellular; Biological process =transport
  Homolog annotation: Hit_ID=Q10N10; Match level="QueryCoverage=99%, HitCoverage=90%, E-value=1e-102, Identity=74%"; Hit description =Phosphatidylinositol transfer protein, expressed
  Pfam annotation: Domain name=IP_trans; Domain location=1-216; Score =83.5; E_value=6.5e-22; Accession=PF02121.8; Description =Phosphatidylinositol transfer protein
MKMEQQNTNSKEGVEVLQQAPFHEDAKLGKGHFTSKVYHLQRALHLPAPSRCTRTRGVRFQRAEQCPLFSKCSLTIDTVTRPDNGCSENAHGLSGEQLAAREVEIIDIASVSRDYWSKAIGAPSVDLTAFKSQRTERGPLLKGWMDSCHPVMTTYKLVTMDAPIWGLGERLEDCIIAGERALFLACHRLCFAWIDEWYGMTVEQIREMERQTDMLLKKTLKKAGSNKHEGNTKTLKDELVAVGS

SEQ ID NO: 63942 - protein, 295 aa, Zea mays
  Coding DNA Sequence Number=SeqID_22163
  Homolog annotation: Hit_ID=Q10N12; Match level="QueryCoverage=68%, HitCoverage=41%, E-value=4e-87, Identity=75%"; Hit description=WD domain containing protein, putative, expressed
  Pfam annotation: Domain name=WD40; Domain location=141-179; Score =31.4; E_value=3.3e-06; Accession=PF00400.22; Description=WD domain, G-beta repeat
  Pfam annotation: Domain name=WD40; Domain location=96-137; Score=8.7; E_value=3.5; Accession=PF00400.22; Description=WD domain, G-beta repeat
  Pfam module annotation: Pfam domain module=WD40::WD40; Domain location=141-179::96-137
NPYYFSIGGSDEYARLYDMRKFQLDGSRNTNQPVDTFCPKHLIKGASARVHITSIAYSYAREILVSYNDELIYLFQHNIGLGPNPVSAEPEFFNMLDQPQAYRGHRNFRTVKGVSFFGQHDEYVVSGSDCGNVFIWRKKGGELIRMMNGDKSVVNCIEPHPHFPFMATSGIDNTVKLWTPAAKKLIMPLPKNAKQIASEGLKYRVFRSHWLIFRVMKTRHTGDQTACRRCPRVEEQVVVVARHEERAMVIERDIEREAGYGVAAVWAWMEQCKSLEGITRASTYPNTLLTRRLVM

SEQ ID NO: 63943 - protein, 254 aa, Zea mays
  Coding DNA Sequence Number=SeqID_22164
  Pfam annotation: Domain name=DUF569; Domain location=1-131; Score= -0.6; E_value=1.8e-06; Accession=PF04601.4; Description=Protein of unknown function (DUF569)
MDLFPDGAFVRLQNRVQQKYLYADDDGEGVSVRPYGHVFSLNAVWRVHRVLVAGNNIVLLQGVAYGRYLAISPGMAPPGYRGRRAVQRDYAGDNVGALMWNPLRIVDGERYVRLRNEFNRNLLRANGRVLRLCQYLGGRRGLFGRRMPEADERRTIRHVRANNEGDFDQDSNNWPTFNFFGRSVFNLRIQVGMRQPGGEVWAITMAVRPGSQGRLTPLVTDLPNSVDNMDIVVFDTGSQGFHFSGAQNLVYPAI

SEQ ID NO: 63944 - protein, 344 aa, Zea mays
  Coding DNA Sequence Number=SeqID_22165
  Gene Ontology: Mol. function=protein-tyrosine kinase activity; Cellular component=integral to membrane; Biological process=protein amino acid phosphorylation
  Homolog annotation: Hit_ID=Q6ZIG4; Match level="QueryCoverage=86%, HitCoverage=87%, E-value=8e-86, Identity=52%"; Hit description =Receptor protein kinase PERK1-like protein
  Pfam annotation: Domain name=Pkinase; Domain location=50-293; Score =28.9; E_value=2.8e-10; Accession=PF00069.15; Description=Protein kinase domain
  Pfam annotation: Domain name=Pkinase_Tyr; Domain location=50-293; Score=0.1; E_value=1.8e-12; Accession=PF07714.7; Description=Protein tyrosine kinase
  Pfam module annotation: Pfam domain module=Pkinase::Pkinase_Tyr; Domain location=50-293::50-293
MHPKLPRAARRLLCCGGAAASPEEDLSDEGRRSLRWVFSLRELRSATNSFNYDNKIGEGPLGSVYWGQVWDGSQIAVKRLNNAKNGTEAEFASEVEILGRIRHKNLLSFRGYCADGPERVLVYDFMANSSLYLHRHATPKIIHGSVKATNVLLDSDFRAHAGDFGLARLIPDDGTDHEKIASSESQRGYLAPEYAAMSGKPTAGCDVYSFGIILLELASGRRPVEKSGSGKACGIRSWVLPLARQGRYDEIADSKLGDKFSGPELRRMVLVGLACTRSEPEKRPTMLQVVPLLKGESKETLVKLEREELFSPDSTTVSSQGTPTPDGSTDSAPPLKKDKELVGA

SEQ ID NO: 63945 - protein, 1147 aa, Zea mays
  Coding DNA Sequence Number=SeqID_22166
  Gene Ontology: Mol. function=protein binding; Cellular component =nucleus; Biological process=regulation of transcription, DNA -dependent
  Homolog annotation: Hit_ID=Q1EP20; Match level="QueryCoverage=95%, HitCoverage=97%, E-value=1e-170, Identity=50%"; Hit description =Transcriptional repressor protein-related
  Pfam annotation: Domain name=HDAC_interact; Domain location=415-515; Score=241.2; E_value=2.1e-69; Accession=PF08295.2; Description =Histone deacetylase (HDAC) interacting
  Pfam annotation: Domain name=PAH; Domain location=151-197; Score =67.6; E_value=4.1e-17; Accession=PF02671.11; Description=Paired amphipathic helix repeat
  Pfam annotation: Domain name=PAH; Domain location=71-117; Score=71.4; E_value=2.9e-18; Accession=PF02671.11; Description=Paired amphipathic helix repeat
  Pfam module annotation: Pfam domain module=HDAC_interact::PAH::PAH; Domain location=415-515::151-197::71-117
MELPRKRSYLNLLDYFMVVLPSAAAPPPQAGAAPPAQPQQPSGAAFTNQKLTTNDALVYLKAVKDKFQDKREKYEEFLEVMRDFKSERIDTNGVIVRVKTLFNGYPELILGFNAFLPKGYAIKLQEEKKPVDFVEAINFVNKIKNRFQHDEQVYKAFLDILNMYRKDNKSIQDVYHEVAMLFKDHKDLLEEFQHFLPDTSVAPQAVASKGGLVKREDRSSLVPPANKILHNDKRDRVYLSHADRDFSVDRPDVEHDRQRRRLDKDKERKVERDRRDYEREDKDGEHDSRDLELGQRKRKPFSRNIEDNVGAETHQGGPSENHGIHSVSASSYDDKDALKRPSTRAVKTEDKEKDRDRDREDKDRDREKEREKERERLDKGSTFNSKEGSSHKPSMFSGKEKYNLSKPISELDLSNCQRCTPSYRLLPKNYPMPPASNRTDLGASVLNDHWVSVTSGSEDYSFKHMRKNQYEESLFRCEDDRFELDMLLESVNAATKRVEELIEKMQDNSVKPESPIRIDEHLTPLNLRCIERLYGDHGLDVMDVLRKNASVALPVILTRLKQKQEEWSRCRSDFNKVWAEIYAKNYHKSLDHRSFYFKQQDTKNLSTKSLLTEIKEINEKKRKEDDVLLAIAAGNRRPIVPNMSFEYIDSEIHEDLHKIIKYSCAEVCNSSDQLDKVMRVWTTFLEPVLGVQQKHGSEDPDLVKTKSRTTKLGLANVRESNTIAGIVSKQSNGDESEQGPSSRARLANGVAAGTQNGFHDADRIARKGEEPSNAILNGRVHGAVSADETLSLITQNIASTERPAENAAAVRTEQHKANLVLTPGMNASRSSHDAVEVAGEGKTGNETLLSAEGGERLGPSLNGTSEGIKGRLNNDGSVPHTSKVEREEGELSPNGDFEEDHFVPFEDGTSKGKEDSTSRPFHGRPGEVVPSSAEAAGENDADADDEGEESAQRSTEDSENASEAGEDASGSESGDGEECSREDHDEEEEDMDHDDQDAKAESEGEAEGTTETHDVEGGISLPLSERFLYSVKPLAKHLMEYGHEKPEVTAVSIEPNFSSYLFSEYLCSTPDKKLSEGVYLGRNKRKYSNNDEPSDSLKAMDGINVVNGLECKISCKTSKVSYVLDTEDFLFRLRKRRKILRGGNVPD

SEQ ID NO: 63946 - protein, 639 aa, Zea mays
  Coding DNA Sequence Number=SeqID_22167
  Gene Ontology: Mol. function=receptor activity; Cellular component =integral to membrane; Biological process=red or far red light signaling pathway
  Homolog annotation: Hit_ID=Q657S5; Match level="QueryCoverage=99%, HitCoverage=75%, E-value=0.0, Identity=65%"; Hit description =Putative PHO1-like protein
  Pfam annotation: Domain name=EXS; Domain location=436-617; Score =260.5; E_value=3.4e-75; Accession=PF03124.5; Description=EXS family
MTSASDTDALQLSEQEEQATPLPTDGPGVTAQEDHQQQQDLEGSGTFAVRPPLSGCGRKSLKITIPLTTPSRTISALTDILWDELAISHFSSSSKKCIPDGKQSVSKTKLRHAEKMIKRAFVELYKGLGYLATYRSLNMMAFVKILKKFEKITGKEVLSIYLKALKLMDEVEDIFVRHFAGDNRRKAMKYLRPAQRRDSHAATFFTGLMAGCFAALFVGYCVMAHMAGMYYYYSTPAPPSRARGTGGGSVSVSVSVSVYMETAYPVLSMFALLFLHLLLYGCNMVAWRRCRVNYGFIFESSPSPAGGELGPRDVFLVCAASMAAVAGVMFAHLALVLRWGYHASPHVEAIPAFLLLVFLLLLFCPINVVYRSSRFQFLRILRNIVLSPLYKVVMVDFFMADQLCSQVPMLRSLEYLACYYISGSYWTQEYGYCTNTKHIRDLAYAVSFLPYYWRAMQCARRWFDEGDTSHLVNLGKYVSAMLAAGAKVAYEKDRSLASLSLLVAVSSGATVYQLYWDFVKDWGLLQPNSKNPWLRNDLILRRKSIYYLSMGLNLVLRLAWLQTIIHPNFGSLDSRVTSFFLAALEVIRRGHWNFYSKPIEPETEPSTENFRLENEHLNNAGKFRAVKTVPLPFHEVDDD

SEQ ID NO: 63947 - protein, 170 aa, Zea mays
  Coding DNA Sequence Number=SeqID_22168
  Subcellular localization annotation: CTP_CleavageSite=38; ConfidenceScore=5.27e-01
MTLVIKRFKSTLNGRKSYNDNKSKGNSDLRGRGGKMPRANEMFRADSRMMVVFGALTSKPEQLTFEETLRFVKKVKARDYMLYLSLFDILGRMELSQLDAYRELLFGNHPDLCEELEKFRPPVPTKQAANNIWPWVIVCAVPLVAVSLIPALGNPVLWFVQQTVGEKMAA

SEQ ID NO: 63948 - protein, 88 aa, Zea mays
  Coding DNA Sequence Number=SeqID_22169
  Subcellular localization annotation: CTP_CleavageSite=44; ConfidenceScore=5.61e-01
MASRMLCDDGSSQPPYGSKRTSARTQPLRQLSLRQAPSLLRRPRHHTSWVPKPLRLPRRLSGVFLLGGGLLRSDRRKNDSVDYNGNGG

SEQ ID NO: 63949 - protein, 69 aa, Zea mays
  Coding DNA Sequence Number=SeqID_22170
MESKVVEGLSRIIDGMMSLEALACESCDELLQWMWATFGLEVAHTRSFAKLDKEGVMESELETADVETT

SEQ ID NO: 63950 - protein, 543 aa, Zea mays
  Coding DNA Sequence Number=SeqID_22171
  Gene Ontology: Mol. function=catalytic activity; Cellular component =nucleus; Biological process=metabolic process
  Homolog annotation: Hit_ID=Q8H8C9; Match level="QueryCoverage=99%, HitCoverage=99%, E-value=0.0, Identity=66%"; Hit description =Putative AMP-binding protein
  Pfam annotation: Domain name=AMP-binding; Domain location=41-461; Score=205.3; E_value=1.5e-58; Accession=PF00501.18; Description=AMP -binding enzyme
MDGSMWCAANYVPLTPLSFLERAAVVYGDRAAVVCGDRRFSWRETRERCLAGAAALARLGVGRRDVRADDRRRPVHAQHPPRRGHGVRPAETLGSQGLPRGVAVPRRGPATRSGSSPTPKTGFLSSSRSLTPAAAAAPATARGSNDGSVAVAEYEALLRSAPRDFEIRWPADERDPISLNYTSGTTSRPKGVIYSHRGAFLNTLATVLVNEMATMPVYLWTVPMFHCNGWCMVWATAAQGGTSVCIGSVSPGVVFDHIVRHGVTNMGGAPTVLSMLANAPAADRKPLPRRVRISTGGAPPPPQVLAKMDELGFDVAHGYGLTETYGPATTCVWKPEWDALPPAERARMKALQGVAHAMVQEVAIKDPASMETLPSDGRAVGEVMLRGNTVMGGYYKDAGATEEAMRGGWLRTGDLGVRHPNGYIQLKDRSKDIIISGGENISSIEVESVLFGHPAVLDAAVVARPDDHWGEAPCAFVTLRDGARATADDIIRFCRARLPHYMAPRTVVFSDLPKTSTGKTQKYLLREKARAMGGLRKPDRSRL

SEQ ID NO: 63951 - protein, 637 aa, Zea mays
  Coding DNA Sequence Number=SeqID_22172
  Gene Ontology: Mol. function=catalytic activity; Cellular component =nucleus; Biological process=metabolic process
  Homolog annotation: Hit_ID=Q8H8C9; Match level="QueryCoverage=85%, HitCoverage=98%, E-value=0.0, Identity=80%"; Hit description =Putative AMP-binding protein
  Pfam annotation: Domain name=AMP-binding; Domain location=136-561; Score=350.7; E_value=2.4e-102; Accession=PF00501.18; Description=AMP- binding enzyme
MRAAAASAIRRLLPRYSISSGGGLHRHSQSQNQSGYCFNPHWDYTNRLARPRALLDFSPCHPRWSSPSSPRSVASPQFFCSLSGTEEEEAVVLDMDAGTVRCAANHAPLSPISFIERAAAVYGARPAVVYGDRRHTWAETRGRCLRVAAALATRFGIARGDVVAVLSPNVPAMYELHFAVPMAGAVLCTLNTRHDAAMVSVLLKHSGAKVFLVESNLLDVGRAAMKRLAESNSAAALPVLLTISDDTDSDDYEDLVRNGPARFDIRWPADELDPIALNYTSGTTSRPKGVVYSHRGAYLNTIATVLAYDITAMPTYLWTVPMFHCNGWNLPWGVAMQGGTNVCLRHFTGEVIFDSITRHGVTHMGGAPTVLNMMANARTATAERKPLPWPVRVMTGGAPPPPRVLFAVEELGFVVYQIYGLTETYGPATVCTWMPEWDALPAEERARLKARQGFHHVAMQDVDVMNPSTMESVPHDGQTVGEVMFRGNTVMSGYYKDLKATKESMAGGWLHTGDLAVRHPDGYIQIKDRAKDIIISGGENISSIEVESVIFSHPAVLEAAVVARPDHHWGETPCAFVKLKDGASATEAEIINFCREKLPHYMAPKTVVFEDLPKTSTGKTQKFVLRDKARAMGSLTK

SEQ ID NO: 63952 - protein, 94 aa, Zea mays
  Coding DNA Sequence Number=SeqID_22173
  Subcellular localization annotation: CTP_CleavageSite=29; ConfidenceScore=5.28e-01
MATARENDPFLKVGLPTRAPEASRVKSPPGNQRSGRRTAAQEACGRPTIKRPFIFAVSSDVDPRAIDLAMRIAERMFLKMKEDEAKNKIEEEND

SEQ ID NO: 63953 - protein, 84 aa, Zea mays
  Coding DNA Sequence Number=SeqID_22174
MSTHPPCRVTDPAVGVSWDCGKKKGAAAPAAGTVTPGEDSVLGRLGEAEPRGRLVHMFRVAWSHVGGDAAKYSNLQAPFVLACR

SEQ ID NO: 63954 - protein, 48 aa, Zea mays
  Coding DNA Sequence Number=SeqID_22175
MEAVVGVSFSAEGPQDERTICNQNSFFMTFVQDSLSLKEDNALKDEGP

SEQ ID NO: 63955 - protein, 273 aa, Zea mays
  Coding DNA Sequence Number=SeqID_22176
  Gene Ontology: Mol. function=carboxyl- and carbamoyltransferase activity; Cellular component=ornithine carbamoyltransferase complex; Biological process=amino acid metabolic process
  Homolog annotation: Hit_ID=UPI00004C1734; Match level="QueryCoverage =21%, HitCoverage=16%, E-value=2e-18, Identity=73%"; Hit description =UPI00004C1734 related cluster
MALPVDVAGLCPRSGDVEAPPKPRSSLSSMAEAEPEPLGRARRRLFSRGQGGVDPSPSPGSGEAEFAVFRGLARVRALGRAERSSPSSGPESEPWVGRSGVRRLPGLSPSPSPGSGGAEFAVFWGLARVRALGRAKRIGVAQAALSFCQTGQWSGEVTAVTSALPGGARQDKGLCSFMLMGVTSSELGVLRVPLIMVPDNRRRPSKSPGGEIRLNKVCLNDPSPLPRIDQVVDSNIGCELLSFLDAYSGYHQIAMKETDQHATTFITPFDTFC

SEQ ID NO: 63956 - protein, 480 aa, Zea mays
  Coding DNA Sequence Number=SeqID_22177
  Gene Ontology: Mol. function=nucleoside-triphosphatase activity; Cellular component=chloroplast; Biological process=chlorophyll biosynthetic process
  Homolog annotation: Hit_ID=Q4FE78; Match level="QueryCoverage=84%, HitCoverage=100%, E-value=0.0, Identity=83%"; Hit description =Magnesium chelatase subunit I precursor
  Pfam annotation: Domain name=AAA; Domain location=169-432; Score= -33.6; E_value=0.074; Accession=PF00004.19; Description=ATPase family associated with various cellular activities (AAA)
  Pfam annotation: Domain name=AAA_5; Domain location=218-347; Score= -14.0; E_value=0.021; Accession=PF07728.4; Description=ATPase family associated with various cel
  Pfam annotation: Domain name=MCM; Domain location=127-458; Score= -223.6; E_value=0.003; Accession=PF00493.13; Description=MCM235 family
  Pfam annotation: Domain name=Mg_chelatase; Domain location=145-353; Score=-123.0; E_value=0.00015; Accession=PF01078.11; Description =Magnesium chelatase, subunit ChlI
  Pfam module annotation: Pfam domain module=AAA::AAA_5::MCM::Mg _chelatase; Domain location=169-432::218-347::127-458::145-353
AIASSTPSSRYHQQRLLAADCQAGPVNPEVGSLQSQHPSEIAAPSPSPGLSPIPSSPAPSTQTSMPLLPLLPVMASTFSPTSAARALLPGSTSRPLFLAASASSGRDWTSAAADSPSAMSPLPPPPNRRRRRRPRRRPSAPCTPFAAIVGQDEMKLCLLLNVIDPKIGGVMIMGDRGTGKSTTVRSLVDLLPDIRVVVGDPFNSDPDDPEVMGPEVRQRVLQGDTGLPVTTAKITMVDLPLGATEDRVCGTIDIEKALTEGVKAFEPGLLAKANRGILYVDEVNLLDDHLVDVLLDSAASGWNTVEREGISISHPARFILIGSGNPEEGELRPQLLDRFGMHAQVGTVRDAELRVKIVEERARFDRDPKTFRESYHDEQEKLQQQISSARSNLGAVQIDHDLRVKISKVCSELNVDGLRGDIVTNRAAKALAALKGRDSVTVEDIATVIPNCLRHRLRKDPLESIDSGLLVIEKFYEVFS

SEQ ID NO: 63957 - protein, 72 aa, Zea mays
  Coding DNA Sequence Number=SeqID_22178
MPRNMVNRGLYPSRDLRRGLPFRLWWIQVRSLHDGSRGSLEDMVAGVTWPSILPPGWTVKWDPASAEEEHEE

SEQ ID NO: 63958 - protein, 159 aa, Zea mays
  Coding DNA Sequence Number=SeqID_22179
  Subcellular localization annotation: CTP_CleavageSite=41; ConfidenceScore=5.27e-01
MVRRPRRDPARHDVPARPRPPPMSPTPSPSSPWHPLPRRPRAAPLPALGAWSRAVRPQWLADAAVRDLDVAAQPRPARRGALPAQLARPWRGPVRRPWRLGPARLGVPRPCATRPRPGAASARAAVVPLRSAARALLGTGVCATRSRHVSAALRVKARV

SEQ ID NO: 63959 - protein, 126 aa, Zea mays
  Coding DNA Sequence Number=SeqID_22180
MAKRVVFFAVDLDLASREGPRQEGEIIGVKLRMKKKYLKFRTKAPFYLLVGFMVVHMKIIHLDVFVTNIEYDDSFSGDDCSSDQKCWLQQSCFSFSNPIALLTPLYKLRSHSCSHCCRSVADEVYI

SEQ ID NO: 63960 - protein, 64 aa, Zea mays
  Coding DNA Sequence Number=SeqID_22181
MWALDALKIFFPAIATTGRFLRHCGANLSKSARGYESPEDHPGTWKLKCQASCALDHFFYPLMF

SEQ ID NO: 63961 - protein, 108 aa, Zea mays
  Coding DNA Sequence Number=SeqID_22182
  Subcellular localization annotation: CTP_CleavageSite=30; ConfidenceScore=5.08e-01
MLVDHTTVLNGPVCRSKARRSKLLLLQKLCAVARTATVVVVFVCIMISSSSRDAQWWCKGASLAEAQGRAASQTPPPAEARGKSPAAPTPGIGAPAPRAGGDAVSPGG

SEQ ID NO: 63962 - protein, 94 aa, Zea mays
  Coding DNA Sequence Number=SeqID_22183
MASGRCGGEEADRWAQGDVGERTARGTIRAETRGEPLISGAHRTSSSQYQPLTGNSSKQHANSTQQQAKDLHAKLPTPNSNHNSLEFTNSSMNN

SEQ ID NO: 63963 - protein, 150 aa, Zea mays
  Coding DNA Sequence Number=SeqID_22184
  Pfam annotation: Domain name=zf-GRF; Domain location=23-76; Score =8.6; E_value=0.0027; Accession=PF06839.3; Description=GRF zinc finger
MSRASSPFNAGHGWPRYGSVLLTRCPECERPEPLVRLISKRSENGNFGREFVKCESKPRPGKVQEKCKFFMWMDDYIKMVEGTGFTSGLGEMMAHNYGDERVAANWDMFTAELKKLNNNLSDLKKMFGVLYASMIFIALLFFVMNYGCKR

SEQ ID NO: 63964 - protein, 330 aa, Zea mays
  Coding DNA Sequence Number=SeqID_22185
  Homolog annotation: Hit_ID=Q52ZI4; Match level="QueryCoverage=84%, HitCoverage=86%, E-value=5e-37, Identity=38%"; Hit description =Expressed protein
MAGGSGEAAMSPPSSSASGKRGRDPEEDVYVDNLHSHKRYLSEIMASSLNGLSVGDSLPDNIMESPARSETASCYRTCMHGFALYMVTEISVSKSGDSGDSLIAHNYYSGCTHMDEILSQYSPMSEDSDDYRCYDTQLNPSGNHPDAMISPSTSPMSSPHRHQRPQSSLLPSNPYPLPSCSLSSVVCSHARRGSDNEGRFPSSPNDMCHVADLRRTALLRSVQMRVQGPHSYDLSFGIRQGQDHAHEHEGEHDHEHEHLEDLEGTEGSSCNKSIVNEVTYNQRRDHDFGRSEHEIDYINNSTSDDCVSDLKFKQEDKSHSKFDIPMHKNS

SEQ ID NO: 63965 - protein, 41 aa, Zea mays
  Coding DNA Sequence Number=SeqID_22186
MTSSSFEQWLQCEQPGGFGVVKQGGLAVCGVKLRAIAFSWS

SEQ ID NO: 63966 - protein, 90 aa, Zea mays
  Coding DNA Sequence Number=SeqID_22187
MEIHWMIGCVCVQGIEEWIAGLLGPHTCGGRVKSDKGDLAYPMRLYMLKAPPQAIEKNGRRQSPDLRRPSLIGQSIFIKTAPNPNRSHEI

SEQ ID NO: 63967 - protein, 173 aa, Zea mays
  Coding DNA Sequence Number=SeqID_22188
  Subcellular localization annotation: CTP_CleavageSite=40; ConfidenceScore=5.51e-01
MAPKRKAQSSSAAIIPPIDPNSQLPFTAAFSSSSEKLLPRSAGVGRRLVVLADVKVISTGEACRRGLAAGIDLFGRRLCGVSAHLRAQFPRGNPPDLQTSGGYPDLSSPTRVVGDASVPIMSIPPFVIHTAQSTVLKTCKICIVEKFHSLWSGLDCMHTTSQFNNASIVVARN

SEQ ID NO: 63968 - protein, 69 aa, Zea mays
  Coding DNA Sequence Number=SeqID_22189
  Gene Ontology: Mol. function=protein serine/threonine kinase activity; Cellular component=membrane; Biological process=protein amino acid phosphorylation
  Homolog annotation: Hit_ID=Q5VRF2; Match level="QueryCoverage=84%, HitCoverage=14%, E-value=5e-26, Identity=91%"; Hit description =Putative serine/threonine protein kinase
MDKKRPTGEQNLVAWARPYLNDRRRLYQLVDPRLGLNYSVKGVQKVAQICHYCLTRDTKLGVACRYLEM

SEQ ID NO: 63969 - protein, 196 aa, Zea mays
  Coding DNA Sequence Number=SeqID_22190
  Homolog annotation: Hit_ID=Q6QP51; Match level="QueryCoverage=97%, HitCoverage=82%, E-value=8e-16, Identity=40%"; Hit description =Putative growth-regulating factor 1
MMTASKKASSPLLIRGSKAGPSEEFNSRLRALGLRAHYWLAPEGFDSHLRRRARDDPGYVRYITKARAALPRARTQPWPRKTTNSASLDPRARTRPRLRKTTNSASPDPRARTRPRLRKTTNSASPDPRARTRPRLRKTTNSASPDPRARTLPWPWTMVSASPDLGLGLDLDLGGASAPPRARTDHVTGGPSLPYP

SEQ ID NO: 63970 - protein, 321 aa, Zea mays
  Coding DNA Sequence Number=SeqID_22191
MREWRREWRMVRQRDGLHTSHSETTRRADEMPRRAAKQETATGGSRASVRVGASTGPSGKQNSGAPDRAAGARSDGACRVRGSEWLERRQERLAAERAADSLRAAGDLQALGGVAGWRGRPASEPGRTSCTSTLGSRACAGTPACRRRAGQRCCREGTGRGRTVGWRGAAAQTARATRWERRLRERRWTGIRRSLAFFLNPPLDCVACPPGALLQENKQVGGPRAFGGRRAPEEDDEQGQGTTGRSTDGALRSAPKQPPPARQEATAKQGLGAAPAALAALGSGGGESRRLGGRDAVGWGPAAGRGGWEKPNLIPYWNVNP

SEQ ID NO: 63971 - protein, 147 aa, Zea mays
  Coding DNA Sequence Number=SeqID_22192
  Homolog annotation: Hit_ID=Q41848; Match level="QueryCoverage=47%, HitCoverage=23%, E-value=6e-35, Identity=100%"; Hit description =Prolin rich protein
  Pfam annotation: Domain name=Tryp_alpha_amyl; Domain location=70-142; Score=51.3; E_value=3.3e-12; Accession=PF00234.12; Description =Protease inhibitorseed storageLTP f
MATSTSVPVLLLLAAAAGLLLLPGSLAWQSSNCAPGAPGSGSPTWPSPGSGSGGGHSKPPKHHHGKPPKCPPCNPPGLIHLVIGQEARSKCCPLVQGVADLDAALCLCTTIRARLLNINIYLPIALNLLITCGKHAPSGFQCPPLYD

SEQ ID NO: 63972 - protein, 293 aa, Zea mays
  Coding DNA Sequence Number=SeqID_22193
  Gene Ontology: Mol. function=transferase activity; Cellular component= mitochondrial outer membrane; Biological process=mitochondrial transport
  Homolog annotation: Hit_ID=O64471; Match level="QueryCoverage=78%, HitCoverage=72%, E-value=3e-61, Identity=51%"; Hit description =Expressed protein
MASAAAVEWEAAARKVLVARKPCFGLPTACPTCLPVLLYLRMAQVPFDIHVDTSFPDADHIPYVEFGDCVAFNNEKGGVIEYLKDEKIADLNSNHPNISSTTVLDTKAMVSSWLANALLYELWVVSAGSIANDIYFSDLPWPIGKILHWNKTRHVKQLLGITKLNAAEKEEEIYLKASAAYDSLSFRLGDQVFLFDNSPTDVDALFLGHALFVLSALPDTSVLRGTLQKHDNLVSFAEHHKVQLLETSSSSSSGLGSSPSPSSSTPRRRPSADHSKCQGTTTSVKLVSKAVVP

SEQ ID NO: 63973 - protein, 716 aa, Zea mays
  Coding DNA Sequence Number=SeqID_22194
  Gene Ontology: Mol. function=protein serine/threonine kinase activity; Cellular component=membrane; Biological process=protein amino acid phosphorylation
  Homolog annotation: Hit_ID=Q5VRE1; Match level="QueryCoverage=98%, HitCoverage=97%, E-value=0.0, Identity=59%"; Hit description =Putative wall-associated kinase 4
  Pfam annotation: Domain name=Pkinase; Domain location=386-658; Score =135.2; E_value=1.8e-37; Accession=PF00069.15; Description=Protein kinase domain
  Pfam annotation: Domain name=Pkinase_Tyr; Domain location=386-658; Score=107.4; E_value=4.2e-29; Accession=PF07714.7; Description =Protein tyrosine kinase
  Pfam module annotation: Pfam domain module=Pkinase::Pkinase_Tyr; Domain location=386-658::386-658
MLLLLLLLLFSLTATLQFQGKTTALALPGPGCLRYCGDVEIQYPFGVGHGCAMEGFELRCNRSAVDGHSFLTIFGIIPVRNISLVDGQSTKKIDCDIWGKDLSGTPFRYSGKSNMFTVIGINALAYMADNTSKPYGDLEAQDGKCDGDSAGCCQAALADDMNFDDIGFSPDHNTTDYYEHRNATDRRADYRGYAVVMETDKFQFKTTYLNTTAFLDENAGGRVPAILIWEVGNETCDVATKKEDSYACLSANSVCVNSSSGGYLCNCSQGFEGNPYLPDGCKDIDECVAKPPPCARCKNKPGGYDCPTPLNITALLSVGSSIGVAVVASAVVCTYLTHERKKLTKIKRKYFQQHGGMLLLHEISLKQGTAFTVFTEAELIEATGNFADKNILGRGGFGTVYRGLLKDGGVVAVKRCVSSMASEQQQKEFGKEMLILSQINHKNIVKLLGCCLEVEVPMLVYEFIPNGTLFQFIHGDGGSRSAPFSVRIRIALESALALSYLHSWASPPILHGDVKSSNILLDQNYEAKVSDFGASILAPADKSQFMTLVQGTCGYLDPEYMQTCQLTDKSDVYSFGVVLLELLTGSTAFNLEGPESERSLSLRFLNAMKERRLGDIIDGRIKADSDAALLEEVAELALQCLDMVGERRPTMRDVAERLDVLAKAMQQQHPWVPAQHRPEEMESLLGESPVASAEMTSTGNFSMEERIVHGLLDSGR

SEQ ID NO: 63974 - protein, 346 aa, Zea mays
  Coding DNA Sequence Number=SeqID_22195
  Subcellular localization annotation: CTP_CleavageSite=62; ConfidenceScore=5.09e-01
MGHNRSCLLCWAGAYFSSSNLSKKQPLVTKVAQYFVGAFGILPAPWVLRSVGSHSPAHHSVSTAHPTPEKRNRIDPASQTVKIRPPHPTFPPATAGPGRLAVWLAVRAPYSAAHAARDADARAEGGIKRGQGSGSQPQATAHSQCGRPRRSRSKRQHRKAPFPLGRMPASHIMTMATPTRRCGTSASASASAHAVSLNGRWSASARAVALNGRPTATESETRQLHSRLAPACFSDLCTPTARATFRFRFPFCAPHRTYLLPWAIWTGRGRVGREKGSKLGEKNHTGPCRWVFTSSSCISLTSPPAGHQGGDDFPEAGSRAGRVRMLGRRRAGPPRGVLPAGGDGGR

SEQ ID NO: 63975 - protein, 3596 aa, Zea mays
  Coding DNA Sequence Number=SeqID_22196
  Gene Ontology: Mol. function=ubiquitin-protein ligase activity; Cellular component=intracellular; Biological process=protein modification process
  Homolog annotation: Hit_ID=Q2QSH6; Match level="QueryCoverage=27%, HitCoverage=100%, E-value=0.0, Identity=81%"; Hit description=E3 ubiquitin protein ligase UPL1, putative, expressed
  Pfam annotation: Domain name=DUF908; Domain location=89-401; Score =117.7; E_value=3.4e-32; Accession=PF06012.3; Description=Domain of Unknown Function (DUF908)
  Pfam annotation: Domain name=DUF913; Domain location=449-786; Score =159.3; E_value=1e-44; Accession=PF06025.3; Description=Domain of Unknown Function (DUF913)
  Pfam annotation: Domain name=HEAT; Domain location=113-148; Score =12.6; E_value=1.2; Accession=PF02985.12; Description=HEAT repeat
  Pfam annotation: Domain name=HEAT; Domain location=428-465; Score =4.5; E_value=12; Accession=PF02985.12; Description=HEAT repeat
  Pfam annotation: Domain name=HECT; Domain location=3303-3596; Score =500.6; E_value=1.8e-147; Accession=PF00632.15; Description=HECT -domain (ubiquitin-transferase)
  Pfam annotation: Domain name=UBA; Domain location=1277-1317; Score =46.7; E_value=8.1e-11; Accession=PF00627.21; Description=UBATS-N domain
  Pfam module annotation: Pfam domain module=DUF908::DUF913::HEAT::HEAT: :HECT::UBA; Domain location=89-401::449-786::113-148::428-465::3303 -3596::1277-1317
MVAAFLALRSFRLLSHCGLWPANVKAFIDQVINIPLHDIAIPLSGFRWEFNKGNFHHWKPLFIHFDTYFKTYISSRKDLLLSDDMTEAEPMPKNAILKILIVMQIILENCQNRSSFTGLEHLKLLLASSDPEIVVAALETLVALVKINPSKLHMNGKLISCGSINTHLLSLAQGWGSKEEGLGIYSCVVANEGNQQGGLSLFPVDLESKYQHRLGSTLHFEYNLGSAQYPDQTSDKGKSSNLCVIHIPDMHLQKEDDLSILKQCVDKFNVPPEHRFALLTRIRYARAFNSTRTCSIYSRISLLSFIVLVQSSDAHDELTYFFTNEPEYINELIRLVRSEDSVPGPIRALAMLALGAQLAAYASSHERARILSGSSIISAGGNRMVLLSVLQKAIFSLNSPNDASSPLIVDALLQFFLLHVLSSSSSGTTVRGSGMVPPLLPLLRDNDSSHMHLVCLAVKTLQKLMEYSSPAVSLFKDLGGVDLLSRRLHVEVQRVIGTADGHNSMVTDAVKSKEDHLYSQKRLIKALLKALGSSTYSPGIPARSQSSQDNSLPVSLSLIFQNVEKFGGDIYFSAVTVMSEIIHKDPTCFPALKELGLPDAFLSSVTAGVIPSCKALICVPNGLGAICLNNQGLEAVRETSALRFLVYTFTSRKYLIPLNEGVVLLANAAEELLRHVQSLRSIGVDIIIEIINKLSSSLKDRNNETAILEEKTDMETDVEGRDLVGGMDSSVEGSNDEQFSHLSIFHVMVLVHRTMENSETCRLFVEKGGLNALLTLLLRPSITLSSGGMPIALHSTMVFKGFTQHHSTPLARAFCSSLREHLKSALGELDKVSNSFEMTKIEKGAIPSLFVVEFLLFLAASKDNRWMNALLSEFGDASREVLEDIGRVHREVLWKISLFEENKIDAEISLSSSTSEAQQPDLSASDIGDSRYTSFRQYLDPILRRRGSGWNIESQVSDLINMYRDIGSAASDSQRVGSDRYSSLGLPSSSQDQSSSSSDANVSTRSEEEKKNSEHSSCFDMMRSLSYHINHLFMELGKAMLLTSRRENSPVNLSPSVISVANNIASIMLEHLNFEGHSVSSEREMTVTTKCQYLGKVAEFIDGILLDRPESCNPIMVNSFYCCGVIQAILTTFQATSELLFTMSRPPSSPMETDSKTGKDGKDMNSSWIYGPLISYGAIMDHLVTSSFILSSSTRQLLEQPIFNGSVRFPQDAERFMKLLQSKVLKTVLPIWAHPEFPECNIELISSVMSIMRHVCSGVEVKNTVGNDGARLTGPPPDESAISLIVEMGFSRARAEEALRQVGTNSVEIATDWLFSHPEDELARALAMSLGNSDTPAQEGNGRSNDLELEEVTVQLPPIDEMLHSCFQLLQTKEALAFPVRDMLVTISSQKDGQNRVKVLTYLIENLKQCVVASEPSNDTALSALLHVLALILHGDTAAREVASKAGIVKVALDLLSSWELELRESGMIEVPNWVSSCFLSVDQMLQLEPKLPDVTELDVLKRDNSNIKTSLVIDESKKKDSESLSSVGLLDMEDQYQLLKICCKCIEKQLPSASMHAILQLSATLTKVHAAAICFLESGGLNALLSLPTSSLFSGFNSVASTIIRHILEDPHTLQQAMELEIRHSLVTAANRHTNPRVTPRNFVQNLAFVIYRDPVIFMKAVQSVCQIEMVGDRPYVVLLKDREKERSKEKDKDKSVDKDKATGAVAKVVSGDTAAGSPANAQGKQSDLNSRNVKSHRKPPQSFVTVIEHLLDLVMSFVPPPRPEDQADVVSGTALSSDMDIDCSSAKGKGKAVSVPPEESKHAIQESTASLAKASFFLKLMTDVLLTYTSSIQVVLRHDADLSNMHGPNRTNSGLISGGIFNHILQHFLPHATKQKKERKSDGDWMYKLATRANQFLVASSIRSAEARKKVFSEICNILLDFTDSSAAYKAPVARMNVYVDLLNDILSARSPTGSSLSAESAVTFVEVGLAPSLLKMLQNLDLDHPDSAKIVTAIVKALELVSKEHVHSADNAKGENSSKIASDSNNVNSSPNRFQALDMTSQPTEMITDHRETFNADQTSQSSDSVADEMDHDRDMDGGFARDGEDDFMHEMAGDGTGNESTMEIRFEISRNRDDMADDDDDDDNTDEDMSAEDDEEVNEDDEDEDEENNNLEEDDAHQMSHPDTDQEDREMDEEEFDEDLLEDDDDEDEEGVILRLEEGINGINVFDHIEVFGGSNNLSGDTLRVMPLDIFGTRRQGRSTSIYNLLGRASDHGVLDHPLLEEPSSTLNFSHQEQPENLVEMAFSDRNHEGSSSRLDAIFRSLRSGRNGHRFNMWLDDGPQRNGSAAPAVPEGIEELLISHLSRPTQQPGAQTVGGTQENDQPKHGSAAEAREGSPAQQNENSENTTNPVDLSESAGPAPPDSDALQRVVSNASIEHATEMQYERSDTITRDVEAVSQASSGSGATLGESLRSLEVEIGSVEGHDDGDRHGTSGASERLPLGDIQAAARSRRPSGNAVAVSSRDMSLESVSEVPQNPDQEPDHNASEGNQEPRGVGADTIDPTFLEALPEDLRAEVLSSRQNQVTQTSNDQPQNDGDIDPEFLAALPLDIREEVLAQQRSQRIQQQSQELEGQPVEMDAVSIIATFPSEIREEVLLTSPDTLLATLTPALVAEANMLRERFAHRYHSSSLFGMNSRNRRGESSRRDIMAAGLDRNTGDPSRSTSKPIEIEGAPLVDEDGLKALIRLLRVVQPLYKGQLQRLLVNLCTHRDNRQALVQILVDMLMLDLQGFSKKSVDASEPPFRLYGCHANITYSRPQSSNGVPPLVSRRVLETLTNLARSHPNVAKLLLFLEFPCPSRCRSEAHDHRHGKAVLEDGEERKAFAVVLLLTLLNQPLYMRSVAHLEQLLNLLEVVMHNAENEINQAKLEASSEKPSENAVKDVKDNTSISDSYGSKSNPEDGSKALAVDNKSNLRAVLRSLPQSELRLLCSLLAHDGLSDSAYLLVGEVLKKIVALAPFFCCHFINELARSMQSLTFCAMKELRLYENSEKALLSSTSANGTAILRVVQALSSLVSTLQDRKDPEQPAEKDHSDAVSQISEINTALDALWLELSNCISKIESSSEYASNLTPASASAATLTAGVAPPLPAGTQNILPYIESFFVTCEKLRPGQPDAVQEASTSDMEDASTSSGGQRSYSCQASLDEKQNAFVKFSEKHRRLLNAFIHQNPGLLEKSFSLMLKIPRLIDFDNKRAYFRSKIKHQYDHHHHNPVRISVRRSYILEDSYNQLRMRSPQDLKGRLTVHFQGEEGIDAGGLTREWYQSLSRVIFDKSALLFTTVGNDLTFQPNPNSVYQTEHLSYFKFAGRVVGKALFDGQLLDAHFTRSFYKHILGVRVTYHDIEAIDPAYYKNLKWMLENDISDVLDLTFSMDADEEKLILYEKAEVTDCELIPGGRNIRVTEENKHQYVDRVAEHRLTTAIRPQINAFLEGFNELIPRELISIFNDKELELLISGLPDIDLDDLKANTEYSGYSIASPVIQWFWEIVQGFSKEDKARFLQFVTGTSKVPLEGFSALQGISGPQSFNQLDLPEYTSKEQLQERLLLAIHEANEGFGFG

SEQ ID NO: 63976 - protein, 58 aa, Zea mays
  Coding DNA Sequence Number=SeqID_22197
TVRDAALLMLAVVGLCRFPPDGADAGHQHQQPGEVKTQLPAVEYGQLLAAGWWSSGGC

SEQ ID NO: 63977 - protein, 77 aa, Zea mays
  Coding DNA Sequence Number=SeqID_22198
MADSKDSFDVSPSNIIELTMETLSAEDQQEFGEHKEQLIKEAQVKFIANFKRATDLASLRPTTTNPKMRNENKCNEY

SEQ ID NO: 63978 - protein, 127 aa, Zea mays
  Coding DNA Sequence Number=SeqID_22199
  Gene Ontology: Mol. function=nucleic acid binding; Biological process= DNA integration
  Homolog annotation: Hit_ID=Q3LRV2; Match level="QueryCoverage=58%, HitCoverage=32%, E-value=1e-31, Identity=88%"; Hit description=Gag
MSGDHAKREIVIVDKPAGKTLSRESDNKYKEESSSSIKSHRRGDKKKKMKKAPQVGDEDYDSDEAAQIRHFNSQATSILLASLCREEYNKVQGLKNAKEIWDVLKTAHEGDEVTKITKRETIEGELG

SEQ ID NO: 63979 - protein, 119 aa, Zea mays
  Coding DNA Sequence Number=SeqID_22200
  Subcellular localization annotation: CTP_CleavageSite=35; ConfidenceScore=5.24e-01
MASRSSAVTVEKGHGSRGGTMVTRRSGRRFAFAIMTASKKGLGKGDTPKGILLREGNGPRAPLLIRGSKAGPSEGFNSRLRALGLHAHYCSEVRRPPPGRVQRPPQATRASRPLLIRGS

SEQ ID NO: 63980 - protein, 182 aa, Zea mays
  Coding DNA Sequence Number=SeqID_22201
MTYAVAVTPAINGEREQVTAMQWKCLDMRRKAGRRRSPASSTDSTVSRSDRRHSTAPLTSLTEGQRRLRHSDCGATRQSESDRQSGLAKGATANSAPPDPRARTRAKTRKTANSAPPDPRARTRAKTRKTANSAPPDPRARTRAKTRKTANSAPPDPRARTRAKDTEDGELRSARPQGSDSG

SEQ ID NO: 63981 - protein, 175 aa, Zea mays
  Coding DNA Sequence Number=SeqID_22202
  Homolog annotation: Hit_ID=Q00X05; Match level="QueryCoverage=46%, HitCoverage=50%, E-value=1e-18, Identity=56%"; Hit description =Homology to unknown gene
  Subcellular localization annotation: CTP_CleavageSite=6; ConfidenceScore=5.25e-01
MAPAPVAAPVASVSRAAAALAPAGAVRSARAPFGYTRKDVLLIGLGVTAFGVGLKYGLELLGVDPLQAGNVVQLLVVLGMTVGWISTYMFRVANKDMTYAHQLRDYEKQVMEVRFAASEFIASKFQLPSTVEIELIAMVMGLVWSTGMVVDNECEGHAGLCRWTGSDKGRALRLD

SEQ ID NO: 63982 - protein, 160 aa, Zea mays
  Coding DNA Sequence Number=SeqID_22203
  Subcellular localization annotation: CTP_CleavageSite=78; ConfidenceScore=5.12e-01
MGGSLPALGRLVKLLPRAVLPRRQHRDGEQSPPPGSTKSEVTGRPSPVARPRSYPRSTARHPSTKSWTRRRWRWCGLRCGGGSSRWRSRAIRGERGFAEVPEGLIPHNAASSDPQFRFSRGVASDPVVTAAEAPARFLLREGDDPDKWDRRTSDSSSGRG

SEQ ID NO: 63983 - protein, 516 aa, Zea mays
  Coding DNA Sequence Number=SeqID_22204
  Gene Ontology: Mol. function=protein binding; Cellular component =nucleus; Biological process=regulation of progression through cell cycle
  Homolog annotation: Hit_ID=Q41734; Match level="QueryCoverage=78%, HitCoverage=97%, E-value=1e-161, Identity=75%"; Hit description =Cyclin IaZm
  Pfam annotation: Domain name=Cyclin_C; Domain location=388-515; Score= 164.7; E_value=2.3e-46; Accession=PF02984.9; Description=Cyclin, C -terminal domain
  Pfam annotation: Domain name=Cyclin_N; Domain location=261-386; Score= 228.5; E_value=1.4e-65; Accession=PF00134.13; Description=Cyclin, N -terminal domain
  Pfam module annotation: Pfam domain module=Cyclin_C::Cyclin_N; Domain location=388-515::261-386
MAYTFWWLCRSLSLAQVTKTPDEVIMRVLTETLYIIRRGTVLLAGNSYPLEQTFLGSNGAKDWIFILLLLLLILTTNISCHADLLLSLVRWSAGVPALGKTKAVPARPDALNRRPPLGDIGNLVSVRPATGNPQEQVNRPITRSFGAQLVKKAQAKAAIKNAAILPARHAPRQERKAPVKQHPPPEDIIVLSSDSEQSRAQSESSASSVRSRRKAINTLSSVLSARSKAACGIAGKPRQVVDDIDKLDVNNELAVVEYIEDIYTFYKIAQHERRPCDYIDAQLEINSKMRAILADWIIEVHHKFELMPETLYLTMYIIDQYLSLQPVLRKELQLVGVSSMLIACKYEEIWAPEVNDFILISDSAYSREQILSMEKGILNRLEWNLTVPTVYMFLVRFLKAATLGGKVEKEMENMVFFFAELALMQYDLVTRLPSLVAASAVYAARLTLKRAPLWTDTLKHHTGFRESEAELIECTKMLVIAHSTAPESKLRVVYKKYSSEQFGGVALRPPAEEICK

SEQ ID NO: 63984 - protein, 452 aa, Zea mays
  Coding DNA Sequence Number=SeqID_22205
  Gene Ontology: Mol. function=transferase activity, transferring glycosyl groups; Cellular component=cytoplasm; Biological process =metabolic process
  Homolog annotation: Hit_ID=Q5VQX0; Match level="QueryCoverage=93%, HitCoverage=90%, E-value=1e-143, Identity=62%"; Hit description =Putative UDP-glucose:salicylic acid glucosyltransferase
  Pfam annotation: Domain name=UDPGT; Domain location=2-452; Score= -81.2; E_value=1.6e-06; Accession=PF00201.9; Description=UDP -glucoronosyl and UDP-glucosyl transferase
MAKWVVRFGPGPVKLGPLGTVRKSGQPGGAAVTFVVTEEWLGLIRSSSAAAAAEPAGIRIRTIPNVIPSEHGRAANHSGFLDAVATEMEAPFDRLLDGLEGPPPAALVADAYVPWVVGVGNRRGRPRLVALPHTIDKKACNIDISHLFILRYAGNSDQRLGHYIAGQASSSIRLSDLEPLIHNKRTVKHILTTISSIRNAQSLLFTTMYELEASVIDSLRSVLSCPVYPIGPCVPYMMLEDHTVSSGKVARQGDYFTWLDSQPVNSVLYVSLGSFVSVSASQLEEIALGLIASEVRFLWILREQSPRVQELFSGINNGMILPWCEQLEVLCHHSVGGFMTHCGMNSTLEGVFAGVPMLALPLFFDQPIDGRLIVEEWKIGLAVRDWASKGGLIGREDIARAVKKLMSSDETGTKALRERALELKEASRRAVNEGGSSYCNLSSLMETVCTPK

SEQ ID NO: 63985 - protein, 165 aa, Zea mays
  Coding DNA Sequence Number=SeqID_22206
MRSPGLGRHSHSLTLLGLTSGADAQVFIVSFSDNEELSPASGAIGSSASPDPRARAQPRRWTTDPASPDPRARTQPRPRKTVSASPDPGLGLNLDLGRRTPPRPTQGSDSTSTTEDGLRLARPQGSDSASISEDGLDLDLGGASASPDLGLEPTTSQGGPSLPYP

SEQ ID NO: 63986 - protein, 322 aa, Zea mays
  Coding DNA Sequence Number=SeqID_22207
  Gene Ontology: Mol. function=transporter activity; Cellular component= integral to membrane; Biological process=transport
  Homolog annotation: Hit_ID=Q5TKJ2; Match level="QueryCoverage=76%, HitCoverage=44%, E-value=5e-99, Identity=73%"; Hit description =Putative cellular retinaldehyde-binding/triple function
  Pfam annotation: Domain name=CRAL_TRIO; Domain location=151-302; Score=6.5; E_value=3.3e-06; Accession=PF00650.10; Description =CRALTRIO domain
MASTSIQREQAREQALRANEEELPLPLSSAAICIGAVSRSGGPIGESDLLRHGGKERLDLECEEREWPMLWNPRAGGGRSGHPGRARGEGGLGDAQVGGVVAQALRHRRAPGRRPRPAGAGEGGVLPRHRPRGPPRLLQRVRRVPGKELYEKAFGNEGKRERFLRWRIQLLERSIWEQLDFSPSGICSMVQITDLKYSPPMLGKDHGVTHQALALLQDNYLEFVAKKVFINVPWWYLATNKVMSLFLTQRTKSKIIFYSPDRYVAPEQVPVRFGGLYKEDDTEFSASNAVTELTVKPSSKETVEVPATEGSTVVWPCGSSAC

SEQ ID NO: 63987 - protein, 152 aa, Zea mays
  Coding DNA Sequence Number=SeqID_22208
MPGLVAYSGLGLGLLALAALESLPLRVPPLWSQHAVAQTRVPLRGAATASGPGAGPPRTEPDAPRALSRRCSPLSLLFSLPAFPCSRAQPPGTKPDAPRAQPRQDAAPSLQPGVVAAPPLCPPPPAPSPLRPPPAPSHVTPLIARPPPNCSR

SEQ ID NO: 63988 - protein, 46 aa, Zea mays
  Coding DNA Sequence Number=SeqID_22209
MSEDKAKGAKTKVKGLLTAKAIREVAYPEWFGQHSYGQEIQWQEED

SEQ ID NO: 63989 - protein, 164 aa, Zea mays
  Coding DNA Sequence Number=SeqID_22210
  Subcellular localization annotation: CTP_CleavageSite=78; ConfidenceScore=5.25e-01
MAWLPRPTVDLPADIDALACSTLPLPSTSHPLSARPARPTTLSVSTPPTAVINHHHDSTRLTEQAQQQPFIFFSQFQSSMPRWGLHAPTHPPVQGSEVMGHNTPPLVIPALGGASRGEGATVEETPNQIDDFANNFFASRAPKLLIFGGLGHATKNRYYFWYPE

SEQ ID NO: 63990 - protein, 87 aa, Zea mays
  Coding DNA Sequence Number=SeqID_22211
MTKLSTVVAIHLRNGLSFAGKEFLLSLIKFDAFSVEFLKHLGGLPHHQGNVSIKSGLVVPEGAADEGAPADEAEQADIEEGDGVKKR

SEQ ID NO: 63991 - protein, 71 aa, Zea mays
  Coding DNA Sequence Number=SeqID_22212
MRSAAGDRATVPSRPMRRRYMHTRDIVYEHNAYRLFLVKDGREKSEIEEIEDMKKTQSNFIGVPKHLKFDF

SEQ ID NO: 63992 - protein, 205 aa, Zea mays
  Coding DNA Sequence Number=SeqID_22213
  Subcellular localization annotation: CTP_CleavageSite=84; ConfidenceScore=5.15e-01
HSAVNCVSFGLLPEVALLLSVLVSFWLLASAPGPNDFFGSMTKVKACRRWSSEFTGGTGRSLGKITFMSLTFTDSQKEGRATSLGSMGQARQHPMVAIKQTEKQGAKSWVADCCFGGSGTATGASLKRKKQTRASLEKKITVTSTTSLPMPSDSVMPTRKSKRNASSRLHRAAKLKARLHNKVIVVTVPPTDHNAKYGHMAKRCW

SEQ ID NO: 63993 - protein, 460 aa, Zea mays
  Coding DNA Sequence Number=SeqID_22214
MKRQRVGGVGDDEVHLEEEEEEVETEILPLHHHHAAAAAVETVGGQPVVSILGLGDVESVLYHEDHYVDVTHLAVLRLRLNDAGEMVRRLVAINARRPVRISNASSLLQASALRSGLLQLSAELSDLHQALRNDCIVWELVDHVRSMPGLGLPVDLQPGILRDGVEHLVVAIRTTLAAFPAEPAGRHSGPNTTPATSHAAEVYTNLAERMRAHLDAMDELLTSSVDYPSVPLASFVSLDVEQSQETETETVYKRIRGLDHLRLLLTLPNQGLLTEFCISQLHLGDADDMLHAIEAAMQHPFYYCFANFDRVASACEMKKMVLNISHALQNIGSGLIDRQRLGVLEDVERKFTQAALRHTGAFREAALGLSAGLLELLQEVDDLLDAPADMAAIVQRVADDPVQVRRMPDAHQAPVHNPAGLVALTPLLEQLLQRVTSIWSVSIEYADESLPDILLAKTVL

SEQ ID NO: 63994 - protein, 140 aa, Zea mays
  Coding DNA Sequence Number=SeqID_22215
MSWRSLSTMRSGSAATRDFVEESPARRMLTEPGEAASIIPGTSWSSQTRLRNPADGVRTCPLRQHSARVLGRRRRSYSLSSEDLCSPRYLRRLLVGADGGGGIGTRFQSEAQAAVKLGSAGGGDENSWRKLVRATDKLRF

SEQ ID NO: 63995 - protein, 581 aa, Zea mays
  Coding DNA Sequence Number=SeqID_22216
  Gene Ontology: Mol. function=oxidoreductase activity; Cellular component=anchored to membrane; Biological process=lignin catabolic process
  Homolog annotation: Hit_ID=Q4VDN6; Match level="QueryCoverage=94%, HitCoverage=93%, E-value=0.0, Identity=55%"; Hit description =Ascorbate oxidase
  Pfam annotation: Domain name=Cu-oxidase; Domain location=166-334; Score=189.8; E_value=6.3e-54; Accession=PF00394.12; Description =Multicopper oxidase
  Pfam annotation: Domain name=Cu-oxidase_2; Domain location=424-565; Score=158.6; E_value=1.6e-44; Accession=PF07731.4; Description =Multicopper oxidase
  Pfam annotation: Domain name=Cu-oxidase_3; Domain location=40-157; Score=203.8; E_value=4.1e-58; Accession=PF07732.5; Description =Multicopper oxidase
  Pfam module annotation: Pfam domain module=Cu-oxidase::Cu-oxidase _2::Cu-oxidase_3; Domain location=166-334::424-565::40-157
MSAPRQPLCKLATAVHHLLLCSLAALSVSADAKVHHHTWDIAYHYKSLDCVNKLAVTINGESPGPTIRATQGDTVVVTVRNSLETENTGIHWHGIRQVGSPWADGTVGVTQCPILPGDTFTYRFVVDRPGTYFYHAHYGMQRVAGLDGMLVVSVPDGVAEPFAYDEDRTVLLMDWWHKSVYEQAVGLASDPLVFVGEPQSLLINGRGVFEPFHCSRAPSASGCSSAPRPAAGCAPPALFTAVPGKTYRLRVGSLTSLSALNFAIEGHSMTVVEADGHYVRPVVVDSLYIYSGESYSVLLTADQDPSRNYWAASHVVARERNTTSAMAILSYAGNDPRAPPPTPRPEGPAWDDARPRLEQSRSLAVAHPDHVVPVPPRPDRALLLLNTQNRIGGHIRWAINGVSLAFPATPYLVSIKRGLRGAYDDQRPPPDTYDYRSYDIASPPTANGTVASKVYRLALGSVVDVVLQNTVALNNKSETHPWHLHGHDFWVLAYGDDGKKFDPERDTNKFNLRDPVMKNTVALHPRGWTAVRFVADNPGVWLFHCHIEAHVYMGMGLVFEEGVDKVGRLPKSIMGCGRSRT

SEQ ID NO: 63996 - protein, 140 aa, Zea mays
  Coding DNA Sequence Number=SeqID_22217
  Subcellular localization annotation: CTP_CleavageSite=63; ConfidenceScore=5.11e-01
MSWRSLSTMRSGSAATRDFVKESPARRMLTEPGEAASIIPGTSWSSQTRLRNPADGVRTCPPRQHSARVLGRRRRSYSLSSEDLCSPRYLRRLLVGADGGGGIGTRFQSEAQAAVKLGSASGGDENSWRKLVRATDKLRF

SEQ ID NO: 63997 - protein, 178 aa, Zea mays
  Coding DNA Sequence Number=SeqID_22218
  Gene Ontology: Mol. function=calcium ion binding; Cellular component =contractile vacuole; Biological process=cytokinesis
  Homolog annotation: Hit_ID=P27164; Match level="QueryCoverage=98%, HitCoverage=81%, E-value=6e-20, Identity=36%"; Hit description =Calmodulin-related protein
  Pfam annotation: Domain name=efhand; Domain location=112-140; Score =10.1; E_value=1; Accession=PF00036.22; Description=EF hand
  Pfam annotation: Domain name=efhand; Domain location=148-176; Score =8.6; E_value=1.6; Accession=PF00036.22; Description=EF hand
  Pfam module annotation: Pfam domain module=efhand::efhand; Domain location=112-140::148-176
MAEKLTPEQVDECKEIFDLFDADEDGKSPSHRTPIHRPPRAHLAPSLTQLICRIATGELVTALRSLGQNVDEAEARRFLEDAGVAAGAGDIDLAAFLAVAARKMGARQSEARLAECFDVFDDACSGSIPAEQLRQVMVSHGDRLTEEEADAMLREADPRGEGRVEYKHYVKVLLRDKK

SEQ ID NO: 63998 - protein, 122 aa, Zea mays
  Coding DNA Sequence Number=SeqID_22219
MAIPADAAAHPFHPRLVKASKFKRRKEVKANRTKKAVAAAAIDEVSPLGYAQRIPPHALSPSFSFYRIHPMFFEAVTMVQTQSLALLLRHHLWHRCRSQLATDTEGSVPPMPTIAEAKTSSG

SEQ ID NO: 63999 - protein, 159 aa, Zea mays
  Coding DNA Sequence Number=SeqID_22220
MEEHVTPGPGFPARSSTWRDDSLDFISSSSVAKPQGIAASSQQPNWKRMGGDETIDIGEGQIRGRLGRGDPRHARRSSGVRRHKGSHPRPGWLGFGDGSGDGTRGFRIGLREQRAESAGTAASARGVSGDSADFDGCYGNSARSRRDWRLPWSRRIVCE

SEQ ID NO: 64000 - protein, 303 aa, Zea mays
  Coding DNA Sequence Number=SeqID_22221
  Gene Ontology: Mol. function=lyase activity
  Homolog annotation: Hit_ID=Q8GVM3; Match level="QueryCoverage=89%, HitCoverage=57%, E-value=1e-35, Identity=36%"; Hit description =Putative ribosomal RNA apurinic site specific lyase
  Pfam annotation: Domain name=F-box; Domain location=22-69; Score =31.6; E_value=2.7e-06; Accession=PF00646.23; Description=F-box domain
MGIGVVTRSKRRRLDEEQRLADRISSLPDDVLGEIVSLLPTRAGARTQVLSSRWRHIWRSAPLNMDLHPDGPEWRHMPVEQIRRVLSAHPGPGRRLSVPSRFGYLHWMDGWLRSAAALGPRQPPGARTELTQPSSSSLVGLAHAAASAAIGAPLLVHPPRRLLPRLRVSDQCQGPRPSPQPVRLPRLQQLTLSGVTISEGSLHAMLAGAPALRSLLLLDSNGFARLQIASCSIENIGVRSRCRGAKLQHLVLEDTPSLKRLLLFEGTNHMDISVVSAPRLDVFGKLCDDATKLKYSSATTDLQ

SEQ ID NO: 64001 - protein, 90 aa, Zea mays
  Coding DNA Sequence Number=SeqID_22222
MAAARGVGGCCEVGGCENGDGGRGVSGSVDRRMLRDRDDDWAAAAAADLRAQVSIFRTFAGDEHPPPDWFNHQKIIHWAELGANACGPYL

SEQ ID NO: 64002 - protein, 142 aa, Zea mays
  Coding DNA Sequence Number=SeqID_22223
  Subcellular localization annotation: CTP_CleavageSite=39; ConfidenceScore=5.14e-01
MAVAASGVDVAACGPRPRSGGAGHDTLAARARGSPGGTSAQALAAPAPTRLQRGGPDPAAPAPARGRARQPGLVRLRPRRRRGTGVCGPRGPVEDADLAAPSAVLVAPAWGATISHDTGFGATATSALTSNCPGASIEHKKF

SEQ ID NO: 64003 - protein, 129 aa, Zea mays
  Coding DNA Sequence Number=SeqID_22224
  Gene Ontology: Mol. function=dihydroorotate dehydrogenase activity; Cellular component=cytoplasm; Biological process='de novo' pyrimidine base biosynthetic process
  Homolog annotation: Hit_ID=Q6Z744; Match level="QueryCoverage=54%, HitCoverage=17%, E-value=7e-30, Identity=88%"; Hit description =Putative dihydropyrimidine dehydrogenase
  Subcellular localization annotation: CTP_CleavageSite=31; ConfidenceScore=5.09e-01
MESLTLHASTAASPLQRRRLLPGRQRAMYVRATASAAPDNVEDTLTVITSTSVSLDAEKVINVTPRYAKLRAEPNGAAMGRIIGWQNIELISDKPLETMLNEFKQLKKEYPDRILIGSIMEEYNKANAR

SEQ ID NO: 64004 - protein, 165 aa, Zea mays
  Coding DNA Sequence Number=SeqID_22225
MATKAAEAPSPPPPTAEAEAPATPGKRVPADRADKGREGVERPEPKRRRARARIAVLDSVPRASEVAAAAAAAAAASREEDESVGGCDGVDSSFSFHARNFSSAQTTPKFGSFDPAAAELVAFHLMKATRRRLDASATDEPGDHGTVAGGGGEEAAAEGSDENSR

SEQ ID NO: 64005 - protein, 169 aa, Zea mays
  Coding DNA Sequence Number=SeqID_22226
MGRRFLMVFTVALIARSAEASICIYDQEPFCEVDNASSSLANTSLPVACSQGEGRWNTGPQMASAVQAAMIDEASSDLCSSPPGYNKPAKFRGGISRVPTGRRGPGCPTGQPVGVGPGGLRRRSGVIRNARVELLRRTWDVGGNFLRFRTRRKLKVANLPMKFEFPGCL

SEQ ID NO: 64006 - protein, 88 aa, Zea mays
  Coding DNA Sequence Number=SeqID_22227
MGECRTPVYTVQTSKFGPGPPRVQIGPLEWDPDPPVWGSSCPQRGPKVPGDVLSPRYVGRAVTHHYSRITHTVTAHQCSMDYRRHDSR

SEQ ID NO: 64007 - protein, 113 aa, Zea mays
  Coding DNA Sequence Number=SeqID_22228
  Gene Ontology: Mol. function=protein binding
  Homolog annotation: Hit_ID=Q69L94; Match level="QueryCoverage=81%, HitCoverage=23%, E-value=5e-33, Identity=70%"; Hit description =Putative speckle-type POZ protein
  Pfam annotation: Domain name=BTB; Domain location=31-112; Score=14.5; E_value=0.0002; Accession=PF00651.21; Description=BTBPOZ domain
MNCTVGVVKNRIETPKDIQIHVPRSDMGRCFKELLSRCIGCDITFEVRDEKVRAHKWILAARSPVFKAQFFGPIGKPDLHTVVVEDVEPVVFKKQKLDAVVRYTRMLFNRNVI

SEQ ID NO: 64008 - protein, 120 aa, Zea mays
  Coding DNA Sequence Number=SeqID_22229
  Gene Ontology: Mol. function=transcription regulator activity; Cellular component=nucleus; Biological process=regulation of transcription
MSASPASKRTAFATITRMEHRLGSTTSKYQEDWQLLFAAGIKTVLLVPVVPHGILQLGSLDMILCEDYEVFLVLKGLKVSILKGVLEHHRSDKLWARFVIEGSDGFNQTQILYMALSLYR

SEQ ID NO: 64009 - protein, 143 aa, Zea mays
  Coding DNA Sequence Number=SeqID_22230
MVQPKENGEIKRSHIEDYHCCRMWATCGEEEKVRARSNEVGKWGGARSGVERCATIDWIWAKCRADTVTRRVERRATASQNAERKRHGSGRMCEPSGVGVLGEGGHNTEQKESEQTDAGLAVLVVSLLMDLEREYMSTTPSLK

SEQ ID NO: 64010 - protein, 127 aa, Zea mays
  Coding DNA Sequence Number=SeqID_22231
  Gene Ontology: Mol. function=protein serine/threonine kinase activity; Biological process=protein amino acid phosphorylation
  Homolog annotation: Hit_ID=Q7X9J4; Match level="QueryCoverage=90%, HitCoverage=90%, E-value=3e-43, Identity=87%"; Hit description =Casein kinase-like protein
MATAGSRWAVVMSRNSGFSAQVVELDFLYPSEGIHRRWDNGFRITATAATWDQAAFILSIPKRKPADETQETLRTSAFPSQHVKIEHPFALANDMFTGQMGEKSLLSFHLLWKNGVMRSAQFGWGTL

SEQ ID NO: 64011 - protein, 237 aa, Zea mays
  Coding DNA Sequence Number=SeqID_22232
MEPGVARRVWHVVLAVCHMLRRGLSPKRIMMDVHLLLGRGKLAGRTLRGHLAHPSSHHRHGHGHGHLTTYGGGASRASSSSSSSTLASFYGHPREVEFSCTTTPSYPQQHYGLFPFKGLRGRGGARCGGEYGGLDAAAVARAFEMLSAEVDTGGGGTPAVAATTATPSPMLAWILGRSPAGVRPLRVTDSPFPAVPEDGCCNDRVDADADDFIRKFYEQLRLQPTAATPDAYLRRRG

SEQ ID NO: 64012 - protein, 225 aa, Zea mays
  Coding DNA Sequence Number=SeqID_22233
MLDKWEPSSLQMLEYSPNDKDMWEPDLRGGSGGGERRARAATGAVERDVEEEDSDSPSSEMSVDEPNSGVLGFLICSTQFLGDHQVRPHAANSGAGSPRAGGPRPWLSMTAQGNCEQQLASHTVPTTCKMLNASTMFRRLHDKSIEKTEKGYLEILVEGAQNCIKKGEKYSYKTSCLEGNKYVEYNYMNSQGNLARAHSSRSTELCSLGWGTLVLHFVSCGYPLS

SEQ ID NO: 64013 - protein, 193 aa, Zea mays
  Coding DNA Sequence Number=SeqID_22234
MAGRNRQCRAPGVATVAAHNLISGGACAPWPGGGAACSKSKRSSVAADGTIGHRRRGGWQRLPRTCVEGLRRQGTHAACPTGRPDLARQARAVPGLPTSAAAVAPVRQALARQTADRPLATRSAVLARQANSGARPLATRLPGSARANADARRRGSRGKQGQTHPMPATVREQAASSSLPLPSAHGGGPVVLL

SEQ ID NO: 64014 - protein, 230 aa, Zea mays
  Coding DNA Sequence Number=SeqID_22235
  Homolog annotation: Hit_ID=Q6QP54; Match level="QueryCoverage=37%, HitCoverage=30%, E-value=7e-19, Identity=58%"; Hit description =Putative kinase
MRLGSARYRLVSRLGSAREPLCWFWTAFGSLVHAALATTDVSLNLVPRYLCRRRAPARGMGMEVVGAETAPAEVKITTNVTDLAPPKDVKDGWPESKQTYAFYFIKVRSFEDLKLRAKLEQSNKEFQKKIQARSKLIETVIANEMGRRSGSLRPESARGRAMMAPPVDVAGLRPRLGDAEAPPEPRSSLSSVAEAESEPLGRARRRSSAEARAESEPWGRAKRSPSSSGT

SEQ ID NO: 64015 - protein, 130 aa, Zea mays
  Coding DNA Sequence Number=SeqID_22236
MGQFRRRSGDDAARRRKKAHSEPVHFTEDHEAKDDGARIVEATAAFNCKREFPSAPSSRPSCWPVDPLPPPHSVKGVSAATWGMVVVRARTRAQPRKTANSAPPDLGLGLGLSPGRRRTPLRPTQGSDSG

SEQ ID NO: 64016 - protein, 78 aa, Zea mays
  Coding DNA Sequence Number=SeqID_22237
TESRAASCHATVFFDVGEALSHLRSTLSPCRLGRLLVRQFGRLPKGGYETVESGYDYGAGEDEAVEGDFQEFQDYDEF

SEQ ID NO: 64017 - protein, 55 aa, Zea mays
  Coding DNA Sequence Number=SeqID_22238
MAAADAARAGGVATAGKVELGRPNGAAGGEVELGRPTATTLHNLFKSTYTECCPR

SEQ ID NO: 64018 - protein, 532 aa, Zea mays
  Coding DNA Sequence Number=SeqID_22239
  Gene Ontology: Mol. function=GTP binding; Cellular component =intracellular; Biological process=RNA-dependent DNA replication
  Homolog annotation: Hit_ID=Q5QN81; Match level="QueryCoverage=98%, HitCoverage=96%, E-value=0.0, Identity=78%"; Hit description =Pentatricopeptide (PPR) repeat-containing protein-like
  Pfam annotation: Domain name=PPR; Domain location=147-180; Score=0.4; E_value=6.7; Accession=PF01535.11; Description=PPR repeat
  Pfam annotation: Domain name=PPR; Domain location=181-215; Score =19.7; E_value=0.01; Accession=PF01535.11; Description=PPR repeat
  Pfam annotation: Domain name=PPR; Domain location=216-250; Score =16.9; E_value=0.071; Accession=PF01535.11; Description=PPR repeat
  Pfam annotation: Domain name=PPR; Domain location=252-286; Score =30.9; E_value=4.5e-06; Accession=PF01535.11; Description=PPR repeat
  Pfam annotation: Domain name=PPR; Domain location=287-321; Score =49.7; E_value=1e-11; Accession=PF01535.11; Description=PPR repeat
  Pfam annotation: Domain name=PPR; Domain location=322-356; Score =23.3; E_value=0.00086; Accession=PF01535.11; Description=PPR repeat
  Pfam annotation: Domain name=PPR; Domain location=357-391; Score =35.3; E_value=2.2e-07; Accession=PF01535.11; Description=PPR repeat
  Pfam annotation: Domain name=PPR; Domain location=392-426; Score =19.6; E_value=0.011; Accession=PF01535.11; Description=PPR repeat
  Pfam annotation: Domain name=PPR; Domain location=427-461; Score =33.6; E_value=7e-07; Accession=PF01535.11; Description=PPR repeat
  Pfam annotation: Domain name=PPR; Domain location=462-496; Score =36.8; E_value=7.4e-08; Accession=PF01535.11; Description=PPR repeat
  Pfam module annotation: Pfam domain module=PPR::PPR::PPR::PPR::PPR::PP R::PPR::PPR::PPR::PPR; Domain location=147-180::181-215::216-250::252- 286::287-321::322-356::357-391::392-426::427-461::462-496
  Subcellular localization annotation: CTP_CleavageSite=50; ConfidenceScore=5.14e-01
MRSGPCGLATDAQGLFNGMPPPKLPSHALFGHACQVLGRTHVSQFCTVARQSTDERASAEPLRFTVTPGDAFGDGPPVGMSEAAKMVCRIVSTQPEPKIASTLDALGVAVSPELVAEVLKNLSNAGMLALAFFRWAERQEGFSYTAEGFHNLIEALGKIKQFRLVWSLVETMRCRGLLSKDTFKLIVRRYARARKVKEAVETFEKMSIFGLKTELSDYNWLIDTLSKSKQVKKAQAIYKEMKRKGKFVPDLKTYTVLMEGWGHEKDLLMVKTMYQEMIDAGIRPDVVAYGMLISAFCKSGKCDEAIKVFYEMEASGCMPSPHVYCMLINGLGSEERLDEALKYFEHYKKSGFPMEVPTCNAVVGAYCRASKFQHAFKMVDEMRKCKVGPNSRTYDVILHYLIKSQKFEEAYNIFQRMGIDGCEPQLNTYTMMVGMFCSNGRVDMALKVWKQMGEKGVLPCMHMFSALINGLCFENRLEEACVYFQEMLDKGIRPPGQLFSNLKEALVQGGRISLAQEVALKLDAIRKTPFRG

SEQ ID NO: 64019 - protein, 79 aa, Zea mays
  Coding DNA Sequence Number=SeqID_22240
  Homolog annotation: Hit_ID=UPI00005A1F45; Match level="QueryCoverage =75%, HitCoverage=15%, E-value=1e-10, Identity=53%"; Hit description =PREDICTED: similar to CG12128-PA, isoform A
MAPSSVAVPRTTRESSALVMTMRHLLIAFGGLAGLEESIEEDTNLKGKRADDVFTSYFNTCPNQGSRTIRTEVSAYYKF

SEQ ID NO: 64020 - protein, 133 aa, Zea mays
  Coding DNA Sequence Number=SeqID_22241
MVMLLYWASESSPDGLPGEPGSGQKVCTPAQAAHQGARRPYQIGAARVSNPNRPCIRRQEDSWPPRRRPGSQSPSPREPKLSAARSWPARASAHEADQELQPPPLLVELGRGGHAERATEGLAERLVPRAPTP

SEQ ID NO: 64021 - protein, 286 aa, Zea mays
  Coding DNA Sequence Number=SeqID_22242
  Homolog annotation: Hit_ID=Q6QP51; Match level="QueryCoverage=38%, HitCoverage=49%, E-value=9e-10, Identity=37%"; Hit description =Putative growth-regulating factor 1
MQTACNRTKWAHPFDSNAPSMGAQAHTSWTGKGDAPKGILLREGNGPRAPLLIRGSKVGPSEGFNRRLRALGLRAHYWSEAGPQRVHSRLRRRARDDPGYVRYITKARATLPSSLEDTMFGALQGQHGAFPPSSLQKGDTGAAARVAPTVVPLDRVRLTAAKSGLGRHRKLRLARPRARTRAWPRKTTNSASPDPGSSSGSTPGRRRTPPCPTQGSDSGSAPEDDELRLARPRARTRPRPQSTISVSPDPRDRTQPRPRKTDSTSTSEEPPLVPTTSQEGPSLPYP

SEQ ID NO: 64022 - protein, 71 aa, Zea mays
  Coding DNA Sequence Number=SeqID_22243
MAAHGKGAGRLLRMVSFFVEVADAASPPSQLRRLPLFLLCAGSLLLGKISLFSLVRFAHYWCPDGMGVDRF

SEQ ID NO: 64023 - protein, 50 aa, Zea mays
  Coding DNA Sequence Number=SeqID_22244
MVKNFGRKTVQIAMNAVVTSHLLVYLYSAAEIEEFALVIIDIKGRINRPL

SEQ ID NO: 64024 - protein, 76 aa, Zea mays
  Coding DNA Sequence Number=SeqID_22245
MPHAKKQKFSTSVHPCVHYMLTNQFYELYEALGLEPISCNHFFFITMPLVFTLQGETVMQVDAATNPYPWRVLRLY

SEQ ID NO: 64025 - protein, 80 aa, Zea mays
  Coding DNA Sequence Number=SeqID_22246
  Gene Ontology: Mol. function=transferase activity, transferring glycosyl groups
  Homolog annotation: Hit_ID=Q575Z8; Match level="QueryCoverage=98%, HitCoverage=10%, E-value=1e-24, Identity=68%"; Hit description =Alkaline alpha galactosidase 1
MFNVGIGVKECVVTSGVGSRVVALRFHGCSRFGAYCSQEPARCLLDSTKVEFSYDADTGLVSVALPMLEQELYQWTLEIL

SEQ ID NO: 64026 - protein, 250 aa, Zea mays
  Coding DNA Sequence Number=SeqID_22247
  Gene Ontology: Mol. function=acyltransferase activity; Cellular component=mitochondrial membrane; Biological process=photorespiration
  Homolog annotation: Hit_ID=Q2V987; Match level="QueryCoverage=66%, HitCoverage=66%, E-value=2e-60, Identity=67%"; Hit description =Transcription factor APFI-like
  Pfam annotation: Domain name=Hexapep; Domain location=118-135; Score =12.8; E_value=1.3; Accession=PF00132.14; Description=Bacterial transferase hexapeptide (th
  Pfam annotation: Domain name=Hexapep; Domain location=141-158; Score =6.3; E_value=25; Accession=PF00132.14; Description=Bacterial transferase hexapeptide (th
  Pfam module annotation: Pfam domain module=Hexapep::Hexapep; Domain location=118-135::141-158
MADNGGRLERAALQEREAVGGARRSWRGGRRGAASRSWRRGGRQRYQELERREAGSGQRSTACLLFCILIFQVIFAINKSMTSISGDANIIQIGSGTNIQDNSLIHVAKSNLSGKVFPTTIGNNVTVGHSAVLQGCTVEDEAFVGIGATLLDGVVVEKHGMVAAGALVWGGNPAKFLRKLTDDEISFIAESAANYSNLSKVHAAENAKPLEKIEFEKVLGKKFAHQDEYDSSIGVAEGAPPELTSPNPAQ

SEQ ID NO: 64027 - protein, 90 aa, Zea mays
  Coding DNA Sequence Number=SeqID_22248
  Subcellular localization annotation: CTP_CleavageSite=70; ConfidenceScore=5.06e-01
MPTFWAQQADAAQHQKRARRSHTHSTTDKSEPWADTAPSLTGTLCGRHLGQFVSVVFPTTSCLYANIIASATAKSGWTVATAFAQVRIEA

SEQ ID NO: 64028 - protein, 101 aa, Zea mays
  Coding DNA Sequence Number=SeqID_22249
MGITRSCTVIIELSHIFVFHGQIEQHESLENIFSSILETTAQAYGEDDNIQPSSGCTDAGQLCHHPVQELDTERASAETAARSGSTLFALFELLALPTFSK

SEQ ID NO: 64029 - protein, 94 aa, Zea mays
  Coding DNA Sequence Number=SeqID_22250
  Gene Ontology: Mol. function=peptidase activity; Cellular component =membrane
  Homolog annotation: Hit_ID=Q9M583; Match level="QueryCoverage=97%, HitCoverage=32%, E-value=1e-43, Identity=92%"; Hit description =Hypersensitive-induced response protein
MGEILGLVQVDQSTVAIKENFGKFSEVLEPGCHFLPWCIGQQIAGYLSLRVRQLDVRCETKTKDNVFVTVVASVPFRPLADKASDAFYKLNESS

SEQ ID NO: 64030 - protein, 139 aa, Zea mays
  Coding DNA Sequence Number=SeqID_22251
MGRLGEGITTLSLSHGGGGVGAVGGGWQREGGGGGACSSFFQAATGLALGGVGWPTLYGGHDRQRMGRVWEDEAGGGGREEVPDGGRHRGGRGGGGAAEEVRKEGGCHGGGGRRWWRGVERRSEHHGVEEVLNYVKIYM

SEQ ID NO: 64031 - protein, 59 aa, Zea mays
  Coding DNA Sequence Number=SeqID_22252
MAEALAAMAGGIELAGAKGKWLAGEENADDLWEEVCNSEIQKSEFLQGFIDQGLIWGFI

SEQ ID NO: 64032 - protein, 166 aa, Zea mays
  Coding DNA Sequence Number=SeqID_22253
MKPEQRGNDAVGSGPHARGGGDDDVGWAEPVEAEGKPTTSEFNNWEKRKTAASAPIELERWRRVVGGQCRLERGSGGWKAGQALSERGSVLARALVGGAWLAVAEWEHGRGLASLRDMDQRWAVGTRARGSGHACEASVICAAHRIAIETEAGLVVIMDIHSEAEP

SEQ ID NO: 64033 - protein, 254 aa, Zea mays
  Coding DNA Sequence Number=SeqID_22254
MAEPQDNHCPKIIGLGLPGEVGEVDAGDADELLEHGAAVKQVVDVPSMDDGSTKSNLLEAGEHGGAAPRECDGVWEAPEVEVEGAEGGKVEDVYEEADGETHFFGFQMVDILYMLCPQLRLNPLTVIMETLLEKESIFGLKSGITVDQNNTKLLKQSLQEKELRTLYLSPRIQFLSLVKATCFYMELLEFGSLSSMVLKVQHKPIKRSKLGFKRKEQNKPKRTLVWRTGLSGVPPDSVRCPQGPYRLNSSPSGF

SEQ ID NO: 64034 - protein, 140 aa, Zea mays
  Coding DNA Sequence Number=SeqID_22255
MAIVGLVEDDRYMCSNVDIVWRTGQQWLDRAKELVMPVVALAGQTVSVVALLNMAMTFVYMLLGFGSSRPPCTAVSSLDDSVKTGLNSLILLDVWVIWKHRSDCVFNRKLPHLTSTLVMTGEEIVAWSMAGAKGLFLLSA

SEQ ID NO: 64035 - protein, 206 aa, Zea mays
  Coding DNA Sequence Number=SeqID_22256
  Subcellular localization annotation: CTP_CleavageSite=37; ConfidenceScore=5.38e-01
MAPFTRTARVAASVGRCAQGLRGVAAGHGRGRLGCTRAARRVEAVAVRSAQGSVRGWGFVASGAPGASSSAAGAGLWARRPGTDGMAPGELGVGSCGALPGREKRGERERDSRVGERREEGGGWEREPGVAAARAFTNRGARSAAAGATPPRVAPASPSPAAISALALPSCNLGVLHGNLVPHPQIGVRAPVPLSYLHAPPTTPAS

SEQ ID NO: 64036 - protein, 64 aa, Zea mays
  Coding DNA Sequence Number=SeqID_22257
MAMCGWHGEDGTPVRNSPRSEDVQASTRSPKASRRLGDPDRWHPETFLQLRYMKDIMHIREMIR

SEQ ID NO: 64037 - protein, 63 aa, Zea mays
  Coding DNA Sequence Number=SeqID_22258
  Gene Ontology: Mol. function=heat shock protein binding; Biological process=protein folding
  Homolog annotation: Hit_ID=Q949C1; Match level="QueryCoverage=85%, HitCoverage=16%, E-value=7e-15, Identity=61%"; Hit description=DnaJ -like protein
MRTITRQIGLDMIQQMNTFCPECSGSAKVVQERTDLEVHIEKGMHYGQKTVFQGEVASSINYL

SEQ ID NO: 64038 - protein, 118 aa, Zea mays
  Coding DNA Sequence Number=SeqID_22259
MAPECLGENDGTRNGGASRDRRGGSGDERGGGMLGFQSLGRRRRRGRTRRPPHTQISTTRRRARRAEHGEETVPPQEGRVNEGGGKGLGEGESGNARGVVAVAEVEEKRGSKVEATEA

SEQ ID NO: 64039 - protein, 83 aa, Zea mays
  Coding DNA Sequence Number=SeqID_22260
MAISVLGGAETGREAEVVAGEICGGGGMVMEDASDHDILTLEIDTKQQARCACTPGNSHDDMELSICDNSSQVISKNAEKISV

SEQ ID NO: 64040 - protein, 117 aa, Zea mays
  Coding DNA Sequence Number=SeqID_22261
  Gene Ontology: Mol. function=protein dimerization activity
  Homolog annotation: Hit_ID=Q337Y8; Match level="QueryCoverage=88%, HitCoverage=19%, E-value=1e-12, Identity=36%"; Hit description=HAT family dimerisation domain containing protein, expressed
MAAFSPKNSYGDFKLESLVELAKLYPDDFTSEELKDPAHDLEIYIDNVQADDRFSNLNTLTELAKLMVDTKKHLAFGLVYRLLKLVLVLPVATASAERLLLYPNFDVCLEAGAFESW

SEQ ID NO: 64041 - protein, 438 aa, Zea mays
  Coding DNA Sequence Number=SeqID_22262
  Gene Ontology: Mol. function=phosphoribulokinase activity; Cellular component=chloroplast; Biological process=reductive pentose -phosphate cycle
  Homolog annotation: Hit_ID=P26302; Match level="QueryCoverage=90%, HitCoverage=98%, E-value=0.0, Identity=88%"; Hit description =Phosphoribulokinase, chloroplast precursor
  Pfam annotation: Domain name=PRK; Domain location=61-260; Score =403.8; E_value=2.5e-118; Accession=PF00485.8; Description =Phosphoribulokinase  Uridine kinase family
  Subcellular localization annotation: CTP_CleavageSite=53; ConfidenceScore=5.69e-01
MAICSAHTTTSLRSPCTTVSNAGLRQKQVIFVTSNRRSGGGRRHGGARSFQVSCSVDKPVVIGLAADSGCGKSTFMRRLTSVFGGAAEPPKGGNPDSNTLISDTTTVICLDDYHSLDRNGRKEKGVTALDPRANNFDLMYEQVKAIKEGQAVEKPIYNHVTGLLDPPELIAPPKIFVIEGLHPMFDERVRDLLDFSIYLDISDEVKFAWKIQRDMAERGHSLESIKASIEARKPDFDAFIDPQKQYADAVIEVLPTQLIPDDNEGKVLRVKLIMKEGVKNFNPVYLFDEGSTISWVPCGRKLTCSYPGIKFSYGPDTYFGNEVSVLEMDGQFDRLDELIYVESHLSNLSTKFYGEVTQQMLKHADFPGSNNGTGLFQTIIGLKIRDLYEQIVAERADVLKLQLSELNGSNNLRICWDIWRARRMSYAYWRALAVCGVA

SEQ ID NO: 64042 - protein, 151 aa, Zea mays
  Coding DNA Sequence Number=SeqID_22263
  Subcellular localization annotation: CTP_CleavageSite=17; ConfidenceScore=5.14e-01
MHAAAPERPTAEPPSPRATGQRRAAWKHALAPARAGAAPASVSLAACVARARSPALWPGTAAVGHVRLGVAPPTSAGAATRAVRPPLPEARELLVVLRVRPFSLATALSLFLLPVELSHTVLGGREIKFGLLTPGAVYRRLSSFVLMPFVN

SEQ ID NO: 64043 - protein, 158 aa, Zea mays
  Coding DNA Sequence Number=SeqID_22264
  Gene Ontology: Mol. function=potassium ion transporter activity; Cellular component=integral to membrane; Biological process =potassium ion transport
  Homolog annotation: Hit_ID=Q4U3W4; Match level="QueryCoverage=84%, HitCoverage=23%, E-value=2e-29, Identity=50%"; Hit description=High -affinity potassium uptake transporter
MQMLFLAMMCIPASATLLSVHDSGSDRKRSGAGEAERKDGTEKKRRLSLNSMLLSPLACNAAAVMLACVTERRSIAGDPLNFSTFNVIFEVVSAYGNVGLSTGYACSRLLPAAAEATTACHDKPYSFSGWWSDQGKLLLVLLMLYGRLKCFHGQRRRG

SEQ ID NO: 64044 - protein, 99 aa, Zea mays
  Coding DNA Sequence Number=SeqID_22265
  Gene Ontology: Mol. function=binding; Biological process=thiamin biosynthetic process
  Homolog annotation: Hit_ID=Q5ZDP1; Match level="QueryCoverage=92%, HitCoverage=10%, E-value=4e-19, Identity=52%"; Hit description =Pentatricopeptide (PPR) repeat-containing protein-like
MHGKTELGRIAVEKLFELDPQDSGNHVLLSNMLASAGRWAEATDVRKEMKNVGIKKDPGHSWITWKNVVHVFQAKDTTHDMNREIQALLAKLKGQICVI

SEQ ID NO: 64045 - protein, 248 aa, Zea mays
  Coding DNA Sequence Number=SeqID_22266
  Homolog annotation: Hit_ID=Q94KM3; Match level="QueryCoverage=30%, HitCoverage=36%, E-value=5e-14, Identity=54%"; Hit description=MURB -like protein hMURB17
  Pfam annotation: Domain name=Auxin_inducible; Domain location=4-114; Score=91.5; E_value=2.6e-24; Accession=PF02519.5; Description=Auxin responsive protein
  Pfam annotation: Domain name=Zea_mays_MuDR; Domain location=70-248; Score=-18.1; E_value=0.00019; Accession=PF05928.2; Description=Zea mays MURB-like protein (MuDR)
  Pfam module annotation: Pfam domain module=Auxin_inducible::Zea_mays _MuDR; Domain location=4-114::70-248
MMVMGYFRSSTTKSATAAAKQKARTTREELGLREALLDQPAAAEEEGGVPKGYFAVYAGEESRRRFVVPTGYLREPAFRDLMERAADEFGFAQAGGLRVPCAEEDLEDLLRRLQRKNAAGKGKKKATVCRSGKCWMQDFRYDAPRQAGPFQSSPPFHKDVWPLPTVCVGTMSSSILEVDGGKLGKLAGHLDHVCRMLEKTSIVCEQDLENKCLGWDLYDPPSDVAGDTSGVEDLEDGYVSAVDPSFSH

SEQ ID NO: 64046 - protein, 141 aa, Zea mays
  Coding DNA Sequence Number=SeqID_22267
  Subcellular localization annotation: CTP_CleavageSite=19; ConfidenceScore=5.79e-01
MTLMLQHTGVPIPPSSVSTASTSSGSCCASYLARTPLPAVGPSSSPLRPVTLVFTSPVIGSVSSQPPVPPAPAVITAVVAVSVTSSAPAAPAAQPPSESVPAPASTADPESETDSDPQLSFALLPRPRPDAPPPPPPSSDV

SEQ ID NO: 64047 - protein, 264 aa, Zea mays
  Coding DNA Sequence Number=SeqID_22268
  Homolog annotation: Hit_ID=Q9FN45; Match level="QueryCoverage=72%, HitCoverage=75%, E-value=1e-27, Identity=34%"; Hit description =Genomic DNA, chromosome 5, P1 clone:MYJ24
  Pfam annotation: Domain name=DUF617; Domain location=86-261; Score =172.3; E_value=1.2e-48; Accession=PF04759.4; Description=Protein of unknown function, DUF617
  Subcellular localization annotation: CTP_CleavageSite=53; ConfidenceScore=5.28e-01
MKKNKSGASNYLCLAPIFNSCVSSGKQQPSNADAAARNRLSFSFPERQQQPAPAEEEQNSESIIDPAASVIARKEKEKDGGKHCAVIVGTIFGRRAGRVTFCVQRDAAVPPPFLFELSVPTQSLATEMGSGLLRIALECHRGAGDDHRSSVWRASCNGRDVGHAVRRRPTEWDRQVLDSMRTMTTGVGALPPAVAMGRPNDGDDGDAQQDGDGGAAGEVLYMRATYERVVGSRDAVSFHLINPGGGGASPPQELSVFLLRTRGD

SEQ ID NO: 64048 - protein, 93 aa, Zea mays
  Coding DNA Sequence Number=SeqID_22269
MASSSLLSAARCLFRAMCMPVAATAWVAMLLLQQHRGGGATEPPAVNAVADAGAPRIGGAARPGNRLRDTDPQRVVKKLRTRRRAASTARLSR

SEQ ID NO: 64049 - protein, 63 aa, Zea mays
  Coding DNA Sequence Number=SeqID_22270
MAALATVVQRLFEACREVFTGAGPGAVPPPADVERIKRESERLGTYAATVKGSSDHGDLNLDE

SEQ ID NO: 64050 - protein, 145 aa, Zea mays
  Coding DNA Sequence Number=SeqID_22271
MGKSKKGGSSSHHSGDKRKREPTPPSEDFGDSEYSEEEFSSKSEGSPVPASPPASSDDSDDFQGIAAEVWTYIRAVERAGLEGSDESGGSSDEEDSSDSSEEGGGDGDGEGDDDGDGKGGSGDGGGKGGSGDGGDGSKGSNKASG

SEQ ID NO: 64051 - protein, 543 aa, Zea mays
  Coding DNA Sequence Number=SeqID_22272
  Gene Ontology: Mol. function=DNA binding; Cellular component=nucleus
  Homolog annotation: Hit_ID=Q2HUC6; Match level="QueryCoverage=37%, HitCoverage=29%, E-value=7e-24, Identity=34%"; Hit description=ELM2; AT-rich interaction region; Homeodomain-related
  Pfam annotation: Domain name=Myb_DNA-binding; Domain location=362 -412; Score=25.1; E_value=0.00025; Accession=PF00249.21; Description =Myb-like DNA-binding domain
MAEKAAAADCSRLKWLLASQTAFKGLLTAHAETRHTILVRWDVDLTDKVDATVEMQWQRNVCKPGDVLPILITVLGTRALIGWALGFLLRAIAKEGEESISIFCVTVAHNKLTTKWIRAAPPITCAQPNIQISQPLVKQSTVDNMLSTHEANADQFDLLSYALYDGLVEIKQPNDIPAINGATTCSGSSVIPCRNHDQSILVENLDIPDWATSFPGYFEDCGPVVTYSHVDDIGSPRKGVPIGPEHQADIPEWRPLNSMIVPGASEFCANLDCSSASTSESVPRGDDYVSDKWIRYCVVPVTCCSSPVDWAGDSKIDCNCSDEGSMRCSRQHIIEARDNLKMILGQDRFRELGLCEMGEDVALRWTDEEEKLFQRVVFLNPVSLGKNFWDHLPDAFPNKTSQEFVSYYFNVFMLRKRAQQNRSDVLAVDSDDDELHGEPLAERVEGDPAVESSTHEHSVSNSLPMDDDHKEFEGAQFDGSLCEKSVYNAVECRHLPNQMPADSNTVNTALDVCDQDNGAQCSEFHMSLPSDTSNSLGDQSASV

SEQ ID NO: 64052 - protein, 364 aa, Zea mays
  Coding DNA Sequence Number=SeqID_22273
  Gene Ontology: Mol. function=nucleic acid binding; Cellular component= intracellular; Biological process=chromatin modification
  Homolog annotation: Hit_ID=Q75GS7; Match level="QueryCoverage=92%, HitCoverage=96%, E-value=3e-60, Identity=40%"; Hit description =Putative zinc finger protein
  Pfam annotation: Domain name=zf-C2H2; Domain location=238-260; Score =8.6; E_value=1.2; Accession=PF00096.16; Description=Zinc finger, C2H2 type
  Pfam annotation: Domain name=zf-C2H2; Domain location=300-322; Score =19.7; E_value=0.011; Accession=PF00096.16; Description=Zinc finger, C2H2 type
  Pfam annotation: Domain name=zf-C2H2; Domain location=32-54; Score =11.4; E_value=0.6; Accession=PF00096.16; Description=Zinc finger, C2H2 type
  Pfam module annotation: Pfam domain module=zf-C2H2::zf-C2H2::zf-C2H2; Domain location=238-260::300-322::32-54
MTMTEWAHWKIGPPVAKKPSWRPGQTRHATRHSCKVCRKGFPCGRSLGGHMRSHSLADELDDEEEHQQRQGLDCATAPGAGGHGLRDKPKKTRRLSSLSDCGGRGDVFSPCESNVDYRRARGGGKAMELERDWKQEGLMPPPRRRRSMRVPARTPPPTAFDKEPEDVALSLIMLSCDIVDRRGCSTAVGAKYSPGEDSTRRDYQYEYHHHDADSNDGTKINKRKLHHSDVGDEKRGRYECPVCGRTFRSYQALGGHRASYKRINSNCSIAKPILDYQPEPKPSVETNTTSMVSNNRTIKFECRICFRVFSSGQSLGGHKRSHSIAGELYEHVHSVDDDDVGDDEQPLISDEFLDLNLPAPGVED

SEQ ID NO: 64053 - protein, 152 aa, Zea mays
  Coding DNA Sequence Number=SeqID_22274
  Subcellular localization annotation: CTP_CleavageSite=35; ConfidenceScore=5.17e-01
MAKSWLGGGASTSWSLSVLLLLFVLVGRKRGWLSMASLGKSHKVRVHKGSTQTNKRLKLGIKFKGAKKPSVLWPGAPDCLVCHRTVFGAPGPYRVQRATLGLQQVHSAKNHRTVRCASGAMTTSHNGRLQKFLKQGTVRDRVRAQSQRRTGQ

SEQ ID NO: 64054 - protein, 77 aa, Zea mays
  Coding DNA Sequence Number=SeqID_22275
MARVARTLLAKDRLKGVHTLESLFFSRVSGLVSDEYREEAPAPTPSVENGVAWRWRHEGREKRSGMANEKKMTQDDR

SEQ ID NO: 64055 - protein, 45 aa, Zea mays
  Coding DNA Sequence Number=SeqID_22276
MQPDEVEEEGHDLERLGRLRVAERMRARETAAATKNQRKGENDDA

SEQ ID NO: 64056 - protein, 458 aa, Zea mays
  Coding DNA Sequence Number=SeqID_22277
  Homolog annotation: Hit_ID=P12862; Match level="QueryCoverage=28%, HitCoverage=25%, E-value=2e-63, Identity=96%"; Hit description=ATP synthase subunit alpha, mitochondrial
  Pfam annotation: Domain name=ATP-synt_ab_N; Domain location=16-84; Score=87.6; E_value=3.9e-23; Accession=PF02874.13; Description=ATP synthase alphabeta family, beta-barrel domain
MTLLESRMINFYTNLKVDEIGRVVSVGDGIARVYGLNEIQAGEMVEFASGVKGIALNLENENVGIVVFGSDTAIKEGDLVKRTGSIVDVPAGKAMLGRVVDALGVPIDGKGALSDHERRRVEVKAPGIIEPKVQYRSHKGASPISSGDANASPTRGPPTLNCATFLLLADRGSLVHSSGFPAASGSGPSLNPDVASTPSSSFFQGVGSALEAATAPAEPGEEVQQGAIEALNVAALPGVPQDELFGAISQNLGIALPQVPAAPPAAPIHQDIEPMIQSAKSSIYNNLTTLHGSMDPKEATELMETIFYKKSQILQELERLNGLINGPILWKDGWDTIRNPQSGKEYQPNTLDMIWRSLQRYGLNSDYYKNFLNERVHTMENEKSTKLKLEDLTIAKLDSLNQAKLIVGRLELENEIRIIKKELRYLDFSSMKKVGKCIAMIGYKSQNSSYTMLENKLI

SEQ ID NO: 64057 - protein, 171 aa, Zea mays
  Coding DNA Sequence Number=SeqID_22278
MASPANSIVSWEQLPMTWWDRILSTKRQQRDAQGSHSAERHGEKRPRRGAASFHAGCRKGTEPSRTLDRAQGGADELQQEAKARSGSATIVACELLAGARAMATMGGGSSAARALGWDDRAEERSREEAREKLHGKTRRSWEMTAGEEEMKLGTPEATASDQRSKLQGAIG

SEQ ID NO: 64058 - protein, 48 aa, Zea mays
  Coding DNA Sequence Number=SeqID_22279
MRNMLANEGVRSFYKGLSAGLLRQATHIDCSSWILQPLPPPDGPRLQQ

SEQ ID NO: 64059 - protein, 85 aa, Zea mays
  Coding DNA Sequence Number=SeqID_22280
  Subcellular localization annotation: CTP_CleavageSite=66; ConfidenceScore=5.80e-01
MTSSSKFEFLPKSSNNSSKKFLSVCLSSGITLNIVVTSLTRTSSPRFRFVDRICSSLSIYEKTEMSSSNARSKGFDWKDVKVLCC

SEQ ID NO: 64060 - protein, 292 aa, Zea mays
  Coding DNA Sequence Number=SeqID_22281
  Gene Ontology: Mol. function=oxidoreductase activity; Cellular component=membrane; Biological process=response to oxidative stress
  Homolog annotation: Hit_ID=Q8GVG6; Match level="QueryCoverage=64%, HitCoverage=48%, E-value=9e-64, Identity=67%"; Hit description =Putative peroxidase
  Pfam annotation: Domain name=Extensin_2; Domain location=6-279; Score= -142.8; E_value=0.1; Accession=PF04554.4; Description=Extensin-like region
  Pfam annotation: Domain name=peroxidase; Domain location=106-292; Score=239.4; E_value=7.8e-69; Accession=PF00141.13; Description =Peroxidase
  Pfam module annotation: Pfam domain module=Extensin_2::peroxidase; Domain location=6-279::106-292
  Subcellular localization annotation: CTP_CleavageSite=20; ConfidenceScore=5.18e-01
MMSPSKLAVLTVFALLGSVSSQGGSYYYTPPAPATPQPPPCPPPVTPVPPPTSPPTYPPPTPTSPPAPTPTPPPPPPPPPSSPGTQLTVGHYKNKCGAYVDVEAIVKKHVSATDAGMQAGLVRLFFHDCFVRGCDGSVLLDTFSNDTSLTPEKFGVPNFPSLRGFEVIDAAKDEIEAACPGTVSCADIVAFAARDASYFLSGGGISFAMPAGRYDGTVSLASETLPNLPPPFAGFDQLVKMFDDKGLDAFDMITLSGAHSIGRSHCSSFTRDRLPPQQHLRHGPGVRRHAAG

SEQ ID NO: 64061 - protein, 155 aa, Zea mays
  Coding DNA Sequence Number=SeqID_22282
  Subcellular localization annotation: CTP_CleavageSite=48; ConfidenceScore=5.49e-01
MLPPPHATPAIPGPSPHPPPQPAPTPIRTARGARTVATDERVLAEFLEASLRVPDLSLPPRKCFIFPPPAPERDGVPSHALISGDVDAEQRAIAAAAEFGAFRMTGAVEAREVREAVEAASGLVFAAPEEVKRGLERWFRRRDQEPQRSSFGSGR

SEQ ID NO: 64062 - protein, 656 aa, Zea mays
  Coding DNA Sequence Number=SeqID_22283
  Gene Ontology: Mol. function=kinase activity; Cellular component =cytoplasm; Biological process=D-ribose metabolic process
  Homolog annotation: Hit_ID=Q10H44; Match level="QueryCoverage=86%, HitCoverage=96%, E-value=0.0, Identity=66%"; Hit description=PfkB -type carbohydrate kinase family protein, putative, expressed
  Pfam annotation: Domain name=PfkB; Domain location=273-616; Score =48.5; E_value=2.3e-11; Accession=PF00294.14; Description=pfkB family carbohydrate kinase
MVASSIGIKGSTTNVSMDVRRYNSMPFHYTGEEEEIGTSRAKKIGLGKCGGGPISFDLRRRRHRGERCAMRRLGRKTTGYANRIRKRINGIRLFWGQIHYKTNNMGKNMAKSTVSLLNRSANFASRTSQDAVDGLSDESDGETSTKKKRTPRRGRKKATVETSRDVGEEIEVITEQTAAEETKEVKRRGRKKAATSASSEEEKDKAKEPKKRGRRKVKTVEEPIDNAGEHLSKDLMLYNEREDQTRLQNSASVLESKIASVLHEDIGEVDDLIPLVCCFGPAKYSFIPSGRPANRLIDHEIHDRMKDMFWSPDKFVRAPGGSSSNVALALAAIGGRVAFMGKLGDDDYGQSLLYHLNINGVQTRAVYMDPSAPTAVSLMKVRTEGSLKTNCVKPCAEDCFLPSDINPAVLKEAKMFYYNSSALLEPTTESSLLKAIDVSKKFGGTIFFDLNLPLPLWSSSKETKSLIKEAWEAANIIEVTKQELEFLCSIKPSEKFDTNDNDKSKFTHYSSEVIMKLWHSNLKVLFVTNGTSKIHYYTETHNGWVRGTEDAPITPFTGDMSQSGDAIVAALMRMLVINPHLITDKVYLHKAVKHAIKCGVIDQWVLARERGFLPKERADPTSEQYEVKSITEREYRTLPDAMQSENTSTSELAYVE

SEQ ID NO: 64063 - protein, 75 aa, Zea mays
  Coding DNA Sequence Number=SeqID_22284
  Subcellular localization annotation: CTP_CleavageSite=22; ConfidenceScore=5.36e-01
MALHVQVLGALVLVPMVSIRPLGNSSSGSRGNSSEFRPLGNLSFGDFSRREEAEIAKNLNLQRYHVLMGDEQLTT

SEQ ID NO: 64064 - protein, 115 aa, Zea mays
  Coding DNA Sequence Number=SeqID_22285
MDCSSAAATVERDVEPSSSIWTAKEAVRASVGSPWPWHRRNDAQRCAERQRRHGRHRVAEHALRSMEGAHGRGGRLRDARQVQVDGFPLHHRLVEEREGNAGDVRGGQAGPERRQ

SEQ ID NO: 64065 - protein, 67 aa, Zea mays
  Coding DNA Sequence Number=SeqID_22286
MAASSAVEKLKVLWDSQVNDEEQWALNYVRTPFPSLRILYLFKLLKAAGLFAGSIFLMRNFGDLMAI

SEQ ID NO: 64066 - protein, 75 aa, Zea mays
  Coding DNA Sequence Number=SeqID_22287
MAGGRWLLGPLESLDAAPGSGRVAAGPLDAAPGSGRARCMAAGGGWRRRRAAADAWGVEARIGDRLTRGKTSKPN

SEQ ID NO: 64067 - protein, 457 aa, Zea mays
  Coding DNA Sequence Number=SeqID_22288
  Gene Ontology: Mol. function=glycerophosphodiester phosphodiesterase activity; Cellular component=periplasmic space; Biological process =glycerol metabolic process
  Homolog annotation: Hit_ID=Q6AUZ6; Match level="QueryCoverage=81%, HitCoverage=94%, E-value=1e-164, Identity=73%"; Hit description =Putative phosphodiesterase family
  Pfam annotation: Domain name=GDPD; Domain location=110-420; Score =234.6; E_value=2.2e-67; Accession=PF03009.8; Description =Glycerophosphoryl diester phosphodiesterase family
MGCHLLGLAWHGHDGRLWLTAAAELRLATPCLEEDADTAQSRRATVAAAKRTLAVGVGLPSRVVLALLLLIGVSGSGATQAASPHTHHSRQLDVNHKKPVQTFRPINIAHRGSNGELPEETAAAYLRAIEEGADFIETDVLASKDGHLVCFHDVTLDATTDVADHAEFAGRKRTYEVQGEDVTGWFIVDFTLEELRSLRVKQRFSFRDQRYNGKYQIITFEEYILIALYADRTVGIYPEIKNPVFINQHVKWSDGKRFEDKFVETLLRYGYGGEYMSDGWLRQPLFIQSFAPTSLIYVSNMTDSPKLLLIDDTTVPTQDTNQSYHEITSDAYLAFIGSYVVGIGPWKDTLVPPDPTDNRLGRPADLVARAHALRLQVHPYTFRNENQYLHFDFRQDPYAEYAYWLDEVAVDGLFTDFTGSLHKYQEWTRPYRKEQEKTSPEALLREIAGMLKNDGYD

SEQ ID NO: 64068 - protein, 58 aa, Zea mays
  Coding DNA Sequence Number=SeqID_22289
MVHLLLKERNRYLKNMALIKEDQMKKKSRRKKKSFLDPKMLFKDPDYVGDAKKEPNNF

SEQ ID NO: 64069 - protein, 302 aa, Zea mays
  Coding DNA Sequence Number=SeqID_22290
MKFRFEHEYVTIHTTQILELFGFPKSSTRLHSLCYGNSDPPHRPHGGVAPNTAHVATLFRPPFIDNSRCSPVDFTLAVKFLYELMRRTLLPWMGYREATTHIQLWLLGALVSHSMFDVVDFLIYEIEDTLLDSLRARRQLPYAHYLCHIFAQLIRPPQFQAELDSTRLKFGFYRPAPEDTIPVNAPLDPLAPEHRNEDKVIRQLEDQATVVDTSLDSDDEDLGIPPPPLPPRTHDHEAGGSSAAPPSTPPAIYPALTAIIQSLTQQQAHLAVEQTRQEAIQQQMSERMLSMFQTIQDRQDTL

SEQ ID NO: 64070 - protein, 144 aa, Zea mays
  Coding DNA Sequence Number=SeqID_22291
MGKEQTRRKRRANFFHREEFGDLGVFRGRSFPSESEGSLAPHPPAGSRRRVWTYIRAVERSGLEGSDESEYSSDEEDSDGGGEDEDDDDDEDGGGGDGDGSGRGGGSGSKDGDGGGSRGGSGGGGSSRGSTRGGSGGGSNRASG

SEQ ID NO: 64071 - protein, 146 aa, Zea mays
  Coding DNA Sequence Number=SeqID_22292
  Gene Ontology: Mol. function=nucleic acid binding; Cellular component= nucleus; Biological process=mRNA processing
  Homolog annotation: Hit_ID=Q84L59; Match level="QueryCoverage=74%, HitCoverage=25%, E-value=7e-15, Identity=39%"; Hit description =Polypyrimidine track-binding protein homologue
  Pfam annotation: Domain name=RRM_1; Domain location=48-115; Score =19.2; E_value=0.0024; Accession=PF00076.12; Description=RNA recognition motif. (a.k.a. RRM, RBD, or
MACEIGARDYGGLSSDLGRGRSLQNGARKLFGEMPRSDWRSPSRVLEVTIRQVRYPITESVVRAVFAPYGKVEHVHMFGDSDHVLAHVVFETKHEAAGAFGDLHGRNIYDGCCELNIQWGASQDHINANTDKSCYDHVSSYSLIVA

SEQ ID NO: 64072 - protein, 265 aa, Zea mays
  Coding DNA Sequence Number=SeqID_22293
  Gene Ontology: Mol. function=peroxidase activity
  Homolog annotation: Hit_ID=Q00UY7; Match level="QueryCoverage=80%, HitCoverage=78%, E-value=2e-31, Identity=35%"; Hit description =Homology to unknown gene
  Subcellular localization annotation: CTP_CleavageSite=40; ConfidenceScore=5.04e-01
MELCLAARAGTTAAACRRRAPTTTGVPKKKRHGGGTVRVRCAATAPMGEKTEYRDGPLERAFMGLFARKMEKYAAKKPAAQAKEERAVWEWDYESFVDVSRRVMLGRTRAQQQQAVREVLLSMLPPGAPAQFRRLFPPTRWACEFNAALTVPFFRWLVGPSEVVEVEVGGVRQRSGVRIEKCRYLESSGCVGMCVNMCKVPTQDFFTNEFGLPLTMNPNFEDMSCEMIYGQVPPPLEEDPASKQACYPSLCSMSTPSAPACPKLQ

SEQ ID NO: 64073 - protein, 146 aa, Zea mays
  Coding DNA Sequence Number=SeqID_22294
MRQMQPTDHQHPSSSERAPPLAAAVGKDDGASSSSSSVVVKIDDLRCHGDWGAAAGSAAVDVCLAAAAVAGAALLAWWAVAFHPSYAQLWMVPLGLVLAGTPPVVCLALRFSPDARAPPPPGKDGPAGARAPPPPPPLVAVVIDKQ

SEQ ID NO: 64074 - protein, 306 aa, Zea mays
  Coding DNA Sequence Number=SeqID_22295
MTGGQEVHARTHRPQKPALDGDAKSKTGCGRLLVLAPVGFGFALDPRRADEEALSSSRPAVGSPPRNRNPTVCTVACAVVCIGGITHSLLAIAHRYYGPCVTGTAHADALHAPLPPPCFLARLSYKTVPGRTRRRANPLTHCDAADAPHRPRPPGRAHPPSTPTHAGEPSQPPTSPPGPGLDQTQIQMHLLDDLRQDRGGAAAHTGSRSRKPPPPLAAAAAAAAGVPAGSSTAATATHLGPEAAALLACVTATLLLLPLVLPPLPPPPPLLLLVPVAIFAVLLLLVLLPSDARAAVATPTSSASYL

SEQ ID NO: 64075 - protein, 373 aa, Zea mays
  Coding DNA Sequence Number=SeqID_22296
  Gene Ontology: Mol. function=DNA binding; Cellular component=nucleus; Biological process=regulation of transcription
  Homolog annotation: Hit_ID=Q5Y5S4; Match level="QueryCoverage=88%, HitCoverage=88%, E-value=1e-112, Identity=64%"; Hit description=NAC transcription factor
  Pfam annotation: Domain name=NAM; Domain location=34-161; Score =272.5; E_value=8.3e-79; Accession=PF02365.6; Description=No apical meristem (NAM) protein
MGGASGGDQQPQQHGGADDADDGHLQQASGGDMVMPGFRFHPTEEELIDFYLRRRVEGKRFNIELINLVDLYRYDPWDLPALASIGDKEWYFYVPRDRKYRNGDRPNRVTPSGYWKATGADRTVYVEVKRPIGLKKTLVFYVGKAPKGLRSSWIMNEYRLPSGEADRYQKEISLCKVYKRPGIEDNFHLSTTTARSSGSKAAANMDKKHHRTSASPRLAPMFDGGHSSAHMNKPYGGANTAIAITSSAAARAVTMVPQTSMFLSTPSLSSTTSTEEDGTSLYLMKGANNSPMLHSSTHALLNANSATMATIPIDELSRAIGSYSSQGNPNHPLPSQGPLLPFPSMEKIWDWNPLLESPKVCVYVQAPQNYYLG

SEQ ID NO: 64076 - protein, 54 aa, Zea mays
  Coding DNA Sequence Number=SeqID_22297
MKEIPTNGPHLSVPRYLGVGVFLSAEGPQDEGVIDKDMLRILFPARGPQDEDVI

SEQ ID NO: 64077 - protein, 86 aa, Zea mays
  Coding DNA Sequence Number=SeqID_22298
MGIPHTSGFGRLAAAPAVVCCHCAVHHVSWHWPALAATKAYLLVVARRTNSEGQAFEESYLIHVPLIVAVLGVEEAEGADVKDEGI

SEQ ID NO: 64078 - protein, 38 aa, Zea mays
  Coding DNA Sequence Number=SeqID_22299
MEQAMSDCEEMFCEEIMQHQLSWFLEQAQQQPSVFPQF

SEQ ID NO: 64079 - protein, 76 aa, Zea mays
  Coding DNA Sequence Number=SeqID_22300
MVGFADHGPQNSTVVVLEGTGGGTRRDRGGCVKAKELRVKDVAVGSKTNELVHFAPGGVDRLYVNNGSLGSENNPL

SEQ ID NO: 64080 - protein, 270 aa, Zea mays
  Coding DNA Sequence Number=SeqID_22301
  Gene Ontology: Mol. function=zinc ion binding
  Homolog annotation: Hit_ID=Q7XI22; Match level="QueryCoverage=51%, HitCoverage=63%, E-value=2e-74, Identity=97%"; Hit description =Putative ES43 protein
  Pfam annotation: Domain name=BAH; Domain location=22-139; Score =143.6; E_value=5.4e-40; Accession=PF01426.8; Description=BAH domain
MAGKSRPPKRILESYTIKGSDRVIKPGDCVLMRASDASKPPYVARVEAIEAAGSRGTNVRVRVRWYYRPEESIGGRRPFHGSKEVFLSDHYDVQSADTIEGKCNVHSFRSYTKLDSVNAEDFFCRFEYKSATGSFVPDRIAVLLIGTRVGQGLIGVNHVKNQRNDLFCVDSAKIITFMSFFKNPNIVIVIENGVKGIGDLGMSSPFPNLGLSAISDAAGVSSHDALPSLRLPSLIASSTVLLAAAASPLTHAAASSQLGCGAAPMLAAGV

SEQ ID NO: 64081 - protein, 428 aa, Zea mays
  Coding DNA Sequence Number=SeqID_22302
  Gene Ontology: Mol. function=(R)-2-hydroxyglutarate dehydrogenase activity; Cellular component=mitochondrion; Biological process =electron transport
  Homolog annotation: Hit_ID=Q7XI14; Match level="QueryCoverage=93%, HitCoverage=67%, E-value=1e-159, Identity=72%"; Hit description =Putative actin interacting protein
  Pfam annotation: Domain name=FAD_binding_4; Domain location=138-297; Score=115.9; E_value=1.2e-31; Accession=PF01565.13; Description=FAD binding domain
MPRREAARLLRRLGPIAVQSPKRGFSGMPHNQYESTNHAVNSYRRFHWIPSVQHPLCGPTSSGGIYEGQRSANKACEVQKRTFGSAATQFQRNPAYSVLNSDDIAYFKSILGENGVVQDEDRVAVANVDWMGKYRGASQLVLLPKTTTEVSKILSYCNTKRLAVVPQGGNTGLVGGSVPVFDEVIVGLAGMNKIISFDNLLLQMHPRAMVNGILTCEAGCVLENLSTFVENEGGLVDLDLLLRFIMPLDLGAKGSCHIGGNISTNAGGLRFIRYGSLHGNVLGLEVVLADGTILDMLTTLRKDNTGYDLKHLFIGSEGSLGVVTKISVLTPAKLSSTNVAFLSCNDYTSCQKLLLAARRSLGEILSAFEFMDHHCIDLAMQHLEGVQNPLPASPYKFYVLVETTGSDESSDKLYHFSLFETNLVLNSN

SEQ ID NO: 64082 - protein, 120 aa, Zea mays
  Coding DNA Sequence Number=SeqID_22303
  Gene Ontology: Mol. function=nucleic acid binding; Cellular component= ribonucleoprotein complex
  Homolog annotation: Hit_ID=Q7XI13; Match level="QueryCoverage=90%, HitCoverage=22%, E-value=2e-21, Identity=53%"; Hit description =Glycine-rich RNA-binding protein-like
  Pfam annotation: Domain name=RRM_1; Domain location=9-78; Score=11.7; E_value=0.012; Accession=PF00076.12; Description=RNA recognition motif. (a.k.a. RRM, RBD, or
MAEEKVGRIFVGGLSWNTTERTLERTFGQYGKVIEAQSYNFILIAAADSQRLQSVQFLHVRKLAKLQEKKFTNHLSSLVVVERETGRSRGFGFVTFSVPRAVDAAIRGMHFLVWMAAIFL

SEQ ID NO: 64083 - protein, 169 aa, Zea mays
  Coding DNA Sequence Number=SeqID_22304
  Homolog annotation: Hit_ID=Q8LR04; Match level="QueryCoverage=47%, HitCoverage=60%, E-value=2e-22, Identity=66%"; Hit description=LIN1 protein-like
  Subcellular localization annotation: CTP_CleavageSite=59; ConfidenceScore=5.26e-01
MASAAKTLARVGSSLFGRILASPSSSIPRAGLPLARLQPHVPPPAPAGVDAYEAETIARLSSLPGEISFPCGLPSLRFFIDDVDRWHEVAVAPLAHQTVRVKFPGAPDTVRWCTGQSGVVQSELFNFGFLRRRSAIIHGTVRCTIGAMAIQRNGHMQKCEQCAQKSEQA

SEQ ID NO: 64084 - protein, 103 aa, Zea mays
  Coding DNA Sequence Number=SeqID_22305
  Subcellular localization annotation: CTP_CleavageSite=73; ConfidenceScore=5.36e-01
MKLWKETSRSSKITTSSRCGLAATPSRLPVKAAVIYVSFPHFDLLGSSALTNSRGQVSEKSRKRVLSVVALTKAAMASVNVGGTCGGLGVSSRQWDVPAPSCA

SEQ ID NO: 64085 - protein, 92 aa, Zea mays
  Coding DNA Sequence Number=SeqID_22306
MVVACLTVIICSLLSGPTRHSGSILCHLLALRLPDCSDWWLGQEDSVPDYPVSGTNSFLIDCSDDTAANAEGTTSGTAADVNAGSAAEGDSA

SEQ ID NO: 64086 - protein, 198 aa, Zea mays
  Coding DNA Sequence Number=SeqID_22307
  Gene Ontology: Mol. function=iron-sulfur cluster binding; Biological process=electron transport
  Homolog annotation: Hit_ID=Q1R7F0; Match level="QueryCoverage=55%, HitCoverage=11%, E-value=6e-44, Identity=83%"; Hit description =Possible hypoxanthine oxidase XdhD
MMSRGGGISSAARKQSACASVQRSVKQLHRCRHHRLHTILLASSATIWDEPWASIAQQHDPALQPGTTQIRVTVSCLGSFSGPRAGLVWPENTGGDIFARARTDREVDDHMLAALGCMAVIVFQSIWRTSNIHHRFIVHDRRIFRHCFVDRHYRLKHFIFNVDELQCFERNFFTFCDDRSNTIADVTHFLAEHTAVKR

SEQ ID NO: 64087 - protein, 371 aa, Zea mays
  Coding DNA Sequence Number=SeqID_22308
  Pfam annotation: Domain name=DUF593; Domain location=10-102; Score =62.6; E_value=1.3e-15; Accession=PF04576.6; Description=Protein of unknown function, DUF593
MAGVEEEGEVAALREALRQQVQAVEELRAELEEERQAAASGADEALAMILRLQAEKAAERMEAEQFPPGGQGADPEMEISSLNRRLLAVHATGDDPLSPAVDLPWLRKLAKSGVASRRNASLPAAHLEELCSELDVVVDTDADKKRVGDRRPARTVSDIGEVISREKEWATRPNQTAPTPRLYRSASHSHGLPRRATCCSAQCGVRSAGRASPEIIAEEDEKSCKSNAALEADIEQIKATVLSLHTDLTKLRESTLSMADAHSQILAEIHAKLDGVTPRRQTNFEPRSELLLKKATRGGSSNSSSSSKEQSYQYQWQADVLMNHFIEVRGLTFSATTVVRPLMKAAASMSLFRCLLILGLAVAIRKVLINS

SEQ ID NO: 64088 - protein, 54 aa, Zea mays
  Coding DNA Sequence Number=SeqID_22309
MARSTAVNSDEERLAVVVEGEAEGALILIGASVGASLGFLSLPSLDDPEELAQI

SEQ ID NO: 64089 - protein, 50 aa, Zea mays
  Coding DNA Sequence Number=SeqID_22310
MASNRVGTGMMEGLARGQRMFKEIGHHLIFGNKGFEFWKTGNTFDLEKGF

SEQ ID NO: 64090 - protein, 88 aa, Zea mays
  Coding DNA Sequence Number=SeqID_22311
MWRTSSNLKMGSIATLGEPPPHLSSVRPSISVIEDVLNAIKYSGANASLKKLCPILSTMSTATVWVAPRHGGSEFESTKNMLRNMINQ

SEQ ID NO: 64091 - protein, 45 aa, Zea mays
  Coding DNA Sequence Number=SeqID_22312
MATEGDPYFVLDGVKEKGLIVKSAAKSIFIRRERDIWARCSAIRP

SEQ ID NO: 64092 - protein, 76 aa, Zea mays
  Coding DNA Sequence Number=SeqID_22313
MARDGQWQTVQRTVADGPTRLDNAGAAGSAVLRRTTRRSWDGAADNSGWFGRRSARPGHCAGVTVADSGIARGRER

SEQ ID NO: 64093 - protein, 108 aa, Zea mays
  Coding DNA Sequence Number=SeqID_22314
MLETSVHLTGAHRSSFNVASETLGGLRLINLGEIGEHLEEEFEVEGEPVPRSETSPTEVVSEGPPEGALVGFVANCNILVEEPNSPPHEGKLQCICPFLIIKMLYHLI

SEQ ID NO: 64094 - protein, 62 aa, Zea mays
  Coding DNA Sequence Number=SeqID_22315
MEERAEGLTGGEIAPARWSSDIKAVHGKNWKMAQRLTRSMFAGERKKSGEGDLGSPVKLCRF

SEQ ID NO: 64095 - protein, 91 aa, Zea mays
  Coding DNA Sequence Number=SeqID_22316
MATRVLQVVGFVRVYWTWPIYFTIKPKTNLKDPLIHDGSESDEDKECKRAHGAIEYKYGASNVGYELYVIEHCYDYKMIGNYSKVDQSYEI

SEQ ID NO: 64096 - protein, 910 aa, Zea mays
  Coding DNA Sequence Number=SeqID_22317
  Gene Ontology: Mol. function=microtubule motor activity; Cellular component=microtubule associated complex; Biological process =microtubule-based movement
  Homolog annotation: Hit_ID=Q6WJ05; Match level="QueryCoverage=88%, HitCoverage=72%, E-value=1e-152, Identity=59%"; Hit description =Central motor kinesin 1
  Pfam annotation: Domain name=Kinesin; Domain location=186-681; Score =342.0; E_value=1e-99; Accession=PF00225.13; Description=Kinesin motor domain
MARWLQSAGLQHLATSSAAGAGGADYRGGMPGFGGAGAGSMLSSLLMQGYGPESIEEKQRLYTLLRGLNFSGESVPTSISEPYTPTAQSFGGGNPVEGFYSPELRGDLGAGLLDLHAMDDTGLLSEDVASEPFEPSPFMPKDIDDDDEDVIAGSQQASVDNYGVVTSEKETTARENNVAKIKVVVRKRPLNRKELSRKEEDIITVEDSSFLTVYEPKLKRGGSGRTTEVALILRKLAREGVGGGALLLPGKGSCLLCFLAAAVVALVASRVDGATTTSWEGGAVAVPPNAKAEVGGAPRSTGDNIAAPAAPPERRVARRQMRCGWRCNPDEGLGAFGDASPHAALVREDGERGLKEAGDVPILAGVGWRQREVGQRFLEAVHDEGAAMDGHRRWWPGEVDLTAYVEKHEFCFDAVLDEHVSNDEVYRETVEPIIPIIFQRTKATCFAYGQTGSGKTYTMQPLPLRAAQDMVRLLHQPVYRNQNFKLWLSYFEIYGGKLFDLLSDRRQLLMREDGKKQVCIVGLQEFEVSDVQIVKEYIERGNAARSTGSTGANEESSRSHAILQLAVKKHIIVKDTRRQRDRDANEAKNTKAVGKISFIDLAGSERGADTTDNDRQTRIEGAEINKSLLALKECIRALDNDQIHIPFRGSKLTEVLRDSFVGSCEHTLNTLRYADRVKSLSKGGNTRKEQSTGPTTTSSRDSLSALSYSLPAEAEEIPNQVQEKRPVDTYRKGTEKFLSPTLLWSLTEIPLVRFQIIPIEGEKKMVQHLEEEKVTKVSPPRRKAYREDKSDRQSNYMKKDNGPETSRVGYKMQQAKQLQQQQRPASASASSRQSEKESSCDDVEIDAILEEEEALIAVHRKEIENTMEIVREWSLAAPKRLARAWLPRYRNETRFSTTWIVARCCIPQCR

SEQ ID NO: 64097 - protein, 81 aa, Zea mays
  Coding DNA Sequence Number=SeqID_22318
MASPSGRRTVHILQQAMALARAYEHRQQGSDSRVPPPSTRYAILDAGITSRASGCCLHPGSTDIQAPHPSRDDGATPPVAV

SEQ ID NO: 64098 - protein, 323 aa, Zea mays
  Coding DNA Sequence Number=SeqID_22319
  Gene Ontology: Mol. function=protein serine/threonine kinase activity; Cellular component=membrane; Biological process=protein amino acid phosphorylation
  Homolog annotation: Hit_ID=Q2MHE4; Match level="QueryCoverage=94%, HitCoverage=80%, E-value=1e-132, Identity=75%"; Hit description =Serine/threonine-protein kinase HT1
  Pfam annotation: Domain name=Pkinase; Domain location=25-279; Score =217.6; E_value=2.9e-62; Accession=PF00069.15; Description=Protein kinase domain
  Pfam annotation: Domain name=Pkinase_Tyr; Domain location=25-279; Score=244.1; E_value=3e-70; Accession=PF07714.7; Description=Protein tyrosine kinase
  Pfam module annotation: Pfam domain module=Pkinase::Pkinase_Tyr; Domain location=25-279::25-279
MGSGGEGSSRDSGRREEWMADLSQLFIGNKFASGANSRIYRGIYKQRAVAVKMVRIPERDEARRAELEEQFNSEVAFLSRLYHPNIVQFIAACKKPPVYCIITEYMSQGTLRMYLNKKDPYSLSAETILKLALDISRGMEYLHAQGVIHRDLKSQNLLLNDEMRVKVADFGTSCLETKCQATKGNKGTYRWMAPEMTKEKPYTRKVDVYSFGIVLWELTTCLLPFQGMTPVQAAYAASEKNLRPPLSSSCPPVLNNLIKKCWSANPARRPEFSYIVSVLEKYDHCVKEGMPVTAHQELRLWRSFAKIFRTGCITNNLSIPVHA

SEQ ID NO: 64099 - protein, 226 aa, Zea mays
  Coding DNA Sequence Number=SeqID_22320
  Gene Ontology: Mol. function=DNA binding; Cellular component=nucleus; Biological process=regulation of transcription
  Homolog annotation: Hit_ID=Q27W75; Match level="QueryCoverage=51%, HitCoverage=38%, E-value=9e-48, Identity=80%"; Hit description=MYB transcription factor TaMYB1
  Pfam annotation: Domain name=Myb_DNA-bind_2; Domain location=12-66; Score=-8.6; E_value=0.087; Accession=PF08914.1; Description=Rap1 Myb domain
  Pfam annotation: Domain name=Myb_DNA-binding; Domain location=12-58; Score=59.5; E_value=1.1e-14; Accession=PF00249.21; Description=Myb -like DNA-binding domain
  Pfam annotation: Domain name=Myb_DNA-binding; Domain location=64-109; Score=45.7; E_value=1.5e-10; Accession=PF00249.21; Description=Myb -like DNA-binding domain
  Pfam module annotation: Pfam domain module=Myb_DNA-bind_2::Myb_DNA -binding::Myb_DNA-binding; Domain location=12-66::12-58::64-109
MGAEAAERDRIRGPWSPEEDEALRRLVERHGARNWTAIGRGVPGRSGKSCRLRWCNQLSPRVARRPFTADEDAAIARAHARLGNRWAAIARLLPGRTDNAVKNHWNCSLKRKLGAAARRVRREDPLTALSLSLPGTDQRFHHHSAAADSHFQELPPSPSSPAPSAYPFSPEFAAAMQQLIRTEVQRYMASAGLRAGCGAVGATDLCMPQLVDGVMRAAAEQVGRMQ

SEQ ID NO: 64100 - protein, 191 aa, Zea mays
  Coding DNA Sequence Number=SeqID_22321
MRNGQRTDLNRTVKRIRSEPGNLTASALLLDRLGFFQLFNTASGGDDVTRWAHPPVEMNKQEGRCWSAGVRCSVLPSSVRPRTRYQNRPQPAPRPHAPQNGRSIIHPPLRADAQVHARQFIAPATPRGVGPAPDCVPYRRVPPGTTGLRWSWAMDAPTSARHRLTAHCAPAAACPRNRGTVRDPDPTPAWS

SEQ ID NO: 64101 - protein, 103 aa, Zea mays
  Coding DNA Sequence Number=SeqID_22322
  Homolog annotation: Hit_ID=Q67WE5; Match level="QueryCoverage=50%, HitCoverage=5%, E-value=9e-12, Identity=69%"; Hit description =Putative receptor-like protein kinase
  Subcellular localization annotation: CTP_CleavageSite=85; ConfidenceScore=5.27e-01
MEPWIGDVGLDRLVSGEAAPHSRAGASARLFGSKRSMHSTRSLQPPACVSGGGRDQAECRRRRIVGVLRGRREVDAFSFNFQTVPLSEVAPLQRKRDERTRIY

SEQ ID NO: 64102 - protein, 119 aa, Zea mays
  Coding DNA Sequence Number=SeqID_22323
  Gene Ontology: Mol. function=protein kinase activity; Cellular component=integral to membrane; Biological process=protein amino acid phosphorylation
  Homolog annotation: Hit_ID=Q67WE5; Match level="QueryCoverage=92%, HitCoverage=12%, E-value=9e-49, Identity=87%"; Hit description =Putative receptor-like protein kinase
MPQQQASPTPATLVTVDGDGELKMETLLKASAYILGATSSSMYKAVLADGTALAVRRIGDSGGTEKLKDFEVQVRAIARFRHPNILRLRGFYWGVDEKLLIHDYAPNGSFANIAFSNFY

SEQ ID NO: 64103 - protein, 1085 aa, Zea mays
  Coding DNA Sequence Number=SeqID_22324
  Gene Ontology: Mol. function=zinc ion binding; Cellular component =endoplasmic reticulum; Biological process=ubiquitin cycle
  Homolog annotation: Hit_ID=Q1STD2; Match level="QueryCoverage=96%, HitCoverage=93%, E-value=0.0, Identity=66%"; Hit description=Zinc finger, RING-type; RINGv
  Pfam annotation: Domain name=zf-C3HC4; Domain location=35-81; Score =71.1; E_value=3.5e-18; Accession=PF00097.15; Description=Zinc finger, C3HC4 type (RING finger)
MAEIAERAVAGEVPEEPRPPHGEEDDEGEEEGDVCRICRNHGDEDHPLRYPCACSGSIKFVHQDCLLQWLDHSNSRQCEVCKHAFSFSPVYADNAPTRLPFQELMVGVGMKACHVFQFILRLAFVLSVWLMIIPFITYWIWRLTFVRSLSEAQRLFLSHISAQLILSDCLHGFLLSAIIVLIFLGATSLRDYIRHLRELGGHDAERDDGGRERHGARAVRRLAGPNNRVPADGNVDELAEAQGIGAGELLRRNAENVAARLERLEAQVEQMLDGLDDADGAEDVPFDELVGMQGPVFHLVENAITVLASNAIFLIVVIFVPFSLGRIILYYLSWFFSSASTPMLAKVMPFTETAISIANDTLKSALNVVKNFSSDSNNEGVIGHVIEVVTQSLKINATGLSVIQGTGKNSLMKGTTIASSYLSDLTTLAVGYMFIFCLVFLYIGSLALLRYARGERFTIGRLYGIATILEAIPSLCRQFFAGMKHLMTMVKVAFLLVIELGVFPLMCGWWLDVCTLKMLGTTIAQRVEFFTMSPLASSSIHWLVGIVYMLQISIFVSLLRGVLRNGVLYFLRDPADPNYNPFRDLIDDPVHKHARRVLLSVAVYGSLIVMLVFLPVKVAMRVAPSMFPLDITIFDPFTEIPVDVLLFQICIPFAIEHFKPRATIKALLHHWFSVVGWGLGLTDFLLPKSEENGGQENLNARAERRDRGHGGREMVAPQVEQLMIQHVAAEDNGRGDSNEANDVTEDSDVDDQGDSEYGFVLRIVLLLVLAWMTLLIFNAGMIVFPISLGRLVFEAVPRLPITHGIKCNDLFSFSIGCYILWSVAAGTRYAIDYITSRQLGFLVQQICKWCSIVLKSSVLLSIWIFVIPVLIGLLFELLVIVPMRVPIDESPVFLLYQDWALGLIFLKIWTRLVMLDQMAPLVDESWRSKFERVRDDGFSRLKGLWVLHEIIMPIVTKLLTALCVPYVLARGIFPLLGYPLIVNSAVYRFAWLGSLIFSALFFWGKRFHVWFTNLHNSIRDDRYLIGRRLHNFGEDSHSPERSESGASIGSDDQDRDIVLRDQEEEVGLRMRRNNMHANQQPRFAL

SEQ ID NO: 64104 - protein, 405 aa, Zea mays
  Coding DNA Sequence Number=SeqID_22325
  Gene Ontology: Mol. function=carboxylic ester hydrolase activity; Cellular component=lysosome; Biological process=lipid metabolic process
  Homolog annotation: Hit_ID=Q67V34; Match level="QueryCoverage=92%, HitCoverage=95%, E-value=2e-96, Identity=62%"; Hit description =Putative triacylglycerol lipase
  Pfam annotation: Domain name=Abhydro_lipase; Domain location=48-116; Score=71.2; E_value=3.3e-18; Accession=PF04083.6; Description=ab -hydrolase associated lipase region
  Pfam annotation: Domain name=Abhydrolase_1; Domain location=130-397; Score=23.3; E_value=0.00012; Accession=PF00561.10; Description =alphabeta hydrolase fold
  Pfam module annotation: Pfam domain module=Abhydro_lipase::Abhydrolase _1; Domain location=48-116::130-397
MAQKDLYLPFLALSIIACCLMNLQTVLSSSSRMRNSTDDISDDKCPPQPHPLGMCRSRVAAYGYPCEEYHVTTEDGYILSLKRIPYGLSGATEMTRTPVLLFHGLLVDGFCWVLSTPKQSLGFILADGGFDVWIANSRGTESSRRHTTLSPQDPVTYLRISSLYSLKFGQETAFWDWTWDQLADYDLPAVLEFVYNRTGGMKVHYVGHSLGTLIILAAFSENRLTDIVRSAALLCPIAYLNSMESRLILLATRIFLAETIHMLGYHEFNPVGPVAKEVLGKVCVDPEVDCYDLFSAVAVVRKETIRKYDYGSEKENTKRYNQTRPPTYNLSSIPSHVPLFLTHGGQDFLGDVADTRHLLRTLLSQHDSDDIEVLYMPDYAHGDFIMGYNAPQLIYKPMVEFFKRH

SEQ ID NO: 64105 - protein, 416 aa, Zea mays
  Coding DNA Sequence Number=SeqID_22326
  Gene Ontology: Mol. function=oxidoreductase activity; Cellular component=integral to membrane; Biological process=electron transport
  Homolog annotation: Hit_ID=Q67WH0; Match level="QueryCoverage=95%, HitCoverage=78%, E-value=1e-110, Identity=55%"; Hit description =Putative cytochrome P450
  Pfam annotation: Domain name=p450; Domain location=1-404; Score=95.4; E_value=1.8e-25; Accession=PF00067.12; Description=Cytochrome P450
MKTHDTSFCVAAAERHGARADEQRPGHHLRAPTGSTGRQLAEGGHHGAPERAPGCSPFRAIREEEVAATLRACAAAAAESPPRPVEMRARLSALVADATVRAVMGDRCRDRDVFLRELDRSIGLSAGFNPADLWPSSRLVGLLSGAVRRAEECRDTVFGILDGIIKEHLQRMDSAGAGAGAGEAAGEDLLDVLLKIHKDGSLQIPLDMDVLKAVIFDIFGAGSETSATTLEWAMAELIRNPKAMQRATAEVREAFGARGAVAEHELGELRYLHLVIRETFRLHPPLPLLLPRQSQEPRRVLGYDVPAGTTVLVNVWALGRDGSGFEDEASEVEFKGADFHLLPFGAGRRMCPGMAFGLANVELALASLLFHFDWEAPGVSDPAEFDMAEAFGITARRKADLLLRPILRVRLPVPGV

SEQ ID NO: 64106 - protein, 74 aa, Zea mays
  Coding DNA Sequence Number=SeqID_22327
MVHAADDWQLPRPRRKPQAVAVHRAAPALREHDNEQRHQRQSELQFIKTKQHRNSRNRCEPVTGKAGLVLESTR

SEQ ID NO: 64107 - protein, 339 aa, Zea mays
  Coding DNA Sequence Number=SeqID_22328
  Gene Ontology: Mol. function=S-adenosylmethionine-dependent methyltransferase activity
  Homolog annotation: Hit_ID=Q8R1C6; Match level="QueryCoverage=74%, HitCoverage=59%, E-value=9e-26, Identity=32%"; Hit description=CDNA sequence BC024814
MEAAGGGAEDEQVMSEVHLGCPPHFSGLLVSHFSFSSRPLGPYGHKGGGGGGGGSELVAATSGSARGDRHLFTIQHGVTSSLKSVGLQVWKAALLLSDFILHESFSSPNFDGVTAIEIGAGTGLVGLALARVARRIFVTDRGTDILDNCLANLHINSGMLRFDEAKVCVRELDWKMAWPPPVGTYDPSDPSRYLWSASEVEEAEKATVLFAADVIYSDDLTNLFFNTVKKLMSVGAKKVLYLALEKRYNFSVDELDVVANGYTHFRSFFTAQDGKLFAKSTVIRATDLDQVLLEKQIDPAEIPQYIREYERGKDLEMWMIMYSPEEKQHSNSTKTVFSF

SEQ ID NO: 64108 - protein, 94 aa, Zea mays
  Coding DNA Sequence Number=SeqID_22329
MKGRYGAGAYLEGRGAWGRTRTWKGVDGRAMSLGEDREALRSSGDAKAWVVRRRWKGAVGEDLGASEDFGVGCGCADGGYALAPRERCSGAECA

SEQ ID NO: 64109 - protein, 90 aa, Zea mays
  Coding DNA Sequence Number=SeqID_22330
  Subcellular localization annotation: CTP_CleavageSite=14; ConfidenceScore=5.15e-01
MPPLPVLTFFSLKSCGVRRYNDGATSTSDGGSMNHPTSFISTTSDDWSRPLLGAIPSTTMTIVELKQRHCAWLLGGGDASKSERVVGGGD

SEQ ID NO: 64110 - protein, 108 aa, Zea mays
  Coding DNA Sequence Number=SeqID_22331
MSSDLIGWLRLDIKYPFARIRSEPLDVDRADGDLWALFWIWSLDFESSGHRSIPVGIGTGVISAVGTRSCGPGRSIPLRPGIFVKETPKNLLTNPRSSGTVVCVSGNL

SEQ ID NO: 64111 - protein, 73 aa, Zea mays
  Coding DNA Sequence Number=SeqID_22332
MARLWWLTGVGVRDKPSWRGHSCVMGDNQWSRGVVIARNRSLGALDHQRRDLHSLKLFYQVVSELVPILRRWE

SEQ ID NO: 64112 - protein, 141 aa, Zea mays
  Coding DNA Sequence Number=SeqID_22333
  Subcellular localization annotation: CTP_CleavageSite=76; ConfidenceScore=5.52e-01
MDKGRLLPNGAQTQMSTPTNTAATLRSHPLMAHQSTVFLSKRQNRTRGEGRTSWGQLTGDSSLQSAGRGDRQKCGSAMTTMNNSVGSDRRTRPGETLSQAEYPCVEPDTHRRTGDAKEEPPGVEMVNRKTPAAVVTAVEPC

SEQ ID NO: 64113 - protein, 71 aa, Zea mays
  Coding DNA Sequence Number=SeqID_22334
  Subcellular localization annotation: CTP_CleavageSite=66; ConfidenceScore=5.61e-01
MWLAPLRLSLGPSPIRKSLTLITSSSVVGSSRVVVHSTLVSDSRLRLGRSPADYVVVVLVPPGPLRVSHEV

SEQ ID NO: 64114 - protein, 690 aa, Zea mays
  Coding DNA Sequence Number=SeqID_22335
  Gene Ontology: Mol. function=ion channel activity; Cellular component= membrane; Biological process=ion transport
  Homolog annotation: Hit_ID=Q10G24; Match level="QueryCoverage=99%, HitCoverage=97%, E-value=0.0, Identity=73%"; Hit description=Cyclic nucleotide-gated ion channel 9, putative, expressed
  Pfam annotation: Domain name=IQ; Domain location=604-624; Score=20.9; E_value=0.0047; Accession=PF00612.17; Description=IQ calmodulin -binding motif
  Pfam annotation: Domain name=Ion_trans; Domain location=129-384; Score=57.8; E_value=3.5e-14; Accession=PF00520.21; Description=Ion transport protein
  Pfam annotation: Domain name=cNMP_binding; Domain location=485-585; Score=26.6; E_value=8.9e-05; Accession=PF00027.19; Description =Cyclic nucleotide-binding domain
  Pfam module annotation: Pfam domain module=IQ::Ion_trans::cNMP _binding; Domain location=604-624::129-384::485-585
  Subcellular localization annotation: CTP_CleavageSite=54; ConfidenceScore=5.39e-01
MSYDQSAFQVDYMGVGAGAGVSASRRRFMPSESLARGVITHGSAQLRTIGRSLRAGATMAAVFQEDLKNTSRRIFDPQDPVLVRLNRAFFISCIVAIAVDPMFFYLPMVTDEGNLCVGIDRWLAISTTVVRCVVDLFFLGRIALQFRTAYIKPSSRVFGRGELVIDTALIARRYMRRFFSADLMSVLPLPQVVIWKFLHRSKGTAVLDTKNSLLFIVFIQYVPRVVRIYPISSELKRTSGVFAETAYAGAAYYLLWYMLASHIVGAFWYLLSIERIYMYCGNDRQLGFLEWRTITRQVINETCEPKRDGSIPFNYGIYSPAVVSDVLKSKDTTSKLLFCLWWGLANLSTLGQGLKTSIYTGEALFSIALAIFGLILMAMLIGNIQTYLQSLTVRLEEMRVKQRDSEQWMHHRLLPPELRERVRRYDQYKWLNTHGVDEEALVQNLPKDLRRDIKRHLCLGLVRRVPLFANMDERLLDAICERLKPSLCTEHTYITREGDPVDQMVFIIRGSLESITTDGGRTGFYNRSLLEEGDFCGEELLTWALDPKAGACLPSSTRTVMALSEVEAFALHAEELKFVAGQFRRMHSKAVQHTFRFYSQQWRTWAATYIQAAWRRHLKRRAAELRRREDEELEEDEGKSNRIRTTILVSRFAANAMRGVHRQRSRRAVAVSELLMPMPKPREPDFGDDY

SEQ ID NO: 64115 - protein, 305 aa, Zea mays
  Coding DNA Sequence Number=SeqID_22336
MVQVILDLLTSRSSPPAATGRDIWAGRWLETENQKRKTCSRRLPHGGMVQRFRFGDQGFGRDFFLSPLMTLGVGIASSTFVDLQRAFNLVVLAVVVGIPVACGGSRLVASQLFDTRRFWFSSIQFVAPIATLAWATDRRMAATAMAEVVVQKHGSDPHVLLQQHDQALFKVPMTSMSDAHGVFDAISSHVLWDDELPQGLQLHNCLLKLVAQGECMVGETDMNAELCDVVSWDEEVATLSKCMQSRPLTGGEEYLDSNELILDTNQIAVHVLNLIHVHDVPVFCECDGFNNSHGLREQLVEEMDD

SEQ ID NO: 64116 - protein, 102 aa, Zea mays
  Coding DNA Sequence Number=SeqID_22337
  Subcellular localization annotation: CTP_CleavageSite=13; ConfidenceScore=5.27e-01
MSSFSSSAANAPLADSSSKDTFSDFVAVELQLGHTVEFGVSRISSPQPPIWPLVKASVAWRTGLSGVPSDTVQCASHVTRPLGSDHWSSDKWGHRTVRWCTG

SEQ ID NO: 64117 - protein, 109 aa, Zea mays
  Coding DNA Sequence Number=SeqID_22338
MDKKLSEHFSAYDKLGFMLIALIWEFDFFIVHDPDTISTSRQLEAKRDLVAGVVYGTDFFTKRKIQDSRGILIGQINYGVFAVESYVFKSIKELTEKGNATSSSTSSAN

SEQ ID NO: 64118 - protein, 143 aa, Zea mays
  Coding DNA Sequence Number=SeqID_22339
  Homolog annotation: Hit_ID=Q9ASF7; Match level="QueryCoverage=46%, HitCoverage=15%, E-value=1e-12, Identity=65%"; Hit description=SF16 protein-like
MAASVVKDVLQVADVHGDPEATVSSALLDHEERVHELLRDCELLAHAATAHQRLQPYNAPQCPQRPPSINASTNKNRCAAHMCGKRRGGGDMGIGNDRMLRVGTWEWQNGTWESEWQPTPRDMGIEMAETGMAAYTALLVVKI

SEQ ID NO: 64119 - protein, 63 aa, Zea mays
  Coding DNA Sequence Number=SeqID_22340
  Subcellular localization annotation: CTP_CleavageSite=34; ConfidenceScore=5.01e-01
MEVQLQPLALYKRRAEIAVAAVASHTAQKAGMFRSAHRRSRRLQQSSRAVSPGSPVDNVRHAL

SEQ ID NO: 64120 - protein, 311 aa, Zea mays
  Coding DNA Sequence Number=SeqID_22341
MQILRLLAARRFRRRRRRPVSTITATATAPVTPRGGAAGGCMYGYGEEEDEGPFFDLDLTCCSAPASSAGSQAAESGSESEDTSSCGAAADGGAAARSDLDFVISLHRSRPSSPSYEERLFCRGAAPARPPPLMFCASEPSDAASRSRARDSSGGGRLRLRTLSFGSAKAAFSGGRASFSRSTSGARSARLFAAYDQDLPDEGRALRPPSGDVIRRYLSKISSRLRRVGVGVGVSHPAAATDLRLRKSRSASAAQASSTAQSPPPRRDDSLAEKQDGIASAIAHCKESLHRASVSEAVDTSLARSRSDPGP

SEQ ID NO: 64121 - protein, 71 aa, Zea mays
  Coding DNA Sequence Number=SeqID_22342
MPGGQKAYQSTLNGWVAWKRRLPFAVGAFEEAERQSGASATARGPVQNHAAVWGALGLRALRGPLCYTTSI

SEQ ID NO: 64122 - protein, 157 aa, Zea mays
  Coding DNA Sequence Number=SeqID_22343
  Gene Ontology: Mol. function=binding; Cellular component=thylakoid; Biological process=photosynthesis
  Homolog annotation: Hit_ID=Q9SE32; Match level="QueryCoverage=61%, HitCoverage=26%, E-value=7e-31, Identity=69%"; Hit description=Sgt1
  Pfam annotation: Domain name=SGS; Domain location=74-155; Score =185.2; E_value=1.6e-52; Accession=PF05002.5; Description=SGS domain
MWLPLGVHMQAHPLNDVGDDGPEEGRVLEGTDQAPVGHRVGDQGPAILREAWSRACSRTSETAPRPSYPSSKSKKDWDKLEAEVKKEEKEEKLEGDAALNKFFRDIYKDADEDMRRAMDKSFRESNGTVLSTNWKDVGSKTVEASPPDGMELKKWEI

SEQ ID NO: 64123 - protein, 532 aa, Zea mays
  Coding DNA Sequence Number=SeqID_22344
  Gene Ontology: Mol. function=microtubule motor activity; Cellular component=microtubule associated complex; Biological process =microtubule-based movement
  Homolog annotation: Hit_ID=Q9AVP4; Match level="QueryCoverage=98%, HitCoverage=72%, E-value=1e-178, Identity=64%"; Hit description=BY-2 kinesin-like protein 10
  Pfam annotation: Domain name=Kinesin; Domain location=2-322; Score =440.5; E_value=2.2e-129; Accession=PF00225.13; Description=Kinesin motor domain
VRKRPLNKKEVSKKEEDIVDIEQRSNSLTVHETKLKVDLTEYVEKHEFVFDAVLDEDVSNDEVYRETVEPVVPAIFNRTKATCFAYGQTGSGKTYTMRPLPLKASQDVLRLMHHTYRNQGFQLYVSFFEIYGGKLFDLLNDRSKLCMREDGKQKVCIVGLQEYRVSDIETIKELIEKGSATRSTGTTGANEESSRSHAILQLAIKRRVDGNDSKPPRPVGKLSFIDLAGSERGADTTDNDKQTRIEGAEINKSLLALKECIRALDNDQTHIPFRGSKLTEVLRDSFIGDSRTVMISCISPSSGSCEHTLNTLRYADRVKSLSKGSNAKKDVSLAVPLRESNSSPLPSVVPSFSASEVMNDITGRSNFGWPKQQYVKEQPAPTFVERMPKAKDAVEFTSSNIAEVPDIMYQLGRQPSRKDVTLANNMRNSVAYPTRRVEPDDDDEHLNNLLQEEEELVSAHRKQVEETLDILKEEMNILGDADQPGFQLDDYITRLSSMLSQKAAVIVDLQARLEQFQRLLNENNVLLYAQSP

SEQ ID NO: 64124 - protein, 79 aa, Zea mays
  Coding DNA Sequence Number=SeqID_22345
  Gene Ontology: Mol. function=binding; Cellular component=thylakoid; Biological process=photosynthesis
  Homolog annotation: Hit_ID=Q8W516; Match level="QueryCoverage=66%, HitCoverage=14%, E-value=6e-21, Identity=94%"; Hit description=SGT1
MAASDLESKAKEAFVDDDFELAAELYTQAIDAGPATADLYADRAQAHIKLGNYTGLLWAQFLADGEEEDGGGGRLCLHG

SEQ ID NO: 64125 - protein, 212 aa, Zea mays
  Coding DNA Sequence Number=SeqID_22346
  Subcellular localization annotation: CTP_CleavageSite=35; ConfidenceScore=5.40e-01
PTRPPESAAPAPASRVRPPPTAPAPSSAGNAAHAPASANRPHHDPVRPRRAASTHRPPAHRPRPLGHAPGRSARPLRRARPRLAPTRPASPHRPPAPRFRPIGPRPSAPPPDLAALGCLAPGEPRARVGPALPPSSGPARPRPRARSGEPPARARLPASSPPPVQPPPCPGSAARPRARPHPAASSLARARLPRRACPPAPPCLARIVSAPA

SEQ ID NO: 64126 - protein, 740 aa, Zea mays
  Coding DNA Sequence Number=SeqID_22347
  Gene Ontology: Mol. function=RNA methyltransferase activity; Cellular component=nucleus; Biological process=RNA processing
  Homolog annotation: Hit_ID=Q10T58; Match level="QueryCoverage=96%, HitCoverage=41%, E-value=0.0, Identity=77%"; Hit description=RNA methyltransferase, TrmH family protein, expressed
  Pfam annotation: Domain name=SpoU_methylase; Domain location=578-715; Score=51.8; E_value=2.3e-12; Accession=PF00588.9; Description=SpoU rRNA Methylase family
MDLSSTLLYMMPTKCLIDCVRAIEGISEFQRSTVAIQYLFISVQMMMQLAKSSWILHLNCNKRRVAPIAALLSAVLHPAIFCNLEMHQTNEKGPGPLKWFVENLLNEGSKSPRTIRLAALHLSGLWLMYPKTLRFYMEELKLLSLYGSVAFDEDFEAELSENHEARFEVSMLAQSPDREFTEVFINTELYARVSVAVLFHQLWKQIKEHSILETEEALECGKLFLLELLDSAVNSKDLSKELYKKYSSVHRRKVRVWQMICVLSHYVEDDIVGEVTSSIHICLYRNNLPAVRQYLETFAILLYLKFPTLAEEQLIPIFHDKGMRQQALSSYVFIAANVILHSRQSVQIYHLNQLLPPILPFLTSHHHSLRGFTQLLVHSVLSRLWPTLHPETSEDAVFERRCFQELKDYLAENSDCVRLRVSIEGFLDVFDPNASGTPPGIFSARPEVSDFECVPVSVMERVIEFLNDVREDLRQAIANDTVTIKNEDLAVGEHHKSDESVSEMVKTGQEVLDFQKKITPHRGDSEQALNLNTRGHSGVGDEYISRIISEMEEDDQVFDLALEARLHAAETIKQSRQELIVVASLVERIPNLAGLTRTCEVFRAAGLVVADKSVLQDKQFRLISVTAEKWLPVTEVPVDSVKAYLERKRGDGYSVIGLEQTANSMPLDRFGFPDRTVLVLGREKEGIPVDIIHILDACVEIPQLGRGEVAQCPCQRRHSRLGVHASTTQSALACCLFLLH

SEQ ID NO: 64127 - protein, 168 aa, Zea mays
  Coding DNA Sequence Number=SeqID_22348
MTSSSRLRVTDVGLLDWRVEMPPIWSMRCVSSVASWCNPYNSDDSVSSAFSVLWDFYLNVTHHSTIANEIGAELHLAAYEALAYVLAVLSTASSTQFLDFVEAKQTDQAHKFSLDILVTTFLDNINHLLTEGTLTRSRRAVLMTWKVRIISCLFLQYTKKSVWMAPNS

SEQ ID NO: 64128 - protein, 159 aa, Zea mays
  Coding DNA Sequence Number=SeqID_22349
MDREGAAQYREEEQGACRVAARPHTIGVVICCCCYGSGCSLPLGKKGAAEGGEAKGESRTPPSRSMGKTTDCGEEGRRHHGQPAVWPSREAPHALQGEMSQGRPPWERGQRRSAVVGRRAEHHGEEEEPSSLLAVVWEKGTTKMCASAEVEEREKGCGG

SEQ ID NO: 64129 - protein, 110 aa, Zea mays
  Coding DNA Sequence Number=SeqID_22350
  Subcellular localization annotation: CTP_CleavageSite=5; ConfidenceScore=5.47e-01
MTSILAAALARSALHSAAPSLSLLKRRLKFLQQASPSIAPQQHAPSPRAWVLDESQQRATPSGFASVSHARRRVSSSRPMCSNPDRDRVHIVAAIVIFVVVRDLSADVFL

SEQ ID NO: 64130 - protein, 498 aa, Zea mays
  Coding DNA Sequence Number=SeqID_22351
  Gene Ontology: Mol. function=sequence-specific DNA binding; Cellular component=nucleus; Biological process=regulation of transcription, DNA-dependent
  Homolog annotation: Hit_ID=Q38897; Match level="QueryCoverage=78%, HitCoverage=71%, E-value=2e-70, Identity=40%"; Hit description =Homeobox protein
  Pfam annotation: Domain name=Homeobox; Domain location=316-374; Score= 3.9; E_value=0.0019; Accession=PF00046.19; Description=Homeobox domain
  Pfam annotation: Domain name=POX; Domain location=124-260; Score =209.8; E_value=6.3e-60; Accession=PF07526.2; Description=Associated with HOX
  Pfam module annotation: Pfam domain module=Homeobox::POX; Domain location=316-374::124-260
MAIHHPHLLDFSPPPNTVAMEEAPPPPHFDHGLLGLHVDGMPHRVLADDAPVAAWAPQAVVSHSLYGYDNTAAGASSLFGHHEASEAQFSVLPPAASSFALLPNHHHQQQLPTTTAASSMQQPFQLRSSKYLGPAQELLAEFCSLEGDLLHATNKQGASGAAAGNSRWDDVETSSSSSAGLWGHLSLSSMDLLELERRKARLLSMVEEVDRRYRRYREQMRSVEVSFEAVAGAGASQVYTRLALRAMSRHFRCLRDALVAQVRALRKAMGERDGGPAGAAAGATKGDTPRLKVLDQCLRQQRAFQHPGTIDNYPWRPQRGLPERAVAVLRAWLFEHFLHPYPNDVDKHILARQTGLSRSQVSNWFINARVRLWKPMIEEMYTEEVNPKPADDTSQNPSAGGGVGVGVAIKPEQQVSTAAAGATIGGGGGDHLFGPSYPSMYGSHGGAVSLTLGLQQQPFASTMMHQRRPLMTFQGDEQEPALPYRDLMGSQLLHHFAG

SEQ ID NO: 64131 - protein, 119 aa, Zea mays
  Coding DNA Sequence Number=SeqID_22352
MDIDYVRIDVHDLESAGLNQGRRHEIFEVLEQGRRSRVLELIDTYNGQVVETWVLESNPDLKQAKKGKTIKKVKYAREALKKVQFKTEKIREFSQDPLWWISAQLVFDLVQLVFVLVHL

SEQ ID NO: 64132 - protein, 60 aa, Zea mays
  Coding DNA Sequence Number=SeqID_22353
MTFATDGWLGRVLRLLANVCDSSSGTERQRTWDEVALDKGVARASSLLGKSGATPTDFIP

SEQ ID NO: 64133 - protein, 87 aa, Zea mays
  Coding DNA Sequence Number=SeqID_22354
MAESFLMCAIVDRVASCEIRGGEGKAEMGALGCGRLKRGEYLPQSVTYLRSSSGESEVLEGPTGARSGRSLVMALDTDLGRGEACDS

SEQ ID NO: 64134 - protein, 271 aa, Zea mays
  Coding DNA Sequence Number=SeqID_22355
DNDGAAEWRAERARAAARMLVMGENSSEARRRRKVKNGAAARNQQRLACCAFRRAHSKRQRRTAQQHASRGNGARVPSVHHGRDDELGSVKRSRGWRPWTGRGLRSREKRSRGRAELLLDHTPLEPRRKGAMVICCCCCEGVELLGDGSGCSLPLGKKGAAEGGEAKGESRTPPSRSMGKTTDCGEEGRRHHGQPAVWPSREAPHALQGEMSQGRPPWERGQRRSAVVGRRAEHHGEEEEPSSLLAVVWEKGTAKMCASAEVEEREKGCGG

SEQ ID NO: 64135 - protein, 163 aa, Zea mays
  Coding DNA Sequence Number=SeqID_22356
  Subcellular localization annotation: CTP_CleavageSite=24; ConfidenceScore=5.29e-01
MAQGAPAAFPPASSSFSLPAPLTAAATYHHGALPPRLQWCVVEQQLCTPPAPLLSTAQPPPCPWPPAPAPLHRAELVVPAMVDARHSSSIPPACVLLRSASLTLAMCSTKCATSQALLIPRSSTVLHLASSSSFAAVFPHDQHPRSSPRPLGPPLRSAVVVPA

SEQ ID NO: 64136 - protein, 128 aa, Zea mays
  Coding DNA Sequence Number=SeqID_22357
MAQCAGATSYLHTAPALRGPALQRDCTTVVPRGGGVLWRDSKIDDRKNALDFDCTSVRNRIFPREDSRRSATSGYAGTCPPLHLLFQQIQRDDESAPDTIRDTFRSGSSLHNADGGRKSALNAENPCI

SEQ ID NO: 64137 - protein, 98 aa, Zea mays
  Coding DNA Sequence Number=SeqID_22358
MSTVNTQQMQSSRDADAAGRPPEHQLPDTADARLLEWRHSGGLEDRVTGRQGRRTGGRPGPRVTAAWVLVWRRGGREDEPQEDGGRATTNGSARRPVV

SEQ ID NO: 64138 - protein, 340 aa, Zea mays
  Coding DNA Sequence Number=SeqID_22359
  Gene Ontology: Mol. function=oxidoreductase activity; Cellular component=integral to membrane; Biological process=electron transport
  Homolog annotation: Hit_ID=Q8H8D4; Match level="QueryCoverage=89%, HitCoverage=60%, E-value=1e-105, Identity=67%"; Hit description =Putative cytochrome P450
MERSAESWWVLPMTLIPAISGEQHGNMATVATSFAYLAIFACLAWVGASLLYWAHPGGPAWGKYWRARGKKPSAAIPGPKGLPVVGSLGLMSGLAHRSLADEASRRPGAKRLMALSLGPRPRGRHVPTRDVAKEILDSPAFRRPAPLKPRRHGPVLARAPGASPRATCSARGRSKPFAPYRAAVAEGIVAALLRAGSGGAVVQVRGLLRRASLYYIMRFVFGKEYDVSRVVPPSGGEEVEELLEMVHEGYELLGMENLCDYFPGLAALDPQGVGARCAELMPRVNRFVHGVIQEHRAKAVAGGDARDFVDILLSLQESEGLADADIASVLWVRIRKNPCT

SEQ ID NO: 64139 - protein, 123 aa, Zea mays
  Coding DNA Sequence Number=SeqID_22360
  Subcellular localization annotation: CTP_CleavageSite=49; ConfidenceScore=5.11e-01
MLSMPNTAARWCLWNSGSGKGSIGWSPRRGCVFIPPVLVKPGPGIRMVVATAPEKRAELGHARDAVKVVADPGLVILTRGVHKSMGQARASGWGAGPTSQGCARVSDKLGHAVGIREWAEMGC

SEQ ID NO: 64140 - protein, 170 aa, Zea mays
  Coding DNA Sequence Number=SeqID_22361
  Gene Ontology: Mol. function=calcium ion binding
  Homolog annotation: Hit_ID=Q10NP2; Match level="QueryCoverage=60%, HitCoverage=12%, E-value=6e-27, Identity=63%"; Hit description =Calcium-binding EF hand family protein, putative, expressed
  Pfam annotation: Domain name=efhand; Domain location=18-46; Score =27.0; E_value=6.6e-05; Accession=PF00036.22; Description=EF hand
MALSASAASTGRGSRAEKVKRIFECFDTNGDGGLDRNEMAALVVTVNPWVKFSEDQISAIIDEVFRTYVEFILPDGSSLPLSGLLRTYNDDDGDVDRDFVALSLPTVHSDSSSPNIAAGDAAAHSSPPSVSAAAWTTAVGGVAVAAFAGKMGACVQRGRQGHRRRSTLLP

SEQ ID NO: 64141 - protein, 236 aa, Zea mays
  Coding DNA Sequence Number=SeqID_22362
  Gene Ontology: Mol. function=ubiquitin thiolesterase activity; Biological process=ubiquitin-dependent protein catabolic process
MAAGLGHVAVLLCGVAVRYSVQLQPPRRETCHAPNSCRPVPSPFRVRDARGPQPHALIDAPALAEGRGGGGRGGGGEKRGGLGEEDGVVEVRIVDLVPAGGAEELGVVDGDLVVGPRGGGGVRGSVGGAEDGGAGEAGVDAGGGDGDAAAQGEQRGSSRGSHRISGRPSEHTRRQRRRKRSEREDRRCAARCGQGGGMDWVDIGEGTDRGVLWWGQRRWVTGWPGRGGGAIGGVWQ

SEQ ID NO: 64142 - protein, 266 aa, Zea mays
  Coding DNA Sequence Number=SeqID_22363
  Subcellular localization annotation: CTP_CleavageSite=50; ConfidenceScore=5.13e-01
MTIAVANIFTPKHFHPFCTDFTDCIDSLRSRVVRHVAQTEKTRPVFPAVLSMSFWAANLTGSDNKSWMDPLQTFTLSCACAASSSPIPTPTLPLSFAWHILGGAAACFFTGAAACFFDDAEAYGGLPSGRVHGRTDLRRLADLRRAAYRLWTDLRCLVPWQTRQRLLQAGGSPALLELEQAGVPVFSRRMDLHRRGGLPGGRIRSISSCSVPLLLRGLSSGRTDPRPSDSAASAALCLQRIHASAARRPELRPSRAVACSLNPHTC

SEQ ID NO: 64143 - protein, 98 aa, Zea mays
  Coding DNA Sequence Number=SeqID_22364
  Subcellular localization annotation: CTP_CleavageSite=39; ConfidenceScore=5.21e-01
MEIQLRRVSSNPGWPFLIHRVHSQWTGTGASALRFLNPGCAARSRRREAGTETASLALRFLETGEWRLELEVAGWRHGALEIVTGALELGMALARVRV

SEQ ID NO: 64144 - protein, 180 aa, Zea mays
  Coding DNA Sequence Number=SeqID_22365
  Homolog annotation: Hit_ID=Q69J27; Match level="QueryCoverage=18%, HitCoverage=11%, E-value=9e-11, Identity=96%"; Hit description =Putative cis-prenyltransferase
MGFSALIASLLYCYEMGVKYITVYAFGIDNFKRFYPTLIPFAHKCAWTPSPFTLTLLTGWTHYKLSLSSAQQPLLPRSRLQLSLSPSPRRHGSLLLHRGGCFFTGAAACFFTRAAAYFFDDAEACGGRDAAAFRAVGSADERISGACQIFERGAVAYRADGSTDERISGVTACFFTGAAA

SEQ ID NO: 64145 - protein, 111 aa, Zea mays
  Coding DNA Sequence Number=SeqID_22366
MPYNSTSETVNAVSEVCAERMEMFRSEDIGDCNGHAYRCPSGPGPPGGPRHGTKMAQPSTGTVRLQTCLDKPGPFAVSGWARDFSLSGLARPDPSKGEARGGPVSVKSGVV

SEQ ID NO: 64146 - protein, 103 aa, Zea mays
  Coding DNA Sequence Number=SeqID_22367
MPTSLMFVGCLRDDVFVSALVIHVSCLVCLTTNSAHGEVFVVAFTTHVREVAIVGVDRNRKGLPPTRGEDSFGCPLRSSYEPLRLWGRPSRGPLSKLLQSSKG

SEQ ID NO: 64147 - protein, 134 aa, Zea mays
  Coding DNA Sequence Number=SeqID_22368
MGKNNKRKREPTPPSEDFGDSEYSEEEFSSESEGVPGSHSSAGLRRRSGLTSGPSSAPGLEGSDESEYSSDKEDSSEEDGGGDGEEDDDDDDDDEGGGGGDGDGGGRGGSSGSKDGDGASSRGGSGRGSNRASG

SEQ ID NO: 64148 - protein, 155 aa, Zea mays
  Coding DNA Sequence Number=SeqID_22369
MDPRYGTRRGDIGELDDGFLTARGGGNEDGHSKGEEAESAGIYTEAAEKHQRNPTIPVSTIRTPRRDSRLVSELGTWAYPSATTADAAHLRSATGFNTYWDARLTEPAEDPAHLRHARWFSWGKDMTRPVHASVRGTGARRERSAQWDPRDSECQ

SEQ ID NO: 64149 - protein, 243 aa, Zea mays
  Coding DNA Sequence Number=SeqID_22370
  Subcellular localization annotation: CTP_CleavageSite=45; ConfidenceScore=5.10e-01
MNSARFPSLSGEANHCSHRSSWHTGQSGGAPDSPVRPVGGYKRPRGREREACTRRPVLPRVANPPYECPGPSLYRRKERAQSEPWVGRGGGSYEVEVESVFRGRGRVRAPGRARRRPSAEARAESEPWCWARRSSSSSGAEAEPKGRARRSSSSFGAKAESWGRARRSSSSSGAEAESEPWGRARRSFLWRPRPDLAAVSLTLSSGTAVGAAQVALSSHQAGQWSGEVTAVTSALSTGGRASG

SEQ ID NO: 64150 - protein, 111 aa, Zea mays
  Coding DNA Sequence Number=SeqID_22371
MSNKTYVGRDEQNYYQPRRAHEGVTMGEERQDATWQLKSGGWALVRSSTRAQQPTMLGARGLRKQRPARKGRGSARLRHRGRDERRIWGRGAARLVKGKCALGPFLSILVI

SEQ ID NO: 64151 - protein, 125 aa, Zea mays
  Coding DNA Sequence Number=SeqID_22372
MMSNKTYVGRDEQNYYRPRRAREGATMGEERQDVTWRLRSGGWALVSSSTRAQQPTMLGARGLRKQRPMRKGRGSARLRHRGRDERRIWGRGAARLGAMDRKQELQGRCCAVGRRVVEGDAPWGR

SEQ ID NO: 64152 - protein, 137 aa, Zea mays
  Coding DNA Sequence Number=SeqID_22373
MARFQISLFSCICRLCVCVDGHQQQWALPFVGAGQVRPPSQQAPPDRKGHSGGGVMDSGSRSSGGASERCENSIFISTFDNFHLDHGSATRDGSDVPSGQSASSDLSPGLPRSLHASMYSARAGESADRGRNPVCEQ

SEQ ID NO: 64153 - protein, 317 aa, Zea mays
  Coding DNA Sequence Number=SeqID_22374
  Homolog annotation: Hit_ID=Q6QP51; Match level="QueryCoverage=19%, HitCoverage=28%, E-value=1e-10, Identity=61%"; Hit description =Putative growth-regulating factor 1
  Subcellular localization annotation: CTP_CleavageSite=50; ConfidenceScore=5.48e-01
MSEVKIVQGGNVPDDDGATLNMGVASRGGGSNSWGPSTTTTRAMRLTLTRALTNSSSVLSLLWTTSVVVRHELLEGKCDLGKFVDEVCLILKYVVSQCFSNQDQTDTMSRDTEDFDGAKPSGAVTIDALLLRQMWNVGQRKRKSSEILATADKPAKCQETITILRQLHPRIASLYKTFGDEAWTQHSICIPKTSSAKSDYKPQSLASILVEASTSPSPTPTTPTPQVLSKKDEGREPKAAPRPTAVTCNDAVDALCCLQGNDVSPVARSVRAQGRARRRLLLRLRPGSGEDTIPPEAEAEAEPWGRVRRRPPPEAEA

SEQ ID NO: 64154 - protein, 431 aa, Zea mays
  Coding DNA Sequence Number=SeqID_22375
MAWAGARNCRKEDGAAWGLERGHGEVMAFAEQVASGALTSQFVSERKRLEGRIEHLRTQHTKAIRDKSAAENKRRNLLYKVIALEKEKGDLGHRLNDEKKDAENTLVEAQATRAAAQAARKRAADLELELKNMHDHHERTVSSSHVGVDRAHTLFVDAYHDLGTQTAPFDKSGEEVGTRFLGWLQDELESLPSIVTGLMSYASLMICEGAVNALSREGCMHFEVFDRANEDFDHGMFQIEDGVLKHTAGALYDRMWGPHGRDIVQERSDRALAYAMNKEDVEDLAGLECSVARKDASAEARAEEQAMFQGGGAEGPATADASALIGYCTGFDVGAYDGNAVFLSSDASGESHVGSWSFEGGKLGSPFSWIDDESSEDELDYFVAFDLAVVESPLRVAPCEERVTSVGAILGGPRGQKKMGGVGDLFSNAMR

SEQ ID NO: 64155 - protein, 121 aa, Zea mays
  Coding DNA Sequence Number=SeqID_22376
MSGVHRTCPVNYSEAPLKIPEGAKFGLESLVHRTLSGGAPDSPEKKMTEEKMTEEKKLTEEKKLYEEKKVADPFIARFYESMAKTNTEKITKEIMEGLSEDSDDSDSYDVESGDEDSEDRP

SEQ ID NO: 64156 - protein, 50 aa, Zea mays
  Coding DNA Sequence Number=SeqID_22377
MAVSRTGGAGQELSMDDYLVGGVTMFDAQTGLLPVVELVYLILLRRKLRS

SEQ ID NO: 64157 - protein, 75 aa, Zea mays
  Coding DNA Sequence Number=SeqID_22378
MSISNTSATNEDSYCRGVSADSLRMVSYRGLEGGSEIKGRRYNENLYSTREEIGLLLLGLVAHVISFVGSCFLAS

SEQ ID NO: 64158 - protein, 101 aa, Zea mays
  Coding DNA Sequence Number=SeqID_22379
MNRLAVLSAEAQMIRGPGPDSPQLERKSGSFSTYVWKVYAWGSDGPDGVEGCLLRSRPRSRIPRGTSSEVDTPSYGRTVRLSQPDHLFEHRTVHAQVSNCP

SEQ ID NO: 64159 - protein, 384 aa, Zea mays
  Coding DNA Sequence Number=SeqID_22380
  Gene Ontology: Mol. function=DNA binding; Cellular component=nucleus; Biological process=regulation of transcription
  Homolog annotation: Hit_ID=Q6Z538; Match level="QueryCoverage=98%, HitCoverage=97%, E-value=1e-142, Identity=67%"; Hit description =Putative NAC domain protein
  Pfam annotation: Domain name=NAM; Domain location=8-136; Score=293.6; E_value=3.6e-85; Accession=PF02365.6; Description=No apical meristem (NAM) protein
MEKSDEILMPGFRFHPTDEELVSFYLKRKVQQKPISIELIRQLDIYKYDPWDLPKLASTGEKEWYFYCPRDRKYRNSVRPNRVTAAGFWKATGTDRPIYSSEGTKCVGLKKSLVFYKGRAARGMKTDWMMHEFRLPSLADPSLPKRPIDKTIPLNDSWTICRIFKKTSSLAQRALSHTWGPPLLGATEADDMINALQSVQASEFALESSLQVAPAAPAAGQFSSRHGLHVHGQHQQKKGTNSPSLDGSSSCKLINFTSSSPSEEGRPQSLSFPVTFPFEVQGTHKTAAAAPVFFGAHPDHHLGGFVVDSSADVNGGIVGGRSQDSSTRKPSNNGFSTSSGDWETAGRVSFPFDLGADSSEEWRCNIPWESLLTPAAVQAELLPH

SEQ ID NO: 64160 - protein, 197 aa, Zea mays
  Coding DNA Sequence Number=SeqID_22381
  Gene Ontology: Mol. function=enzyme inhibitor activity; Cellular component=cell wall; Biological process=cell wall modification
  Homolog annotation: Hit_ID=Q27U80; Match level="QueryCoverage=50%, HitCoverage=52%, E-value=2e-25, Identity=55%"; Hit description =Pectin methylesterase
  Pfam annotation: Domain name=Pectinesterase; Domain location=58-197; Score=-88.9; E_value=6.3e-15; Accession=PF01095.10; Description =Pectinesterase
MPMAYLPSRTSTSLLACIEPMQQSINGGPIDLEGPERSHTLHTLRAGPAPDPPPSPVLAPTSDPRTDPRDAMELPRPQPPCRSGGLPISVGCSLYARCPAPGQKNVVTTQGREDPNQSTGIVVQGGKVAVAADLASLVANVSSYLGRPWKRYSCAVFAQTKMEALVHPRGWLEWNATFALDTLYYAEYMNRVCCKPI

SEQ ID NO: 64161 - protein, 195 aa, Zea mays
  Coding DNA Sequence Number=SeqID_22382
MGPRGRACSREAVSRDLDRWVRDGRFKSGAQGLTTRWLAPLLSTAVGSLEIGQTRSRGPRVVGVGWNWRGGPGELTGGAPVAITGAEAREQCRGCSGRVWMTPARNLGRGEGESSVLRLGLAPAREGERYGPQPGLGMGLIWSDAERGVVNWCGRAPASSSPRDNAHEGLAWFLSQDPSAELADDCPHTLRHELI

SEQ ID NO: 64162 - protein, 258 aa, Zea mays
  Coding DNA Sequence Number=SeqID_22383
  Gene Ontology: Mol. function=DNA binding; Cellular component=nucleus; Biological process=regulation of transcription
  Homolog annotation: Hit_ID=Q2HVT2; Match level="QueryCoverage=60%, HitCoverage=48%, E-value=3e-36, Identity=56%"; Hit description =Homeodomain-related
  Pfam annotation: Domain name=Myb_DNA-binding; Domain location=29-74; Score=44.6; E_value=3.4e-10; Accession=PF00249.21; Description=Myb -like DNA-binding domain
MGETSVCEKPARSCRAPVDQLPPARASSAGSFSDQEEKLIIHLQELLGNKWSAIASYLPERTDNDIKNYWNTHLKKKLAKTGARESGASAKTTKKSDRAAAPKGQWERRLQTNIHTARQALREALSMDDTAPPAIKPEPLPLPLGQLPAPASQAMYASSIDNIARLLEGWMRPSVSGNASAESMSSFSAFSGGGDGASASHIGTAHTPEGFTGTRKEEGAGPGPASLPMFENWLLDDGMGNGDASLICVPLADPCEFF

SEQ ID NO: 64163 - protein, 338 aa, Zea mays
  Coding DNA Sequence Number=SeqID_22384
  Gene Ontology: Mol. function=DNA binding; Cellular component=nucleus; Biological process=regulation of transcription, DNA-dependent
  Homolog annotation: Hit_ID=Q8W389; Match level="QueryCoverage=96%, HitCoverage=95%, E-value=8e-51, Identity=38%"; Hit description =Putative transcription factor
MGRPPCCEKGGVKKGPWTPEEDLVLVSYVQDHGPGNWRAVPTNTGLMRLQQELPAPVDQPSPPGHQVRQLQRPGREAHHPPAGAAREQVTPLQEQPVLPLAHAPSTSSVIPQRAEPLTIDCVFCTIRWAAIASYMPERTDNDIKNYWNTHLKKKFTRTGAAGAEARSGRWAAPRGQWERRLQTDIHTARQALREALSLDPAPLSTKPPEQLPQPTAPASQATSYASSAENIARLLEGWWSMHPGAAGKVSSGSRSSSVSVSVFSDDDGVISASNSGGTAAARTPEASIRMTKADGEGTAGPGPGPSFSMLESWLLDDAMGHGDTGLVTVPMGDPCDFF

SEQ ID NO: 64164 - protein, 146 aa, Zea mays
  Coding DNA Sequence Number=SeqID_22385
MYQDVNKRFWWYDMKREIADRTLSPPLLLCAWPEKSTAHSTVAVEPSLRPLPGEFRLAASNSGHPSVRTQPLWFARSALTGVSVVKPESATVDPRLPRVLAVAQAPLSLHSSDFAAAEEATPVTELKSPAPPSQSSAPDPTTQICG

SEQ ID NO: 64165 - protein, 56 aa, Zea mays
  Coding DNA Sequence Number=SeqID_22386
MQVGVIGNLVHSSPKIKKEVLNAGALQPVIGLLRMSNLLVQPQPLILHIFSIRDQT

SEQ ID NO: 64166 - protein, 459 aa, Zea mays
  Coding DNA Sequence Number=SeqID_22387
  Gene Ontology: Mol. function=protein binding
  Homolog annotation: Hit_ID=Q00U71; Match level="QueryCoverage=77%, HitCoverage=26%, E-value=8e-32, Identity=29%"; Hit description =Chromosome 16 contig 1, DNA sequence
  Pfam annotation: Domain name=Arm; Domain location=1-39; Score=15.4; E_ value=0.15; Accession=PF00514.13; Description=Armadillobeta-catenin -like repeat
  Pfam annotation: Domain name=Arm; Domain location=114-154; Score=3.7; E_value=4.2; Accession=PF00514.13; Description=Armadillobeta-catenin -like repeat
  Pfam annotation: Domain name=Arm; Domain location=155-195; Score =13.9; E_value=0.22; Accession=PF00514.13; Description=Armadillobeta -catenin-like repeat
  Pfam annotation: Domain name=Arm; Domain location=40-80; Score=8.4; E_ value=1.1; Accession=PF00514.13; Description=Armadillobeta-catenin -like repeat
  Pfam annotation: Domain name=BTB; Domain location=221-324; Score =72.6; E_value=1.2e-18; Accession=PF00651.21; Description=BTBPOZ domain
  Pfam annotation: Domain name=HEAT; Domain location=11-41; Score=10.1; E_value=2.5; Accession=PF02985.12; Description=HEAT repeat
  Pfam annotation: Domain name=HEAT; Domain location=120-156; Score =3.3; E_value=17; Accession=PF02985.12; Description=HEAT repeat
  Pfam annotation: Domain name=HEAT; Domain location=51-82; Score=3.4; E_value=16; Accession=PF02985.12; Description=HEAT repeat
  Pfam module annotation: Pfam domain module=Arm::Arm::Arm::Arm::BTB::HE AT::HEAT::HEAT; Domain location=1-39::114-154::155-195::40-80::221 -324::11-41::120-156::51-82
MQKVHIVQRGAVCPLIEMLQSADVQLREMSAFALGRLAQDTHNQAGIAYNGGLVPLLKLLDSENGSLQHNAAFALYGVADNEDYVSDFIKVGGVQKLQDGEFIVQATKDCVAKTLKRLEEKINGRVLKHLLYLMRVGEKSVQRRVALALAHLCAPEDQSSVFIDNNGLDLLLDLLISMSSKHQQDGSAALYKLANKAAALSPMDAAPPSPTPQACKRIIKFKFTLYYIILIPSTGKRFYAHRIALLASSDAFRAMFDGGYREKDARDIEIPNIRWDVFELMMRFIYTGSVQVTSEIAQDLLRAGDQYLLEGLKRLCEYTIAKDVNLDNVSDMYDLSEAFHAVSLRHTCILYILEHFNKICTRAGYLLLLITFDLKAVRFQVTQFLTRNLAMQFCTADPACYSRAPQFPNQGTEFIKKPKYNRRQELADLILSPNSLTLTPSSDQSCWTSCTVKFLALRI

SEQ ID NO: 64167 - protein, 155 aa, Zea mays
  Coding DNA Sequence Number=SeqID_22388
MVLATLAKEDTLPLIFQKEDTQIIPFFGGSEIVHMRVMVLLLLPLLAQLQKVMLLGLLLLLMPRRAMLQAQHATNHALGPTVVHDASQIAHPVVRAAARAAISHIATQTAAAIHHAVNQTVALTTICHAANRTTAHVVNRTELLHGPRHVLIAGA

SEQ ID NO: 64168 - protein, 274 aa, Zea mays
  Coding DNA Sequence Number=SeqID_22389
  Homolog annotation: Hit_ID=Q5NAY5; Match level="QueryCoverage=34%, HitCoverage=20%, E-value=1e-27, Identity=63%"; Hit description =Ubiquitin-conjugating enzyme-like
IRSRRPSRSRTHRQSRQHHGRRNPAQRGPVDDAEDYDGGPPSRQPSASVSHRTQPRPRPRAGSRGSSRRMTTRGGPNGGKSFCVPMEVRYNRWILMEQGSSSSWHTTGAVSCGAAQQQKRQRCQGSSSDQAGSSSSSSLQISEPEPQQIQEEEDYYMEDDCDDDFDGYDEDDYDFDEADFNQHLADKFDDLDLPPGVEATVPWLQKTTPKEDVKEPPKSNTADENANKYTQFKQFDTVQNFSDHYYAKNSHGEPNRAWSKRVQHDWKLLEKDLP

SEQ ID NO: 64169 - protein, 273 aa, Zea mays
  Coding DNA Sequence Number=SeqID_22390
  Homolog annotation: Hit_ID=Q1EPE0; Match level="QueryCoverage=64%, HitCoverage=37%, E-value=4e-26, Identity=40%"; Hit description=WD-40 repeat family protein
  Pfam annotation: Domain name=WD40; Domain location=139-184; Score =33.1; E_value=9.6e-07; Accession=PF00400.22; Description=WD domain, G-beta repeat
  Pfam annotation: Domain name=WD40; Domain location=31-80; Score=18.8; E_value=0.02; Accession=PF00400.22; Description=WD domain, G-beta repeat
  Pfam annotation: Domain name=WD40; Domain location=88-126; Score =24.8; E_value=0.00032; Accession=PF00400.22; Description=WD domain, G-beta repeat
  Pfam module annotation: Pfam domain module=WD40::WD40::WD40; Domain location=139-184::31-80::88-126
MVVNEADGCVFTGSADGTVKMWRRVYGGTAHALIIVLRSELSPVNALALCHAVGGSGGGATRRCCFLYAGCSDGYVNVWEKEATVGRPTHAGYLKGHRLAVFCLASGCGGRVVVSGSEDATMRVWRREGISKGGGGAVHTCLAVIEGHRGPVRCLAVGGGEAGEVEGSMVVYSSGLDKSVKVWRIRVVGKEEEEDDDEELDEDGVEDNDHPEAAVAGEIFMEGGKGDGLDAHAIPVAMDDVVDGTEDEEAEFVGSTPVLSPVWVEKRRHTSRG

SEQ ID NO: 64170 - protein, 256 aa, Zea mays
  Coding DNA Sequence Number=SeqID_22391
  Gene Ontology: Mol. function=RNA binding; Cellular component =cytoplasm; Biological process=regulation of transcription
  Homolog annotation: Hit_ID=Q9LU22; Match level="QueryCoverage=89%, HitCoverage=73%, E-value=2e-40, Identity=36%"; Hit description =Arabidopsis thaliana genomic DNA, chromosome 3, P1 clone: MYA6
MEASFNRSSSPASPSSTKVVIEDHAELSGFNKDLAGSNVFGTHSSSVEAVQSRQLDYSHFISLPLALHPDLVNKLNYFQSSILGEENSNKDGSQSEGSIGEMDYDHKQAEAKMGAKGSQSDFGIDKSIFIKPETFHLTVLMLKLWNKERIDKASDVLQSVSTQVNEALENRPISIQLRGLLHATVMNVRHRKSSRNKRNTWTDSFDARGIFGRFGKAEWGAYPIHEIHLSQRFKFDRSGYYYCCSSIPLPAEMHTE

SEQ ID NO: 64171 - protein, 146 aa, Zea mays
  Coding DNA Sequence Number=SeqID_22392
MESRWVGEWNAPICAPNRRSASCRGGELDRAHLRVEEEICAAPRWRTGSRRDTGGDRAEAREGIAPMGGGVDLDMGGVWGGMPGGELGGGRSQGRGWWGRALGGGIPGGDGWRARVLTGLGPLFQGAAAGLGGWPSKEAGISGGGI

SEQ ID NO: 64172 - protein, 754 aa, Zea mays
  Coding DNA Sequence Number=SeqID_22393
  Gene Ontology: Biological process=intracellular protein transport
  Homolog annotation: Hit_ID=Q5NB64; Match level="QueryCoverage=87%, HitCoverage=98%, E-value=0.0, Identity=70%"; Hit description =Putative VHS1 protein
MDQSRRAVESYWRSRMVDGVTADDDKVAPVYKLEEICELLRASDASIVKEVADFVLKRLDNKSPLVKQKALRLIKYAVGKSGTDFKREMQRHSAAMRQLVHYKGHPDPLRGDALNKAVRETANEAIAAIFSTEDPKPAVATESLGKRIQGFGNTNYEPSRDDKKSFLSELSEVVGIGSASIKQGLSNFAAAHAMMTNDNGSTYRSPNLRRSLTTESERYGRYDPSEIQRESRASSDASKNAPSGPWGPTSSSTPTDETSSSQPGIKTREERLLETIVTASEASKLDAVALSRALESKLNSPLWQVRMKAICVLEAIVRKQDTDPYSIIASYFTENTASVVKCSELPQVSLREKASKVLNMLIGEQPTGTAATKAAMPTPVQMPDLIDTGDQDDLATSSGHASIEQNSGNSAYVSSVDDLLGGEPISDTSVTADSNGSDPFADVSFHEAETKETNDLFSGLTVEEKSSTTMHDSSSDKNELPDIFGSSPDSFNQGSVTDQGTVNDLIAGLNLNGTGHAQSAVKAEPNSNSGSQFFDTKNESGHVPSAATLNDILGQNSLYQQQQTPLQYSFPQHMMLNQSFPGQQLNYGAMGILLAQQQQLLQSFGNFNAGLGNSSFNSMNGGNTSVLPDIFNSSNQPQNHVAVMSSSKKDDNKAFDFVSVPKVHNLANKKTKNWIQQRSKGITEGSPEALRYNSPDCPMYTGQCPVLQGRAPQELASFGKSLRYNSPDCPMYTGLSGEPVEQRLLRANGHLQTH

SEQ ID NO: 64173 - protein, 80 aa, Zea mays
  Coding DNA Sequence Number=SeqID_22394
MYGLQVVMRRMVMIMLMVMVAFGAIYAQCPIAKYMWRVIQVPLNLRLIPKSIKNLYDNWLEKEGAKNGGARKQAYPKDGK

SEQ ID NO: 64174 - protein, 62 aa, Zea mays
  Coding DNA Sequence Number=SeqID_22395
MAWHQRKAQPRRKARPRPTSCVSEFDVSEDDIPVQPWTKTCASNHWTMPHLSAMRTRANYLK

SEQ ID NO: 64175 - protein, 62 aa, Zea mays
  Coding DNA Sequence Number=SeqID_22396
MARSAINHRIVRWAIGLSGEPACNGYPAPTVDSAKCYISEIVDAGGKKKPNPAFEEWDARDQ

SEQ ID NO: 64176 - protein, 85 aa, Zea mays
  Coding DNA Sequence Number=SeqID_22397
MATEKGNRLKYEKAIQTSMGYYRVISKYVRKQAQRRKTCSAGQAAPQDEALQPQLPPPSPMTIEQMFLMQTQAVQAIGQTLATIQ

SEQ ID NO: 64177 - protein, 229 aa, Zea mays
  Coding DNA Sequence Number=SeqID_22398
MAGCPEMAGATVVDGDGATWRIAGELPCIGVAACAGGSGGARGWWGAGAWGRGHSRAAAARAASAGGAASGGAGSVSGGGAASGGAGRFGDFAECGTRQSLLCRVPDKKQSAKPPALGKGPDSGSAIQVPFGSQNVTLVSPTLRDEKSEGFPSNHSRSALDRWNAAAMASVFMDPTTLKFLLNEIGRKFDETNARLGPAISLALNEHGRYRPKHWGHERAVSVLSAWSL

SEQ ID NO: 64178 - protein, 303 aa, Zea mays
  Coding DNA Sequence Number=SeqID_22399
MAALFSQAVIQRTGPYGEAGGHSTEGHHDRTSRGHAVQGPRYAADMSRPDREQRAGRARRDPCRGGHVAGRGGHATPRRGGCCAERGQAQGGRAPGKAAPGATTSSHAARALRTATLGWPGWGRARRGRATPGRGPGTRRTGRGMPGHRAEPTGGHAKAAPNGHGAAAPGREGPGPGPSERAGAGLCQGRGRGHALRRTPPPLLGRADPRAGGQAGAPCREGERAAPGPRPSPGPHHGRAAPFVGAAPWPRKGVGHAAGRGPPSQGKKGARKGERGGVGAPPREGAKAMQADSVEGGSDRRGR

SEQ ID NO: 64179 - protein, 171 aa, Zea mays
  Coding DNA Sequence Number=SeqID_22400
MSISSEHTNPDTPRNDENNPVADVPVGPTGVGKSLHQLFQAEMTQMLCSHHCRFGGPQHVNHRKVKIRRSDEQLRRSNSLLFPSASMNISGSDYASIEDLETANGYDWCQGICDYLKVYYLDNLDCEFVLPSGTPRWSVFTRSLIKRIGDVDKKSHNGGKMTNDNFPQYLQ

SEQ ID NO: 64180 - protein, 143 aa, Zea mays
  Coding DNA Sequence Number=SeqID_22401
MGDGQGEQEKGNEGAHWKLGPRHREPAMEVGELRTEANRETGAMGELHSRRACTRRETERAGELEREERVPSVSRGISALDSRRSRGQVESREGRAMEMGGRARRPWNALGHGKDSTRGDVVLVADEQEGRDTRESRSNELRG

SEQ ID NO: 64181 - protein, 539 aa, Zea mays
  Coding DNA Sequence Number=SeqID_22402
  Homolog annotation: Hit_ID=Q10Q33; Match level="QueryCoverage=62%, HitCoverage=96%, E-value=3e-35, Identity=33%"; Hit description =Expressed protein
  Pfam annotation: Domain name=Remorin_C; Domain location=233-345; Score=8.9; E_value=0.00033; Accession=PF03763.4; Description=Remorin, C-terminal region
MDDDLKHLRVSFSGVRQGGETVPLPSQRRTSSRRASDAAEEYDAAYAATVAAVAYAIAAREERLSASQESTPYAAADRLARGNKQSSKSARTTKRGESLEKPNFEGRRSSSSRWFTGKEPIDDDYQDEQANVSVKRPLRPAQKKPAPAEGAASDERLPALADPALRVRKDFSFTRKPSEKRGSRRFEQDQGNQTTAPPPPPPTARPSDKASSSYSAAGSRDSGAATTSGGPMAFSSENEAMADAWEKEKLARIKRKYNETMQTIAAWEAEKKANARRQKQLKDESESERKRAKALEEYTEEMSRINKVAAASRLTAEEKKRSAERKARDKAHTIRHHRKLRFARPRARTRAQPRKTANSAPPDPGLGLGLSPGRRQTPLRPTQGSDSGSAPEDGELRSARPRARTRAQPRKMANSAPPDPGLGLGLSPRRRRTPLRPTQGSDLSSTPEDDELRFARPQGSNSALASADGRRLARPRGSDSTTATEDRLDLDLGGASTSPNLGRGPTTSTGGAIITLPQADSGYGEQDWRPIWLAPPDRQ

SEQ ID NO: 64182 - protein, 954 aa, Zea mays
  Coding DNA Sequence Number=SeqID_22403
  Gene Ontology: Mol. function=ionotropic glutamate receptor activity; Cellular component=membrane; Biological process=ion transport
  Homolog annotation: Hit_ID=Q8GXJ4; Match level="QueryCoverage=96%, HitCoverage=91%, E-value=0.0, Identity=49%"; Hit description =Glutamate receptor 3.4 precursor
  Pfam annotation: Domain name=ANF_receptor; Domain location=48-496; Score=292.2; E_value=9.5e-85; Accession=PF01094.18; Description =Receptor family ligand binding region
  Pfam annotation: Domain name=Lig_chan; Domain location=621-883; Score= 176.1; E_value=8.6e-50; Accession=PF00060.17; Description=Ligand -gated ion channel
  Pfam annotation: Domain name=SBP_bac_3; Domain location=558-841; Score=-22.5; E_value=1.4e-06; Accession=PF00497.10; Description =Bacterial extracellular solute-binding proteins, family 3
  Pfam module annotation: Pfam domain module=ANF_receptor::Lig _chan::SBP_bac_3; Domain location=48-496::621-883::558-841
MGGVAQLVVVAALLATAAAAPTAAAAGALPSEVAVGALFTYDSTIGRAAQLAIELAVDDVNADDKVLAWTKLNLVSMDTNCSGFLGTIKAPSPLGSSPPAAALLHCNHRQSRGRFPTFELAPWPLLDARRRVVTAICTPCCHRRVVAALPAACAFHTGAACTLSIGYRAKFLNLVQFALELMEKNVVAVIGPQSSGIGHAISQVVNELHVPLLSFAATDPTLSASEYPYFLRTTTSDYFQMNAVASIVDYYQWKRVTAVYIDDEYGRGGVSALGDALALKRAQVSYKATIPPNSNTDVIRDVLFKANMMESRVMVVHVNPDTGLRVFSAAKKLQMMASGYVWIVTDWLAAVLDSSASRNPKYMSNIQGVIVLRQHTPDSDAKNKFISRWNNVARNRSMTPGLNSYGFYAYDSVWAVARSVDQFLNAGNQINFSTDPRLHDPNGTTLRLSTLKIFDGGDQMLQQLLLTNFTGLTGAVKFDSGGNLLHPAYDILNVGRSGTHLIGYWSNYSGLSVAAPEILYQMSPNASTSTHQLNSVVWPGDSTDIPRGWVFPNDGQPLRVGVPVKPSFKALVSGSTPDSVRGYCIDVFKSAIKLLPYPVPYQFIPIGDGTKNPSYVSIVGMVASNTLDAAVGDFAIVRNGTRLAEYTQPYIDSGLVIVAPKLLDEKLSPSEENTRTALGRFVLIIWMFVVLIITSSYTASLTSILTVQQLATGITGLDSLISSSLPIGYQTGKFTKKYLMLNLNVPESRLVQLNTIEEYADALNRGPKNGGVAAIIDEKPYIDIFLSHYCNFKIVGQQFTREGWGFAFQKDSPLAADMSTAILQLSESGQLQSIHDEWFTQPSCATNDESNVGATRLGLGSFWGLFLICALICLFAVVVFFIRVCWQYKQYSNSEDADESNEAGADGAGKRQRKLSRLGSFQEILKFFDMKEEEVMKSSMKRRPGEKDNHAAGF

SEQ ID NO: 64183 - protein, 88 aa, Zea mays
  Coding DNA Sequence Number=SeqID_22404
  Gene Ontology: Mol. function=transcription factor binding; Cellular component=intracellular; Biological process=regulation of transcription, DNA-dependent
  Homolog annotation: Hit_ID=O23657; Match level="QueryCoverage=53%, HitCoverage=22%, E-value=2e-13, Identity=77%"; Hit description =AtRab18 (Putative GTP-binding protein) (GTP-binding protein(RAB1Y), putative)
MDSSSSSLSQQPEFDYLFKLLLIGDSGVGKSSLLLRFTADSFDDLSPTIGDLFDFDYIPRSDRLPSSRHQCNLNLCSPIYFLQVLTSR

SEQ ID NO: 64184 - protein, 484 aa, Zea mays
  Coding DNA Sequence Number=SeqID_22405
  Gene Ontology: Mol. function=dolichyl-diphosphooligosaccharide -protein glycotransferase activity; Cellular component=cellulose and pectin-containing cell wall; Biological process=protein amino acid glycosylation
  Homolog annotation: Hit_ID=Q9ZUA0; Match level="QueryCoverage=90%, HitCoverage=93%, E-value=1e-131, Identity=53%"; Hit description =Putative ribophorin I
  Pfam annotation: Domain name=Ribophorin_I; Domain location=40-475; Score=490.7; E_value=1.7e-144; Accession=PF04597.5; Description =Ribophorin I
MTDHRDVMLPLSLQYIATRALLLLVIASAVSCSSLPPEDGIRVVSAEKRIDLTGPIVKVFLTLKVMSCSDGHPVASSSIGISHNFSTPLCQVENAPTASEASRVLLAFTPTEFQHLSIVKATRAEGKRKKKAFVPLSVQASELATTAPDAPRLYSVLLSTPLKPGDATTLEVLYMLTHSLEPFPAEISQSESQLVYYRDSAVLLSPYHVLEQVTYIKMPSNRIESFTRVDPTTRAGSEVKYGTYSNQMPNSYLPVLVHYENNRPFAVVEELLLIEYFLARLEYQSRPSISGASSFKNLLARLPPRVHSVYYRDEIGNISSSHLRTDSHKSDLEIEPRYPLFGGWHCTFTIGYGLPLQDFVFESVDGRRYINLTFGCPLLDTVVDDLTVKVVLPEGSKNPEHVVPFVTEKHLETSYSYLDVVGRTTVVLKKKNVVGEHNVPFQVYYEFNPIFMLAEPLMLISAVLLFFVAFIAYLHMDLSIRKSS

SEQ ID NO: 64185 - protein, 534 aa, Zea mays
  Coding DNA Sequence Number=SeqID_22406
  Gene Ontology: Mol. function=drug transporter activity; Cellular component=membrane; Biological process=multidrug transport
  Homolog annotation: Hit_ID=Q1SP70; Match level="QueryCoverage=80%, HitCoverage=76%, E-value=1e-119, Identity=49%"; Hit description =Tetratricopeptide-like helical
  Pfam annotation: Domain name=PPR; Domain location=155-189; Score=5.1; E_value=1.9; Accession=PF01535.11; Description=PPR repeat
  Pfam annotation: Domain name=PPR; Domain location=190-224; Score =11.7; E_value=0.31; Accession=PF01535.11; Description=PPR repeat
  Pfam module annotation: Pfam domain module=PPR::PPR; Domain location =155-189::190-224
  Subcellular localization annotation: CTP_CleavageSite=54; ConfidenceScore=5.65e-01
MAAAVLRPTAATLRFLSTPPHQRRRVLVGHLPFARRRRHSSTATAPALEDSSPRSGEGKAVRRRRARESPQGLLRHQLDMCSRNADLTTALRLYDDALSPDNPIPLSLHHYNCLLYLCSNAAATDSDSHISATAAQRGFDIFARMEADGVQPNEATLTSVARLAAATRDPAMAFSVVRRMAAAGTPPRLRTYGPALFAYCDAKDADGAKQVEAHMDASGVVPEEPELAALLRVNADTGKADEVYRLLHRTRVLVRQVCDTTAQVVEAWFRSDAASQAGVDSWDPTKVKEGVVKGGGGWHGQGWLGKGAWSVGWTEMGKDGTCQRCGERLVCIDIDPAETDNFANSLTELAIKLEAREDFLSFQSWLRRHGPFDAVIDAANVGLYKSKDFCFSQVNSVVNAIQRVTKSKKLPLIVLHRSRVNVGPAKAPYNQKILDSWRNAGALYATPPGSNDDWYWLYAAVSCRSLLVTNDEMRDHLFQLLGTSFFPRWKEKHQSLDAAPLCAEASRLLALDNLGGFARKFSHHTLCAEAQAIL

SEQ ID NO: 64186 - protein, 99 aa, Zea mays
  Coding DNA Sequence Number=SeqID_22407
MAWWRARVVAPARHAWLAVVVAARVRGRKRRTERAGIVDLHKDVQTCGYHDVQVMWGMLGLEAGAPSAPERRKRSPFWTWTPSFWHFASSRRTGTAAAR

SEQ ID NO: 64187 - protein, 288 aa, Zea mays
  Coding DNA Sequence Number=SeqID_22408
  Gene Ontology: Mol. function=Rab GTPase activator activity; Cellular component=intracellular; Biological process=regulation of Rab GTPase activity
  Homolog annotation: Hit_ID=Q69UB8; Match level="QueryCoverage=61%, HitCoverage=72%, E-value=3e-48, Identity=61%"; Hit description =GTPase activating protein-like
MKRWGSSGQAADSFYQVRPDCSQNVPNTKFKIKAGKTLSVRKWHAAFTRDGCLDIASVLSRIQRGYARWKEECKEMDSHVGSGKIITAPIITEDGFPIKDPLVLLEATSDTQGTSIATGNSGNGIENRVLDKQIIDWKLTLHQIERLGGGDYLFAFRMFMVLFRRELSFGDSLYLWEEVLPCDGPRNDDPGAMCDSIQSCAATLQAPPLVRRAARAARLLPRRRPSPTRRPLLPPAAAGHFPCPGRRPLPLCFARQTREQQPRQDPPARRQGRESLVRARTAETASLD

SEQ ID NO: 64188 - protein, 126 aa, Zea mays
  Coding DNA Sequence Number=SeqID_22409
MGLPDGTGVSALDFFEGLRFQEWIFNKFNRPNNFLPDWVREWQPFVEEESKSWKVTHEHIQNAVDSFGRVLMWDPDPSNLSGLEDLPSSDESVGFFNDIIIPKGFTSPMWKLLNQLKQCWPFQLSP

SEQ ID NO: 64189 - protein, 165 aa, Zea mays
  Coding DNA Sequence Number=SeqID_22410
MVYKQRYMGESGRWPKKKFFEAHDAMMATEVAKKAAKDEMHRPLIACDSAIVAQVQVQTLLEGYNAELQELHLATSKVCDQLAPPPPSKVPLIDRLRALPGHVEHAVFEGAFHKGSLVLDQMVSPFNEIDVGMIVEGFAAGRSDEDLDAIGDLFSNAMNQEQGNT

SEQ ID NO: 64190 - protein, 138 aa, Zea mays
  Coding DNA Sequence Number=SeqID_22411
  Gene Ontology: Mol. function=Rab GTPase activator activity; Cellular component=intracellular; Biological process=regulation of Rab GTPase activity
  Homolog annotation: Hit_ID=Q2R1Y1; Match level="QueryCoverage=82%, HitCoverage=25%, E-value=7e-41, Identity=77%"; Hit description =RabGAP/TBC domain-containing protein, putative, expressed
MGSPIVGSSDVAQVDEGEVASVMMWALEYDPGICSTYEEDNTGAVVHKIEGKVKSIRQFGKYERENMKKRANDGDGPVPISVFLVASVLKENSTKLLQEARGIDDIIRILNNVNGNLDAKRACVVALKLHRKYHKKSW

SEQ ID NO: 64191 - protein, 223 aa, Zea mays
  Coding DNA Sequence Number=SeqID_22412
  Homolog annotation: Hit_ID=Q9C568; Match level="QueryCoverage=69%, HitCoverage=73%, E-value=5e-07, Identity=26%"; Hit description =NDR1/HIN1-like protein
  Pfam annotation: Domain name=Hin1; Domain location=60-200; Score =103.7; E_value=5.5e-28; Accession=PF07320.4; Description=Harpin -induced protein 1 (Hin1)
  Subcellular localization annotation: CTP_CleavageSite=33; ConfidenceScore=5.26e-01
MKPDIMHQGQGTPAPPTTASHARRIARRTRDSCAAALANTLCSLLLGLLLIAAVVVFVIWLGLRPHRPRFNMASFSVAGGLDPDYSPAGASLSFNVTDRNPNRHIGIYYDAMHASVHFYDALVASGPAFADGWYQPNRTTTSITGLLDFLGPVTTDASWPSFSAAVRAGRLPLRLQLTTAIRFRVANAFHSGRQKMHVSCNLFVGANGHLLPDSVGVACDRYI

SEQ ID NO: 64192 - protein, 111 aa, Zea mays
  Coding DNA Sequence Number=SeqID_22413
MGFPMVQCTEKDLQVQSPSPSVTFAQGFALIAVIRAGLRQDSAGRVKGSEEERIGSRGRSRARTLQLIEGKGSSEVELCVSQARAPAIAYLGRYRLTGDLPSPSNVMDPTL

SEQ ID NO: 64193 - protein, 46 aa, Zea mays
  Coding DNA Sequence Number=SeqID_22414
LRVLLERKRLRVSCLVGEEEIKGMGGVAAFIEDWRDQPRRLREYKM

SEQ ID NO: 64194 - protein, 111 aa, Zea mays
  Coding DNA Sequence Number=SeqID_22415
MVSAPSLTLGFLTAGFLSGSLKAYLLLLSKQTAGTSAGRPRTFAKHDEKDVYSRRGHQKKRIIRFYETSKQLPNGIKNREMETLEKHHVVKSQSHVRCNGLAFDKLECKGG

SEQ ID NO: 64195 - protein, 103 aa, Zea mays
  Coding DNA Sequence Number=SeqID_22416
MEAQQEVVDKNAGNRSGKGEEDSWLLLSPTIQLLPRLSHRRLRFIVVADDLDATADDSDVAALDLASATLDLASAAPDSALPTPKWRRPFPFPFPYVILLILT

SEQ ID NO: 64196 - protein, 85 aa, Zea mays
  Coding DNA Sequence Number=SeqID_22417
  Gene Ontology: Mol. function=hydrolase activity, hydrolyzing O -glycosyl compounds; Biological process=carbohydrate metabolic process
  Homolog annotation: Hit_ID=O80403; Match level="QueryCoverage=56%, HitCoverage=6%, E-value=1e-18, Identity=81%"; Hit description =Isoamylase
MASLIFLFSIKAFLSCSMDYWDSDISTICQGHLSVQGEFYNYSGCGNNFNCNHPVIRGFIEDCLRYWVTEMHVYGVRFDLALHLQ

SEQ ID NO: 64197 - protein, 174 aa, Zea mays
  Coding DNA Sequence Number=SeqID_22418
  Gene Ontology: Mol. function=nucleotide binding; Cellular component =membrane; Biological process=small GTPase mediated signal transduction
  Homolog annotation: Hit_ID=Q40525; Match level="QueryCoverage=96%, HitCoverage=63%, E-value=1e-59, Identity=75%"; Hit description=Nt -rab6 protein
  Pfam annotation: Domain name=MMR_HSR1; Domain location=10-162; Score=- 17.9; E_value=0.044; Accession=PF01926.13; Description=GTPase of unknown function
  Pfam annotation: Domain name=Miro; Domain location=11-162; Score =39.3; E_value=1.3e-08; Accession=PF08477.3; Description=Miro-like protein
  Pfam annotation: Domain name=Ras; Domain location=11-174; Score =112.1; E_value=1.6e-30; Accession=PF00071.12; Description=Ras family
  Pfam module annotation: Pfam domain module=MMR_HSR1::Miro::Ras; Domain location=10-162::11-162::11-174
MAPVSALAKYKLVFLGDQSVGKTSIITRFMYDKFDNTYQVLDIVLWDVRAQIFCVLRVLDRDCDVNSLHLNSRPGNATIGIDFLSKTMYLEDRTVRLQLWDTAGQERFRSLIPSYIRDSSVAVIVFDVASRQSFLNTSKWIDEVRTERGSDVIIVLVGNKTDLVDKRLVVFALS

SEQ ID NO: 64198 - protein, 269 aa, Zea mays
  Coding DNA Sequence Number=SeqID_22419
QIYHSTVQPDCPTEIRLTLTHPDPDSRFWTRRVRRLAGSDVIRIRPGSEVARRRTVKLLRRESHCGPRRSSLSGKGKTTKEETPNPIDYDRPGIAVIFQTHCSSVLVIISQMLSSAYRTGDAIDLDKRVKGSRLNLLGQPKILMYLQGQLHTPQFCSSFATACKDSGLHSGALFFIFQIGGYGCINVTKTIRLDWLLQQLKGATTSKSQTHARYDFFLCTLGHAQDDFFYCTGGRATTSKSQTHARYDFFLCTLGHAQDDFFYCTGVSM

SEQ ID NO: 64199 - protein, 194 aa, Zea mays
  Coding DNA Sequence Number=SeqID_22420
  Homolog annotation: Hit_ID=Q2QMU6; Match level="QueryCoverage=98%, HitCoverage=9%, E-value=1e-34, Identity=37%"; Hit description =Kinesin motor domain containing protein, expressed
MQREELEVDLQKVREQMLVVQPFGKARRYMEDGMVDLADSSRHPIDMHNELLCAQETIRILRREVSEKESEIAQCNAHISELNVHVEAVAQEYKHKMNSKKDEELSAAKQRIVELEGIAARRQREEATEGNNKDSSDTQVYLKCNVQCFYEAKEKFQQLQKVISILGDTEKRALYDETDISDDDVRTSFIALQF

SEQ ID NO: 64200 - protein, 63 aa, Zea mays
  Coding DNA Sequence Number=SeqID_22421
MVPHPRTSGPECQDVGMMATWGIEGPPLTGVAMGSIEGHVAYPDIYRSGSPEAREHGFLGIAK

SEQ ID NO: 64201 - protein, 656 aa, Zea mays
  Coding DNA Sequence Number=SeqID_22422
  Gene Ontology: Mol. function=transcription regulator activity; Cellular component=nucleus; Biological process=regulation of transcription
  Homolog annotation: Hit_ID=Q6YW41; Match level="QueryCoverage=91%, HitCoverage=83%, E-value=4e-47, Identity=46%"; Hit description=Basic helix-loop-helix (BHLH) family protein-like
  Pfam annotation: Domain name=HLH; Domain location=387-458; Score =31.8; E_value=2.4e-06; Accession=PF00010.16; Description=Helix-loop -helix DNA-binding domain
MDTLFVLGQESRLRILQQAAARVPGCAYLCAWAAAIPSQPHRPASSSSSAAAATTSARLLCCIDAWLCDGGRPSLGDDAHRLRALFDAYRGSLCAPVSGCVPGWAYKDGRAYMELPAHDLTTSASLPVQQQFYQEAGIQMAAFMGCESGEVEIGMYTAPTSGTSPMSLESTLQQVFSEDFFQQSLLEELLQLPPTRPSSPSVSVGSPAADALTSLPRTMAATPTPSSSVERRAPPVPPPPPPHARPPVFPVPFARHGPGHVRFPSADTDDAAMAQAMIDVISGASSSSALPTPPSTATAPPPPGKHHRARRRRGAATAFRAYNAALAPRAPWRPPGVPGQRMIKMGISILRRMHMLRFSRERTGTTMAQRGQEGEDDLSSPAVPTSSQLNHMISERRRRERLNESFEALRGLLPPGSKLGLVRFYPNPYGLRGIERFQSLKDKATVLAKTLDYMSILVAQIADLEAKNRSLESRAQHHHRHANGGSNGGRVVVLQGLMSGTSSSERVQVHVTAGAGDVCTSASSPSAGPPPPASREVEETVRVHARAARSDVTEAGRPARWPPIKGMGRFTVVAVDAGRSSDGGGDFAQATFTLRATVLSRLYMSSGSSPWRKQKRPSLPLDRFPFADLGEFVTLLRRLEYVLQSPLAYLQSLVFW

SEQ ID NO: 64202 - protein, 107 aa, Zea mays
  Coding DNA Sequence Number=SeqID_22423
MTPTTLLLRAMTSSIGRGKLNGLCFFANTAGGLYTMALEEDMVIDEMTNVVASQDKLLRLVAHERKEYKCKDEATLRELESARASVVVSGEIECDECALYMLHITTL

SEQ ID NO: 64203 - protein, 330 aa, Zea mays
  Coding DNA Sequence Number=SeqID_22424
  Homolog annotation: Hit_ID=Q53LP7; Match level="QueryCoverage=25%, HitCoverage=24%, E-value=3e-25, Identity=73%"; Hit description =Expressed protein
MQRRPEFSFPGSPARGLPPRPPANPMAPRYGDEEVRWLQASPQASPEMDYSSGGSGTPSPQLWAHHHQLHRQYPASAGSSPSRAQAIAGYRREMLDLVRGLPESAYELSLRDIVEHPSPPSPPHAPTNPLPPPTTAGPRASRAVPVPAQEKGESAGARKDAVAAADAEDGGGSRKQGGSKGKKQGEEAEDDAEAAEPEPGPQRQPGHRPAHQALPPRSPSAAKKKVSPKPDAAKDSKKKKEERRKKGGGGAGGGVVDQERVQRGREQQPDQQQQQQQQRRQPQECQWRRQSESAGQELEQKFESFLKKKRTGCYAFFRANKGKKNEANQD

SEQ ID NO: 64204 - protein, 80 aa, Zea mays
  Coding DNA Sequence Number=SeqID_22425
  Subcellular localization annotation: CTP_CleavageSite=26; ConfidenceScore=5.33e-01
MAAILTLPSPPRSAPPISTIPRPHRRASRLSSSLPESSGWGQDGTMAHLPGSGHSYATKSNQTRVIKTPGCIDRIPQLVA

SEQ ID NO: 64205 - protein, 170 aa, Zea mays
  Coding DNA Sequence Number=SeqID_22426
MTTAEVPVGEIFTPKSWLSSRAFHALEHLPKKLANLYNLNKNFGNTIRRATLHSAFIQPLTVITDSHVKDGTVIPAASHNNNQLLRQKHQPVSHLLTKHEEGRENKIAHHRIQCDYLICNGELPKFRDKGQFGKPIAKAECKGYDFDLGKWWDNYGTQVPILQRMVVCHL

SEQ ID NO: 64206 - protein, 40 aa, Zea mays
  Coding DNA Sequence Number=SeqID_22427
  Gene Ontology: Biological process=intracellular protein transport
  Homolog annotation: Hit_ID=Q53LP6; Match level="QueryCoverage=87%, HitCoverage=33%, E-value=1e-12, Identity=91%"; Hit description=VHS domain
MSAAVACAERATNDMLIGPDWAVNIELCDIINMDPGNLES

SEQ ID NO: 64207 - protein, 230 aa, Zea mays
  Coding DNA Sequence Number=SeqID_22428
MASSQHLKGVNNFLQKHGGRMRWTCLGFQRKCLPSPTNVAYDPISTACHRASSSGSAPYSSPYGACGLPITHWGSAETHKQQGMLSANWFHSSGPATKGHQSTVLVNDTRQLISCTDHAQANVHTGAPPRLKANGHDLKNLSLRSCGLPSRKGNLRKLNPKRVGAAWAEKRRAELEMEKEGEIVPITSDSSWLPNFGSVWQSGTRKESRKEFEKNHKFHDTKSNMTYPWR

SEQ ID NO: 64208 - protein, 82 aa, Zea mays
  Coding DNA Sequence Number=SeqID_22429
MAVPLSRVLLLCQQQARAATLVFIRARARYREGKQADKRGTGRKNDDFNMARVGTRVLSITKNEQEAAAVPTRMDSCRRVGL

SEQ ID NO: 64209 - protein, 126 aa, Zea mays
  Coding DNA Sequence Number=SeqID_22430
  Gene Ontology: Mol. function=DNA binding; Biological process=DNA integration
  Homolog annotation: Hit_ID=O24587; Match level="QueryCoverage=63%, HitCoverage=7%, E-value=9e-31, Identity=80%"; Hit description=Pol
  Subcellular localization annotation: CTP_CleavageSite=9; ConfidenceScore=5.03e-01
MKLWKETSRSSKTTTSSRSGLAATPSRLPVKAAFIYVSFPHFDLLPDIMLYVCMCARLQADPKECHLRAMKRILRYLVYTLNFGLWYPRGSTFDLVGYSYVEYARFKVDKKSTLGTCQFLGRSLVS

SEQ ID NO: 64210 - protein, 456 aa, Zea mays
  Coding DNA Sequence Number=SeqID_22431
  Gene Ontology: Mol. function=protein serine/threonine kinase activity; Cellular component=mitochondrion; Biological process =protein amino acid phosphorylation
  Homolog annotation: Hit_ID=Q84KB6; Match level="QueryCoverage=65%, HitCoverage=86%, E-value=1e-34, Identity=28%"; Hit description =Fertility restorer homologue
  Pfam annotation: Domain name=PPR; Domain location=146-180; Score =34.5; E_value=3.6e-07; Accession=PF01535.11; Description=PPR repeat
  Pfam annotation: Domain name=PPR; Domain location=181-215; Score =23.2; E_value=0.00094; Accession=PF01535.11; Description=PPR repeat
  Pfam annotation: Domain name=PPR; Domain location=217-251; Score =19.9; E_value=0.0091; Accession=PF01535.11; Description=PPR repeat
  Pfam annotation: Domain name=PPR; Domain location=253-287; Score =22.7; E_value=0.0013; Accession=PF01535.11; Description=PPR repeat
  Pfam annotation: Domain name=PPR; Domain location=288-323; Score =10.6; E_value=0.42; Accession=PF01535.11; Description=PPR repeat
  Pfam annotation: Domain name=PPR; Domain location=324-358; Score =49.2; E_value=1.4e-11; Accession=PF01535.11; Description=PPR repeat
  Pfam annotation: Domain name=PPR; Domain location=359-393; Score =28.4; E_value=2.5e-05; Accession=PF01535.11; Description=PPR repeat
  Pfam module annotation: Pfam domain module=PPR::PPR::PPR::PPR::PPR::PP R::PPR; Domain location=146-180::181-215::217-251::253-287::288 -323::324-358::359-393
MAGNKFSSYHLAAALRREPDPAAALRLFLNPPASATPFRYSLRCYDLIISRLAAARLFPAMESILSRLASSSGPRPREQLLCRVVSAYGRARLPAAARRAFAHPAFPGPRTARALNALLHALLACRAPLRDLLAVCRDAGTPPDACTYNILMRAAAASGSLAHARHMFDEMLRRGIAPTVVTFGTLVAALCAAGQLEGAFEVKEVMVRQYHVLPNVYVYTSLIKGLCEKGDVDAAVALKEEMAGKADLVLDSAVYATLVRALFQVGRKGAVVGLLEEMKGSGVVADTVVYNAMLAGFCEDEKDLAAAFAVLDDMQKNGCKADAVSYNTLVAGLCKLGRWRDAHELVEDMPRQGCHPDVVTYRMLFDGMCAAEEFLEANQVLDEMVFKGFAPSNDGAQKFVQGIEKEGDVVLLESVLCRLAKVNALVPSGWEKAVSGALNDPTELRLEKQLDSLRIA

SEQ ID NO: 64211 - protein, 459 aa, Zea mays
  Coding DNA Sequence Number=SeqID_22432
  Gene Ontology: Mol. function=DNA binding; Cellular component=nucleus
  Homolog annotation: Hit_ID=Q6YZE8; Match level="QueryCoverage=87%, HitCoverage=89%, E-value=3e-87, Identity=46%"; Hit description=SBP -domain protein-like
  Pfam annotation: Domain name=SBP; Domain location=113-191; Score =174.2; E_value=3.2e-49; Accession=PF03110.5; Description=SBP domain
MPVSWDLPDLEHDAVPPPIAAAASAAPSPAAASGIAAAAAGPPPAAAPRGAPSRAECSVDLKLGGLGEFGAADGTKEPVVAAAAAAAAAPPSASPMKRPRSGPGGAAGAQCPSCAVDGCKADLSKCRDYHRRHKVCEAHSKTPVVAVAGREMRFCQQCSRFHLLAEFDEAKRSCRKRLDGHNRRRRKPQPDTMSSGSFMTSQQGTRFSSFPVPRPEPSWPGVIKSEDSGSYYAHQRHPVLSSRPHFAGGGSTPPAYSSKEGRRFPFLQDGCDQQQVGGFSAGAGAQQLEVSSTSTVCQPLLKAAAAAAPPPPPESSSSNKMFSDGLAPAVLDSDCALSLLSSPANSSSVDVGRMVVHQPAEHIPMAQPLVPGGLQQQQQHHPFGGSPAWFACSQAGSSAVSAGGFACPPGVESEQLNTVLVPSSDGGGHDMNMNYHGIFHVGGDGSSDGTSPSLPFSWQ

SEQ ID NO: 64212 - protein, 232 aa, Zea mays
  Coding DNA Sequence Number=SeqID_22433
MKASPADALVARLNARILEGRLAAARCMDRRTDADGGSDMSSYIGFSVVPTKSLLVGPILRRQEGSGGSIDAGDIDDRKRKSVATRGGVDEGCSKGKVVAIVGASNRFVKELVETCVEPGEVMTLLDLREASSRMLKVTDGEWHKKVPIPMAPSEDNFTSYLARCSKVFPYEQNIGAAVTAVMDKDCQESLRKKRKARCGLWSLNVRQRHSIPARRVPLLPQRFLRLRCWLL

SEQ ID NO: 64213 - protein, 48 aa, Zea mays
  Coding DNA Sequence Number=SeqID_22434
MELSPRNVFHSDNPLLPSLKKLAIIECESDSTHSIMHGRRFRLCSNLL

SEQ ID NO: 64214 - protein, 112 aa, Zea mays
  Coding DNA Sequence Number=SeqID_22435
MTRPWASALTARGGAAAVWAAGGGAAAARPSASRYACADAVGMPGDAPRTGGDTSGAAPRARGDTLGEKGAAATATSTTASTTTTSSTPGQAPGIYESQAPDLLQFARTTRC

SEQ ID NO: 64215 - protein, 115 aa, Zea mays
  Coding DNA Sequence Number=SeqID_22436
MARGDAPIEIASVRYRESPSPASWPCPHGTLPRSAMVNLAPLPPSCNCKRRSNLWSAFPPRIMVLNAQTKIQYDAKVTVSMGAKTHNEIFSLQIVYKLDITIYWDKSYQKLKKKS

SEQ ID NO: 64216 - protein, 265 aa, Zea mays
  Coding DNA Sequence Number=SeqID_22437
  Homolog annotation: Hit_ID=Q6QP54; Match level="QueryCoverage=49%, HitCoverage=39%, E-value=3e-12, Identity=52%"; Hit description =Putative kinase
MARGDVPIEIASVRYRESPSPASWHCPHGTLPRSAMVNLAQQPQAPQQPVVCFSSTEDSAAYAAPTAEPLDRARLTAAKSGLRRHRKLRLARPRARTRAQPRKTANSAPPDPRARTRAQPRKTANSAPPDPRARSPGRRRTPLRPTPGLGLGLSPGRRRTPPRPTPGLGLGLGPERRRTPPRPTLGLGLGLGPGRRRTPPRPTPGLGLNPGLSRWSPPRPTRGLGLDLDLGRQTQPRPRRSLHLAQPRAQTDHVNRKRHHYPTSS

SEQ ID NO: 64217 - protein, 273 aa, Zea mays
  Coding DNA Sequence Number=SeqID_22438
  Gene Ontology: Mol. function=GTPase activity; Cellular component =protein complex; Biological process=protein polymerization
  Homolog annotation: Hit_ID=Q10G26; Match level="QueryCoverage=99%, HitCoverage=63%, E-value=1e-87, Identity=62%"; Hit description=Cell division protein ftsZ, putative, expressed
  Pfam annotation: Domain name=Tubulin; Domain location=85-273; Score =250.1; E_value=4.5e-72; Accession=PF00091.15; Description =TubulinFtsZ family, GTPase domain
  Subcellular localization annotation: CTP_CleavageSite=47; ConfidenceScore=5.07e-01
MATQLPCFTQLSPPSCSWIKDVGNCKATPDRVARSARALGHCHFRCCAGPRSANSFKKKDSFEKKDSFLELHPEVSLLRGEKSAEVVPMKGSSDGVNRMIESSMNGVEFWIVNTDVQAIRMSPVLPHNRLQIGQELTRGLGAGGNPDIGMNAAKESSESIQEALFGADMVFVTAGMGGGTGTGGAPVIAGIAKSMGILTVGIVTTPFSFEGRRRAVQAQEGIAALRNSVDTLIVIPNDKLLSAVSPNTPVTEAFNLADDILRQGIRGISDIIT

SEQ ID NO: 64218 - protein, 108 aa, Zea mays
  Coding DNA Sequence Number=SeqID_22439
MEDEVQRAAARASWDRKARGEEEDEEEHDPEMTLDYYAYQAKKFRNTWNILYFGHFGRFEDTTTAVTQSVADWSRLREACGRQPVSRRLEPPLRGQRLWVKAAACYFC

SEQ ID NO: 64219 - protein, 226 aa, Zea mays
  Coding DNA Sequence Number=SeqID_22440
  Gene Ontology: Mol. function=nucleic acid binding
  Homolog annotation: Hit_ID=Q9LVN8; Match level="QueryCoverage=66%, HitCoverage=19%, E-value=6e-24, Identity=44%"; Hit description =Similarity to SNF2/RAD54 family
  Pfam annotation: Domain name=Helicase_C; Domain location=91-164; Score=44.5; E_value=3.7e-10; Accession=PF00271.21; Description =Helicase conserved C-terminal domain
MKLNNFMEKWKRSIPSGMCCPDLEMLEGEVLCEKLGAETWVHAFSVTDLPLAPAERFAALFRDQDIGMVEKIAMDLADIAYGDNAHWKLRNLVKEGHHVLIFSQTRKMLNLIQDFQEGPGAPIFLLTTQVGGLGLTKAARVIVVDPAWNPSTDNQSVDRAYRIGQNKDVIVYSYLVCALRRFQSFLVCHNKVLMFPSRISSCKKSMVNKLLCKRSVLAELPLIEHG

SEQ ID NO: 64220 - protein, 157 aa, Zea mays
  Coding DNA Sequence Number=SeqID_22441
  Pfam annotation: Domain name=VQ; Domain location=37-67; Score=30.4; E_ value=6.2e-06; Accession=PF05678.4; Description=VQ motif
MASPLLQRPHELLGPRPAPLKLQVVNRRRRRQPVIIYVESPRVVHAHPAEFKSVVQRLTGTAPALPLPLKFPFHFHFPSSVGAASRALLPLTSSTSSGVMSVVTVADTTCGGGSPVQQLPNHHMLVSSDPCDLPPPPSLAACYHQHHGGGLLIDQHQ

SEQ ID NO: 64221 - protein, 295 aa, Zea mays
  Coding DNA Sequence Number=SeqID_22442
  Gene Ontology: Mol. function=binding; Cellular component =intracellular; Biological process=regulation of transcription
  Homolog annotation: Hit_ID=Q6Z996; Match level="QueryCoverage=91%, HitCoverage=49%, E-value=1e-123, Identity=56%"; Hit description =Putative pentatricopeptide (PPR) repeat-containing protein
  Pfam annotation: Domain name=PPR; Domain location=111-145; Score =12.5; E_value=0.25; Accession=PF01535.11; Description=PPR repeat
  Pfam annotation: Domain name=PPR; Domain location=146-180; Score=7.5; E_value=0.97; Accession=PF01535.11; Description=PPR repeat
  Pfam annotation: Domain name=PPR; Domain location=212-246; Score=8.1; E_value=0.83; Accession=PF01535.11; Description=PPR repeat
  Pfam annotation: Domain name=PPR; Domain location=77-110; Score=27.1; E_value=6.1e-05; Accession=PF01535.11; Description=PPR repeat
  Pfam module annotation: Pfam domain module=PPR::PPR::PPR::PPR; Domain location=111-145::146-180::212-246::77-110
MRHSVCKPNDVTFATIFSVCTNHAFLVLGKSVQALQMRMGFDSYVHVSNALISMYAKCGSIGEARAVFESIRCKDLVSWNSLIFGYSQHGLAEHCLYLLREMEGHITPDAISFLGVLSSCRHACLVAEGRRCFRAMIEHGVVPEIDHYSCMVDLFGRAGLLDEAWDLIQTMPMPPNGVVWGSLLASCRVHGSTWIGIQAAEHRLKLEPSCAAIHVQLANLYGSIGCWDDVARVRKVMKERGLKTNIGCSWIEVGNKVYTFTAENRSKNQMIARYVQVHLKRHSIGIDITPQISAT

SEQ ID NO: 64222 - protein, 94 aa, Zea mays
  Coding DNA Sequence Number=SeqID_22443
  Gene Ontology: Mol. function=transporter activity; Cellular component= mitochondrial inner membrane; Biological process=transport
  Homolog annotation: Hit_ID=Q53HZ4; Match level="QueryCoverage=82%, HitCoverage=33%, E-value=1e-17, Identity=47%"; Hit description =Putative mitochondrial carrier protein
  Pfam annotation: Domain name=Mito_carr; Domain location=20-94; Score =60.3; E_value=6.5e-15; Accession=PF00153.17; Description =Mitochondrial carrier protein
MEQGQGPPPPKPPATERDIGFAERAVAAAGAAVVSAVLVNPLDVAKTRLQAQAAGVVYNPEGIFRLWRGTGASLALAVPTVGIYLPSYDLLRNG

SEQ ID NO: 64223 - protein, 397 aa, Zea mays
  Coding DNA Sequence Number=SeqID_22444
  Gene Ontology: Mol. function=oxidoreductase activity, acting on the CH-OH group of donors, NAD or NADP as acceptor; Cellular component =cytoplasm; Biological process=leucine biosynthetic process
  Homolog annotation: Hit_ID=Q7Y096; Match level="QueryCoverage=98%, HitCoverage=93%, E-value=1e-176, Identity=82%"; Hit description =Putative 3-isopropylmalate dehydrogenase
  Pfam annotation: Domain name=Iso_dh; Domain location=46-396; Score =646.8; E_value=1.7e-191; Accession=PF00180.10; Description =Isocitrateisopropylmalate dehydrogenase
MAAALQATPIKTLATSRWRVEGAEARPRPRPIAVSFRCSAAARSYNITLLPGDGIGPEVVAVAKDVLSFAGALEGVELRFQEKLVGGSALDATGVPLPDETLDEAKGSDAVLLGAIGGYKWDTNEKHLKPETGLLQLRAGLGVFANLRPAAVLPQLVDASTLKKEVAEGVDIMVVRELTGGIYFGKPRGFGTNDKGDDIGFKHRKFIQLLSLNQNQLGMQDVIDRIARVAFEVARKRRGKLCSVDKANVLEASMLWRKKVTALASEFPDIELSHMYVDNAAMQLVRNPKQFDTIVTNNIFGDILSDEASMITGSIGMLPSASVGESGPGLFEPIHGSAPDIAGQDKANPLATILSAAMLLRYGLGEENAARRIEAAVTETLNHGFRTGDIYSPGTVR

SEQ ID NO: 64224 - protein, 640 aa, Zea mays
  Coding DNA Sequence Number=SeqID_22445
  Gene Ontology: Mol. function=protein serine/threonine kinase activity; Cellular component=integral to membrane; Biological process=protein amino acid phosphorylation
  Homolog annotation: Hit_ID=Q2QXA8; Match level="QueryCoverage=79%, HitCoverage=80%, E-value=1e-134, Identity=50%"; Hit description =Protein kinase family protein, putative, expressed
  Pfam annotation: Domain name=ACT; Domain location=259-322; Score =37.0; E_value=6.7e-08; Accession=PF01842.15; Description=ACT domain
  Pfam annotation: Domain name=Pkinase; Domain location=360-610; Score =233.4; E_value=4.8e-67; Accession=PF00069.15; Description=Protein kinase domain
  Pfam annotation: Domain name=Pkinase_Tyr; Domain location=360-610; Score=275.0; E_value=1.4e-79; Accession=PF07714.7; Description =Protein tyrosine kinase
  Pfam module annotation: Pfam domain module=ACT::Pkinase::Pkinase_Tyr; Domain location=259-322::360-610::360-610
MEDDDTEGVGESTCPPAADRGGSSSAGGGGGDSHSYTDIEKEVFDRLMEKRIPEVVADPVAFREELRRHFERLPLRSAPLVDSRLCSSPHLLCFALTITAIRVCMCSYAVDVNVDKAEDVLLHRRILNECAHPENRPIFHVGFLNVSTTARSRLHCALASHWKAKTRQHRLGSYLFLEETEIFVLPLYEQCIPPSVDPQYNTQSISTSENGNCGGSQDSTLRKFEPCEGIEDLSLTGQKVVVDSVASSSRGDEEILHVHEIIFSTIDKPKLLAQLSALLSEVGLNIREAHVFSTTDGFCLDVFVVDGWDTKETDTLLQILKETAARNHASLSNPTNSAASERVLELQEKIGDSNIDRNFLQIGEKIASGSSGDLHRGTYQGMDVAVKFLRTEHVNDSSKVEFLQEIIILKSVNHDNVVRFYGACTKQRKYVIVTGDEYMPGGNLYDFLHTLKNTLDLPTVLRIAIGISKGMDYLHQNNIIHRDLKTANLLMGSDYVVKIADFGVSRNPSQGGDMTAETGTYRWMAPEVINHKPYDHRADIFSFAVVLWELVTSKIPYRNLTPLQAALGVRQGMRLEIPSWVNPQLSKLIQRCWDENPNLRPSFSEITAELEGMLRDHQASKGSNKHSKAKAHKKSQREAE

SEQ ID NO: 64225 - protein, 241 aa, Zea mays
  Coding DNA Sequence Number=SeqID_22446
  Gene Ontology: Mol. function=bis(5'-nucleosyl)-tetraphosphatase (asymmetrical) activity
  Homolog annotation: Hit_ID=O24005; Match level="QueryCoverage=89%, HitCoverage=92%, E-value=7e-76, Identity=68%"; Hit description =Diadenosine 5',5'''-P1,P4-tetraphosphate hydrolase
  Pfam annotation: Domain name=NUDIX; Domain location=72-228; Score =74.1; E_value=4.3e-19; Accession=PF00293.18; Description=NUDIX domain
  Subcellular localization annotation: CTP_CleavageSite=62; ConfidenceScore=5.51e-01
MVVAAAAALYLAVKPLPLVLVLVHHSRPAPSSALRLPRRTASAWLPRFPSCSTSAPPPFAAVASMDAPPQGYRTNVGICLADPSLTKASAAPPSSTILLLSPTHLRWIFSASRIDIPSAWQMPQGGIDAGEEPRAAAFRELREETGVTSAEIVAEAPVWLTYDFPMDVRTKLNARFLFRLTGNDDEINLNGDGSEKPEFGEWTWMTPQEVIEKAVDFKKPVYEEALKHFAPYLQSDPAASS

SEQ ID NO: 64226 - protein, 267 aa, Zea mays
  Coding DNA Sequence Number=SeqID_22447
  Gene Ontology: Mol. function=glutathione peroxidase activity; Cellular component=chloroplast; Biological process=response to oxidative stress
  Homolog annotation: Hit_ID=O65156; Match level="QueryCoverage=77%, HitCoverage=76%, E-value=4e-78, Identity=69%"; Hit description =Glutathione peroxidase
  Pfam annotation: Domain name=GSHPx; Domain location=73-201; Score =208.8; E_value=1.2e-59; Accession=PF00255.10; Description =Glutathione peroxidase
  Subcellular localization annotation: CTP_CleavageSite=66; ConfidenceScore=5.70e-01
MAPSFTSLLSAANSAAAATASRLPSAAAGRASTFVRFPHHPTGWAGASVAAPRTARKRAPGVAYATAATEKSIYDYTVKDIDGKDVPLKKFKNKVLLIVNVASQCGLTTANYTELSHIYEKYKTQVIPNVVVMKRILLDSTVSFKRFEILAFPCNQFGAQEPGSNTQIKQFACTRFKAEFPIFDKVDVNGPNTAPIYKFLKSSAGGFLGDLVKWNFEKFLVDKNGKVIERYPPTTSPFQIEAGRLQMINAVFSLPTYYMSILKLPKM

SEQ ID NO: 64227 - protein, 844 aa, Zea mays
  Coding DNA Sequence Number=SeqID_22448
  Gene Ontology: Mol. function=protein serine/threonine kinase activity; Cellular component=integral to membrane; Biological process=protein amino acid phosphorylation
  Homolog annotation: Hit_ID=Q9ZUI0; Match level="QueryCoverage=92%, HitCoverage=94%, E-value=1e-122, Identity=35%"; Hit description =Putative receptor-like protein kinase
  Pfam annotation: Domain name=LRRNT_2; Domain location=22-59; Score =50.1; E_value=7.2e-12; Accession=PF08263.3; Description=Leucine rich repeat N-terminal domain
  Pfam annotation: Domain name=LRR_1; Domain location=111-134; Score =13.8; E_value=0.65; Accession=PF00560.23; Description=Leucine Rich Repeat
  Pfam annotation: Domain name=LRR_1; Domain location=136-157; Score =11.8; E_value=1.8; Accession=PF00560.23; Description=Leucine Rich Repeat
  Pfam annotation: Domain name=LRR_1; Domain location=161-183; Score =9.6; E_value=4.5; Accession=PF00560.23; Description=Leucine Rich Repeat
  Pfam annotation: Domain name=LRR_1; Domain location=185-205; Score =0.2; E_value=2.6e+02; Accession=PF00560.23; Description=Leucine Rich Repeat
  Pfam annotation: Domain name=LRR_1; Domain location=227-249; Score =8.2; E_value=8.3; Accession=PF00560.23; Description=Leucine Rich Repeat
  Pfam annotation: Domain name=LRR_1; Domain location=251-274; Score =12.6; E_value=1.3; Accession=PF00560.23; Description=Leucine Rich Repeat
  Pfam annotation: Domain name=LRR_1; Domain location=324-346; Score =11.8; E_value=1.7; Accession=PF00560.23; Description=Leucine Rich Repeat
  Pfam annotation: Domain name=LRR_1; Domain location=348-370; Score =18.7; E_value=0.021; Accession=PF00560.23; Description=Leucine Rich Repeat
  Pfam annotation: Domain name=LRR_1; Domain location=371-395; Score =0.2; E_value=2.5e+02; Accession=PF00560.23; Description=Leucine Rich Repeat
  Pfam annotation: Domain name=LRR_1; Domain location=63-85; Score=7.3; E_value=12; Accession=PF00560.23; Description=Leucine Rich Repeat
  Pfam annotation: Domain name=LRR_1; Domain location=87-109; Score =16.1; E_value=0.13; Accession=PF00560.23; Description=Leucine Rich Repeat
  Pfam annotation: Domain name=Pkinase; Domain location=505-814; Score =110.1; E_value=6.5e-30; Accession=PF00069.15; Description=Protein kinase domain
  Pfam annotation: Domain name=Pkinase_Tyr; Domain location=505-814; Score=71.6; E_value=2.5e-18; Accession=PF07714.7; Description =Protein tyrosine kinase
  Pfam module annotation: Pfam domain module=LRRNT_2::LRR_1::LRR_1::LRR_ 1::LRR_1::LRR_1::LRR_1::LRR_1::LRR_1::LRR_1::LRR_1::LRR _1::Pkinase::Pkinase_Tyr; Domain location=22-59::111-134::136
  Pfam module annotation: Domain location=251-274::324-346::348 -370::371-395::63-85::87-109::505-814::505-814
  Subcellular localization annotation: CTP_CleavageSite=57; ConfidenceScore=5.26e-01
MPRLFVTLIAVAVAAVSSVDSHATDRAALLAFKSGVRGNLSDWGSRSPRMCNWTGVTCDSTGRVTRLLLKNSNLSGVISPSIGNLSALRKLDLRFNHLSGTIPRELGMLSQLLELRLGHNSLTGTIPEAVVCNCTSLTSIILSNNSLTGEIPFSARCRLPRLQQLSLYENRLEGGIPSPMSNFTSLSWVLLQYNRLGGVLPVPDVQQDAVPPINAEIPKSIGLLAQQLATISISNSGLRGEIPETLSNLTNLDYVLLDHNQLSGAIPPGGLSCQMILDLSYNKLTGQIPSGMPGLLGSFNMYLNLSNNLLEGPVSSLEFGSMEMIQALDLSGNKLSGGLPSSMGALKNLRFLDVSSNGLTGVIPRSLQGLPLQFANFSHNNFTGEVCGGGSFANLTGDSFLGNPGLCGSVPGMAPCGGRKRGRFLYIAIGVVVAVAVGLLAMVCAVVDHYLMRSSRSRLAMAAPSSLLPRFSTTGLVKATGDGEKESGEHPRISYWELADATDGFSEVNLIGKGGYGHVYRGVLHGESETVIAVKVLRQDQAAGGEVVAGSFERECRVLRSIRHRNLIRVVTACSTPEFKAVVLPFMPNGSLDSLIHGPPAAAAGGPRHLGLDLDLLLGVASNVAEGMAYLHHHAPVKVVHCDLKPSNVLLDGDMTAVVSDFGISKLVATDDGARGPEVTGEASTSSVCNSITRLLQGSVGYIAPEYGLGGRPSTQGDVYSFGVMLLEMISGKRPTDVISEEGHGLHDWAKKLLQHKRDLGAVVEERSLLPFGPPPRGEMEEVAVVLELLEIGVACSQLAPSMRPSMDDVAHEIAYLRDGTWRKYGVTDLKTTIFDQQTPRCTD

SEQ ID NO: 64228 - protein, 80 aa, Zea mays
  Coding DNA Sequence Number=SeqID_22449
  Subcellular localization annotation: CTP_CleavageSite=18; ConfidenceScore=5.38e-01
MGAGPRISSALAATGPCCSSAPTSAPGIRLRVVVVGAPGGGGRERLLAGNLCSPNIVKYLWYDSNEVYDIYGMIVMKYMI

SEQ ID NO: 64229 - protein, 180 aa, Zea mays
  Coding DNA Sequence Number=SeqID_22450
  Homolog annotation: Hit_ID=Q2QN63; Match level="QueryCoverage=62%, HitCoverage=23%, E-value=3e-29, Identity=50%"; Hit description =Expressed protein
  Pfam annotation: Domain name=DUF1336; Domain location=1-141; Score =28.4; E_value=1.8e-13; Accession=PF07059.3; Description=Protein of unknown function (DUF1336)
MPDVKAYLFFRWLKIHEKTLKRILSLVLYFRVSECYDKEVSEHFKESMMRFFEDETEKVKGFTSESTVSYRDRLKIMAGLINHLPSNLPSLHRQGEDYLEVDLDIHRFSYIARKGLDSFRARLKNGILDLGLTIQVRFHLDPPTEKKQKLSITVFFSFSLFVYIPVDRCDLAGLEAVGAP

SEQ ID NO: 64230 - protein, 80 aa, Zea mays
  Coding DNA Sequence Number=SeqID_22451
MNDESGALVFKVSRPRHARRPLGADSKVATRGVRLRQGGAWPRFQAAASPQRNEHQRKTILMGGPHTYERKYEGIGEPVV

SEQ ID NO: 64231 - protein, 42 aa, Zea mays
  Coding DNA Sequence Number=SeqID_22452
MGMRGLRGSLEDMIAGVTCPSILPPGGTFDRGPTWSEEEHEE

SEQ ID NO: 64232 - protein, 153 aa, Zea mays
  Coding DNA Sequence Number=SeqID_22453
MGLRPTIWGHDQARLASWAGSSSLSSSIKGGINNFIYRFGILQIGSRPACDPMDPQTKGSRGNIKLWRRRRSLGTTPSLQNSSRHGRHHSDFRLGEVWSRHVSRQGWQEPRPPQVRSGLWSGKTRESSVTTYSQACPHPGRGPVLTRGQTPLA

SEQ ID NO: 64233 - protein, 519 aa, Zea mays
  Coding DNA Sequence Number=SeqID_22454
  Homolog annotation: Hit_ID=Q2R4W1; Match level="QueryCoverage=52%, HitCoverage=55%, E-value=2e-07, Identity=25%"; Hit description =Expressed protein
  Pfam annotation: Domain name=DUF1719; Domain location=127-379; Score =133.3; E_value=6.7e-37; Accession=PF08224.2; Description=Domain of unknown function (DUF1719)
  Pfam annotation: Domain name=SelB-wing_1; Domain location=247-308; Score=12.3; E_value=0.025; Accession=PF09105.1; Description =Elongation factor SelB, winged helix
  Pfam module annotation: Pfam domain module=DUF1719::SelB-wing_1; Domain location=127-379::247-308
MADSIAGAVASALAQEMVSRAVSLVLQVGLKREDKAPAPAQLQAQAAGAAGHNAERLKMAVSQLEFALERTGKLPITDVSLLDQRKMFKLAFIEGTSLLITEQRLRRQSTQARHQHEEVEEEANHQKGQAKPKRRRRWVLAAMARPFLTSSSSSPSSSSPCIDAAVVRRFEWMADSAGRFVRDVAESGSSLRHCTFCNPVVRRLLEGKHLRYEAEQGAVLRFLDLWPLCVEGRGVETILEYGYEDRGAPEKNLLLHIVLRLSESMDVFGTAIRCLQAMASQLKLLVSEAAVGELALLAASVDMCRSSAPPWARIDEGEYARASQAFRRDPVCCRDRERGQQLGRPRATSGGGVADAASSPELSRILPEQIIVLAFWCRVPAAPGCGLLPTRPPLKMTVFFSPHACCHDAEEERRSSWALDLSAGENGNPLLRDVSVQQVAEMVGPKALDRFLRQPHLAVYAITWGSEHGKAIFILERPKEQDHRRRTERNANRRHMKEGQLQKIDFASLNRGMGWECFC

SEQ ID NO: 64234 - protein, 53 aa, Zea mays
  Coding DNA Sequence Number=SeqID_22455
MAATPVVSRQSPAGRSSSRDNKQPVFLKGVAEEVLSNNYFVNASVLTYYVLFT

SEQ ID NO: 64235 - protein, 71 aa, Zea mays
  Coding DNA Sequence Number=SeqID_22456
MPHGGASDPIWGKSGDCGLWCTAEANCRWYERVIERRSEGINRNIVELQVYLQLEGDDITSVTQKANAKSA

SEQ ID NO: 64236 - protein, 64 aa, Zea mays
  Coding DNA Sequence Number=SeqID_22457
MSPDFNRPSSHVDQAPRFSRGYGCWSDLAVYLATGLDSRVEPYLSRRGAGGVMGQTSPSSLMYR

SEQ ID NO: 64237 - protein, 86 aa, Zea mays
  Coding DNA Sequence Number=SeqID_22458
MAPSPIPESSEFAVEPACAPDTVWCTPDSPELWFGARECDSDSLRRGANGASSGMGVGLGGGTRTARTVDLAANDGDYNTTYRFAS

SEQ ID NO: 64238 - protein, 153 aa, Zea mays
  Coding DNA Sequence Number=SeqID_22459
MACLPVREEVRMRSVAPPLSFDTDVVLALGATPGVVSVAWRPPTGTIGWGDTEQRLDARGPNKELKVQLKPIKRSKLGFKREEQKKPKRTLVWRTGLSGAPGTVQDELLTFGFLRPLSTIIHRTVRCGTGLSDVPSGATVSSATVDFNGRLTT

SEQ ID NO: 64239 - protein, 174 aa, Zea mays
  Coding DNA Sequence Number=SeqID_22460
MELLSKSYLTKEKTLKGMLVKGVKGFKGGNQVQGSKQVRKILKTSRKVANAPGLAFVSSLGGPAIQRNGARPHPHWQPCRKVLVFLNISTESKALFNTVADSYKDTLALLSILGWKSTTTVNTAALRDVNRNGGGANLCAEESPTMMRVMDKLKWKKREDRGDSSRALQRKGNG

SEQ ID NO: 64240 - protein, 404 aa, Zea mays
  Coding DNA Sequence Number=SeqID_22461
MVRTKNVSAPGGGDDEDPPRPFRQVKGKTMYLEQQEGCKKRRMDRAVRAALAAVVAPEQAKPPFTDGSRRSPADFTLVAKYLYQMVFVLADSCRMRTICYIFTQLIRPPQFQGTLEASCLQFGSYRPAPEDPVLVPDPVIDIQAEDVAFHQFETQGTAVADDDDDDDLGIPPPPPMPPRSHDHEAGSSSVAPSAPPAIDPDLATILQPLTKQQAHLAAEQARQAAVQQQMSERMLSMFQIIQDIHDTLQQQLLVDRAEHRAFMTHILQHTGVQSAPPPALQAAVVPAIQAGPPLPPFGPSPSPLRPVTRDFSSSIIGSVSAQPPVPPAPAVTTAVVAVSVTTLAPVDPAAQPLYESVPAPASTTNPGSKTESGPQLAFSLLPRLNVPHSSFLLWTVGLGYPFGV

SEQ ID NO: 64241 - protein, 172 aa, Zea mays
  Coding DNA Sequence Number=SeqID_22462
MASPKGGFNPAERDEFSINHVEADSAATYPKRWWPPRQSSTVSRFPGGRSFFGEEFSARRLPIEHGETTSIVPGTSWSSQTRLRNPADGVRTGRRQEEVQMPCGSYPRVEVDNDHAAFPGEIRIPRRWTRDEDDREQGRTHQQRWRKGRPCAKGLARGPASQCQGTKRVWSG

SEQ ID NO: 64242 - protein, 102 aa, Zea mays
  Coding DNA Sequence Number=SeqID_22463
  Gene Ontology: Mol. function=hydrolase activity; Biological process =alkaloid metabolic process
  Homolog annotation: Hit_ID=Q2RBB3; Match level="QueryCoverage=70%, HitCoverage=28%, E-value=2e-32, Identity=80%"; Hit description =Hydrolase, alpha/beta fold family protein, expressed
MVKPEHQDEAVIRLWLPSKVVREARLMGMAAKEHFVLVHGEGHGAWCWFKLRWLLEGAGYHVTCIDLAGGGVDPTDPNTIRSFQQYDKPLIDLISTLPEGEK

SEQ ID NO: 64243 - protein, 288 aa, Zea mays
  Coding DNA Sequence Number=SeqID_22464
  Gene Ontology: Mol. function=DNA binding; Cellular component=nucleus; Biological process=regulation of transcription
  Homolog annotation: Hit_ID=Q8S3X9; Match level="QueryCoverage=61%, HitCoverage=87%, E-value=7e-32, Identity=41%"; Hit description =Typical P-type R2R3 Myb protein
  Pfam annotation: Domain name=Myb_DNA-binding; Domain location=29-88; Score=12.4; E_value=0.29; Accession=PF00249.21; Description=Myb-like DNA-binding domain
  Pfam annotation: Domain name=Myb_DNA-binding; Domain location=94-139; Score=44.5; E_value=3.7e-10; Accession=PF00249.21; Description=Myb -like DNA-binding domain
  Pfam module annotation: Pfam domain module=Myb_DNA-binding::Myb_DNA -binding; Domain location=29-88::94-139
MERTKRASMVSQVEEEEDGEHCTHKTVRKGLWSPVEDARLSSHITRYGVGTWIALRYVPAEMDGYDRGAHAGLERSGKSCRLRWMNYLQPDLSREPISRQEEDRIVSLQKLLGNRWSAIAARMPGRTDNEIKNYWNSLIKKKKKKKLKQSMDTGGGGGDYHQSLPGPEPEPEVHRTAAHEGSSAGMYTTTGTGHIDTSEVRVEHGGTTASHNNDSADHPRPSPLPQLPVFAGQVLLDPDAAVRNGEQTAAPAQASSLSLIPFPKSREMNFVEEYVQFLVSLSDDLLEI

SEQ ID NO: 64244 - protein, 82 aa, Zea mays
  Coding DNA Sequence Number=SeqID_22465
MSQVSWLQFIWRLLAVVMQWTCVAHVQRDQFTRVVKLELNESTVYHKDGASAGIPCKRQRWDDRCPETPNQRLAKHRSHRKH

SEQ ID NO: 64245 - protein, 77 aa, Zea mays
  Coding DNA Sequence Number=SeqID_22466
MEKKRFLQEVKVVQAMKSHDALKTMIYGWRSSKKLKLNRKELEKKVLKGGCLGALDPLKGSGGPPGLDQRLFVEANG

SEQ ID NO: 64246 - protein, 210 aa, Zea mays
  Coding DNA Sequence Number=SeqID_22467
MNRLRPTSDKQHISDALEGISGDAPEGAKLRRPTLQCGPSHKLSAHQGPKADRLTNSPLTNSPEATPPWETIHDSPEANPGWEKQSRLARDEPRVGDAVMTRPAGDAVMTHPRPSLNGRCSHNSPEANPVRTSHAGSAPTHRYAASGAGYSFRLVLDDPAAGSWTSLLVLGPPSAQGRDSDRLPLFCHLAASGERLDTEVDGAGWVLRVS

SEQ ID NO: 64247 - protein, 102 aa, Zea mays
  Coding DNA Sequence Number=SeqID_22468
MAPIPAVGRGGGCGMGGVRAPPVVLRGGGAGGASPGEALAKETRAEGFVAAEAHQALAKETRAEGFMAAEAWACGWGGAGEGDEGEGFAAAEVRACGRDSRR

SEQ ID NO: 64248 - protein, 113 aa, Zea mays
  Coding DNA Sequence Number=SeqID_22469
MEVIVEKVAGSKSGRRTVTWADENGTVLETSKAYESPSSSIKQPEEGIDSSPRFASAEACAAALIKAAEAISSGTAEAEDVVSKAGIIILPDMLSQKEYDNCKNTGGDVDPVA

SEQ ID NO: 64249 - protein, 164 aa, Zea mays
  Coding DNA Sequence Number=SeqID_22470
  Subcellular localization annotation: CTP_CleavageSite=69; ConfidenceScore=5.28e-01
MAPRMLCDDDGSQPPYGSKRTSARTQPLRQLSLRQAPSLLRRPRHHISWVPKSLRLPRRHGPLREGRPRGDEDETGARLEAARSLTRVDACNPLLQAHPTWARDEHEGRGIPTSLTLFSGRLASPPFALALALDPSGLGHAATLTRRPKGPPDLETPTFLEYNV

SEQ ID NO: 64250 - protein, 120 aa, Zea mays
  Coding DNA Sequence Number=SeqID_22471
MQLHGGELHDAIGYLEGTMAKNLDHLTNDFDVATNVVLGEGEPMVSGPFLSSDGLHDSHADVSVVEALDPLEPLGAFRKGPTKLSPQTTNDQVFANEDKGLRTSMVSACLRIVCEECVVG

SEQ ID NO: 64251 - protein, 181 aa, Zea mays
  Coding DNA Sequence Number=SeqID_22472
  Subcellular localization annotation: CTP_CleavageSite=49; ConfidenceScore=5.36e-01
MKFMYPMGRIELSRPNTPFHFSPPGQPLCPAVLTVPWAPQASGLSLSPCAPTLSGVFRLSLTRGPKLSDLSPPDPTNLCPIMVRIGRHVPPENSGNIALSRTSPWSIRTATAKGRMNCHCVPLDVHPCRNPLEGSGVHASQLKLGLGGIALLTNGVPRRNGSFAMLSRMPWTASLASFLSP

SEQ ID NO: 64252 - protein, 774 aa, Zea mays
  Coding DNA Sequence Number=SeqID_22473
  Gene Ontology: Mol. function=protein serine/threonine kinase activity; Cellular component=integral to membrane; Biological process=protein amino acid phosphorylation
  Homolog annotation: Hit_ID=Q2RBQ5; Match level="QueryCoverage=96%, HitCoverage=81%, E-value=0.0, Identity=55%"; Hit description=Leucine- rich repeat family protein, putative, expressed
  Pfam annotation: Domain name=LRR_1; Domain location=432-454; Score =6.3; E_value=19; Accession=PF00560.23; Description=Leucine Rich Repeat
  Pfam annotation: Domain name=LRR_1; Domain location=456-477; Score =5.9; E_value=22; Accession=PF00560.23; Description=Leucine Rich Repeat
  Pfam annotation: Domain name=LRR_1; Domain location=479-501; Score =14.6; E_value=0.37; Accession=PF00560.23; Description=Leucine Rich Repeat
  Pfam annotation: Domain name=Pkinase; Domain location=603-771; Score=- 15.7; E_value=1.3e-07; Accession=PF00069.15; Description=Protein kinase domain
  Pfam annotation: Domain name=Pkinase_Tyr; Domain location=595-774; Score=5.7; E_value=8e-13; Accession=PF07714.7; Description=Protein tyrosine kinase
  Pfam module annotation: Pfam domain module=LRR_1::LRR_1::LRR _1::Pkinase::Pkinase_Tyr; Domain location=432-454::456-477::479 -501::603-771::595-774
MASSSSLNPSSYSCFLFVTAAAVFFTASDAQVPGFVSIDCGGSTNYTDELGLQWTGDAGWFPFGQTATISVPSEKRAQYSTLRYFPSPSASSSSSSKHCYTLHVRTRTRYLVRATFLYGNFDSSNVFPEFDLYLGASHWSTIVIYDDSKVVTREAVVLAADPALSVCLSSTGTGTPFISTLELRQLNGSLYYTDYEADAFLALSARINFGAPTADPVRYPDDPYDRIWESDMVRRANYLVDVAAGTVNVSTDRPVFVAGSERPPQKVMQTAVVGSLGELTYRLDLPGFPGNGWAFSYLAEIEEFLVPETRKFKLYIPGLADVSKPTVDIGENAPGKYRLYEPGFPNISLPFVLSLALRKTNDSSKGPILNALEIYKYMHMELGSPDGPVMATLSLALASSSSSLADVAMEGGDPCLPSPWSWVKCNSEAQPRVVSINLSGKNLTGSIPPQVADLPCLAEIGFANNMLTGPIPDLSGSSNLSIIHLENNQLTGTVPSYFGSLPKLSELYSGNVYLGTAGKQKKKHVIIIISALLGASLLLAAALCCYMLTRKAMNSSSSPQAQEKALPAEQNKLQKYPSTQQLQSIATETAHPYSLCELEEATNKFASRIGSGGFGIVYYGKLSDGKEIAVKVPSNDSYQGKKQFSNEVVLLSRIHHRNLVAFLGYCHEDGRNILVYEFMHNGTLKEQLHRRDKHISWIKRLEIAEDAAKGIEYLHTGCTPSIIHRDIKTSNILLDKHMRAKVSDFGLSKLLAAEGKDSHASTNVRGTMGYLDPQ

SEQ ID NO: 64253 - protein, 215 aa, Zea mays
  Coding DNA Sequence Number=SeqID_22474
  Gene Ontology: Mol. function=protein serine/threonine kinase activity; Cellular component=integral to membrane; Biological process=protein amino acid phosphorylation
  Homolog annotation: Hit_ID=Q5JNB7; Match level="QueryCoverage=68%, HitCoverage=15%, E-value=3e-39, Identity=59%"; Hit description =Putative light repressible receptor protein kinase
MAAASREEGEAWSTGLSVRALVVLEGEEYRAEKRGGERGRYYVSQQLTEKSDMYSFGIILLELISGCPPISTIAFGDNFRNIGPWAKFYYESGDIEAIIDPSISTAAEYQDVQSVWKIAEAAVRCIDAEPRKRPCMPEVVKEIQDALALERAAAETTTSDRALACPFSPAAASVRSGGTMRSHDMVMDNLLLLDDDDDSTFSGSTVTKLKYPELR

SEQ ID NO: 64254 - protein, 965 aa, Zea mays
  Coding DNA Sequence Number=SeqID_22475
  Gene Ontology: Mol. function=kinase activity; Cellular component =proton-transporting two-sector ATPase complex; Biological process =ATP synthesis coupled proton transport
  Homolog annotation: Hit_ID=Q5JNC1; Match level="QueryCoverage=93%, HitCoverage=97%, E-value=0.0, Identity=62%"; Hit description =Putative kinase interacting protein 1
  Pfam annotation: Domain name=KIP1; Domain location=51-124; Score =152.8; E_value=8.8e-43; Accession=PF07765.3; Description=KIP1-like protein
NSALAVGRGPSDPRLWTVYDVVESTAVGSLQVLQENISYNNKERAASNAYSWWWASHIRTKQSKWLDNHLQDMEHRVKCMLLLLGEEADSFSKRAEMYYKRRPEVITQVEEVYRAYKALADRYDIMSGELHKANHTIATAFPDQVQYAMLEEEDDNIPKAFTPVDPRKIHKSTVDGLMMKKKKKGEHPGSMVGGATSAPVNKENAREEISRLQKAILAMQTEKEFIKSSYESGIAKYWDLEKEIHDMQEQVCHFQDKFDESAVIEDDEARALMTATALKSCEDTIVKLQEQRKASAEQAVGESERVKVFREKLKAIMNKHGKSLPVSLDLSEKNTTRKSHGAGMENVCYVKQCAIDAESIIDKIKEHFESDCNISMAEVTERIDEIVNMVVDLDLMVSAQTSQIDRLRQENNELEDSLQGLEDENTTELPSTGSNELIEKLRQAEEELVRAQALESSFHKDESTIRSNFLEAISRLHEISELLLSPVCDSASAARTSQEIESLGPSSSNECCDMEKVVDDPNDALVADSDESSSGSTKLISEQQLDVGQQDRISRERGSLVRLRHISSGNLGGGCDGQEGLSSSAVTDMMKLQERLTDSLDDKEKVLLGEYTSLLEDYKDAKRKLVEMEKKNQDCLNEIRTLREGIIKSSSAAAGEGGSEGSCKRSFSRRGHRRTPSYSSIHQRRPSVSSISRLIRMGSAIQEGAAGSGKQSDLLDDLRLPAIAEAENASPLEEKFRRDIDTLLDENLEFWMKFSSSLQRVQEFQNKHDGLQRKLQLINDQDGKQDGSTEKQLRAFKTELQVWSEQNAMLRGELQCRFTSLCDIQDEITAALDTEAEEEAHFTSYQAAKFQGEVLNMQQENIRVSDELQAGLDHIKGLHAEVEKALAKLHKSVNLPPQQAGADKEEEEEDDSSSGHGGGGGSKSKVPLQSFLFPAKPKKTSLLARVTPVLPKQSVDMKFLAKLPR

SEQ ID NO: 64255 - protein, 542 aa, Zea mays
  Coding DNA Sequence Number=SeqID_22476
  Gene Ontology: Mol. function=heparin binding; Cellular component =nucleus; Biological process=cell motility
  Homolog annotation: Hit_ID=Q10F11; Match level="QueryCoverage=72%, HitCoverage=100%, E-value=1e-169, Identity=73%"; Hit description =Vegetatible incompatibility protein HET-E-1, putative, expressed
  Pfam annotation: Domain name=WD40; Domain location=202-241; Score =7.6; E_value=4.7; Accession=PF00400.22; Description=WD domain, G -beta repeat
  Pfam annotation: Domain name=WD40; Domain location=245-283; Score =41.8; E_value=2.4e-09; Accession=PF00400.22; Description=WD domain, G-beta repeat
  Pfam annotation: Domain name=WD40; Domain location=287-325; Score =28.3; E_value=2.7e-05; Accession=PF00400.22; Description=WD domain, G-beta repeat
  Pfam annotation: Domain name=WD40; Domain location=329-367; Score =44.8; E_value=3e-10; Accession=PF00400.22; Description=WD domain, G -beta repeat
  Pfam annotation: Domain name=WD40; Domain location=374-412; Score =19.7; E_value=0.011; Accession=PF00400.22; Description=WD domain, G -beta repeat
  Pfam annotation: Domain name=WD40; Domain location=416-454; Score =40.8; E_value=4.8e-09; Accession=PF00400.22; Description=WD domain, G-beta repeat
  Pfam annotation: Domain name=WD40; Domain location=457-495; Score =34.0; E_value=5.2e-07; Accession=PF00400.22; Description=WD domain, G-beta repeat
  Pfam annotation: Domain name=WD40; Domain location=499-537; Score =35.1; E_value=2.4e-07; Accession=PF00400.22; Description=WD domain, G-beta repeat
  Pfam module annotation: Pfam domain module=WD40::WD40::WD40::WD40::WD4 0::WD40::WD40::WD40; Domain location=202-241::245-283::287-325::329 -367::374-412::416-454::457-495::499-537
MVGSSLGCPILEKKNQNQRKKREQRRRLGAHAATAQKAGDAVDPCGVEFDEGNTPAYDLSRSSCVWVRALPATPPSGSPARGLLSDPTAPQRLALGWQPPRPVGPAPAAYIRLQPEDLPPATALPALVASVVLHTSTRTCPQTTAAAMSISEELPGEGSDGEEEVFINEEDIIHEITIDEEDLPDRDDEDDDVVNGMGRGGFCLELQLSVYANEVFIVACSPTDSSLVASGGKDDRGFLWRIGSEEGALELTGHKDTVGTVAFSSDGNLLACGSFDGQINVWNTATRTLKGTLEGSGSGFEWLKWHSRGHLIIAGSEDCNVWMWNADHNAILNTFAGHSNTVTCGDFTPDGKLICTGSDDASLRIWDPRSAQSRHVVRGHGYHSDGLTCLSMTSDSQTVVSGSKDSSVHIVNLNSGQVVGSLAGHTNSIECLGISSSYGWVATGSMDQKLIIWDLTHQSSRCICEHDEGVTSLTWLGSSRYVASGCIDGKVRIWDSLSGACAREFSGHADVVQSLAITADGNTMVSASSDGSARVFDISMFK

SEQ ID NO: 64256 - protein, 45 aa, Zea mays
  Coding DNA Sequence Number=SeqID_22477
MSRLQLIEDQVPEAMSLAASLQHKKPNYVRYRFNAACAEDFYCRA

SEQ ID NO: 64257 - protein, 108 aa, Zea mays
  Coding DNA Sequence Number=SeqID_22478
MARLGHAVANGEGTAAVSTLPRGRKKLLTKSIGYIKTSSSLKSSLKRGHTLYPQAVIPILPGVLASPLITTKVLTERYLGNNLSPLKYHKNIIGITSSYHKIYIMFID

SEQ ID NO: 64258 - protein, 96 aa, Zea mays
  Coding DNA Sequence Number=SeqID_22479
MRRWPGKRGRGRVHGGGVGERLGKRRGLMGGSVGQQEGIRKLAVNSDGDMEFFEPTQLYIQAIIQHLSSFAGKFDPHAYINWELGIDKEFDKHDLS

SEQ ID NO: 64259 - protein, 436 aa, Zea mays
  Coding DNA Sequence Number=SeqID_22480
  Gene Ontology: Mol. function=nucleoside-triphosphatase activity; Cellular component=membrane; Biological process=proteolysis
  Homolog annotation: Hit_ID=Q1SGD5; Match level="QueryCoverage=99%, HitCoverage=100%, E-value=1e-175, Identity=74%"; Hit description=AAA ATPase, central region; MIT
  Pfam annotation: Domain name=AAA; Domain location=178-353; Score =178.6; E_value=1.5e-50; Accession=PF00004.19; Description=ATPase family associated with various cellular activities (AAA)
  Pfam annotation: Domain name=MIT; Domain location=43-71; Score=45.0; E_value=2.6e-10; Accession=PF04212.8; Description=MIT domain
  Pfam annotation: Domain name=Vps4_C; Domain location=368-433; Score =130.0; E_value=6.4e-36; Accession=PF09336.1; Description=Vps4 C terminal oligomerisation domain
  Pfam module annotation: Pfam domain module=AAA::MIT::Vps4_C; Domain location=178-353::43-71::368-433
MYSNFKEQAIEYVKQAVQEDNAGNYVKAFPLYMNALEYFKTHLKYEKNPKIKEAITAKFTEYLRRAEEIRAVLDEGGAGPGANGGDAAVATRPKTKGKDGDGGNGGDDSEQSKLRAGLNSAIITEKPNVKWNDVAGLESAKQALQEAVILPVKFPQFFTDYDWLLDSNLEFIDLARELLAKKRITFAKLRKLSLESISSSDLVSKWMGESEKLVANLFQMARENAPSIIFIDEIDSLCGQRGEGNESEASRRIKTELLVQMQGVGHNDDKVLVLAATNTPYALDQAVRRRFDKRIYIPLPDTKARQHMFKVHLGDTPHSLTESDFESLARRTDGFSGSDVAVCVKDVLFEPVRKTQDAMFFFKADGDMWMPCGPKQPGSVQTTMQELASKGLAAKILPPPISRTDFEKVLSRQRPTVSKKDLEVHERFTKEFGEEG

SEQ ID NO: 64260 - protein, 223 aa, Zea mays
  Coding DNA Sequence Number=SeqID_22481
  Gene Ontology: Mol. function=protein binding
  Homolog annotation: Hit_ID=Q2QV87; Match level="QueryCoverage=61%, HitCoverage=10%, E-value=4e-13, Identity=41%"; Hit description =Expressed protein
MNVVVTSHLPVCLYSAAAFENKSPTDVNNKLHLKLPEGTLPLKVLPLEGEQDCRLGRPAGPLSTEQDLELGAPDLPLVADVDLSGSDVLRFGGASREKPGISDGFHGLDLIVGELPLEGVGAAVFAGEEPLGIVEPGLVIDDDLTGATKLPCWAEGAEGRLVGVNALDVGLLCADMVGLDDSVVDLVAGIDDLEVGVDDLEKLQFWQEQLSGKWGSKVLNLWN

SEQ ID NO: 64261 - protein, 166 aa, Zea mays
  Coding DNA Sequence Number=SeqID_22482
  Gene Ontology: Mol. function=small conjugating protein ligase activity; Biological process=protein modification process
  Homolog annotation: Hit_ID=Q5JKR6; Match level="QueryCoverage=99%, HitCoverage=56%, E-value=1e-40, Identity=58%"; Hit description=RWD domain containing 1-like protein
MAMVYTLVSSAKEWLSEIYGQNGGDEEPEETEAEEEEVGSTVASGDFELATVIIPHGEAVTVESFLAWRDRFEAELALQRAKLMPDSALTSSKEKKLTGRQYFESGRHAVKGASTVADEDEEEEEDIEFDDDFEAILQNLFPYFDTDDEEDMLEHYLAQQSENSAA

SEQ ID NO: 64262 - protein, 121 aa, Zea mays
  Coding DNA Sequence Number=SeqID_22483
MTEKKRRQTKTDGAKALRRRERSKHSKALSVPFEARNGEGLTDFRRLGAWCMEFSVATRAFLKWWARVKPPWAAWSHLDNVGNQGIIVFAKCTLLREAENTVALIHYVASIKSSPFSYCLD

SEQ ID NO: 64263 - protein, 246 aa, Zea mays
  Coding DNA Sequence Number=SeqID_22484
MELQPNHTVEFGTSRIYSGHVHEMQRLGYFGNGVGQAPGVEDVLELEDPSVDAERYGGVGKVFAKNYCLHWQKKKICGLIAQFGSCTFMPRTGKMSTEVVEIVPCAKNKWGDWWNFWFYVAPEDVKGVPGLPTSILCSHCYVAFPQFKVKKGVKNEEALQNVARLSSDRDLVEEFVACSVWPLAHGWGLAEVKLHLMPFLGDQMERNPTFAIDLRGRDVAACIREVESEDIKIVGKYVPKTEMLRS

SEQ ID NO: 64264 - protein, 239 aa, Zea mays
  Coding DNA Sequence Number=SeqID_22485
MGPKASWIFVEELTGTCAGPQEVMTSPELRETSLRMLKVTGDPTEEAESPASTGGSASQHQDIAPQRVGAALATTMPPATPVAPTKASSPPRVVETMVSKTRGIGQELYVDDYLGRRLGSLVVAPAKLPASTGGLAKGVAGTSLDPWVEFCAAADGGGEVAVAAAAEGVATSVTRQLRYVTMLEKEKEDLSRRLNDEKEATTEATTEAESARAEAQASHKRAVELELMVKSMHAYLKVA

SEQ ID NO: 64265 - protein, 160 aa, Zea mays
  Coding DNA Sequence Number=SeqID_22486
  Gene Ontology: Mol. function=small conjugating protein ligase activity; Biological process=protein modification process
  Homolog annotation: Hit_ID=Q5JKR6; Match level="QueryCoverage=88%, HitCoverage=60%, E-value=1e-35, Identity=59%"; Hit description=RWD domain containing 1-like protein
  Pfam annotation: Domain name=RWD; Domain location=1-100; Score=6.1; E_ value=0.012; Accession=PF05773.12; Description=RWD domain
MAEIDPSESGIATTARCFQILLSPQDDDFDESAYVPVQLALIFAHTEKYPDEPPLLNVKSVRGIKPHDLASLKEKLEQEEDVDESSCMTVTLCADVTIAEHEVEELGSRITVVNVAIEVANVKAATHEVMSAKRRRGDDKDALKQLSCRGQCRGRHNQGR

SEQ ID NO: 64266 - protein, 68 aa, Zea mays
  Coding DNA Sequence Number=SeqID_22487
MQESLVGPPSQQNPPEGLPTLTTPLLPLPLSGLGALIQGKAGVSVKESLDTDPIHVDCGLILKTMGSL

SEQ ID NO: 64267 - protein, 114 aa, Zea mays
  Coding DNA Sequence Number=SeqID_22488
LSRAEERAQRMRAWKTSTVRAEPPTTTTVHECAYGRCGHASSTGANAPASRRMRNWTLLVLDHILDFEAVLERRKWKVIPSDMVKTHLRIPIEEVIVGLNYWDHHTDTLNALGG

SEQ ID NO: 64268 - protein, 58 aa, Zea mays
  Coding DNA Sequence Number=SeqID_22489
MSRAFDDYYIKDYGAISAPELSVLTVRHMVEAHPLIAWPCHKLAYYTVPLLSDRQFAV

SEQ ID NO: 64269 - protein, 116 aa, Zea mays
  Coding DNA Sequence Number=SeqID_22490
MVTKLSRGRSRSKMATLIRGTKAPVTGHFQLIIKGQDTRAARGEILLPAGDNPRRDRVQRGEASRTENLNRSTARSRAAAANAFQSDIVTSYPKIATGHATEISYPMRAYFSLFSL

SEQ ID NO: 64270 - protein, 555 aa, Zea mays
  Coding DNA Sequence Number=SeqID_22491
  Gene Ontology: Mol. function=catalytic activity; Biological process =metabolic process
  Homolog annotation: Hit_ID=Q9ZW77; Match level="QueryCoverage=65%, HitCoverage=76%, E-value=1e-109, Identity=55%"; Hit description =Putative carboxyphosphonoenolpyruvate mutase
  Pfam annotation: Domain name=ICL; Domain location=25-392; Score= -295.4; E_value=0.0011; Accession=PF00463.11; Description=Isocitrate lyase family
  Subcellular localization annotation: CTP_CleavageSite=53; ConfidenceScore=5.75e-01
MACCSPSCTIPLGFSLTPCSASPSPTAHPSAWGVATPSAASARPLSRARISPRCTYSGGASAAPGPGELPAAALRRVLEMPGAHQAPACYDALSARLVERAEFRACFTSGFSISAARLGLPDVGLISYGEMIDQGRLMTEAVSIPVIGDADNGYGNCMNVKRTVKGFINAGFAGIILEDQVSPKACGHTQGRKVVSREEAIMHIKAAVDARNESGSDIVIVARTDSRQAVSLNEALWRVRAFADAGADVLFIDALASREEMKAFCAIAPGVPKMANMLEGGGKTPILSPVELEEIGYKIIAYPLSLIGVSMRAMEDALIAIRGGRIPPPSSLPTFEEIKNTLGFNHYYEEDKRYAVTPAQPLYGTGYDNYTSEPNSPGDSRSRAKKTQEPVIDILPQLYDIGSSDSRGPSTGMWSRTLRLKITGRDGIQKIDARIPAGFLEGMTRIIPGLAGANIMERLRNAPVDTDNPQNGQILLDFEDAMGDRIQLHNNDMNRRCGTNKDACFHYTDLDYFIANYSKMKGKSEADKCHFQSRRHKYTSGNHKSKMRFDKVAFK

SEQ ID NO: 64271 - protein, 60 aa, Zea mays
  Coding DNA Sequence Number=SeqID_22492
MVMGTRTVSCCGQGRQIKPSQEDTHPPRLKASAYQAWSMKVAIRREFTTTDRKKRYYGMT

SEQ ID NO: 64272 - protein, 386 aa, Zea mays
  Coding DNA Sequence Number=SeqID_22493
  Gene Ontology: Mol. function=protein binding; Cellular component =cytoplasm; Biological process=ubiquitin cycle
  Homolog annotation: Hit_ID=Q2RBJ7; Match level="QueryCoverage=98%, HitCoverage=74%, E-value=6e-83, Identity=40%"; Hit description =Leucine Rich Repeat family protein, expressed
  Pfam annotation: Domain name=LRR_1; Domain location=114-136; Score =5.1; E_value=32; Accession=PF00560.23; Description=Leucine Rich Repeat
  Pfam annotation: Domain name=LRR_1; Domain location=140-162; Score =12.5; E_value=1.3; Accession=PF00560.23; Description=Leucine Rich Repeat
  Pfam annotation: Domain name=LRR_1; Domain location=164-187; Score =2.5; E_value=98; Accession=PF00560.23; Description=Leucine Rich Repeat
  Pfam annotation: Domain name=LRR_1; Domain location=191-214; Score =10.1; E_value=3.7; Accession=PF00560.23; Description=Leucine Rich Repeat
  Pfam annotation: Domain name=LRR_1; Domain location=254-276; Score =6.0; E_value=21; Accession=PF00560.23; Description=Leucine Rich Repeat
  Pfam annotation: Domain name=LRR_1; Domain location=304-328; Score =3.3; E_value=68; Accession=PF00560.23; Description=Leucine Rich Repeat
  Pfam annotation: Domain name=LRR_1; Domain location=330-350; Score =5.2; E_value=30; Accession=PF00560.23; Description=Leucine Rich Repeat
  Pfam annotation: Domain name=LRR_1; Domain location=356-378; Score =6.3; E_value=19; Accession=PF00560.23; Description=Leucine Rich Repeat
  Pfam module annotation: Pfam domain module=LRR_1::LRR_1::LRR_1::LRR _1::LRR_1::LRR_1::LRR_1::LRR_1; Domain location=114-136::140-162::164- 187::191-214::254-276::304-328::330-350::356-378
  Subcellular localization annotation: CTP_CleavageSite=55; ConfidenceScore=5.11e-01
MPAALARYPSATRLDLTLCARVPDAALASAAVSGSSALRAVDLSRSRGFGAAGVAALAAACPDLADLDLSNGVHLGDAAAAEVARARALRRLSLVRWKPLTDMGLGCVAVGCTELKDLSLKWCLGLTDLGIQLLALKCRKLTSLDLSYTMITKDSLPSIMKLPNLQELTLVGCIGIDDGALVSLERECSKSLQVLDMSQCQNITDVGVSSILKSVPNLLELDLSYCCPAKEPAEAGHYLLSHGALQLIGKHCSHLEELDLTDSDLDDEGLKALARCSELSSLKIGICLKISDEGLSHIGRSCPKLREIDLYRCGVISDDGIIQIAQGCPMLESINLSYCTEITDRFNDFLSQKCAKLKSLEIRGCPSVSSIGLSEIAMGSRLLFQA

SEQ ID NO: 64273 - protein, 490 aa, Zea mays
  Coding DNA Sequence Number=SeqID_22494
  Gene Ontology: Mol. function=structural constituent of ribosome; Cellular component=intracellular; Biological process=regulation of transcription
  Homolog annotation: Hit_ID=Q2QYQ2; Match level="QueryCoverage=91%, HitCoverage=96%, E-value=0.0, Identity=83%"; Hit description =Expressed protein
MGVSLAGLSSLDNHTTNHEGITFNTGGAIYIFCGNKSSITKSIDSVDDSYSADGVEDSQLFLSVPALNQAASYLAQTASFLTQCLPVPGFVGLSEEGQELLTLPPASASGRLSVQTSSVEPSGTNSSLGQSDCGGNPSQENAGQMVPSHVFQNGASLFQGLVERARKTVRGSADDIGWLQRDQSLPTTEDGTARFLEIFGFCLFSNHGPLYFVKTKAYFSKMGLACHIAKIHSESSVSKNAREIKEYIEEIYWGSRKRVLLLGHSKGGVDAAAALSLYWPQLKDKVAGLALAQSPYGGSPVASDILREGQLGDYVRLRKIMEILVSKVLKGDLQALEDLTYERRKEFLRRHPLPQDVPIVSFHTEASITPSVLTALSHVAHLELPIAGDGNSTRIPVVMPLSAAMAACSQLLVARYGEKSDGLVTRKDAEVPGSVAVRPERKLDHAWMVYSSLKEESGDQADTSQVCEALLTLLVEVAQKRRHEMAMKDE

SEQ ID NO: 64274 - protein, 217 aa, Zea mays
  Coding DNA Sequence Number=SeqID_22495
MAKKRSTGELRRRIEVPCDARPRPNGLLMSRAKVWLGPYVAIPGAPPLVVSNFCRLASTISYTRIGKRPIGRSAGPEKVTTVAFNGRVLKLGPDSCQSMCPLPKLVEQAYSNEGNLDGVQVISWINMSNELYNIVSGLESHNLILSFRYLAVSDWFTLPASVKCVFAFSTIPGLQYACSGAEQQQVVLYDAVEAPSPLFGGSTTTPVLSPSSSRFEF

SEQ ID NO: 64275 - protein, 191 aa, Zea mays
  Coding DNA Sequence Number=SeqID_22496
  Gene Ontology: Cellular component=intracellular; Biological process =ribosome biogenesis and assembly
  Homolog annotation: Hit_ID=Q2QYV8; Match level="QueryCoverage=94%, HitCoverage=62%, E-value=1e-80, Identity=69%"; Hit description =Ribosomal protein L10 containing protein
MPKSKRNRPVTLSKTKKKPGLERKGKVVAEIKDAVDKYSSAYVFTYDNMRNQKLKDLREQLKSSSRIFLAGKKVMQIALGRSPADEAKTGLHKLSKVELKEGPLEQFTHEMEPFLRKQGLPVRLNKGVVELVADHVVCEEGKPLSPEAAQTLRLLGIQMATFRLYLVCRWSGDDFEVYKEGLMHLGADESS

SEQ ID NO: 64276 - protein, 618 aa, Zea mays
  Coding DNA Sequence Number=SeqID_22497
  Homolog annotation: Hit_ID=Q2QYU1; Match level="QueryCoverage=85%, HitCoverage=92%, E-value=0.0, Identity=68%"; Hit description=Nodulin- like family protein, expressed
  Pfam annotation: Domain name=MFS_1; Domain location=47-513; Score =4.5; E_value=0.0002; Accession=PF07690.6; Description=Major Facilitator Superfamily
  Pfam annotation: Domain name=Nodulin-like; Domain location=43-300; Score=247.3; E_value=3.2e-71; Accession=PF06813.4; Description =Nodulin-like
  Pfam module annotation: Pfam domain module=MFS_1::Nodulin-like; Domain location=47-513::43-300
MGGRGGGEEEEGVVDGGRHHLRHEQRLNVFGGEEDDRDEGWRRWSVLVATVWIQALTGTNFDFSAYSSALKSSLGVSQEALNCLATASDLGKALGWSSGLALLHMPLHAVLMLSAAMGLAAYAAQYYCLVFAGGADAGASSSVAVPYPLVFLFCLIAGCSICWFNTVCFVLCIRSFSASSRSLALSLSISFNGLSAAFYTLFANALSPFSPAVYLLLNAILPLAVSVLALPAILLCHKNEGHIQSAPGHDGRVFLGLYILAFITGIYLVVFGSFTATSSTAWVILTGAMVLLALPLIIPACSSCSDGPDPAYDDPHKPLLISQMESNAMMQKPKENQVQVKGRLATLGEEHSAKKLIRCVDFWLYYTAYFCGATVGLVYSNNLGQIAQSLHQQSQLTMLLAVYSSCSFFGRLLSALPDLLHRKVSLARTGWLAAALVPMPMAFFLMWNKQDGSTLVAGTALIGLSSGFIFAAAVSVTSELFGPNSVGVNHNILITNIPLGSLLYGQIAAMVYDANGQKMTVVDNRTGIVDTMTVCIGVKCYSTTFVVWACITFLGLASSIVLFIRTKPAYATAASRSSSCRTSGLNLTSISAFCLKLNVKTSPSVCAKEALMLQIGVS

SEQ ID NO: 64277 - protein, 72 aa, Zea mays
  Coding DNA Sequence Number=SeqID_22498
MGARPCGHSHSGRSVIGWKSNAMRAFLLGSVGHEKVTVLESEKRAWESSPEAQAMREALNPWRKHDEQEQQK

SEQ ID NO: 64278 - protein, 154 aa, Zea mays
  Coding DNA Sequence Number=SeqID_22499
  Homolog annotation: Hit_ID=Q2QZT0; Match level="QueryCoverage=43%, HitCoverage=7%, E-value=6e-14, Identity=62%"; Hit description=Beta-D- xylosidase, putative, expressed
MRPNGPGRGVPVEHAEPHLHGDSVEERDVDVGVGDLARGDDGAGVEREERPAVEVEADAERGGGGVLGGARVGKGRQAGDGGGGGFGRRACEERGGGWRWAIVKAGERGEILARMGRKGAELPPDEDGGVECGDAHGEREVERTDLRSDVVFRT

SEQ ID NO: 64279 - protein, 85 aa, Zea mays
  Coding DNA Sequence Number=SeqID_22500
MPWLPSAPAPGHAHTLVEQKAVDEMVDGFGIGRLQELLGAAAGQAAEIDDMYAGMLSKLEKLAREVEKSNLRVLEQLPEYSRQID

SEQ ID NO: 64280 - protein, 217 aa, Zea mays
  Coding DNA Sequence Number=SeqID_22501
  Homolog annotation: Hit_ID=Q6ZIP6; Match level="QueryCoverage=53%, HitCoverage=40%, E-value=9e-13, Identity=73%"; Hit description =Putative interferon-related protein
MVVTMKCCFSYVAGTTPYYSRCSSGPFSDDDFHAVSTAISGKPQGSTREATLIKLVDALESFMLHGLVENKHSIVWLSSHLLAQLIWLKQSRLLKAMWDVIHPKSGSNVFFPFTYYRILQADAGRSCRIVNTWGNGGSKNKLFLDMQELKAKISGLALNLSAEVGGKGVDMKNLADQRDLFQLFTPKHLVLLCLSVNESKLDTRSLVNLEVSARALP

SEQ ID NO: 64281 - protein, 266 aa, Zea mays
  Coding DNA Sequence Number=SeqID_22502
  Homolog annotation: Hit_ID=Q9LRZ4; Match level="QueryCoverage=31%, HitCoverage=32%, E-value=2e-09, Identity=55%"; Hit description =Protein phosphatase-2C-like protein
  Subcellular localization annotation: CTP_CleavageSite=69; ConfidenceScore=5.38e-01
MAPSTALPLELGTFNRGRKAVKSVMAWPNRGERRRGTSWSSPTSVTLRLFWALHPTTVPPHRPAHRPPEAQSATQESSVLVLSRAFDDYNTKDYGFISAPEVMQRRTDNNHQFVILATVGSSPYQPASAENRPCPTSPPPPCSSDTPETADPHASVSLHPHRRHGQDLQTTRGCRSTRISDTNRISARDQRMHPSPNTVMPTAARGCQPPPHHPAPTHPLYITWILVGAFADWINHDGPPSCFSGEDQVMEGEELNAGYHTSNNNG

SEQ ID NO: 64282 - protein, 151 aa, Zea mays
  Coding DNA Sequence Number=SeqID_22503
  Homolog annotation: Hit_ID=Q6QP51; Match level="QueryCoverage=89%, HitCoverage=58%, E-value=2e-09, Identity=68%"; Hit description =Putative growth-regulating factor 1
  Subcellular localization annotation: CTP_CleavageSite=28; ConfidenceScore=5.13e-01
MGGRGVPSLLVYRGEPGNDAPPAAWSVRAQVRARRRLFLRPRPGSSEGAILSVVEVEVEPWGRARRSPSSEAEAGAEPWGRVRRSPSSEAEAGAELWGRARWNFLWRLRLDSAAVSLTLAGGTAVGAGQAALLSCQVGQWKGEVTAVTSAL

SEQ ID NO: 64283 - protein, 45 aa, Zea mays
  Coding DNA Sequence Number=SeqID_22504
MASKFIPWNLRTWDENAHNMKNAVWEKDEPVPKLPVKKLRLSDGK

SEQ ID NO: 64284 - protein, 53 aa, Zea mays
  Coding DNA Sequence Number=SeqID_22505
METRLPQPAISSAGDSIHAFPSYDGTNNFESRMTQNQEGENDEFMDVNYMLKA

SEQ ID NO: 64285 - protein, 97 aa, Zea mays
  Coding DNA Sequence Number=SeqID_22506
MGKVVGERNRKRAVARVMLCQGEKTGGEGGSVAMGSLWPLSLYPGVALSLRLQLSSSLWLPCLGGGDLLAPHLCHAGEEGKRGGGGDLVAGDEETED

SEQ ID NO: 64286 - protein, 263 aa, Zea mays
  Coding DNA Sequence Number=SeqID_22507
  Gene Ontology: Mol. function=N-acetyltransferase activity; Biological process=metabolic process
  Homolog annotation: Hit_ID=Q84S80; Match level="QueryCoverage=60%, HitCoverage=54%, E-value=3e-76, Identity=86%"; Hit description=GCN5 -related N-acetyltransferase-like
  Pfam annotation: Domain name=Acetyltransf_1; Domain location=133-229; Score=51.0; E_value=3.9e-12; Accession=PF00583.14; Description =Acetyltransferase (GNAT) family
  Pfam annotation: Domain name=FR47; Domain location=150-238; Score= -4.8; E_value=0.037; Accession=PF08445.1; Description=FR47-like protein
  Pfam module annotation: Pfam domain module=Acetyltransf_1::FR47; Domain location=133-229::150-238
MVVDSGSGSEGSAVTVQGGGGDEGEWRVGFGVVCRHGCGRSRRTLVGARHIPPALRSDDTISSSLPPNSSGHNGSMMNQDHRKALADREFEALQDRISGKMINFRRVSCINGTVPLSPSLMSAEELCSMCKFVEDGKERLVVGSLDLNQCLWLPDELTGKRPGVNEDIQTRAYLSNVCVAKELQKKGLGYTLVDKSKKLALEWGITDLYVHVAINNVAGQKLYKKCGFVYEGEEPAWKGRFLGRPRRLLLWLDMSKVLVRSCM

SEQ ID NO: 64287 - protein, 76 aa, Zea mays
  Coding DNA Sequence Number=SeqID_22508
MANLEKAFKAYKLVDNKKVASLHELEKAFKAYKLVDNKKVASLHELEKAFKAYKLVDNKKVASLHELKKTFWYGLY

SEQ ID NO: 64288 - protein, 442 aa, Zea mays
  Coding DNA Sequence Number=SeqID_22509
  Gene Ontology: Mol. function=3-dehydroquinate dehydratase activity; Cellular component=integral to membrane; Biological process=aromatic amino acid family biosynthetic process
  Homolog annotation: Hit_ID=Q25CI2; Match level="QueryCoverage=97%, HitCoverage=63%, E-value=1e-148, Identity=54%"; Hit description =Hypothetical protein osysl4
  Pfam annotation: Domain name=OPT; Domain location=1-407; Score=25.0; E_value=1.1e-10; Accession=PF03169.6; Description=OPT oligopeptide transporter protein
MASIFYFDFSASFVGLGMIVPHVVNFGLLFGAITSWGLLYPFLQSKRGQWYHTDSRTSLSGMNGYKIFIAVTMIITEGMFNFIKLLTVSSIDLYKKRQQNDSGKIKYMLTSPSLSYDDRRRLDVFLGQRIPLHVPVAGYIGCAIVCSVVIPWIFQHIKLYHMALLFTILPVFTFCNTYGTGLTDWSVAQSYGRFIQFVIAAWVAVPGAVIASLAACGVSVAALNVSSQAMQDLKTGYMTSTSPRAVVAGHIYGVLIGSVIIPSIFLAFEANAKSTAPIGSKDSEYSCPSAAVYRAIGLLGKRGVKELPDHCITLCLVTFFMTLAIETIRLVSQRRNWKLHSFIPCMIAIALPFLAGPYFTIDMCLGSVLLIIWNKRNRPHAELLSSAVAAGLICGDGLWVLPSSVLSIFNVHPPICMKFLSSGKQVDIADSFLNTLGPHGRT

SEQ ID NO: 64289 - protein, 168 aa, Zea mays
  Coding DNA Sequence Number=SeqID_22510
MASTGGAARLGLETRGNTRTARRHPTSWTSIGSRRAPLEVGGSTRGVGEKQAGIHARSGEVNGGGLRKRAAVPDEEGVAEILGHLLLSVIDGGAMAASDPRHRGAEGEEGAMGWIRGHLPSTTWGGGCGGDRRPPSVIDGDAILGTNLWTSLVTRELRGISEDEGPEN

SEQ ID NO: 64290 - protein, 98 aa, Zea mays
  Coding DNA Sequence Number=SeqID_22511
MASTSLRTRFEELSMFKGCINFIQHDVHEHDLACRSQRLHEFSAFADWIRTPASDRIASTCRLSFRSGRSIVAQTAKVELLDVHEKKQGRVGISCIQV

SEQ ID NO: 64291 - protein, 72 aa, Zea mays
  Coding DNA Sequence Number=SeqID_22512
MGCLSISWLPVMKLYNTTLHEEVHMSHNHLHLYELPEEAEMEAGVVEADGGELDGGLTNLESRLLVLWKTTL

SEQ ID NO: 64292 - protein, 43 aa, Zea mays
  Coding DNA Sequence Number=SeqID_22513
MAPEKTVAARTPGKMATHTNGFALITTAMALCGMVIVAGCGGW

SEQ ID NO: 64293 - protein, 40 aa, Zea mays
  Coding DNA Sequence Number=SeqID_22514
MAIQFALAKVTAGERLRTISGGWVRDDLAELTVASIYRGR

SEQ ID NO: 64294 - protein, 137 aa, Zea mays
  Coding DNA Sequence Number=SeqID_22515
  Homolog annotation: Hit_ID=Q10MT6; Match level="QueryCoverage=57%, HitCoverage=14%, E-value=5e-09, Identity=45%"; Hit description =Expressed protein
MAEKSSLRRLKRLLPAFAAIDAAIEAATGFSRDNIRQERGKLVEMLCDIITDNDSVELAEGLCQLLDEAMVFALKRLRVVEATPTVLATTDAIKAVAGLRSHESGRVSFNNHCDYTRCAFSVLMMSTRSNRPCSVSA

SEQ ID NO: 64295 - protein, 91 aa, Zea mays
  Coding DNA Sequence Number=SeqID_22516
MSLDTKLIVDAISEFFDKFDARWAKRDAARETSRHVPVLTQSAAVGADVVADNWGDHFDSGNDSFEQHYEEPIIADNWAASSTTASSTARR

SEQ ID NO: 64296 - protein, 388 aa, Zea mays
  Coding DNA Sequence Number=SeqID_22517
  Gene Ontology: Mol. function=oxidoreductase activity; Cellular component=membrane; Biological process=response to oxidative stress
  Homolog annotation: Hit_ID=Q9LGU0; Match level="QueryCoverage=65%, HitCoverage=77%, E-value=2e-60, Identity=53%"; Hit description =Putative peroxidase 1
  Pfam annotation: Domain name=peroxidase; Domain location=44-291; Score=118.1; E_value=2.5e-32; Accession=PF00141.13; Description =Peroxidase
MPRSADVTLLFLVAVHALLVTHAALQEGFYTSNTDCTVDVEATVASVVQQFISADRGVGAGLIRPPPLPRLLRQGLRRFGSHRREPSQPGPGEGVAVERRPPRAGGDPGGQAAARERVPRDRVLRRHPRLRRPRRVRSNVLSSGAIDYGVPSGRRDGLTSAASDDSRSLPPPFARLDRLTELFAAKGFTQDELVTLSGAHSVGRAHCASFSHRIHIHPTVSETMDAQYGAGLQQRCPTDAGDAVDQDQATPADLDNQYYRNLLAGKVLFRSDWALISDNTTSQMVPDNAGNQAQWAAKFVDAMRKMGALDVVTDSPATCRANQMAPFTWAKKFMKSDVWEVFGKNMTTISIKILDQCPLQDLTRVNEEPSSVTLLPQGLFVFSLIYVD

SEQ ID NO: 64297 - protein, 112 aa, Zea mays
  Coding DNA Sequence Number=SeqID_22518
MMDQPPRPPAENRGDHFQKLMDLSCQNYGFLVRYKFQECEILKSFIYKQPSKKANPEEPAKAAEQEASTEDFPEMTGCLMIFGGLEAYNDKSRLKVAHCEVHAAEPVIPQYL

SEQ ID NO: 64298 - protein, 109 aa, Zea mays
  Coding DNA Sequence Number=SeqID_22519
MTKDKVRTKDKCWSVGMIYGPRELPGKLGCHNSSIEIICLACALIRLRVGLQSDGDKEVLIKGVNTMLKIALKLLAKLSWDVIQTKSIRDAQDYGDVGQDCDLRDDGQN

SEQ ID NO: 64299 - protein, 290 aa, Zea mays
  Coding DNA Sequence Number=SeqID_22520
  Gene Ontology: Mol. function=DNA binding; Cellular component=nucleus; Biological process=regulation of transcription, DNA-dependent
  Homolog annotation: Hit_ID=Q8RUX5; Match level="QueryCoverage=89%, HitCoverage=94%, E-value=4e-29, Identity=33%"; Hit description=One repeat myb transcriptional factor
  Pfam annotation: Domain name=Myb_DNA-binding; Domain location=132 -179; Score=31.9; E_value=2.2e-06; Accession=PF00249.21; Description =Myb-like DNA-binding domain
MDPNYGEWNFSEIKIAKALIASHNAKSSYSSDMNNKQTDIIDMLQARFPTKEKHKVTKLYVDLMLEKMQMILSGNQHATMGKKLVNDKFGMSIEDPAIDFMGGDLVEKRTAKRKAREDMNTHLDSQKERRYRRFWTIDEHRNFLYGLRAYGRSDWKNISKHFVTTRTPMQISSHAQKYFHRMENIARRQRSSINDIVLHDDEPRVQSNDSSLQRFTFTSGTYNPNHYGSSSQFVAMSNIAKHMWFPSVCCIDQESTSNNQITTLDRGGSGGSCVALEVQGVGSKAKLISD

SEQ ID NO: 64300 - protein, 100 aa, Zea mays
  Coding DNA Sequence Number=SeqID_22521
MKRCLNRLTNTIKQKTEGALPSTFVVVIGHQPTSVLNLLEDDSSHSSIDPNPDANKADYHLACHMAGIKDDHLIIKFLPFTSWRDQGPSLSTCPSGTIHD

SEQ ID NO: 64301 - protein, 257 aa, Zea mays
  Coding DNA Sequence Number=SeqID_22522
  Gene Ontology: Mol. function=RNA-directed DNA polymerase activity; Cellular component=mitochondrion; Biological process=RNA-dependent DNA replication
  Homolog annotation: Hit_ID=UPI00004C1731; Match level="QueryCoverage =99%, HitCoverage=21%, E-value=1e-96, Identity=64%"; Hit description =UPI00004C1731 related cluster
  Pfam annotation: Domain name=RnaseH; Domain location=1-123; Score= -13.1; E_value=0.00096; Accession=PF00075.14; Description=RNase H
  Pfam annotation: Domain name=rve; Domain location=125-255; Score =13.4; E_value=0.00045; Accession=PF00665.16; Description=Integrase core domain
  Pfam module annotation: Pfam domain module=RnaseH::rve; Domain location=1-123::125-255
MYFDGSLMKTGADAGLLFISPLGKHLRYVLRLHFPASNNVAEYEALVNGLRIAIELGVRRLDARGDSQLVIDQVMKSSHCRDRKMEAYCDEVRRLEDKFYGLELNHIARRYNETADELAKIASGRTTVPPDVFSRDIHQPYVKIDDTLEPEEASAQPKKAPGGFSHLLVAIDKFSKWIEVQPLTSIRSEQAVAFFRNIIHRFGVPNSIITNNGTLFTGKKFLDFCEDHHIRVDWAAVARPMTNGQVERANGMIFAGT

SEQ ID NO: 64302 - protein, 105 aa, Zea mays
  Coding DNA Sequence Number=SeqID_22523
MKVFARSSLGTLSALTPWNAGQRPNDAGVEQGQRGGEAALWPPTASSLVGKGGPVVDGLTVSVRSRTSSGSMQGATEQTEGEESACGSVMWARLGGSGRGGRTDR

SEQ ID NO: 64303 - protein, 379 aa, Zea mays
  Coding DNA Sequence Number=SeqID_22524
  Gene Ontology: Mol. function=protein serine/threonine kinase activity
  Homolog annotation: Hit_ID=Q5JKG7; Match level="QueryCoverage=90%, HitCoverage=59%, E-value=3e-59, Identity=42%"; Hit description =Pherophorin-dz1 protein-like
MEHNFMVVLRRVREPMLRTTIWPNALGEIKALSIDIWEDRKIFDTQAQSLKDDFFRRLKDIRNQLKNTGSEQLEKVVSSYKHVLNAPMDEDTLMRKCQAALINFDELNKTYGNNSILGGCSYCANGLHHTFVATEISLSLDGLYKEMHCSSNRSGFMQELQEQHSILRNSIEQLKVSESLRATLIFHLKEALNEQVLTQITLFIYFQELKVEHLRSQLQAAQPRFKRASELCVGLGSNMERRQPSNQGLKRSSLSDPLSTVAPEAVKSLQKGQSSAVLYSQEGNGVEHSVTETKLAAGAASDDIRGGALSSRVNGGNTMLKIEEHTSGNKRQKLEDDAHISQPRPPGFRNLTPPPSFRGLAGTFYGPRFPTAPPPADRK

SEQ ID NO: 64304 - protein, 929 aa, Zea mays
  Coding DNA Sequence Number=SeqID_22525
  Gene Ontology: Mol. function=ATP binding; Cellular component =membrane; Biological process=defense response
  Homolog annotation: Hit_ID=Q8RUA3; Match level="QueryCoverage=99%, HitCoverage=100%, E-value=0.0, Identity=63%"; Hit description =Putative disease resistance protein
  Pfam annotation: Domain name=LRR_1; Domain location=606-627; Score =6.4; E_value=18; Accession=PF00560.23; Description=Leucine Rich Repeat
  Pfam annotation: Domain name=LRR_1; Domain location=629-650; Score =7.9; E_value=9.5; Accession=PF00560.23; Description=Leucine Rich Repeat
  Pfam annotation: Domain name=LRR_1; Domain location=652-673; Score =2.3; E_value=1e+02; Accession=PF00560.23; Description=Leucine Rich Repeat
  Pfam annotation: Domain name=LRR_1; Domain location=796-821; Score =1.0; E_value=1.8e+02; Accession=PF00560.23; Description=Leucine Rich Repeat
  Pfam annotation: Domain name=LRR_1; Domain location=868-890; Score =0.2; E_value=2.6e+02; Accession=PF00560.23; Description=Leucine Rich Repeat
  Pfam annotation: Domain name=NB-ARC; Domain location=147-483; Score =119.1; E_value=1.2e-32; Accession=PF00931.13; Description=NB-ARC domain
  Pfam module annotation: Pfam domain module=LRR_1::LRR_1::LRR_1::LRR _1::LRR_1::NB-ARC; Domain location=606-627::629-650::652-673::796 -821::868-890::147-483
MAETAITTVLAKVAELVAWEAAVLLEVGDDVRLLRDKLEWLHTFIRDADRRRRRRDDEFVAVWVRQTRDVAFEAEDALDDFLHRAGRRKAALGSRCALGCWWPGGCAGQVALRHDLSGRIRQIRKRLDKISENRADYNIEHTPAPAWAACSSSATTLAAWDDLEEYTVGLDKYSDMLKEQLLDDSVPARALVAIAGESSIGKTTLARKVYQSLEVRNHFEIRTWTVLPHKCRAADVLRDIHEQMTSQLRRTPSASNSKQAVEDACDDKAFGPGKDISNQLYRSMTGRRYLVVIDGSVAVTDWNSLRASLPDEGNGSRVLLITDLEGLEVVGHAQAGHTYDPIELTRLSPESTYEVFRRRVFGARGDCPGRYKSRYYQDVFRITRGLPLSIVVLAGILRSKELPAEWDEVMAQLAPPAREQQRGGSGGSSNSWPRIMSRAFDDLPHHLKSCFLYLAAMRESTPVDAQRLVRLWVAEGFVRPRRGSTMEEVGQGYLKELISRCMVQLVDKDDFGAVLTVVVHDRLHAFAQDEAQEASFIESHDSTDVLAPATVRRLAVLNSTTDRYVQLSNALPKLRSIICDLVEGRRVRSSNFIRTSDLSFLHASKFLRVIDIQGLELKRLPNEIGSMIHLRYLGLRCGHLEKLPSTIGNLVNLQSLILGGRHVLEVPAAFWRIATLRHVVARFALPSRALGNLHSLQTLHGVQPRGWGGDYNPLGKAANLRSLELGELTSEHADALEAALENLDLLEHLALRGDPLPSSVFSVPSLRRLQSLRLMGAMDEPEGPSCAEDVRYIRPNLTRLSMWNTEVGQKFVDMLAELPSLAELTMMYDSYDGDRLAFVETGFPSLQKLKLGLPELEEWTVAPGSMPGLGTLTLCRCARMQMLPEALAGMRELEEVVLYSMPDIVSRIKEDEGQDYHKVKHVPVIQTIY

SEQ ID NO: 64305 - protein, 155 aa, Zea mays
  Coding DNA Sequence Number=SeqID_22526
MVAAPAEGPTSGAGHVGEAGWRQAAWMERADLGGLGGGGARALGDADKGGPGRAAVHQRGGAVVPLGAASAVFEQGADLSKATELHGMRWMGKRGGGWRLLGRRAAPGGKDEPPGAAARRWWAGPGQTAGSCGVDLSGPKGAAARSNSKERESKG

SEQ ID NO: 64306 - protein, 195 aa, Zea mays
  Coding DNA Sequence Number=SeqID_22527
MTMDMLTSKLGHANKVKVKSELSSSPYFTPPFFITEHQQTEEQKQRLSNSPPTRAAHGMIVVDGRAKPCSYRISPRKRAAEQAANYTTQRQRGSAGELELDQNQSRAGIERAERERCRTFGGAGAEFEGRRLGGGAHLGGEGSLGFNRGFVEGPEQGGEEGETSVTGRSPACARDPAARSSGGAAGECELDDDAV

SEQ ID NO: 64307 - protein, 68 aa, Zea mays
  Coding DNA Sequence Number=SeqID_22528
MCCSGRRAITQSLLLLLRLLMLSILQDRTPEPEYSVQSQCLKTTYKSIYFATLFSMIIPSSAHYFSMK

SEQ ID NO: 64308 - protein, 166 aa, Zea mays
  Coding DNA Sequence Number=SeqID_22529
MTNKKNTKTESTTGIFHEAMVVHSFPEAWGRKDKHSECTTMTNKKNTKTESTTGIFHEAMVVHSFPEGWGRKDKHRAVGHHGDLGALKPVVQAEVTPTGQLQLRPRKIRAKLWRFGIRDLLIQHILVSENRQQSAEEVEGVSSSSDDEDEDDEDDDEEAAVSDGSE

SEQ ID NO: 64309 - protein, 135 aa, Zea mays
  Coding DNA Sequence Number=SeqID_22530
  Homolog annotation: Hit_ID=Q6QP51; Match level="QueryCoverage=44%, HitCoverage=27%, E-value=6e-11, Identity=61%"; Hit description =Putative growth-regulating factor 1
  Subcellular localization annotation: CTP_CleavageSite=27; ConfidenceScore=5.47e-01
MSTTQATTDNKSRSTIEFGLGRNRKLRLARPQAPASRGGLRLARPQAPASRGGLCLARPPNSASTSVSGGIASSPDPGLDLKRSLCLARPWARTDRANRGYIITLFLACSGYKEQDRRPIWLTPAMGNDGAPRAP

SEQ ID NO: 64310 - protein, 111 aa, Zea mays
  Coding DNA Sequence Number=SeqID_22531
  Homolog annotation: Hit_ID=Q6QP51; Match level="QueryCoverage=37%, HitCoverage=19%, E-value=3e-11, Identity=76%"; Hit description =Putative growth-regulating factor 1
MRIARLVALTPRQSERHLGQARRASFRLRHDDRVEKGTGKGVVVERILLGEGSGPRALLLIRGSKASPSEGVRQPPQSTRASSTLLIRDSKAGPSKGFDNRPTTLGLRAHY

SEQ ID NO: 64311 - protein, 544 aa, Zea mays
  Coding DNA Sequence Number=SeqID_22532
  Gene Ontology: Mol. function=RNA-directed DNA polymerase activity; Cellular component=mitochondrion; Biological process=RNA-dependent DNA replication
  Homolog annotation: Hit_ID=UPI00004C1731; Match level="QueryCoverage =92%, HitCoverage=33%, E-value=0.0, Identity=83%"; Hit description =UPI00004C1731 related cluster
  Pfam annotation: Domain name=rve; Domain location=256-415; Score =107.6; E_value=3.6e-29; Accession=PF00665.16; Description=Integrase core domain
MGETISFAPRKAIKSQVLADFMAEWVDTQLPVAPIQPELWTMFFDGSLMKTGASMGLLFISPLGKHLRYVLRLHFPASNNVAEYEALINGLRIAIELGLVIDQVMKNSHCRDPKMEAYCDEVRRLEDKFYGLETPYLQYFHRGELPLDRAEARRLARRAKSFILLGDGKELYHRSPSGILQRCISIAEGQELLQEIHSGACGHHAAPRALIGNAFRQGFYWPTAVADATRIVRTCQGCQFYARQTHLPAQALQIIPITWSFAVWGLDLVGPLQKAPEGYTHLLVAIDIFSKWIEVRPLNSIRSEQAVAFFTNIIHRFGVPNSIITDNGTQFTGRKFLDFCEDHHIQVDWAAVVHPMMNGQVERANGMILQGLKPRIYNDLHKFGRRWMKELPLVVWSLRTTPSRATGFTLFFLVYGAEAILPTDLEYGSPRTRAYDDRRNQTNREDSLDQLEETRDMALLHSARYQQSLRCYHARGVRSRDLQVGDLVLRLRQDARGRHKLRPPWEGPFIIAKILKPGTYKLANSQGKVYSNAWNIRQLRRFYP

SEQ ID NO: 64312 - protein, 235 aa, Zea mays
  Coding DNA Sequence Number=SeqID_22533
  Gene Ontology: Mol. function=oxidoreductase activity; Cellular component=cytosol; Biological process=metabolic process
  Homolog annotation: Hit_ID=Q6H7C9; Match level="QueryCoverage=77%, HitCoverage=59%, E-value=3e-40, Identity=51%"; Hit description=Short- chain dehydrogenase/reductase protein-like
MDLMQRIEAINRHSTEPYEQAEKCLNTNYHGIKAVTKALLPLLQSSSHGRIVNLSSYYGLLRLQFFSGDELKEELSSIDGLSKQRLDELSELFLKDFKDGQLEAQGWPNEGGFAAYKASKALANAYSRILAKEHPSLRINCVHPGYVQTDMNFGSGHLTVEEGARAGSSHAGHGAQGRRHWRVFRPHRGLRPSCNMLALALAPLAIALLDRVFNTLHENPYLVDNWRGTVITTSS

SEQ ID NO: 64313 - protein, 308 aa, Zea mays
  Coding DNA Sequence Number=SeqID_22534
  Gene Ontology: Mol. function=oxidoreductase activity; Cellular component=cytosol; Biological process=metabolic process
  Homolog annotation: Hit_ID=Q6H7C9; Match level="QueryCoverage=80%, HitCoverage=95%, E-value=2e-63, Identity=48%"; Hit description=Short- chain dehydrogenase/reductase protein-like
  Pfam annotation: Domain name=Epimerase; Domain location=62-292; Score= -60.0; E_value=0.032; Accession=PF01370.11; Description=NAD dependent epimerasedehydratase family
  Pfam annotation: Domain name=KR; Domain location=55-208; Score=-74.5; E_value=0.0049; Accession=PF08659.1; Description=KR domain
  Pfam annotation: Domain name=NAD_binding_4; Domain location=64-308; Score=-96.4; E_value=0.022; Accession=PF07993.2; Description=Male sterility protein
  Pfam annotation: Domain name=adh_short; Domain location=60-206; Score= 20.4; E_value=2.5e-07; Accession=PF00106.15; Description=short chain dehydrogenase
  Pfam module annotation: Pfam domain module=Epimerase::KR::NAD_binding_ 4::adh_short; Domain location=62-292::55-208::64-308::60-206
  Subcellular localization annotation: CTP_CleavageSite=60; ConfidenceScore=5.25e-01
MAALQQHDDGARSALSLALLCNNALFPMRAPVTITFTSSIAIRDSLICVPSQRTGTYLIRVAVVTGGNRGIGLEICRQLASGGVTVVLTARDAERGAEAASKLGLPNVVFHQLDVGDPSSAARLAGFIEEKFGRLDILVNNAGITGTTSNVDDPEAFRQELAGMDLMQRIEAINRAQHGIFFSGDELKEELSNIDGLSEQRLDELSELFLKDFKDGQLEARGWPNEGGFAAYKASKALANAYCRILAKEHPSLCINCVHPGYVQTDMNFGSGHLTVEEGARGALMLAMAPKGGVTGAFMDHTEVASFV

SEQ ID NO: 64314 - protein, 169 aa, Zea mays
  Coding DNA Sequence Number=SeqID_22535
MEGAAVMLHYNSNEGVRSSVRPRRAACLHRASRATARTTHEDLPTRQRISATHVVTSIAASPPAQPHCAPPRWDLGAARPPRWDLGGGKWSSSIFGDELGRLANVGDLAVKRVNPEAGIVELTNHVNYYEQSHIQGNHLNDWLVFSPLYLFLALQLISLGNYGIFPSLD

SEQ ID NO: 64315 - protein, 88 aa, Zea mays
  Coding DNA Sequence Number=SeqID_22536
MDCNSIHTTVNVERLFSNIDIGKRYMYFLGKRKNRRQVFQQLNLQTCDQGHKDKVFQQLNLQTCDQGHKDKMLNLKMNKRLLICRRWE

SEQ ID NO: 64316 - protein, 58 aa, Zea mays
  Coding DNA Sequence Number=SeqID_22537
MPKLAKHRAESGKLGTGKDREFKHGSAGLPLSVMVPPLARKHRRPAGMVKEMVLMPSI

SEQ ID NO: 64317 - protein, 80 aa, Zea mays
  Coding DNA Sequence Number=SeqID_22538
MARALVHRPFTVSRRYVCVSRFKISADPATVHCSIALAEFAKERRRDTTSWAYQILNSLLLFLLGGPMVRGEHLCPSLLN

SEQ ID NO: 64318 - protein, 338 aa, Zea mays
  Coding DNA Sequence Number=SeqID_22539
  Gene Ontology: Mol. function=hydrolase activity, hydrolyzing O -glycosyl compounds; Cellular component=vacuole; Biological process =carbohydrate metabolic process
  Homolog annotation: Hit_ID=P12257; Match level="QueryCoverage=90%, HitCoverage=98%, E-value=1e-142, Identity=79%"; Hit description =Lichenase-2 precursor (EC 3.2.1.73) (Lichenase II) (Endo-beta-1, 3-1 ,4 glucanase II) ...
  Homolog annotation: Hit description=((1->3,1->4)-beta-glucanase isoenzyme EII)
  Pfam annotation: Domain name=Glyco_hydro_17; Domain location=33-338; Score=616.7; E_value=2.1e-182; Accession=PF00332.9; Description =Glycosyl hydrolases family 17
METETVTVTPDGDAEKKYWNSLCACTSAGAEAIGVCYGMSANNLPAASTVVSMYKANGISAMRLYAPDQGALQAVGGTGISVAVGAPNDVLSNIAASPAAAASWVRNNIQAYPSVSFRYVCVGNEVAGGAAQDLAPAMENVHAALAAAGLGHIKVTTSVSQAILGVYSPPSAAEFTGEARGYMGPVLQFLARTGSPLMANIYPYLAWAYNPSAMDMSYALFTSSGTVVQDGAYGYQNLFDTTVDAFYVAMGKNGGSGVPLVVSESGWPSGGGVQATPANARVYNQYLINHVGRGTPRHPGAIETYLFSMFNENQKESGVEQNWGLFYPNMQHVYPISF

SEQ ID NO: 64319 - protein, 38 aa, Zea mays
  Coding DNA Sequence Number=SeqID_22540
MAFFANLVPSYQVFLDDVSWEWTCARGRIGIPVRRAIK

SEQ ID NO: 64320 - protein, 143 aa, Zea mays
  Coding DNA Sequence Number=SeqID_22541
MVTMSTESSDAQVIILWEITHLVRLRHTAHKSVIPFLSSYLAERPLHCTVSGQSSHLERLHNHLHEQQERQRQEREHQDSSSSPRQKVEPMRHPSRCPNRTRPPTPPQGAPASRGGPGGDPDRDNLNHSIELSGEEELEGWVA

SEQ ID NO: 64321 - protein, 160 aa, Zea mays
  Coding DNA Sequence Number=SeqID_22542
MDPAALKFLLDEIGRLFYEKSAKWDRRFSRWNVKREPEPYLRDEVTAEENRRRRRALRRTSEKHTPVAVNSYVPAFAARFNGFYLDHMAFLSNGPNFDLIGSVVSKDREEANKCMPSQDKPIINIDLPDYMETSFPESALHDVPSANCPTTWRRSPFVRL

SEQ ID NO: 64322 - protein, 84 aa, Zea mays
  Coding DNA Sequence Number=SeqID_22543
  Subcellular localization annotation: CTP_CleavageSite=62; ConfidenceScore=5.25e-01
MASLTSHTFVLPSRTTLLLLKLQGSFRDPKAPGGTPIMQQRAPKFSASIGLPNSEPNHIYVRCFPKVGIQVPRDLAFIRSNTCK

SEQ ID NO: 64323 - protein, 223 aa, Zea mays
  Coding DNA Sequence Number=SeqID_22544
MSTDSTDAPVIFLWEITHVTSDMVRTLQITYVNTNRIPPPLHAPFYPVVVEEVPMELHRLQVRNGVILEDSSEDILATPTPLSESHAFAARASSSVPPVPVSQAPAPRGDDPDDSSDDDDDDEEEEENNDNNEDVNNEQEKENFVGLWPIAEHYTSCLRRDTFQTCYRMCCMRWEPMFDLSMTQGGNATRRAPWSLNHTYRRTVTFPYVRVVKARQVWFQVKL

SEQ ID NO: 64324 - protein, 48 aa, Zea mays
  Coding DNA Sequence Number=SeqID_22545
MAVSRRCRRRGLHGHQSRAAVWWGCEIRSRKTLRADGFSTVDGRSCVQ

SEQ ID NO: 64325 - protein, 80 aa, Zea mays
  Coding DNA Sequence Number=SeqID_22546
MTRKTCCCRGVARYQSASWRGLSAMTMTYDREVDAEQSKHEDDVQRPERELYRRHGRLTSFGEVGNALEAESWQTLRHGR

SEQ ID NO: 64326 - protein, 130 aa, Zea mays
  Coding DNA Sequence Number=SeqID_22547
MPFATVSFALISVARNTPQFVLCPSDIPYTRSPALLHAAMVPSPGPYCHLEVPDVPLSIDNEQSVVSVGVTGDFPEQQLGEGMCPLTHYVLLTLQFIVSHTMINIRIDKFSVYPVLDYPFGIWLLWLLSW

SEQ ID NO: 64327 - protein, 98 aa, Zea mays
  Coding DNA Sequence Number=SeqID_22548
MGREEKTVSPHPVIVSVAGGETISLSHGEHALVKYLLTVNSLKLVFVAIVGFSTVVRAPQYIPVNVVLLLEDTAADRLHVDHDSLPSLVFPTVVLESQ

SEQ ID NO: 64328 - protein, 74 aa, Zea mays
  Coding DNA Sequence Number=SeqID_22549
  Subcellular localization annotation: CTP_CleavageSite=57; ConfidenceScore=5.28e-01
MAFTGAVSQAMDSLPTTVYYDVVKRLLSFPASVPRSSLSRRMQIKYELMEGEDIVVSVDEFNERTFLFVGECCP

SEQ ID NO: 64329 - protein, 50 aa, Zea mays
  Coding DNA Sequence Number=SeqID_22550
MAMMGSASEKMYLCQVMKQPSFVVSAPRWCQRRRQISEHVGGRMFYLPDM

SEQ ID NO: 64330 - protein, 93 aa, Zea mays
  Coding DNA Sequence Number=SeqID_22551
MALLSTMEASSASSLHWGFLTALVGWSDYSASRTDFLLASYSGDTAADAEGTASRTTAEADAGSAADILEDLLEHDIVGGEIRLPPGLSCSPQ

SEQ ID NO: 64331 - protein, 343 aa, Zea mays
  Coding DNA Sequence Number=SeqID_22552
  Gene Ontology: Mol. function=protein binding; Cellular component =cellulose and pectin-containing cell wall; Biological process =protein amino acid phosphorylation
  Homolog annotation: Hit_ID=Q5Z8W0; Match level="QueryCoverage=50%, HitCoverage=31%, E-value=1e-71, Identity=79%"; Hit description =Putative extensin
  Pfam annotation: Domain name=LRR_1; Domain location=159-181; Score =8.3; E_value=8; Accession=PF00560.23; Description=Leucine Rich Repeat
  Pfam annotation: Domain name=LRR_1; Domain location=183-205; Score =9.3; E_value=5.2; Accession=PF00560.23; Description=Leucine Rich Repeat
  Pfam annotation: Domain name=LRR_1; Domain location=207-226; Score =11.2; E_value=2.3; Accession=PF00560.23; Description=Leucine Rich Repeat
  Pfam annotation: Domain name=LRR_1; Domain location=230-252; Score =2.4; E_value=1e+02; Accession=PF00560.23; Description=Leucine Rich Repeat
  Pfam annotation: Domain name=LRR_1; Domain location=253-275; Score =3.7; E_value=59; Accession=PF00560.23; Description=Leucine Rich Repeat
  Pfam annotation: Domain name=LRR_1; Domain location=302-322; Score =6.0; E_value=21; Accession=PF00560.23; Description=Leucine Rich Repeat
  Pfam module annotation: Pfam domain module=LRR_1::LRR_1::LRR_1::LRR _1::LRR_1::LRR_1; Domain location=159-181::183-205::207-226::230 -252::253-275::302-322
MVVTPAHGQPERKCPKFEPGTRNREMGIMANTIEGWLTGGEYYNEAGHGARHPRKNHTSGDKSPALQLILCLKLPPHDFPMHSASTTTIAELGWVGDKAVKVAAIYTLARDRGMRSSGSANAAEGSLQRGGTASSAFVTEGRSTCQGPIPADLPLGVPDLALLHLNSNRFCGVLPDTLLHLRLLHELDLSNNRFVGAFPAVVLALPSLRYLDLRFNDFEGPISPPLFDRPLDAILLNSNRLRGPIPANLGNSPASVLVLAHNRLGGCIPPSIGRMAATLNEIALIDDDLTGCVPPQVGLLRKVTVFDVSGNHLQGPLPLWGWIQGYLLSSSLLRHEDVLSVSE

SEQ ID NO: 64332 - protein, 60 aa, Zea mays
  Coding DNA Sequence Number=SeqID_22553
MEKRPQELASFGKLQRLVRYNSPDCPDFVEGVSAQLRSCGATVPNQALSLMQWNPLQLQK

SEQ ID NO: 64333 - protein, 125 aa, Zea mays
  Coding DNA Sequence Number=SeqID_22554
MATIAEIRAGAARPVGNPVVHRCCCAAMERGGHDMGTKERGEGKPRLDALWPGACYLCAREQRHNGRSEIPAAKNAWIPFMERAEKGKDDPAKPVPHDWRAHGGCVRLNGGAHVSALFAGTGLRR

SEQ ID NO: 64334 - protein, 221 aa, Zea mays
  Coding DNA Sequence Number=SeqID_22555
MTAIEAKSSQGPPYTDHSPTALAPFGYQDDLQVTRNLTAKRSNTYKHAANHEIYGLDPNPPKRPPFSNAKAATHPADTRESPGGSSRATAPAGLATMATIAEIRAGAARPGGNPVVHRCCCAAMERGGHDMGTKERGEGKPRLDALWPGACYLCAREQRHNGRSEIPAAKNARIPFMERAEKGKDDPAKPVPHDWRAHGGCVRLNGGAHVSALFAGTGLRR

SEQ ID NO: 64335 - protein, 95 aa, Zea mays
  Coding DNA Sequence Number=SeqID_22556
MGAGLPGTGLHASVGAWLDAAEGVALDGLVGRRLGLVKARGSGCASGWGGLGGAWGTGARGPGGDALGWGCLGGAWMVAAGEERRGARKPSWIPC

SEQ ID NO: 64336 - protein, 95 aa, Zea mays
  Coding DNA Sequence Number=SeqID_22557
MAAQWWRWDGSVQTVEGTHPVIVYRDESVPNFTENEEETVIEEEVVPQPENPPAENNFYLDIYGVDPEPPATQGKPIAFSPFLVVLNSLSLEMMH

SEQ ID NO: 64337 - protein, 251 aa, Zea mays
  Coding DNA Sequence Number=SeqID_22558
  Gene Ontology: Mol. function=hydrolase activity; Cellular component =cellulose and pectin-containing cell wall
  Homolog annotation: Hit_ID=Q9FWB6; Match level="QueryCoverage=96%, HitCoverage=68%, E-value=1e-112, Identity=75%"; Hit description =Putative alpha/beta hydrolase
  Pfam annotation: Domain name=Abhydrolase_1; Domain location=2-245; Score=26.1; E_value=7.4e-05; Accession=PF00561.10; Description =alphabeta hydrolase fold
MVGFDRAGYGESDPNPCRSVRSAALDMEELADALGLGDRFYAVGVSLGCHAMWSALRYIPHRLAGAAMLAPVVNYWWPGLPAGPAAEAYARQARGDQWALRVAHHAPGLLHWWMAQRWLPTSTVVDNTTHLPNGRDAEVRRALAADGTLRRKREAATQQGVHESYHRDMAVMFGRWEFDPMDLPEPPCPVHLWQGDEDGLVPVVLQRHVAGTLAWVNYHELPGTGHFLSAVPGLGDTVLRTLFGSSAALVA

SEQ ID NO: 64338 - protein, 88 aa, Zea mays
  Coding DNA Sequence Number=SeqID_22559
MEFNIPAFPSPLARDCGDKPSDLAAAPPPPYPTLPRPPATPTTRLQIPPPSAPTISDIHYARHTYHQGQQPEPTEEHQSLLNLHLLAK

SEQ ID NO: 64339 - protein, 269 aa, Zea mays
  Coding DNA Sequence Number=SeqID_22560
  Gene Ontology: Mol. function=metal ion binding
MVVALRLGHLCCAVVLALSISWCRGQGGGGGGAAGAGGAGAAGGAAGGAVVPGTQDAIQIVSQAALCFDNRQVINGCLQAMGNNVNSNGNGGSSNGSGGGGSSNSNSGSTASMCQGPCFGQMMLMMNCVNGILGNIQGYSPGLMQGVQAVFQMSCGNVGNSQQGGGASGGAAAGGAAAGGAGGTSGSSSSGGAAAAGGGANGGGASGAGGVTGSAGNAVGASGGNNMANGVTTAGGTTSPNGGMAIFSMQNFLGLPAPPPPIIRIEGKL

SEQ ID NO: 64340 - protein, 214 aa, Zea mays
  Coding DNA Sequence Number=SeqID_22561
  Homolog annotation: Hit_ID=Q10ML7; Match level="QueryCoverage=40%, HitCoverage=47%, E-value=6e-11, Identity=43%"; Hit description =Expressed protein
MELFERACHCFDNPNIYSQCAEEFRLNAEGAFHVQRNEVDEYCGGPCLEETNLALECVEEVAAESFRFSNGASVLAVRQALGTGCSYGPDRGKHALSPCAHIRPPAPRSLTLRYDRARAGTFEIRERKDCVGGADEYYYRKPRDHEQEKPAVGGRYYGEGSQQPYEQQGAGGYGEGEEYCSGAAGRLGGERRGYYLQTIILLLLASAPPLILTL

SEQ ID NO: 64341 - protein, 74 aa, Zea mays
  Coding DNA Sequence Number=SeqID_22562
  Subcellular localization annotation: CTP_CleavageSite=43; ConfidenceScore=5.11e-01
MENTSSSPSKDLSKRRTRSKLPRLLSRISPQPQQLKASPGTIQEMVDGVTWPTTLPPGWTVEWDVASTGEEHED

SEQ ID NO: 64342 - protein, 107 aa, Zea mays
  Coding DNA Sequence Number=SeqID_22563
  Subcellular localization annotation: CTP_CleavageSite=40; ConfidenceScore=5.25e-01
MRMVMIMLMVMVVSIATTAQEKMKLWKETSRSSKTTTSSRCGLAATPSRLPVKAAVIYVSFSHFDLLEKKRERGKEVAHTTEDNPKKNTTTKVMKKAKIKKRLVVDL

SEQ ID NO: 64343 - protein, 119 aa, Zea mays
  Coding DNA Sequence Number=SeqID_22564
  Subcellular localization annotation: CTP_CleavageSite=24; ConfidenceScore=5.33e-01
MDSSLPAGFFPHGRAPPRSRSLPVASSLPPGGEFVPPGLPVGRPHEATRACSLPQWAWRLLPVGLGHAVDLELEIGRKRGCCRASEEAGCRATEDVPREGERESWSLWRNCPNYSNLSA

SEQ ID NO: 64344 - protein, 115 aa, Zea mays
  Coding DNA Sequence Number=SeqID_22565
MVVALGRLWRVAGRSPELRAGSGELGAVQRRQWGRQPSTGTGFIAVARGFAHRRALSVPPGVSPRRTRGSLLLPWFNGRFEHPSVNMWDLCSKVMKYTTTFIFGLSHDHKVFMTF

SEQ ID NO: 64345 - protein, 346 aa, Zea mays
  Coding DNA Sequence Number=SeqID_22566
  Gene Ontology: Mol. function=ribonuclease H activity; Cellular component=mitochondrion; Biological process=DNA integration
  Homolog annotation: Hit_ID=UPI00004C1731; Match level="QueryCoverage =99%, HitCoverage=26%, E-value=8e-89, Identity=86%"; Hit description =UPI00004C1731 related cluster
  Pfam annotation: Domain name=RnaseH; Domain location=1-123; Score= -20.5; E_value=0.0047; Accession=PF00075.14; Description=RNase H
  Pfam annotation: Domain name=rve; Domain location=136-318; Score =77.2; E_value=5.1e-20; Accession=PF00665.16; Description=Integrase core domain
  Pfam module annotation: Pfam domain module=RnaseH::rve; Domain location=1-123::136-318
MYFDGSLMKTGAGAGLLFFSPLGKHLRYVLRLHFPASNNMAEYEALVNRLHIAIELGVRRLDAHGDSQLVIDQVMKNSPCRDPKMEAYCDEVRRLENKFYGLELNHIARRYNKTVDELAKIASGRTTFPPDVFSRDLHQPSVKTDYTPEPEEASAQPEAPSAPEGEALRVEEERNGKAPGGFTHRLVAIDKFSKWIKVRPLNSIRFEQAVAFFTNIIHRFKVPNSIITDNGTQFTGRKFLDFCEDHHIHVDWAAVAHPMTNGQVERANVMLLQGLKPRIYNDLNKFGKRWMKELPSVVWSLRTTPSRATGFSPFFLVYGVEAVLPTDLEYGSPRTRAYDDQSNQTS

SEQ ID NO: 64346 - protein, 434 aa, Zea mays
  Coding DNA Sequence Number=SeqID_22567
  Homolog annotation: Hit_ID=Q00XN5; Match level="QueryCoverage=85%, HitCoverage=47%, E-value=7e-13, Identity=31%"; Hit description =Homology to unknown gene
  Pfam annotation: Domain name=DUF1350; Domain location=22-433; Score= -19.4; E_value=1.5e-10; Accession=PF07082.2; Description=Protein of unknown function (DUF1350)
MAPPMRKPYMREHSCLIFPPPRGRRPLAVIKFLGGAFIGAVPEVTYGYLLELLALEGFVVVCVPYNVTFDHEAAAREVFQSFHACYDALLASGLPEAGLSALDIAELPLYSVGHSNGALLQLLVGSYFSERIPEANAIVSFNNRPASEAVPYFEQCVFSILGLSGLQLLTPGIADEVFQDWWKAAEARVCKEKKKGFNSLVALSSWRIWKHRNACVFDGVPPSVSKVIQDIKEEARIWCLAGAAGMIGPLFRQLMPMMEASPVYSMARNASGYAWKALFDLAGGLLREYDQEATVSLSKFIDQLPSVMNQVSEGVSEFKPTPPENREFCKNSYSVPNTLLVKFTVDAIDDTDIVEDVLRPRVDSIGGQIKKVILSGTHLTPCIQALSFVVLQDVKWQVGSEYTPADAIAQGLKSLALSETRVLSRTIADWFTSL

SEQ ID NO: 64347 - protein, 43 aa, Zea mays
  Coding DNA Sequence Number=SeqID_22568
MSRRWSGPEAGRSMVRTVPSANSAAPAHARTVRPVRQGTLALL

SEQ ID NO: 64348 - protein, 68 aa, Zea mays
  Coding DNA Sequence Number=SeqID_22569
MVQWGKPAPPPLAHPWDDLPTAMGGASASRDFAAHIWRELFDLVITKSESSIGDPMARVTRGVEGRRI

SEQ ID NO: 64349 - protein, 322 aa, Zea mays
  Coding DNA Sequence Number=SeqID_22570
  Homolog annotation: Hit_ID=O81060; Match level="QueryCoverage=45%, HitCoverage=8%, E-value=2e-43, Identity=56%"; Hit description =Similar to late embryogenesis abundant proteins
  Subcellular localization annotation: CTP_CleavageSite=17; ConfidenceScore=5.22e-01
MPHSHSNELRELYARKAASLRSSPSTSRFLFFPVPRSPPRFPPPHHHFPRRHSRSRPQGLHRGISLQPPLMHLSFHPPAPSHLPRRGGVAPTTTPSFVLRRNQRRRRHHHRPYRLAPRASLSDLIANLPSSLALVGPAALAAAAAVATSFSSWSSSSQTSLPPPPQESEDYNACGDVAGEWVLFTSPAPFNRCVLLRCPSVSFEDGLDGVNERLLTEERHYVNLSRGCIPVVRGGDGAYDISYQRICIALEDGGVIALDWPDNLYLDKEHGLDSTVLMVPGTHEGSMERNIKVFVLDALNNGYFPIVMNPRGCGGSPVTTPR

SEQ ID NO: 64350 - protein, 107 aa, Zea mays
  Coding DNA Sequence Number=SeqID_22571
MEHEERLVALAGLLYGRRIKDDGDKQPDVLDTVRLSVKGGNDSDVEPGNVGEHRVAREWTSDGRVTRKRRGGVAPMPPGGGGASCADTREREGAPMREGEGLVAVAA

SEQ ID NO: 64351 - protein, 93 aa, Zea mays
  Coding DNA Sequence Number=SeqID_22572
MTTAVTCLCEAALYVVSTKTEEEAIRIFTEGIKPVRTAVRKSTSTDSSSDDDVELGCCSSSTKRCCGAAGAHARRRRRSTDDDDRDDVATAPF

SEQ ID NO: 64352 - protein, 186 aa, Zea mays
  Coding DNA Sequence Number=SeqID_22573
MSWPGLCRSRWSTQCGDPTAIVHAKASAWAELNEAERATHRSQNAEKDMPRSSCRSEELRVSGLSAGKDLGAQPRAWHGQAGKKRIGWGNSGSGPRRLLACAPVEGSRGMGVWEKARRGERRAGLYRGGFGVVAEEGDGGARLEEHGMEEGAAAAMGNERIFRHFCESKGYIYLISRVRLLVGSMS

SEQ ID NO: 64353 - protein, 327 aa, Zea mays
  Coding DNA Sequence Number=SeqID_22574
MPSSEKMISNSMVVDLQPGHTVAFETSRIYSGRVLEVQQLGYFGSGVGRAPGAENVPEPEGSLRGFEFEVAEGDQDEEALLYVARLSSGCDFMQDFVACGVWPLAHGWALGEIAPRPMPTLGNKLVRSLAFVVDLRGHDAATFVPEVESEAVKIVGKYAPKTEMLRSWDIRGSNVRLNRVFKLNKLPYGPYPEGDSTDAGDYRGKQVNPRAGEGPSKGKAPVATIRKRKLGMGADESGTRATGHFVEELMETCMVPGELMSSPELRETSSRMLKVIGGRWSRNDPIPRATSEDFFTSQLASELRIFPYGRNIGDVVSAMMEKDRQDA

SEQ ID NO: 64354 - protein, 174 aa, Zea mays
  Coding DNA Sequence Number=SeqID_22575
  Gene Ontology: Mol. function=cysteine-type peptidase activity; Biological process=proteolysis
METVCLILGLPSAGGSKPFMDWYGEVDVADRLMKDLKISKDEFDIATIQKIIDKGGDDELTIMCFFLILFNWVMFHTLSWSISNNEVLMLEDMDQLPDIDWCQLVFNDLCEAAAKYHKRNTNHVTATAYGCSIVILFRSRTNTCCVAAPECPVNDMFHIHVLRMKDLISSKVLC

SEQ ID NO: 64355 - protein, 70 aa, Zea mays
  Coding DNA Sequence Number=SeqID_22576
MKCDVVKGDKGTLEDPWSRFCVAARGGGELASAAAAVGVAASAVQQMRFVTTFAEQVASGALTSQFVSES

SEQ ID NO: 64356 - protein, 166 aa, Zea mays
  Coding DNA Sequence Number=SeqID_22577
MANISSNLWLEFDSSILDHVTLKGYISEQDGRADGDHRNLDPEVSSPPLLSLSLYLLFFLPHACPPFTLLARAPAPSQPAAARRPRPPQPVEAPRPRPPRPTAAPPAPTPPPARAAAPQPRPLPARRGLRPPAWPPAARPPAAWPPARVVLALSMVRVASRFPVYR

SEQ ID NO: 64357 - protein, 43 aa, Zea mays
  Coding DNA Sequence Number=SeqID_22578
MGAPYMHCLFHLSCGIIRACRDLIRVVHIIYQLRDLDSENFVA

SEQ ID NO: 64358 - protein, 421 aa, Zea mays
  Coding DNA Sequence Number=SeqID_22579
  Gene Ontology: Mol. function=aminoacyl-tRNA ligase activity
  Homolog annotation: Hit_ID=Q10BW3; Match level="QueryCoverage=74%, HitCoverage=69%, E-value=1e-121, Identity=71%"; Hit description =Aminoacyl-tRNA synthetase family, putative, expressed
  Subcellular localization annotation: CTP_CleavageSite=5; ConfidenceScore=5.00e-01
MASTSASSAPVSPSHPNPNPTPDADLPSDRPMPDADGGSGGASPASPEKREEEEEVPGEVAAAAAAVEQPTPRKTRLPRACNNKPKPPPPPPPPERPRRRAAAAGGADETPQCRVVTPLVSEPEAPAELPRWRLRCMWELGSVLNFLHVFRPLLNITGDFTAEELEVALITPNEILDDVHMPLLKSIPPVTRMAMGRGTWVTVLCRKLKDWWHWVAEGDLPIVASHGTEIETYKTIEPAIRLLILKAICDIRVEQEDIRNFIDSSLKHGQNFSTFRKDRIGGDSLGISYWYEDDEILGHRLYREIRRVEQVKKEPGKRSRGKGGSSAISVVSYQWETVASTFDEFDDVAEKLFSSRNRTEVSLGKKLKIEYLPEIEKIHKKKERLLKKQQREALLLDSYLTSDGLTTGRSLRDRKPVTYTF

SEQ ID NO: 64359 - protein, 197 aa, Zea mays
  Coding DNA Sequence Number=SeqID_22580
  Gene Ontology: Mol. function=transcription regulator activity; Cellular component=nucleus; Biological process=regulation of transcription
  Homolog annotation: Hit_ID=Q69WS3; Match level="QueryCoverage=88%, HitCoverage=70%, E-value=2e-63, Identity=68%"; Hit description =Putative bHLH protein
  Pfam annotation: Domain name=HLH; Domain location=76-126; Score=39.6; E_value=1.1e-08; Accession=PF00010.16; Description=Helix-loop-helix DNA-binding domain
MAKLVVAASLFSHHLSKATADPEAKRLKQIAPSEKNDRRTEAETNSGNASKSADKKPAPKEPPKDYIHVRARRGQATDSHSLAERARREKISERMKVLQDIVPGCNKVIGKASVLDEIINYIQSLQRQVEFLSMKLEAINAHVSNATVAFPTKDFGVAPYNTAPSLTLDPQTPREYAQGSMSDWLHMQVGNAYERVT

SEQ ID NO: 64360 - protein, 259 aa, Zea mays
  Coding DNA Sequence Number=SeqID_22581
  Gene Ontology: Mol. function=protein dimerization activity; Cellular component=nucleus; Biological process=regulation of transcription, DNA-dependent
  Homolog annotation: Hit_ID=Q53M47; Match level="QueryCoverage=99%, HitCoverage=28%, E-value=1e-80, Identity=55%"; Hit description=HAT family dimerisation domain, putative
MGPCQPFGHTFPQTPGNFQTRGFVESWFKQFDWLEYSVQKDAVYCFYCFLFKPPRTNNFGKDTFTKVGFKNWKKAKDVFKEHVQAIDGSHSYARKRALNFANQRQSVAHALAFRGHDESKTSSNKGNFLEMLEWYRKRDPKVAMVTSENAPSNNKMSCPNVQKDLVRACAEVTSEVIKAEIGGRLFAVLIDEARDASIKEQMAMVVRYVNDKGHVIERFLGVPHVPDTTSSSLKSYRARILWSLKYERAVSWIAKIGIG

SEQ ID NO: 64361 - protein, 95 aa, Zea mays
  Coding DNA Sequence Number=SeqID_22582
CGPLQSPTLLNRYPGLEEEGTGSEGSNEFPPNGSLEEEVEKGDPEAVANVTKQTTGGSMCAKSGEDKQASSLDALAAEGSNELEQGEPPNGFNGL

SEQ ID NO: 64362 - protein, 537 aa, Zea mays
  Coding DNA Sequence Number=SeqID_22583
  Homolog annotation: Hit_ID=Q10M35; Match level="QueryCoverage=13%, HitCoverage=16%, E-value=1e-14, Identity=54%"; Hit description =Secondary cell wall-related glycosyltransferase family 47, putative, expressed
ARLAAQEAQWCSWESTVVHHSVSIHDLEVAVAIMPSAALIAERDAQVAATHECLAVIADDWGGLFGTGDDCIIADNWGGLFEYATHFQEEQDIDNYIPINDGTSFTEEDDGNHLPTLEPLLTVTTTAAEVDSVANTDDVEADSLTSTSTVGVATSEAAEMQFHVGWARWLEGQADYLRHDRMLRSNLDSLTRSNHPLLQDASATNNSPTQYSIECFSHGIVLLRTISAAPTSEDRALQRRRLECLVVWPEWRRIGGRNYIMLKHHLNRMFDARDRFWHCVFALCDFGSVQGLKRKLERLCLAGSAPDLEALAVLPGLRVRSLSDQRAANHTPTSMRSISTMATPFGLCSARRCYNTSGTSTGMTSSTRSQSWISFEFEHSSIPTPNQKVFNLSSDVLNKRDVWADKVFAAQEVFEELSLSSSATWVNIGKLLASLCWKIPWPPPHIQVGLGCGSETLPSIPWLSPTIDSTNEERIFIISEDDKVDDVVDWTMDEQIAVAAFVPACIEASLNDGMNAGKTREAFADHQYFEYDSRLKR

SEQ ID NO: 64363 - protein, 94 aa, Zea mays
  Coding DNA Sequence Number=SeqID_22584
MQLAHRRVSLWRMENQQKQIRWDITMVAHHSQKSQTPLLEGNTNTQSYIVAEENGSKSLGPNVDAKERKRQRENERYVMMFVEQKMRKVGNIVK

SEQ ID NO: 64364 - protein, 175 aa, Zea mays
  Coding DNA Sequence Number=SeqID_22585
MASSTGPPFPSSIEGAIPSLHGEENGRQSHPSAPNPTHPPYSAPSLPYVAPSVGISPNLLEGVRAKSEPKIRAKSTLDEVVGRSPNLPPFYTPTMNGNPYHRETPYPSSIDGALLLTTEKSLPHADNFILLAFVSSILRFMISDVELILQIDKRFLSYGNSARGQNHSSVSTVLS

SEQ ID NO: 64365 - protein, 575 aa, Zea mays
  Coding DNA Sequence Number=SeqID_22586
  Gene Ontology: Mol. function=oxidoreductase activity; Cellular component=intracellular; Biological process=lignin catabolic process
  Homolog annotation: Hit_ID=Q2PAJ1; Match level="QueryCoverage=99%, HitCoverage=98%, E-value=0.0, Identity=86%"; Hit description =Putative laccase
  Pfam annotation: Domain name=Cu-oxidase; Domain location=162-319; Score=174.9; E_value=2.1e-49; Accession=PF00394.12; Description =Multicopper oxidase
  Pfam annotation: Domain name=Cu-oxidase_2; Domain location=423-559; Score=181.5; E_value=2e-51; Accession=PF07731.4; Description =Multicopper oxidase
  Pfam annotation: Domain name=Cu-oxidase_3; Domain location=36-152; Score=218.5; E_value=1.5e-62; Accession=PF07732.5; Description =Multicopper oxidase
  Pfam module annotation: Pfam domain module=Cu-oxidase::Cu-oxidase _2::Cu-oxidase_3; Domain location=162-319::423-559::36-152
MPAGQLSWPLLLGAVLAFGVAASPAQASRNTHYDFVIKETNVTRLCHEKTILAVNGQFPGPTIYARKDDVVIVNVYNQGSKNITLHWHGVDQPRNPWSDGPEYITQCPIQPGANFTYKIIFTEEEGTLWWHAHSDFDRATVHGAIVIHPKRGTVYPYPKPHREVPIILGEWWNADVEQILLESQRTGGDVDVSDANTINGQPGDFAPCSKADTFKMSVEHGKTYLLRVINAGLTNEMFFAVAGHRLTVVGTDGRYLKPFTVDYIMISPGQTMNMLLEANRATNGSANSRYYMAARPFFTNAGLPFDDKNTTAILEYTDAPPAAGPPDFPELPAINDTAAATAYTAQLRSLVTEEHTIDVPMEVDEHMLVTISVNTLPCGANQTCAGPGGNRLAASLNNVSFVSPTTDILDAYYHSTSGVYDPDFPNKPPFLFNFTAPNPPQEFWLTKRGTKVKVLEYGTVVEVVFQDTAILGAESHPMHLHGFSFYVVGRGFGNFDKDKDPATYNLVDPPYQNTVSVPTGGWAAMRFRAANPGVWFMHCHFDRHTVWGMDTVFIVKNGKTPNAQMMPRPPNMPKC

SEQ ID NO: 64366 - protein, 108 aa, Zea mays
  Coding DNA Sequence Number=SeqID_22587
MGKSKKGGSSLHRYGDKRKHDSQGITSEVWTYIRSVERAGLADSDESEYSSDEENSSNSSEEGGGDGDGGDGGKGDSDGSDKGGSGDGGDGSKGGSRGSSKGSNKASG

SEQ ID NO: 64367 - protein, 270 aa, Zea mays
  Coding DNA Sequence Number=SeqID_22588
MPAAAAARGCDQREDVKQRRDGTNLGHGEDMEAARGEEDDLDGFWVSYGRRCPRRRLPPLIPSLVARGALRRTCTDDGRLVIRIVPIVHEDDSSVPPPPPLRELPAAARDASARRTNVARPDDDRTNLGHGEDVEAVVKQEEKDEEDDNMKAKQTQEEDDLLDGFWVSYGRRCPRRWLPPLISSLVARGTLRRTRTDDGRLVIRILTGTMRERDPSYVAVQPEIQTSIGMKAFGRPLDDQRGRFYRPPYLGAKIYGAELRGRVGATRQCQ

SEQ ID NO: 64368 - protein, 545 aa, Zea mays
  Coding DNA Sequence Number=SeqID_22589
  Gene Ontology: Mol. function=methyltransferase activity; Cellular component=cytoplasm; Biological process=metabolic process
  Homolog annotation: Hit_ID=Q6Z8K5; Match level="QueryCoverage=64%, HitCoverage=96%, E-value=1e-160, Identity=79%"; Hit description =Methyltransferase-like
  Pfam annotation: Domain name=Methyltransf_11; Domain location=286 -376; Score=88.4; E_value=2.2e-23; Accession=PF08241.2; Description =Methyltransferase domain
  Pfam annotation: Domain name=Methyltransf_12; Domain location=286 -374; Score=36.6; E_value=8.8e-08; Accession=PF08242.2; Description =Methyltransferase domain
  Pfam module annotation: Pfam domain module=Methyltransf _11::Methyltransf_12; Domain location=286-376::286-374
MAGGKEPIEVRFRLFDGTDIGPTKYDPSTTVSSLKEFILARWPQAKAHCPTAAAVSSSSSSSQRRAFHLPLPPRLALGTQATAAALRFGLSATAGQPQTRCRRQRLFLPPLANRLAPSPPVLVPPAYRPATLHARLPLPFRLRWTVDSARPRRLHCAPRAAGGQWEPAAAAPARRPCRFGSACPKRSVTCPLTFQRELSASFWNPGNHLSTNNPMRPNDSLEAQDMVPAEGNHSCFSSVQSTPEIEKKYVHRVYDAIAPHFSATRFAKWPKVAGFLNSLRPGSVVLDAGCGNGKYLGFNPDCLFIGCDISPPLIEICAGRGHEVLVADAVNLPYRNDFGDAAISIAVLHHLSTDDRRRRAIEELIRVVRRGGLVLITVWAREQEDKSLLNKWTPLCEKYTEEWVEQSSPPVRSKSGTLLESIAETDEDAGFTKQTDDRLKSCHGEVEDKTIDCSNSKTDENEKNQQEYFVPWHLPFHRAEIGGASAALENGFAKKDEKKGTVVYNRYYHVFVEGELQRLVSGIKNAAIVDQFYDKSNWCIVLEKL

SEQ ID NO: 64369 - protein, 153 aa, Zea mays
  Coding DNA Sequence Number=SeqID_22590
  Homolog annotation: Hit_ID=Q6Z8K6; Match level="QueryCoverage=53%, HitCoverage=38%, E-value=9e-26, Identity=70%"; Hit description =Pentatricopeptide (PPR) repeat-containing protein-like
MARSSVTVRVRESETERDEEDTSTEAPSGDGEAESGDRRWRRWTRGETAVAVAAERRGAVERLSGGSTYKLLYKAHTKANDKALVQKLLKGMNKTGIVPNKKFFLDALEAFGSSERKPRTSPGINSASKQSTDSAGDSETATSKKPEICGPIY

SEQ ID NO: 64370 - protein, 106 aa, Zea mays
  Coding DNA Sequence Number=SeqID_22591
MTAFNGHDNEDKQQEVPVLLRNKASAITIKDVIIYAGDPDQTAQAQRVEPVPELFNLDRPSRFEQLAQDRTVAGWSSSSGSGYGSARAAPDDELAGATTVAEQSSQ

SEQ ID NO: 64371 - protein, 369 aa, Zea mays
  Coding DNA Sequence Number=SeqID_22592
  Gene Ontology: Biological process=response to jasmonic acid stimulus
  Homolog annotation: Hit_ID=Q2QWM9; Match level="QueryCoverage=63%, HitCoverage=68%, E-value=1e-47, Identity=39%"; Hit description=VTC2, putative, expressed
MTRRSDARLRRVVMEPASPPTAASRADEGGGESFAVSTAVFAPKSNRNLRGQRKVGNLVREPALSETPILGRHCRLFFVLGKALSDSCIFILAMLSAATKLTMDGTSFDLTEHEGSNLSPFLLKLFNEVLPGVHNFGATLIEGRDQKKRPTEFTMNQVLQPFVSEKFNFTKVSPLEVIFKFNDTEKDSAQYFDGVPDTVSASSSAILINAYYLKVQYPVEKAITEKLKTLGNSVSIFHLVDYPVNGFVFEGGASLEDLSDVVSKVCIFLQENNRPFNVLISESGKRIFLLPQCYAEKQLLGKASQEFLDMRINPAIWELSGHLVLKRRKDYEEASEANICRFLVEAALSETEFQELNLCVLDFLTSSLG

SEQ ID NO: 64372 - protein, 188 aa, Zea mays
  Coding DNA Sequence Number=SeqID_22593
  Gene Ontology: Mol. function=kinase activity; Cellular component =ornithine carbamoyltransferase complex; Biological process=amino acid metabolic process
  Homolog annotation: Hit_ID=Q6QP54; Match level="QueryCoverage=55%, HitCoverage=37%, E-value=8e-21, Identity=56%"; Hit description =Putative kinase
MAPPVDMSGLRPRLGDVEAPPKPRSNLSSVAEVESEPLVRARRRPSAEARAESEPWGRAKQSSSSSGAVPESEPWGRAKRSSSSSGAEPESEPWVGRSGVRRLPGLRLSPSPAPSPSPGSGGAEFAVFRGFSPESEPWVGRSGVRRLPGLSPSPSPGSGEAKLPMAGQWSDEVTVVTSALSAGGRASG

SEQ ID NO: 64373 - protein, 766 aa, Zea mays
  Coding DNA Sequence Number=SeqID_22594
  Gene Ontology: Mol. function=ubiquitin-protein ligase activity; Cellular component=ubiquitin ligase complex; Biological process =protein ubiquitination
  Homolog annotation: Hit_ID=Q93XR9; Match level="QueryCoverage=88%, HitCoverage=89%, E-value=3e-64, Identity=28%"; Hit description=Bg55 protein
  Pfam annotation: Domain name=Arm; Domain location=438-482; Score =14.0; E_value=0.22; Accession=PF00514.13; Description=Armadillobeta -catenin-like repeat
  Pfam annotation: Domain name=Arm; Domain location=484-522; Score=0.0; E_value=12; Accession=PF00514.13; Description=Armadillobeta-catenin -like repeat
  Pfam annotation: Domain name=Arm; Domain location=523-569; Score=7.8; E_value=1.3; Accession=PF00514.13; Description=Armadillobeta-catenin -like repeat
  Pfam annotation: Domain name=Arm; Domain location=616-657; Score=6.9; E_value=1.7; Accession=PF00514.13; Description=Armadillobeta-catenin -like repeat
  Pfam annotation: Domain name=U-box; Domain location=262-334; Score =79.1; E_value=1.4e-20; Accession=PF04564.6; Description=U-box domain
  Pfam module annotation: Pfam domain module=Arm::Arm::Arm::Arm::U-box; Domain location=438-482::484-522::523-569::616-657::262-334
MEAMEAEEGPFLANDAKEFVEHFILLYLSFPPFSPLSKHQDPEASLAITSETVLLKFEKSRSQLQESLRRTESIVTEDIGCKIVEIVGELEEIVFTLDRSEKEAGDELIKLLQRNNKTNGSSDSGELEVFHMSALKLGITSSRAALTERRALKKLIEKARSDEDKRKELVVSYLYNLMRKYSKFFRSETGDDTDSQGSSPCSPTVLGMDDMYGPYNNGRAFSRQLSSIQSFNSRFGSFNSRLGSFNCRRGGGPRSENMSIPPEELRCPISLQLMYDPVIISSGQTYERICIEKWFNDGHSTCPKTQQQLAHLSLTPNYCVKALIASWCEQNDFPVPDGPPGTFDVNWRLALSDTEAAGCVSVESFDCANAKSVKVVPMENVRKEEPANSESGTLDDGSCNDFDLNEGYGNLLLLLHERSNMNKQCRLVEQIRYLLKDDEEARIQLGSNGFAEALVEFLRNAVNDGNEKAQEVGAMALFNLAVNNNRNKGLLLSAGVTDLLEQMISNPRLSGPATALYLNISCLPDAKAVIGSSQAVPFLVDRLYSQDGSDTRGSSCKHDALYTLYNLSSHQASVPALLAAGIVDALHCLVTESPGSEEGLGWTEKALAVLISLAATQAGRKEIMSTPGLVSTLAMLLDTGESTEQEQAVSCLLVMCGADDKCIAPVLQEGVVPSLVSISAAGTGRGREKAQKLLKLFREQRQRDTPPPQQQQQQLLQSQLAEGGNGGGGAIVCHRESKPLCKSKSRKLGRTLSSLWKNRGFSLYQC

SEQ ID NO: 64374 - protein, 331 aa, Zea mays
  Coding DNA Sequence Number=SeqID_22595
  Homolog annotation: Hit_ID=Q8RZ80; Match level="QueryCoverage=40%, HitCoverage=21%, E-value=9e-47, Identity=74%"; Hit description =Endopeptidase-like protein
MAPPVDVAGPRPRLGNVEAPPRSRSSLSSVAEVESEPLGRARRRPSAETRAESEPWGRAKRCSSSFGAEPKSEPWVGWSGVRRLPGLSPSPSPGSGGAEFAVFRGLAEPWVGRSGVRRLPGLSPSPSPGSGGADSRSGAGGAVLLSGRSVERRSDCGHFGSVDWRTCVRIKLCADGGYQLRIKSLEEPSRTHRGSGMEPRRRERRVIAIAGAAALVAVGLNIAFSAVVAHRRRKRRELPGFTAQVNLSAAAIKRTTDRIISKSRETYDSVAAVPLDKVSFANVIAPLAELDALQFPLVQACVLPRMVSPSEDVRKASAEAEKLLDSHFVLC

SEQ ID NO: 64375 - protein, 210 aa, Zea mays
  Coding DNA Sequence Number=SeqID_22596
  Gene Ontology: Mol. function=peptidase activity
  Homolog annotation: Hit_ID=Q6Z3T8; Match level="QueryCoverage=68%, HitCoverage=46%, E-value=2e-45, Identity=58%"; Hit description=Auxin- regulated protein-like
  Pfam annotation: Domain name=OTU; Domain location=58-179; Score=93.8; E_value=5.1e-25; Accession=PF02338.9; Description=OTU-like cysteine protease
PPSVLAAPSCFHPRQRQGQEETTVATGALHRRMSDRELRPLRSISTFQTPSVSSSGITGDGRCLFRSVAYGACLRRGKHAPSDSAQKELADELRAKVADEFVKRRGDTECFESYVRQMRKPHAWGGEPELFMCSHVLRMPITVYMYTGSSDGPRIIAEYGQEYGKDDPVRVLYDGYGHYDALQPSLDSCVTASSSRFDDAIFLLQFHTAV

SEQ ID NO: 64376 - protein, 272 aa, Zea mays
  Coding DNA Sequence Number=SeqID_22597
  Gene Ontology: Mol. function=transcription regulator activity; Cellular component=nucleus; Biological process=regulation of transcription
  Homolog annotation: Hit_ID=Q5N8U8; Match level="QueryCoverage=78%, HitCoverage=56%, E-value=3e-56, Identity=60%"; Hit description =Putative helix-loop-helix protein 1A
  Pfam annotation: Domain name=HLH; Domain location=161-209; Score =37.8; E_value=3.7e-08; Accession=PF00010.16; Description=Helix-loop -helix DNA-binding domain
MAASGGAMGSYTQAGSDAALGPGHGHGHAQLSSQWSFSRQDLPQISEMGMIPADIGESIVGAGGCNSSSDAAQSSSYLSRTFSVGSWDDTNSIMFSSAPCKKPKVDPAAGADDMVTNFSTIDPQFGLSNSSLELPGMDDYLQLQQDSVACRVRARRGCATHPRSIAERERRTRISKRLKKLQDLVPNMDKQTNTSDMLDLAVEYIKELKDQVEATRAAADAGEADGGGFLRRNNVTVKPELLLQETRPRAEVRDMWSGFHDSASSFLGCSTD

SEQ ID NO: 64377 - protein, 150 aa, Zea mays
  Coding DNA Sequence Number=SeqID_22598
  Subcellular localization annotation: CTP_CleavageSite=52; ConfidenceScore=5.55e-01
MELAPASAWTASLGSGQRRSLCPAPLLACRVRARALFLPRAESSVVLSSLTSSMAVVPSLSYASSSVWARTRAQPRKTANSAPPDPRARTRAQTRKTTNSAPPDPRARTRAKTRMTVNSAPPDLWARTLALDPEDWLSPLRPDLHGSDSG

SEQ ID NO: 64378 - protein, 59 aa, Zea mays
  Coding DNA Sequence Number=SeqID_22599
MASTATTMGGIVRDITETKKQNLAGGDEGAPSLGRPMSQSPIWGSNHRGPLIEYPTPRV

SEQ ID NO: 64379 - protein, 74 aa, Zea mays
  Coding DNA Sequence Number=SeqID_22600
MASIATTMGGIVCDIMETKKQNLAGGDEGAPSLGRPMSQSPFLLTSAVAEENNKAGRWPACVVGWMGSAGAGTA

SEQ ID NO: 64380 - protein, 59 aa, Zea mays
  Coding DNA Sequence Number=SeqID_22601
MAPNFKVSNVDKYESKQDPGDWYLMTRSSFEPYNKLRRPFPISLFWYADFYITTDERGP

SEQ ID NO: 64381 - protein, 152 aa, Zea mays
  Coding DNA Sequence Number=SeqID_22602
MGLLLCQRRFARQYDLTVGDYYNSMMDNIDKVTGKRMIALGEIEKDKIMVAKAYNKKVKAKSFPEKLSIISTCCEMILGYWDPPVSERTKERAFGHWGPLVAERGGYVNPERIHLLSNPTAMSQGSGVAEPDRRTRRVEREILEWISRPALD

SEQ ID NO: 64382 - protein, 453 aa, Zea mays
  Coding DNA Sequence Number=SeqID_22603
  Gene Ontology: Mol. function=transferase activity, transferring hexosyl groups; Biological process=metabolic process
  Homolog annotation: Hit_ID=Q2R4X7; Match level="QueryCoverage=98%, HitCoverage=95%, E-value=1e-106, Identity=50%"; Hit description =Flavonol 3-O-glucosyltransferase, putative, expressed
  Subcellular localization annotation: CTP_CleavageSite=47; ConfidenceScore=5.66e-01
MHLLMLPWLAFGHIVPFVQLARRLLSSTSSSVRVTFLTAAGNVPRVEAMLSSPSSTGEAAVVVPLRLPHVPGLPEDAASTADLSPEGAELLKAALDAARPQVAALLAELRPDAVLLDFATPWAAEDAAALGAKSLRFSVFSAVAGAYLSVPARRPDAAGQLPSARDLMSAPAGFPGSSPLAAAGVPAYQAADFTYMFTSFGGQPCVHERVVAGIRACDGLVLKTCAEMEGAYIDYLAAQFRKPVLVAGPLVPGPPAGDLDDHWATWLSAFPDGAVVFASFGSETFLPPAAATELLLGLEAHGVAPFLAVLNSPGRRPSRPPGFAERGVGGEGSFMPGWGAASSTSCATGAWGSVVEGLVAGCRLVLLPMKGDQFLNAALFARELRVGVEVARRDDDGWFGRQDVCDAIAAAVADVGERDARKWADFLTDDGVQGRFADEFVRQLRELVGAASS

SEQ ID NO: 64383 - protein, 60 aa, Zea mays
  Coding DNA Sequence Number=SeqID_22604
MERTNAEKIANDMLARLSEDSSDSESFDVESENEGVKDRPWRLSHPGFGAPRPGREHNHQ

SEQ ID NO: 64384 - protein, 205 aa, Zea mays
  Coding DNA Sequence Number=SeqID_22605
AARPGALLRRGDFFFLSTLSLSLVFFTDSAHLPAEQLLCAAVFRRSIFPVILSAAVGLIPCTAQARGRESRRPVDFFQPSRDKNRVRLWSLRPPSILPGSYSSSAPTFPARSPAFLKFVARLLYFSVADAQLLAPAHVPLLSSGREQLPGAWTRLSALPVPITARSPLPQPPLLACRVRARALFLPRAESSVVLSSLTSSMAVVP

SEQ ID NO: 64385 - protein, 346 aa, Zea mays
  Coding DNA Sequence Number=SeqID_22606
  Homolog annotation: Hit_ID=Q2QXS4; Match level="QueryCoverage=83%, HitCoverage=100%, E-value=2e-90, Identity=69%"; Hit description=Stem- specific protein TSJT1, putative, expressed
  Subcellular localization annotation: CTP_CleavageSite=43; ConfidenceScore=5.35e-01
MNHSLLKDGSWGPLAASGPPARGSLRPGARMLAVFSGEVVEVPAELVAAGSRTPSPKTKASELVARFLGTSCPAAVSVRLADLGHLAYSHANQALLRPRSFAAKDEVFCLFEGVLDNLGRLSQQYGLSKGANEVLLVIEAYKALRDRAPYPASLMLAQLAGAYAFVLFDASTNSLLVASGGDVPLFWGVTADGCVAFSDDIDVLKGSCGKSLAPFPQGLLPLVPLSESSKKERRGSSSSSSLTEYPLPAPYTGCFYSNALGGLKCYENPKNKVTAVPANEEEICGATFQASIIIGLMRCLERKDPETRGGRGYGAHSAALGDEVSSSVSRPGLGATVHGAWWCNVT

SEQ ID NO: 64386 - protein, 122 aa, Zea mays
  Coding DNA Sequence Number=SeqID_22607
MGEEFIRVLNACGGCGAPCTVVGVLCGINLGRRGCKNWAGVAAVSDLCLRQHGNLGRVVWVSLGSSARSRGLTRGEWQPKSLVGVYIGLIPGLAVDRSLRVVSVDGPYPFAMSVSLKSPRLI

SEQ ID NO: 64387 - protein, 104 aa, Zea mays
  Coding DNA Sequence Number=SeqID_22608
  Gene Ontology: Mol. function=sugar porter activity; Cellular component=integral to membrane; Biological process=carbohydrate transport
  Homolog annotation: Hit_ID=Q688W0; Match level="QueryCoverage=76%, HitCoverage=16%, E-value=2e-20, Identity=62%"; Hit description =Putative integral membrane protein
  Subcellular localization annotation: CTP_CleavageSite=97; ConfidenceScore=5.01e-01
MGSHKASGGGGGYECSSDHDGGLHKPLLPNSGRWYWTGSRQSSLNAAGTSSMVVPLKFHVSAFLCTLMVALCLIQFAFTSGYSSPTQDNVIRDLSLSVAAVSTS

SEQ ID NO: 64388 - protein, 89 aa, Zea mays
  Coding DNA Sequence Number=SeqID_22609
MVAVAGWVGLEPLIASPKIIFVPAYHLLLVRFDFTQKPPNPDHVQTLSKPFQGYPGHHFLVYSSKPRAKRQGLVRLALNPCGLSGIGWV

SEQ ID NO: 64389 - protein, 87 aa, Zea mays
  Coding DNA Sequence Number=SeqID_22610
MACREHDTTTRTGVGTRHAGATQDAREAAPRAHTSESRASREHAGHTQTETVLRAHAAALGAQLAALGAARWSSQSPWQRGKVAMHS

SEQ ID NO: 64390 - protein, 162 aa, Zea mays
  Coding DNA Sequence Number=SeqID_22611
MEGQGRRGWRVPCAVVARLLLFLGVTVGFAFAIYRACHNHNKRDLVFAIVTYFLVVVFACCFAKLQQLRRDPAATEAQMRRVRIAAWVVSTALGIAATLRVADAVHGLALKLVVWAVSIVLHGFGFYFLFLRKGANAARQPGGEGLVNPMSAPIYCNCNIMD

SEQ ID NO: 64391 - protein, 105 aa, Zea mays
  Coding DNA Sequence Number=SeqID_22612
  Homolog annotation: Hit_ID=Q6QP51; Match level="QueryCoverage=65%, HitCoverage=39%, E-value=5e-09, Identity=64%"; Hit description =Putative growth-regulating factor 1
  Subcellular localization annotation: CTP_CleavageSite=58; ConfidenceScore=5.13e-01
MARHRLSTWSFLYHDVDSENSAACPTLTVVPPARVRLTTTKSILKRNRKLRLARPWASASEGGLCLARPQGSAPALASKGGLRLARPQGSAPASASEGGLRLARL

SEQ ID NO: 64392 - protein, 255 aa, Zea mays
  Coding DNA Sequence Number=SeqID_22613
  Homolog annotation: Hit_ID=Q6QP54; Match level="QueryCoverage=37%, HitCoverage=30%, E-value=1e-12, Identity=53%"; Hit description =Putative kinase
MCDGEHGLHARRRGDLQRGRSSCLLQLRVTWIDDRVRIAFAGSKSETHIPRLPHFQGFVEQEEKEKGGYTCSLPEKDTTKTCASGGDIGSSASPDPRARAQPRRRTTDSASPDPGLGLSLDLGRRTPPRPTQGSDSASTSEDGLRLARPRARTQPRPRKTDSASPDLGLGLSLDLERRTPPRPTPGLGLSLDLGRRTPPRPTPGLGLSLDLGRRSPPRPTLGLELNLDLGGVTASLDPGLGPTTSQGGHHYPTPS

SEQ ID NO: 64393 - protein, 222 aa, Zea mays
  Coding DNA Sequence Number=SeqID_22614
MEPVFTVAHGYQTPVTAPAPQHGSGQMEGQGRRGWRVPCAVVARLLLFLGVTVGFAFAIYRACHNHNKRDLVFAIVTYFLVVVFACCFAKLQQLRRDPAATEAEMRRVRIAAWVVSTALGIAATLRVADAVHGLALKLVVWAVSIVLHGLGFYFLFLRKGANAARQPESALPGRVSPEEKDLTAIAAALRAATVALQWSSDGSSGRWGRSGVRLYLGVDLPI

SEQ ID NO: 64394 - protein, 184 aa, Zea mays
  Coding DNA Sequence Number=SeqID_22615
MEPVFTVAHGYETPVMAPAPQHGSGQMEEQGRRGWRVGRVPCAVVARLLLFLGVTVGFAFAIYRACHNHNKRDLVFAIVTYFLVVVFACCFAKLQQLRRDPAATEAEMRRVRIAAWVVSTALGIAATLRVADAVHGLALKLVVWAVSIVLHGLGFYFLFLRKGANVARQPESALPGRVSPEEKV

SEQ ID NO: 64395 - protein, 535 aa, Zea mays
  Coding DNA Sequence Number=SeqID_22616
  Gene Ontology: Mol. function=molecular_function; Cellular component =nucleus; Biological process=biological_process
  Homolog annotation: Hit_ID=Q9LUC1; Match level="QueryCoverage=32%, HitCoverage=55%, E-value=4e-56, Identity=55%"; Hit description =Arabidopsis thaliana genomic DNA, chromosome 3, P1 clone: MIE1
  Pfam annotation: Domain name=C1_3; Domain location=361-392; Score =12.7; E_value=0.016; Accession=PF07649.3; Description=C1-like domain
  Pfam annotation: Domain name=PHD; Domain location=362-413; Score =55.8; E_value=1.4e-13; Accession=PF00628.19; Description=PHD-finger
  Pfam module annotation: Pfam domain module=C1_3::PHD; Domain location= 361-392::362-413
  Subcellular localization annotation: CTP_CleavageSite=21; ConfidenceScore=5.07e-01
MEIAKNSIASGRVRDLPPSKRFRHVGSHLGSTPSVPLPAKKRMLPSHTPEEAAVALCLPVKKRVIAAPRVEVAGATFCLPAKKRAIVPSPPEDAAPACLPAKKRACAAPADAAVPARVPAQERPCAPLPPPPVVVSWARVSTKKRVHAPAPRGHAAGSVPARRPANALSCAEPLEDTVASASVWAKKRAHSPNRREDAARSTPVCLPVNKRVMPPFVPPPSVQSDGARLVAAKEARPQGSSTHVDGGAVSSRVASGAEERARGKEFKKPEKPINHKGTKEQVSMKPRSPPREGKHLEKPCEIVDVEQYEAVAEALRKSDEAADAKGASLKDVTRNGADEVAGQEQGREQEPVDVEDDDDGVRCAVCASTDGDPSDPIVFCDGCDLMVHASCYGNPLARAIPDGDWFCSPCVAGRGKPAAARRRSCCLCPAGGGAMKRTTEGKWAHISCALLVPEVFFRDPDGRDGIDCSPRPRAPPKCGLGFHVSCGLGAGLCIEYQEGKGGGGAIVAGFCREHTELWEKQQLTGKYKIVARGQE

SEQ ID NO: 64396 - protein, 496 aa, Zea mays
  Coding DNA Sequence Number=SeqID_22617
  Gene Ontology: Mol. function=histidine-tRNA ligase activity; Cellular component=cytoplasm; Biological process=tRNA aminoacylation for protein translation
  Homolog annotation: Hit_ID=Q6Z695; Match level="QueryCoverage=93%, HitCoverage=98%, E-value=0.0, Identity=80%"; Hit description =Putative histidine-tRNA ligase
  Pfam annotation: Domain name=HGTP_anticodon; Domain location=390-478; Score=20.7; E_value=0.00047; Accession=PF03129.10; Description =Anticodon binding domain
  Pfam annotation: Domain name=tRNA-synt_2b; Domain location=85-250; Score=128.4; E_value=1.9e-35; Accession=PF00587.15; Description=tRNA synthetase class II core domain (G, H, P, S and T)
  Pfam annotation: Domain name=tRNA-synt_2d; Domain location=68-256; Score=-173.8; E_value=0.044; Accession=PF01409.10; Description=tRNA synthetases class II core domain (F)
  Pfam module annotation: Pfam domain module=HGTP_anticodon::tRNA-synt _2b::tRNA-synt_2d; Domain location=390-478::85-250::68-256
  Subcellular localization annotation: CTP_CleavageSite=43; ConfidenceScore=5.22e-01
MAAWSSPPSLRHLLMLRPCLPLSPTCLAGSLRRHIHSRCRLFSSAASSSTLTHGDIASTHGDADGVVEVNPPRGTRDFPPEDMRLRTWLFDQFREVSRLMAFEEVDFPVLESEALFIRKAGEEITQQLYNFEDKGGRRVVLRPEITPSLARLVIKQGKSVSLPLKWFTIGQCWRYERMTRGRRREHYQWNMDIFGVPKVRAEAELLHAIVLLFQRLGITSSDVGIRVSSRKVLQAVLNMYSIPDHLFTQVCVIVDKLGKMTREEIEKELVSTGLSSEAVQGIIDVLSIKSLSKLEEVLGSDVEAVADLKKLFSFAEQYGYADWICFDASVAFDREGKLRAICGGGRYDRLLSTFGSEDIPACGFGFGDAVIVELLKEKGLLPDMSRQIDDIVFPLDEELEGPASSIASSLRKKGRSVELVEDKRLKWVFKHAERINASRLILVGNSEWERGMVRVKVLSTREEFEVPSHAAASAVDVRTTVLGEASIECTYHWLLC

SEQ ID NO: 64397 - protein, 50 aa, Zea mays
  Coding DNA Sequence Number=SeqID_22618
MDTSNPEALVDAKNLNMFVGQRMRAVVQVQHNEGIGVKDSKEYKRSGGDL

SEQ ID NO: 64398 - protein, 98 aa, Zea mays
  Coding DNA Sequence Number=SeqID_22619
  Subcellular localization annotation: CTP_CleavageSite=74; ConfidenceScore=5.60e-01
MQAACNRAKWARFSDFQHTQHGGPGPRVMQPARRMLRASNCTATRATTTPPRLRNQYRDSRQPYARPSSASLVRWDRERGIPRKGSFSVKEPGSEPPY

SEQ ID NO: 64399 - protein, 102 aa, Zea mays
  Coding DNA Sequence Number=SeqID_22620
  Homolog annotation: Hit_ID=Q2QV87; Match level="QueryCoverage=97%, HitCoverage=8%, E-value=4e-33, Identity=68%"; Hit description =Expressed protein
MPPSPSPRRSLKEVCHARGHSFVSILPAKSKDDELTLFKDMQKYERDNFLLEATEDFDESISKLRYFRDSKIGVNIAARGENRDLLNTDGERNDYDWHITSF

SEQ ID NO: 64400 - protein, 72 aa, Zea mays
  Coding DNA Sequence Number=SeqID_22621
MTTTCIDMLLRLPHLQMVTIGAVSLAPDSPVALQELAIGLLFPGAPGSPAVWHRTVRCATGQSGALSRMVRK

SEQ ID NO: 64401 - protein, 782 aa, Zea mays
  Coding DNA Sequence Number=SeqID_22622
  Homolog annotation: Hit_ID=Q2QV87; Match level="QueryCoverage=81%, HitCoverage=57%, E-value=1e-96, Identity=37%"; Hit description =Expressed protein
  Subcellular localization annotation: CTP_CleavageSite=67; ConfidenceScore=5.70e-01
MPVIKSRTIASPKKPSKSFSPSSGPKRSFDSAVWLMDRRKAPQDKFRPLLSSVPCTTFGVGKGDNVHSSMLSHNSSLTTSSNLSSDHGVTFSPCMGNEQGPSDIAGDCEATPTYSLSATQSSPKSPSTEKNAESNMEDLNMERSRIVETSGNVASGSKAGLTKMATCTRCEKLFNAIKDDGEIDLCEECGLVDEVLFVNPKIETLEEHQKDHKTRISKPCVALEAPHITPDHGEDTKKSFLDSQLLNDEPPADCLQKCPQSQSTIYTTDRMLLMLHGENVNENLRPDDVGNSSQGSSLDISSHQCNINNYQQSELASVVECDNLRDQTANHQNEVFQRLPGSVYQSIEFASNTLTYDSCCKQGSAGHSNLKVENTEGAGISVLLQKSSSNKWPVIEGRPLAGTNIICSEPYYTRDGVTMLKRTIGWDSSSASSIDQGSTRQSGHLEHLKSSNRHDFEKSQISSTMSCKSIASMSDMSSSNCSVSVCPRDDAIADTGFLTDNSESSAPRSIICTEELNESCKYTLSSAIECWSAAQAIVNVGIGSTEDVVIQKLCTGRMVHKDYTSDNSCSSDTETCSNISLSLAPEERCIQKIEEGTSVGTPEHPDGDCGISNYQMQHETIPEADRLDDGCASVISEEANIMGLPGNALCVDNVEVAECKGVEPLSRCSASGTYGRCSCRGHRRRQAAQVAGAGVACGKARGASGGARMMVSQKEGAIDEDSDTIEEVVEEVADAEDDAVKLSWTRRAPGLARLETCRRRMHVPMLPVSHVLGRRPQPSVSV

SEQ ID NO: 64402 - protein, 78 aa, Zea mays
  Coding DNA Sequence Number=SeqID_22623
MSNPLKDEGDPPLEWDTRRSDRDVRRFGGEVPPFLFKIGSLEPVLNLLEAGLGDLCGGVDVLEAGGVEDLRDGAAGCK

SEQ ID NO: 64403 - protein, 106 aa, Zea mays
  Coding DNA Sequence Number=SeqID_22624
  Subcellular localization annotation: CTP_CleavageSite=42; ConfidenceScore=5.08e-01
MARFLARMHLGATWGRLQGRGAARGRGGRLLARLGRGADAARVSRAGRWVRPVLGRVLGWACRGVGILAGVGSAAWPGRSTVLLALHMEQRAGERRELGGVTRGGG

SEQ ID NO: 64404 - protein, 222 aa, Zea mays
  Coding DNA Sequence Number=SeqID_22625
  Gene Ontology: Mol. function=protein dimerization activity
  Homolog annotation: Hit_ID=Q53M47; Match level="QueryCoverage=84%, HitCoverage=16%, E-value=4e-51, Identity=53%"; Hit description=HAT family dimerisation domain, putative
MGPCKPFGHTFPWTPATSAAEDEAYKARLSIMLGIARFLLLQALAFRGHNESKTSSNKGNFLEMLEWYRKKDPKVAMVTGENAPGNNKMSFPNVQKDLVRACAEKTSEAIKAEIGGRLFAVLIDEARDASIKEQMAVVFFTNIIFLVSLLCRYVNDKGHIIERFLGVQHVPDTTSSSLKVALDDMLARYGLSISRVRGQGYDGASNMRGERDVGDLFSNAMS

SEQ ID NO: 64405 - protein, 395 aa, Zea mays
  Coding DNA Sequence Number=SeqID_22626
VGGVSRGGEPSHGGGRGLSPMYHPLTWNAGITSPCGRGRGHGNKSSDRQLALGASSGSSASEAQPGTVCAPAHVVQATTINFTRGTVVPAAWCDLCRVGCNSKEILEQHKNGKKHKRTVQRMQNFARLQGMTPAIADMGARSSTSSQLAEVEGPCPSNAVHMVPSIGSTSFGGEHKDLATENVVASVSGVQITEVTCSSSKQNTAHHTTAVGHSVQAHVELHVAVQAYQPSNEMKDGGEAAPNATVPSNAQLVEARMDVNGNKTGPKRKRTRVGRGGKKLRVSEARRQRPERVREQPLVCNICNVTCDTRAVFDIHLGGKKHQSRLKRSQGPDMLFGPLVARVPPNQSAAHMTGALEPLYHGLGAPLVEQEPHLAGTMQHAFPVLPQAAPTIHGC

SEQ ID NO: 64406 - protein, 508 aa, Zea mays
  Coding DNA Sequence Number=SeqID_22627
  Gene Ontology: Mol. function=transferase activity, transferring hexosyl groups; Biological process=carbohydrate biosynthetic process
  Homolog annotation: Hit_ID=Q1SPA8; Match level="QueryCoverage=90%, HitCoverage=92%, E-value=1e-171, Identity=60%"; Hit description =Glycosyl transferase, family 8
  Pfam annotation: Domain name=Glyco_transf_8; Domain location=63-309; Score=-19.7; E_value=3.3e-05; Accession=PF01501.10; Description =Glycosyl transferase family 8
MAGLPPVARRRPLATASSLLLLLLLLVVTAAAREERGLARVQGPPPRHRHAYAAMMYMGTPRDYEFYVAVRVMMRSLPRVRADADRVLIASADVPRDWVRAMNFECKMRNETRHLLTIQGDVCRTEEDGMRVLIVENLRNPYESNLGGTNKRFKLTLNKLYAWTLVDYERVVMIDSDNIFLQNTDELFQCGQFCAVFINPCYFHTGLFVLQPSIDVFRSMLHDLETGRENSDGADQGFLVGCYPDLLDKPMFHPPENGTKLNGTYRLPLGYQMDASYYYLKLHWHVPCGPNSVITFPSAPWFKPWYWWSWPVLPLGLSWHKQRWDDLGYAAEMPVILMELLMYIVIIAVTRLARPGITKLCYNRRPEKQSALVQWLIKLAAIAAMVAAYSIPFFVVPRTVHPIMGWSVYLFGALALSVLVINVFLLPPLDVLTTWLAIVGMLIVMAFPWYHDGVVRALAVFGYAFCSAPILWASMVRMMDSLQTMLERDSFFPRIGEPAQETEFSKLY

SEQ ID NO: 64407 - protein, 53 aa, Zea mays
  Coding DNA Sequence Number=SeqID_22628
MAIRPNTRSNLNWNDANRYPVYIEHVRQTCTGINGAKLPGRGRGCPTAEQEFP

SEQ ID NO: 64408 - protein, 258 aa, Zea mays
  Coding DNA Sequence Number=SeqID_22629
  Gene Ontology: Mol. function=protein dimerization activity; Cellular component=nucleus; Biological process=regulation of transcription, DNA-dependent
  Homolog annotation: Hit_ID=Q2QRD1; Match level="QueryCoverage=75%, HitCoverage=20%, E-value=4e-57, Identity=54%"; Hit description=HAT family dimerisation domain containing protein
MAVSDDETVEIDCNEERRLCGLAGDDDEDDLREDAAALFGLSSEHPVHVGDEQQVGGQDQEVWLDFEKFSKTVNGKKVSGGTGHLTRHRDRCPRRREKTRMSQSQISFNPDGSMRNWEYCPMVARNELVRLLARLEIPISLGENAAFEHYIRTAHNPKFVPVSRQTTTRDMVKYFTDKKAKLVETLSSSDVNCVCLTSDIWSGNAKEDYLSVVAHYINPDWQLEKRVLALVLIDVSHNGQNIVDRVAGVLADYGLTNK

SEQ ID NO: 64409 - protein, 77 aa, Zea mays
  Coding DNA Sequence Number=SeqID_22630
  Subcellular localization annotation: CTP_CleavageSite=40; ConfidenceScore=5.68e-01
MSATSASHSPAPWALPPPPVMAPTSSHTNSLRGIAKFSNNAMQGKSMKPRQLIALYQNQGTSTEAIKGLDQKTFIHT

SEQ ID NO: 64410 - protein, 52 aa, Zea mays
  Coding DNA Sequence Number=SeqID_22631
MAAAWAGLALLLVAAQLASVAQVTAPAFLWAPKNYGQNCNPAAAYAMALATS

SEQ ID NO: 64411 - protein, 52 aa, Zea mays
  Coding DNA Sequence Number=SeqID_22632
MAEGAGGPAGDADACLFVLLRLARGYESSEVILVPGISSPRQVVPLTTFITQ

SEQ ID NO: 64412 - protein, 121 aa, Zea mays
  Coding DNA Sequence Number=SeqID_22633
  Gene Ontology: Mol. function=ribonuclease H activity; Biological process=DNA integration
  Homolog annotation: Hit_ID=UPI00004C1733; Match level="QueryCoverage =42%, HitCoverage=3%, E-value=6e-19, Identity=90%"; Hit description =UPI00004C1733 related cluster
MPGIPRDVAEHSLDIRAGARPVKQPLRRFDGEERRAIGEEIHKLMAAESIKEAKGVKLNPEMWVFGRGIEANPEKIATIAQHPEPLLGAPGGYTQPREGPLVIAKVLKPGTYKLANGQGEV

SEQ ID NO: 64413 - protein, 206 aa, Zea mays
  Coding DNA Sequence Number=SeqID_22634
  Gene Ontology: Mol. function=nucleic acid binding; Cellular component= intracellular; Biological process=chromatin modification
  Homolog annotation: Hit_ID=Q5UDB7; Match level="QueryCoverage=63%, HitCoverage=25%, E-value=3e-68, Identity=87%"; Hit description =INDETERMINATE-related protein 7
  Pfam annotation: Domain name=zf-C2H2; Domain location=154-176; Score =19.2; E_value=0.015; Accession=PF00096.16; Description=Zinc finger, C2H2 type
  Pfam annotation: Domain name=zf-C2H2; Domain location=78-100; Score =25.1; E_value=0.00024; Accession=PF00096.16; Description=Zinc finger, C2H2 type
  Pfam module annotation: Pfam domain module=zf-C2H2::zf-C2H2; Domain location=154-176::78-100
MAPHTLYDDGGSQLSYGSRIGDVQMRPRGTSLQQSSASALGDGDAALPKKKRNRPGNPKPDAEVIALSPRTLLATNRFVCEVCSKGFQRDQNLQLHLRGHNMPWKLKQKDPKDARRRVYLCPEPTCVHHSPSRALGDLTGIKKHYCRKHGEKKFRCDRCSKRYAVESDWKAHGKTCGAREYRCHCNALFSRSVPPIHSRFPDQRRI

SEQ ID NO: 64414 - protein, 427 aa, Zea mays
  Coding DNA Sequence Number=SeqID_22635
  Gene Ontology: Mol. function=nucleic acid binding; Cellular component= intracellular; Biological process=chromatin modification
  Homolog annotation: Hit_ID=Q5UDB7; Match level="QueryCoverage=89%, HitCoverage=66%, E-value=2e-75, Identity=51%"; Hit description =INDETERMINATE-related protein 7
MACQVTWVPEFSLLCHLGPRKFLLVFSNLILTHPSMYASRKDNFITHRATCDAAVRGTAQKPPLVAGLYVGSGSDDRLGLSDAAAQMHGFADQGQSSSAAEASQFDHVMPSYSGSSMFRSQASDFSLSFFLGGGTPLIEQDLSDNGGDLSEGSQGPLLHGKAPLHGVMTHLPEQQYQPNSGNANVNLLDIGFFSGNSGGTSGSQGPLLHGKEPFHSHDLTQLPEQQHQPGSSNARVNLPNLGVFSGNSGGWPGSSHQDARLVIQDQLNGGSSSNTEHGNGMASIGSHFGGGFVPSLHNSSPSAGLSATALLMKAAQMGSTTSSTTHNPNGPSALLRAAGFAGTASVRETSSRAAEEEKSHEAYFHDLIMNSLPLTGGGTGGLSGLAGVDDGNVSTRDFLGVGRDDATAPQGLHGMGAPNPTQMKWYM

SEQ ID NO: 64415 - protein, 199 aa, Zea mays
  Coding DNA Sequence Number=SeqID_22636
MTLPLVKRRQGFETSPRFMAFSFTRCQRVAEQKFATITAHGRESFSQIGLTALSHVVASAPFHTASCIPLTLAIAFASADRATTSRCCIRLIGPPRATTSRRSSRPLPATGSPLTGGTERRVTDIVVARKHSCSALDVAFHALEAEARDAKMEARIRLVREQRAAPPPTLSSRSRVCYFVVPGLNSLTLQQQLDQRAQM

SEQ ID NO: 64416 - protein, 102 aa, Zea mays
  Coding DNA Sequence Number=SeqID_22637
MEAPMEWIAVHFPLGLEDGRGSPRDTAQMPSISPGKGAPMVERWEEGGRFVVATPVDGARRLTGIVGALTGLELFATGRVRRAQWGAEQTGGQNRALWMPTL

SEQ ID NO: 64417 - protein, 100 aa, Zea mays
  Coding DNA Sequence Number=SeqID_22638
  Subcellular localization annotation: CTP_CleavageSite=57; ConfidenceScore=5.21e-01
MRWGDSIYGVVGASRGDVEVSTGATSKPRSPTQCSTQVKVLGLDPAGGKLLSVPMLRMDSRASGWRRNSLAPTLETSSGSGKRCCRLADSRARRPIGDWP

SEQ ID NO: 64418 - protein, 153 aa, Zea mays
  Coding DNA Sequence Number=SeqID_22639
METISLLIPPKCLPPPSQELHVDTTVTPASEAVSKQKQPIVVETEVRRSARLREKARGFKNCSRATRKCSCCARISPPSISHKIIKKLGEEFCKVAPMSLDLGSLNGSKTTSNIIQRPSASTSNRDDESRSSTEQPEDINNDDEAAPSTPARE

SEQ ID NO: 64419 - protein, 78 aa, Zea mays
  Coding DNA Sequence Number=SeqID_22640
MAFHRVDPTPFLPQGFVAHQVHHREIMMLRVSKEFLGLFNPPEPVVNANNVEEQFSYQLSGLEDLPSSDESMGSSTTS

SEQ ID NO: 64420 - protein, 139 aa, Zea mays
  Coding DNA Sequence Number=SeqID_22641
MHRARILGIVPPLRPLFQLLRAWLHVMPRPGLGLRRDLCLARARPLPTAPNRATRDATSSPVNPAEDRMATETTRPCSSCAGFGCWAGAVAGCVGAGGQQVHNSVAERALCRRWAWAPRAQAEAEREGRENQSGRLGRF

SEQ ID NO: 64421 - protein, 185 aa, Zea mays
  Coding DNA Sequence Number=SeqID_22642
MARRRPGSTVADLGGCTEDGCFYSRPLRGVVVAPLVHRTVRNDPNRECFHVDLELLEVGDHLDMPQEGDQPPPHNPDGAQTPLGSHEAHLRQLRQLHDKLEEEQQRLQQLRQALEGEAAGKALDGGARTKARDVLRHIEEDADAAELLVLNRASQSLAVSSLLLHTMPKPSTTEGRCIHSKLGGF

SEQ ID NO: 64422 - protein, 144 aa, Zea mays
  Coding DNA Sequence Number=SeqID_22643
  Subcellular localization annotation: CTP_CleavageSite=84; ConfidenceScore=5.34e-01
MRPARLASKLTQRHGAQPAWPVRVPPAWPRARVRHDLRAAGVPATRSSPGVICAASWQPRRRFASCTQHVLVLRHELVRPSAVVAEELGVVRFAVVPLMGLGVCGSLYQGGDENDGFGIDYGNGKEEGVEADLQEFQDFDEFDD

SEQ ID NO: 64423 - protein, 914 aa, Zea mays
  Coding DNA Sequence Number=SeqID_22644
  Homolog annotation: Hit_ID=Q6EN70; Match level="QueryCoverage=40%, HitCoverage=74%, E-value=2e-78, Identity=50%"; Hit description =Streptococcal hemagglutinin-like protein
  Pfam annotation: Domain name=DUF248; Domain location=516-907; Score =360.8; E_value=2.3e-105; Accession=PF03141.7; Description=Putative methyltransferase
  Pfam annotation: Domain name=DUF566; Domain location=136-464; Score= -67.1; E_value=5.8e-05; Accession=PF04484.3; Description=Family of unknown function (DUF566)
  Pfam annotation: Domain name=Methyltransf_11; Domain location=770 -866; Score=-2.1; E_value=0.087; Accession=PF08241.2; Description =Methyltransferase domain
  Pfam module annotation: Pfam domain module=DUF248::DUF566::Methyltrans f_11; Domain location=516-907::136-464::770-866
  Subcellular localization annotation: CTP_CleavageSite=98; ConfidenceScore=5.82e-01
MAAAAGPPSHSADLMPPPPPPPVLTTTAPRPRRRAREVSSRYLSTPVPSTPRLSTASSTRSRSPSPTPSPRGRQRAVTPFANENHPPPPPPPTGTVARRRAVQKLFEEIGAGNPRASVSSNSSAVPAATPRPLPRSTSGPAAPTARRGYPRLPTPARAGSCPASGAVDSDTASCCSSSDTSSTATDLSEADRALGMAPAAPCESPPLLGPASCRGGRLSSELCSSVPESGGSSRASNPLCYRSLNSALSISTAMAGKLTAAGRPPQPQGPKVADLKKAAILGGRKVAGKQEDVHLLRLMDNSYLQYRFLNARAEAAGKAKAAAAEKSLYGVEERIASLRVSVAEKRAEVERMKREHILRSVVNAQSSPLPCLFKYELGGATTLAALTRSRSGASDPPPVHHRVHSATHQLLCPVRRSTERYADLAAAMPLSEPSAPAVLAALPRALSLAAAAVAAATATLLLISAVFSTPHHAASSSSPQLSPSASASTAAPVAPAPAHAPDSGPGHPHPPPPVPPCPPNATHDVPCHEPPSRERHCPPRPPPPPPLLPHPPKDPPPHPPPHCRVPPPPRYRPPPPWPARRDRARYANVDLPPLPPVKAADGQQQDPVHGRGEWLLFTDGVQGYVERLERVVPLRDGVVHTALDIGCGVASFGDYLLNYGVLTMSIAPRDRFEPQVQLALERGLPAMIGALVAHRLPYPSRSFDMMGSTCWKSTVFSNLVCEYFDSTILLNITFVTVQRYRYDTLVWEKRVNFYLTYLNFLSNGTYRNVMDMSAGSGGFAAAMSKHPVWVMNVVPANTTENALGVIYERGLIGTYTDWCEAFSTYPRTYDLIHGNGIFSSHIHKCGIIDILVEMDRILRPGGAVIVRDRADVVLRVKKDADRLRWHSRVVDTENGPLDPEKLLIVDNSLPLPGS

SEQ ID NO: 64424 - protein, 119 aa, Zea mays
  Coding DNA Sequence Number=SeqID_22645
MGCRRHGPAPPLSFSVRGMVEGDHKIQSKKPTESPWGISTSSSGNCSSSCNVRHGANAPCWKDHCHPNPSAQHTSWSPWLLSLLRTMVLPTPVVWCSLLPAPVVRCSLLQCSGARSSLL

SEQ ID NO: 64425 - protein, 526 aa, Zea mays
  Coding DNA Sequence Number=SeqID_22646
  Gene Ontology: Mol. function=RNA-directed DNA polymerase activity; Cellular component=intracellular; Biological process=RNA-dependent DNA replication
  Homolog annotation: Hit_ID=UPI00004C1733; Match level="QueryCoverage =99%, HitCoverage=38%, E-value=0.0, Identity=93%"; Hit description =UPI00004C1733 related cluster
  Pfam annotation: Domain name=RVT_1; Domain location=56-225; Score =139.3; E_value=1e-38; Accession=PF00078.17; Description=Reverse transcriptase (RNA-dependent
MPGIPREVAEHSLDIRAGARPVRQPLRRFDEEKRRVIGEEIHKLMVAGFIKEVFHPEWLANPVLVRKKRGKWRMCVDYTGLNKACSKVPYPLPRIDQIVDSTAGCETLSFLDAYLGYHQIRMKESDQLATSFITPFGMYCYVTMPFGLRNAGATYQRCMNHVFGEHIGRTVEAYVDDIVVKTRKASNLLSDLEVTFRCLKAKGVKLNPEKCVFEVPRGMLLGFIVSERGIEANPEKIAAITNMGPIKDLKGVQRVMGCLAALSRFISRLGERGLPLYRLLRKAESFTWTPEAEVALGNLKALLTKAPILVPPTDGEALLVYVASTFQVVSAAIVVERQEEGHALPVQRPVYFVSEVLSETKIRYPQVQKLLYAVILTRRKLRHYFKSHPVTVVSSFPLGEIIQCREASGRVAKWAVEIMGETISFAPRKAIKSQVLADFVAEWVDTQLPTAPIQPELWTMFFDGSLMKTGAGAGLLFISPLEKHLRYVLRLHFPASNNVAKYEALINGLRIAIELGVRRLDARGDS

SEQ ID NO: 64426 - protein, 218 aa, Zea mays
  Coding DNA Sequence Number=SeqID_22647
  Gene Ontology: Mol. function=nucleic acid binding; Cellular component= intracellular; Biological process=translation
  Homolog annotation: Hit_ID=Q3LRV2; Match level="QueryCoverage=68%, HitCoverage=65%, E-value=1e-39, Identity=56%"; Hit description=Gag
MSGEVTDKSEKIPSGEKFEEKVPSGEKPNGNKEENVLSEKKHKEKHKEKKGESQGSSKSHKKDDKKKKRMRKVVYFETGTSSSPSTSNVVSSFSKCHERKPVNQILFCYPRNPKHTPLFSVPLEKPPQFNGEDYSWWSVKMKSHLYSIHPSIWDVIELGMKIQNIGDEDYDLEEATQIVHRNSYVTTILLASLCREEYNKVNGLQIAKEILDTLNTTH

SEQ ID NO: 64427 - protein, 495 aa, Zea mays
  Coding DNA Sequence Number=SeqID_22648
  Gene Ontology: Mol. function=binding; Cellular component=mitochondrion
  Homolog annotation: Hit_ID=Q6K8X7; Match level="QueryCoverage=66%, HitCoverage=70%, E-value=1e-139, Identity=68%"; Hit description =Pentatricopeptide (PPR) repeat-containing protein-like
  Pfam annotation: Domain name=PPR; Domain location=220-254; Score =16.1; E_value=0.092; Accession=PF01535.11; Description=PPR repeat
  Pfam annotation: Domain name=PPR; Domain location=255-288; Score=1.6; E_value=4.8; Accession=PF01535.11; Description=PPR repeat
  Pfam annotation: Domain name=PPR; Domain location=396-430; Score =23.3; E_value=0.00086; Accession=PF01535.11; Description=PPR repeat
  Pfam annotation: Domain name=PPR; Domain location=431-465; Score=1.7; E_value=4.8; Accession=PF01535.11; Description=PPR repeat
  Pfam module annotation: Pfam domain module=PPR::PPR::PPR::PPR; Domain location=220-254::255-288::396-430::431-465
MKRQAMMGKDTGNLLRPWMETPYQLIFLYNLCSLTRKGVIKNMRRNIVDGNSFAFLCDNIDELEHSVQENLPRVSVVMPLKGFGKHNLQNWRTQITSLYGGPLEFLFIVESKYDPAYHVVSRLITEYKTWHFNGRVAYSLTNNNILHIHYRADVPSFHTKFSERRYEQALEIFSWMESCSSLRLSSWDHAARLDLIAKAYSTSQAEEYYNKLQSPATRQAASFPLLHCYVMERDHEKVLSVIDLMKRNNIHRNVLSYNLWMNACAEVSGVDSVQSVFQVMLNDETVKVGWSTYCTLANIFRKNGLNTEAQACLVKAEAKLSPTGRLGYSFVMTCYAALNDSDGVMRMWEASKSVPGRILTAYYMAAMSCSIKVGDISQAECIFGKWEAGCRKHDVRVSNVLLGAYVRNRWIEKAERLHLHMLEKGACPNYKTWEILMEGYVQSRQMDKAVGCMKKGLSLLKSCHWRPPVELMEAIGKHFEEQGSADDAYRYIKVL

SEQ ID NO: 64428 - protein, 62 aa, Zea mays
  Coding DNA Sequence Number=SeqID_22649
MGTNGHLDLDTGVCMCARFQANTKEIHLRAVKRIMRDNVTEPPKSFGPPTVVLVHRTSDNPT

SEQ ID NO: 64429 - protein, 270 aa, Zea mays
  Coding DNA Sequence Number=SeqID_22650
  Gene Ontology: Mol. function=sugar porter activity; Cellular component=integral to membrane; Biological process=imaginal disc -derived wing morphogenesis
  Homolog annotation: Hit_ID=Q6K5Y4; Match level="QueryCoverage=99%, HitCoverage=100%, E-value=1e-121, Identity=86%"; Hit description =Putative UDP-N-acetylglucosamine transporter
  Pfam annotation: Domain name=TPT; Domain location=122-264; Score =46.7; E_value=7.9e-11; Accession=PF03151.7; Description=Triose -phosphate Transporter family
  Pfam annotation: Domain name=UAA; Domain location=33-270; Score= -165.4; E_value=0.038; Accession=PF08449.2; Description=UAA transporter family
  Pfam module annotation: Pfam domain module=TPT::UAA; Domain location =122-264::33-270
MAKGGVERGALLPVSADDGKGNGGGAGGDDAVLFKGSAMTRRGGTAALSYMACSVLLVMFNKAALSSYNFPCANVITLLQVITTHHTSFLGLFTLHGFISVALIVFGAFVAGARDLSFDARGYAIVFVANITTAIYLATINRIGKSSGLNSFGLMWCNGLVCGPSVLLLTYIQGDLKRAMEFPYLYSPGFMTVLLFSCILAFLLNYTIFWNTILNSALTQSMCGNLKDFFTVGIGWVLFGGLPFDLLNVIGQGLGFLGSGLYAYCKIKGK

SEQ ID NO: 64430 - protein, 87 aa, Zea mays
  Coding DNA Sequence Number=SeqID_22651
MGELRGTQAELEPGTRRAEEGDEQSAQRRMHSAGQNRARGARRRLELPQRRWLLRCSAPSVPPQQRCDATTDGSGQRWRPSELTRRR

SEQ ID NO: 64431 - protein, 251 aa, Zea mays
  Coding DNA Sequence Number=SeqID_22652
  Gene Ontology: Mol. function=protein serine/threonine kinase activity; Cellular component=flagellin-based flagellum; Biological process=protein amino acid phosphorylation
  Homolog annotation: Hit_ID=Q9SE24; Match level="QueryCoverage=90%, HitCoverage=44%, E-value=1e-106, Identity=85%"; Hit description =Calcium-dependent protein kinase
  Pfam annotation: Domain name=Kdo; Domain location=15-221; Score= -86.5; E_value=0.079; Accession=PF06293.4; Description=Lipopolysacchar ide kinase (Kdo)
  Pfam annotation: Domain name=Pkinase; Domain location=52-247; Score =95.8; E_value=1.3e-25; Accession=PF00069.15; Description=Protein kinase domain
  Pfam annotation: Domain name=Pkinase_Tyr; Domain location=52-231; Score=-78.2; E_value=1.1e-07; Accession=PF07714.7; Description =Protein tyrosine kinase
  Pfam module annotation: Pfam domain module=Kdo::Pkinase::Pkinase_Tyr; Domain location=15-221::52-247::52-231
MGLCSSSTAARAASDPGAAAAGDAAAAKKGRGIVACGKRTDFGYDKDFEVRYSLGKLLGHGQFGYTFAAVDRASTERVAVKRIDKNKMVLPVAVEDVKREVKILKALQGHENVVHFYNAFEDDNYVYIVMELCEGGELLDRILAKKDSRYSEKDAAVVVRQMLKVAAECHLHGLVHRDMKPENFLFKSKKEDSPLKATDFGLSDFIKPGRQFRDIVGSAYYVAPEVLKRSLLCNIVILNTKTSICIFTKNA

SEQ ID NO: 64432 - protein, 235 aa, Zea mays
  Coding DNA Sequence Number=SeqID_22653
  Homolog annotation: Hit_ID=Q8GUC3; Match level="QueryCoverage=77%, HitCoverage=52%, E-value=1e-65, Identity=67%"; Hit description =Barley B recombinant
  Pfam annotation: Domain name=DUF1004; Domain location=70-184; Score =323.0; E_value=5.3e-94; Accession=PF06217.3; Description=Protein of unknown function (DUF1004)
MDITMPHTSSTRSNHNIIVTMLAAHPDPDTKPPVKKRWQVRQPKSLKPRKPKKAAVPPENGALNEHAPRRRGPKKTVGMVINGIELDLANIPTPVCSCTGAPQQCYRWGAGGWQSACCTTSISTYPLPMSTKRRGARIAGRKMSQGAFKKVLEKLAGEGYNLANPIDLKTFWAKHGTNKFVTISGLGQSKFIVSVILILTEYFFSKNVCRLVVLNFFYSTWVLFGSDAIKMLLRE

SEQ ID NO: 64433 - protein, 451 aa, Zea mays
  Coding DNA Sequence Number=SeqID_22654
  Gene Ontology: Mol. function=kinase activity; Cellular component =cytoplasm; Biological process=carbohydrate metabolic process
  Homolog annotation: Hit_ID=Q8H407; Match level="QueryCoverage=92%, HitCoverage=88%, E-value=1e-122, Identity=61%"; Hit description =Xylulose kinase-like protein
  Pfam annotation: Domain name=FGGY_N; Domain location=58-284; Score= -88.9; E_value=0.00024; Accession=PF00370.11; Description=FGGY family of carbohydrate kinases, N-te
  Subcellular localization annotation: CTP_CleavageSite=39; ConfidenceScore=5.25e-01
MVSALTPSAELLPHPRHPAKRGLLGFRRDHSRAATSKVRVTMLSQQNPGGESAGTPPLYLGIDFGTSGARYALIDEHGAIHSEGKRAYCAPVGDAAGWASSWRAALFQLLADVPPAHRPSVSSISIDGTSATALIVDSETGELLGGPFLYNEGFPDALPAVESVAPANHTVCSPTSTLCKLVSWWAASGGAAAGAAVLMHQSDWLLWLLHGRPGGVSDYNSALKVGYDPELGAYPGWLTSQPYSRMLPAAVRPPGAPVAALRDDVRSQYGKRSYYVLVVVTSLGSTLAIKLVSRVHVADARFGVYSHRLDDVWLVGGASNTGGAVLRQLFTDDQLAALSEHIDPAVPSPLDYYPLPKKGERFPVSDPDMMPRLQPRPGSDAEYLHGILESIARIEAKGYSLLKELGATAVEEVFTAGGGAQNDRWTAIRERVLGVASGRPSRLRRPMELHC

SEQ ID NO: 64434 - protein, 182 aa, Zea mays
  Coding DNA Sequence Number=SeqID_22655
  Subcellular localization annotation: CTP_CleavageSite=30; ConfidenceScore=5.30e-01
MTVCRGLTGQSGDTSDSPVNFSRGALSFPKSDMFVSLACLGTGHCPVHTRQSGAPQASLELHHHRPEASLRLCRCSGTLVFPLEASNLPAPPISLFIASVFVGLLAGADSCHRGTIPPRSAPSGASALAWCPWSCSPVCPECARVLPQVPRALSRPFPSSPARSRREVERCHRTKDPPSRPR

SEQ ID NO: 64435 - protein, 87 aa, Zea mays
  Coding DNA Sequence Number=SeqID_22656
MGELRGTQAELEPGTRRAEEGDEQSAQRRMHIAGQNRARGARRRLELPQRRWLLRCSAPSVPPQQRCDATADGSGQRWRPSELTRRR

SEQ ID NO: 64436 - protein, 625 aa, Zea mays
  Coding DNA Sequence Number=SeqID_22657
  Homolog annotation: Hit_ID=Q6H4Z9; Match level="QueryCoverage=92%, HitCoverage=93%, E-value=2e-75, Identity=58%"; Hit description =Leucine zipper protein-like
  Pfam annotation: Domain name=DUF630; Domain location=1-61; Score =78.7; E_value=1.8e-20; Accession=PF04783.3; Description=Protein of unknown function (DUF630)
  Pfam annotation: Domain name=DUF632; Domain location=238-551; Score =151.1; E_value=3e-42; Accession=PF04782.3; Description=Protein of unknown function (DUF632)
  Pfam module annotation: Pfam domain module=DUF630::DUF632; Domain location=1-61::238-551
MGCSSSKLDEEAAVKTCHDRKSFVRKAIAQRDLLASSHVAYVQSLRRVSMGLFYYFAEDEHLHRLQESSCVHRPGSPDKVLVVVNCLRPAGAPVHPVVEQWEPTDEAIEAATIDGFFGADGPFLRPPSIDPMFGPSVSPQPRRWDLFWDPFSSLTDHPSYSVEEVRDDQEDEQIPELEEESDGGGGDCHREGEGGAEEEEGEQAAVAAQVAAPSREQVGRKVDHVSNELRVLASAEIEQHGAPGFTVYVDRPPASMAEAVRDIQGHLMKILDTAKEASVLLEVVPYQRRVQPPVPRDDGEEQGAPEVPPEPFELFQSHKESLDRLYEWEKRLYEEVRAGERVRLAYEKKCALLRSQDASGAEPFAIDKTRAAVRDLRTKLDISLTSVDAVSRRIAAVRDDELLPQLLQLVRGLARMWRVIADAHRVMKRTADDSIALLTASAAAAAAARPDPVREGGGTRGPPPPPGVARAAAAAGALGAELRGWRAALEAWAESQRAYAAALWGWARSCVKDGENMPRLIVSWARAVEAVDVEPAARAVDAAAEAAAAVASAAKRQRSGGGEEWFNEDEGKKKVCVGLAAALGAIAEAGALAVFGYDELLLEMEMGAREREREISGRDDECFNP

SEQ ID NO: 64437 - protein, 100 aa, Zea mays
  Coding DNA Sequence Number=SeqID_22658
MPRSLRQHKEHLPQHDGDPSQVCNHLQLLTQVGGGSWPRWQVRDVGGTGVPFFMAAHASSPSSVERGSRAATEPRMGLLPLFLRVDSQAIETWALSGGRA

SEQ ID NO: 64438 - protein, 77 aa, Zea mays
  Coding DNA Sequence Number=SeqID_22659
MEWHARPRLPLQCIHRSDPISPDLDTCLSALQDLEDEPGATRRSAAPSAKRSCTTEDSWKSLRVSNLICEGTLSAYY

SEQ ID NO: 64439 - protein, 63 aa, Zea mays
  Coding DNA Sequence Number=SeqID_22660
MASAGVAPSGYKNSSSNPVRGVRVQDNAINDYRGLKKFTKECCPLKLFAKHLKVERQACYEPA

SEQ ID NO: 64440 - protein, 271 aa, Zea mays
  Coding DNA Sequence Number=SeqID_22661
  Gene Ontology: Mol. function=protein serine/threonine kinase activity; Cellular component=membrane; Biological process=protein amino acid phosphorylation
  Homolog annotation: Hit_ID=Q8GV28; Match level="QueryCoverage=92%, HitCoverage=71%, E-value=2e-95, Identity=66%"; Hit description =Serine/threonine protein kinase
  Pfam annotation: Domain name=Pkinase; Domain location=135-271; Score=- 90.6; E_value=0.0036; Accession=PF00069.15; Description=Protein kinase domain
  Pfam annotation: Domain name=Pkinase_Tyr; Domain location=142-271; Score=-87.9; E_value=4.5e-07; Accession=PF07714.7; Description =Protein tyrosine kinase
  Pfam module annotation: Pfam domain module=Pkinase::Pkinase_Tyr; Domain location=135-271::142-271
MTEAARFHGMIGGGGGKGMQDNVINGFDNIPYYQKFGEGSHMSVDSVDGFNLTNCAGGSVAMSVDSSSVGSNESRTVILKHPGLRDAPTASYSVNNSVFRPNRVAAHTLNEDALAQVLMDPNHPTEVGHGGSFCSRSLWKLYRGIYNGEDVAIKLLEKSENDPERAHSMEQQFVQEVMMLSRLSHPNIVRFIGACRKSVVWCTITEYAKGGSVRQFLARRDLKSDNLLISADKSIKIADFGVARIEVKTEGMTPETNLPVDGTGNDPAQAL

SEQ ID NO: 64441 - protein, 563 aa, Zea mays
  Coding DNA Sequence Number=SeqID_22662
  Gene Ontology: Mol. function=protein-tyrosine kinase activity; Cellular component=integral to membrane; Biological process=protein amino acid phosphorylation
  Homolog annotation: Hit_ID=Q6H504; Match level="QueryCoverage=96%, HitCoverage=95%, E-value=1e-110, Identity=67%"; Hit description =Putative receptor-like protein kinase PRK1
  Pfam annotation: Domain name=LRRNT_2; Domain location=32-79; Score =27.0; E_value=6.8e-05; Accession=PF08263.3; Description=Leucine rich repeat N-terminal domain
  Pfam annotation: Domain name=LRR_1; Domain location=109-130; Score =8.9; E_value=6.1; Accession=PF00560.23; Description=Leucine Rich Repeat
  Pfam annotation: Domain name=LRR_1; Domain location=132-155; Score =13.3; E_value=0.87; Accession=PF00560.23; Description=Leucine Rich Repeat
  Pfam annotation: Domain name=LRR_1; Domain location=157-179; Score =10.6; E_value=2.9; Accession=PF00560.23; Description=Leucine Rich Repeat
  Pfam annotation: Domain name=LRR_1; Domain location=180-201; Score =11.4; E_value=2.1; Accession=PF00560.23; Description=Leucine Rich Repeat
  Pfam annotation: Domain name=LRR_1; Domain location=202-224; Score =15.8; E_value=0.16; Accession=PF00560.23; Description=Leucine Rich Repeat
  Pfam annotation: Domain name=LRR_1; Domain location=83-104; Score =0.8; E_value=2e+02; Accession=PF00560.23; Description=Leucine Rich Repeat
  Pfam annotation: Domain name=Pkinase; Domain location=270-543; Score=- 103.8; E_value=0.022; Accession=PF00069.15; Description=Protein kinase domain
  Pfam annotation: Domain name=Pkinase_Tyr; Domain location=234-543; Score=-130.9; E_value=0.00019; Accession=PF07714.7; Description =Protein tyrosine kinase
  Pfam module annotation: Pfam domain module=LRRNT_2::LRR_1::LRR_1::LRR_ 1::LRR_1::LRR_1::LRR_1::Pkinase::Pkinase_Tyr; Domain location=32 -79::109-130::132-155::157-179::180-201::202-224::83-104::270
MARSRPHDHIIRAAFTLAFSAAILLSSPATAAPSEGDVLVAFRDTLRGPDGAPPGPLRNWGTPGPCRGNSSSWYGVSCHGNGSVQGLQLERLGLAGSAPNLDVLAVLPGLRALSLADNALTGAFPNVSALAVLKMLYLSRNRLSGAIPEGTFGPMRGLRKLHLSSNEFSGPVPESITSPRLLELSLANNHFEGPLPDFSQPELRFVDVSNNNLSGPIPAGLSRFNASMFAGNKLLCGKPLDVECDSSGSPRSGMSTMTKIAIALIVLGVLLCAAGIASGSLGRRKRKPRRAGAERLGSGDQTPSNPKLNTAPAVNIENAASTSQPRAAAAAGGAAAAAAAGKRPRRDEHGRLCSSRRAAPGNRGSLLDWGKRLRIIKGAARGLAHLYDELPMLTVPHGHLKSSNVLLDAAFDAVLSDYALVPVVTAQIAAQVMVAYKAPECMAPQGKPSKKSDVWSLGILILEILTGKFPANYLRQGRQGNADLAGWVQSVVAEERTGEVFDKDITGARGCEADMVKLLQVGLACCDADVDRRWDLKTVIARIDEIREPEPAAAADDESSLSS

SEQ ID NO: 64442 - protein, 175 aa, Zea mays
  Coding DNA Sequence Number=SeqID_22663
  Gene Ontology: Mol. function=RNA-directed DNA polymerase activity; Biological process=protein amino acid phosphorylation
  Homolog annotation: Hit_ID=Q8GV28; Match level="QueryCoverage=35%, HitCoverage=14%, E-value=2e-25, Identity=88%"; Hit description =Serine/threonine protein kinase
MTAVQAAFAVVNKGARPVIPQDCLPSLRHIMTRCWDANPEVHPPFTEIVCMLESAEMELLSNHASYRKKKNFVAKIQEEDMPYVSQDEKQEIIADFFEDLLNRRDQRDFTFDLASFHPQPQQDLSSLDEPFTAEEVWDTILSKDCLLARHPGLTDLLRDFTVAAGTLSVAMSLQH

SEQ ID NO: 64443 - protein, 263 aa, Zea mays
  Coding DNA Sequence Number=SeqID_22664
  Gene Ontology: Mol. function=protein serine/threonine kinase activity; Cellular component=membrane; Biological process=protein amino acid phosphorylation
  Homolog annotation: Hit_ID=Q8GV28; Match level="QueryCoverage=86%, HitCoverage=69%, E-value=4e-61, Identity=71%"; Hit description =Serine/threonine protein kinase
  Pfam annotation: Domain name=Pkinase_Tyr; Domain location=141-263; Score=-157.0; E_value=0.0078; Accession=PF07714.7; Description =Protein tyrosine kinase
MTEAARFHGMIGGGGGKGMQDNVINGFDNIPYYQKFGEGSHMSVDSVDGFNLTNCAGGSVAMSVDSSSVGSNESRTVILKHPGLRDAPTASYSVNNSVFRPNRVAAHTLNEDALAQVLMDPNHPTEVLSSYEQWTIDLGRLDMGGPFAQGAFGSCTGEYIMEKMLPLSCWRSLKNDPERAHSMEQQFVQEVMMLSRLSHPNIVRDLKSDNLLISADKSIKIADFGVARIEVKTEGMTPETGTYRWMAPCKVPEVQGNDLAQAL

SEQ ID NO: 64444 - protein, 199 aa, Zea mays
  Coding DNA Sequence Number=SeqID_22665
  Gene Ontology: Mol. function=DNA binding; Cellular component=nucleus
  Homolog annotation: Hit_ID=Q653Z5; Match level="QueryCoverage=96%, HitCoverage=57%, E-value=5e-32, Identity=42%"; Hit description =Putative squamosa promoter binding protein-homolog 4
  Subcellular localization annotation: CTP_CleavageSite=52; ConfidenceScore=5.18e-01
MHTRENFSVGHPSLNCSKSNDRRQISFVWNKAPVSHVRPFTSPWDSSSELPQAKEIRELSTKGGTITGQVHLDKSYVSTAIPSLTHGKDEPWPMKGPDMSIAASKFDGAPDLQRALSLLSVGACGLPDPVHQTSCVIQFTSASENSGDLHLSHGANSGLASCGDGQHIASQPQAQLVRFTMDTSNSVYEPSFFSVNQIN

SEQ ID NO: 64445 - protein, 84 aa, Zea mays
  Coding DNA Sequence Number=SeqID_22666
  Gene Ontology: Mol. function=nucleic acid binding; Biological process= DNA integration
  Homolog annotation: Hit_ID=O24587; Match level="QueryCoverage=97%, HitCoverage=7%, E-value=4e-37, Identity=86%"; Hit description=Pol
MGWLWHRCLAHVGMKNLHKLLKGEHVLGLANVCFEKDRPCAACQAGKQVGSTHHNKNVMTTSRPLELLLMDLFGPVTYLSIRGR

SEQ ID NO: 64446 - protein, 162 aa, Zea mays
  Coding DNA Sequence Number=SeqID_22667
  Gene Ontology: Mol. function=hydrolase activity; Biological process =aromatic compound metabolic process
  Homolog annotation: Hit_ID=Q8H4S9; Match level="QueryCoverage=58%, HitCoverage=28%, E-value=3e-36, Identity=77%"; Hit description =Putative lysophospholipase homolog
  Subcellular localization annotation: CTP_CleavageSite=27; ConfidenceScore=5.20e-01
VGRQGRWHRETGHQVCATANRVKRKARRQQVAGGRGMRSTAPTTVLDASSLSISIYNARPRLGIVVEVLRAIDELAKRLDEVNIMFLVVHDSADEVTDPEVSHALYAAAASKDNTIKIYDGMLYSLLFGEPNENIERVRGDILAWLNERCTTQATHRNIPVE

SEQ ID NO: 64447 - protein, 60 aa, Zea mays
  Coding DNA Sequence Number=SeqID_22668
MERCRFGLIGRLKGAGIGGLEDGGIESRGGGKADLGRALRPLLPCIAWASSGGTAIHDHK

SEQ ID NO: 64448 - protein, 265 aa, Zea mays
  Coding DNA Sequence Number=SeqID_22669
  Homolog annotation: Hit_ID=Q208N4; Match level="QueryCoverage=39%, HitCoverage=19%, E-value=3e-46, Identity=99%"; Hit description =Putative calcium/calmodulin dependent protein kinase
  Pfam annotation: Domain name=Pkinase; Domain location=25-244; Score= -100.2; E_value=0.014; Accession=PF00069.15; Description=Protein kinase domain
  Subcellular localization annotation: CTP_CleavageSite=36; ConfidenceScore=5.04e-01
MASAGVAPSGYKNSSSNPVRGDRIFHALAVLYGIVSAVAPVSTLIVLQILLFFILAVLYGRRQAAAGSAASDPDPAAPVFPAWARTPSECLAELGVSVDRGLSSEEAATRLQRHYSEFDAAGVVRQIARGLQALHGAGVVHRDLKPENCLFADRGEASTLKIMDFGLSSVEGFSDPVVTPVRLDRLRLAGGPLEAGCLGCQRHVVCWGDSVYLVVRSPTLEHPSSPAGPSLGPDATSRRRTDGVAGAGAMAVGVDAPHRWSLCGR

SEQ ID NO: 64449 - protein, 76 aa, Zea mays
  Coding DNA Sequence Number=SeqID_22670
  Subcellular localization annotation: CTP_CleavageSite=48; ConfidenceScore=5.27e-01
MALAASADPVFLAFFVFFFAPLPPGPPSADSGWLLRLQGTGDNMAGVSAAARRVHPGRVREKLVGAQVKELSDMIC

SEQ ID NO: 64450 - protein, 72 aa, Zea mays
  Coding DNA Sequence Number=SeqID_22671
  Gene Ontology: Mol. function=protein serine/threonine kinase activity; Cellular component=integral to membrane; Biological process=protein amino acid phosphorylation
  Homolog annotation: Hit_ID=Q208N4; Match level="QueryCoverage=90%, HitCoverage=12%, E-value=9e-25, Identity=98%"; Hit description =Putative calcium/calmodulin dependent protein kinase
MAPSRASATPSSPLFGSIDYVSPEALSRQDVSAASDMWSVGVILYILLSGCPPFHAPTNREKQQRILQMSHS

SEQ ID NO: 64451 - protein, 168 aa, Zea mays
  Coding DNA Sequence Number=SeqID_22672
  Gene Ontology: Mol. function=oxidoreductase activity; Cellular component=mitochondrion; Biological process=metabolic process
  Homolog annotation: Hit_ID=Q9SAK4; Match level="QueryCoverage=76%, HitCoverage=24%, E-value=6e-45, Identity=75%"; Hit description =Succinate semialdehyde dehydrogenase, mitochondrial precursor (EC 1.2.1.24) (At-SSADH1) ...
  Homolog annotation: Hit description=(NAD(+)-dependent succinic semialdehyde dehydrogenase)
  Pfam annotation: Domain name=Aldedh; Domain location=2-168; Score= -142.4; E_value=1.4e-09; Accession=PF00171.12; Description=Aldehyde dehydrogenase family
  Subcellular localization annotation: CTP_CleavageSite=34; ConfidenceScore=5.02e-01
MWRFTNHLSQRCSFLFALQPVGVVGAITPWNFPLAMITRKVGPALACGCTVVVKPSEFTPLTALAAADLALQAGIPAGALNVVMGNAAEIGDALLQSTQVRKITFTGSTAVGKKLMAGSANTVKKVSLELGGNAPCIVFDDADIDVAVKGSSSLVPFVDEGDIAVKNV

SEQ ID NO: 64452 - protein, 179 aa, Zea mays
  Coding DNA Sequence Number=SeqID_22673
MCYKQHHYMKNRKNASNNKNVGADVLIQGRGDATTAKRDGTNATTYANDAISEYVYVDASTVFPNDSKCTIGNLFACRRTVVEYLSKALLPLRQRTPCLRMVMHHRIWDRSPQPNDAPNYVVGICSVDAALDDSADAASDATSDANADAVSDANADVVATGDVGIFSYGAVKMPWGYAP

SEQ ID NO: 64453 - protein, 181 aa, Zea mays
  Coding DNA Sequence Number=SeqID_22674
  Subcellular localization annotation: CTP_CleavageSite=16; ConfidenceScore=5.22e-01
MPRAGVEGRAHAPRPRASRAGDRTTTPGLRARAGAAPRRDAPAPSHARVGTRSRRGVPALRAGDRGRDASSAAEQGRAAPGADVRDGAAPDADGRDGAAPDHRAMATGGRTAPPRRATGGRAGPAAMSVRTEAETRGKGEPGPVALSKIIVAGGRMREREGVRSHRSDDADRRGVCAAAPE

SEQ ID NO: 64454 - protein, 266 aa, Zea mays
  Coding DNA Sequence Number=SeqID_22675
  Subcellular localization annotation: CTP_CleavageSite=27; ConfidenceScore=5.02e-01
MTLSPPRPLPSGSPSPHSGTRNLREVEAARHRARPPQKHRLACRPSDHDGGTTVDTTSPEWLSATVPLGYAIGTNGAGADEGKVPSLAARAASFIVLCDTYKLKEWRVRTQKQWQRGMEKNTTHQEERARTKGILYAKGSTAGEGSDDAPSGHLTDTADATDVVGVGDAAVMAGQFAHRRQCHGSATGRGGHVLHIGGGDNTPPQVGLVGGTVHPCMHAIESVQPILSLFVSCLSSWMDTWADMARIGAKTGRAYLGTVHIGTKRA

SEQ ID NO: 64455 - protein, 145 aa, Zea mays
  Coding DNA Sequence Number=SeqID_22676
  Subcellular localization annotation: CTP_CleavageSite=31; ConfidenceScore=5.16e-01
MVAQRNPMSTKGGTVVVTELRLRTPARTESPAAARSALFFVRGEAPAVLFKGQTASVFGEREGEWLAGEGRFPGASIYPSARLNGSGARGFRGGGELAQFVTAQRKRGEDGLTDGSRGVSETIPSPRGIGQLTGGSRKSVIQRRA

SEQ ID NO: 64456 - protein, 98 aa, Zea mays
  Coding DNA Sequence Number=SeqID_22677
MGRRETEREGGKKPEGDMRKRGIPRSSCSSRAQVGHKERIQGNDDASCDLVGPSPRLGEVEAPPRSRSSLSSEAEVESEPLGRARRRPSAEARAESEP

SEQ ID NO: 64457 - protein, 145 aa, Zea mays
  Coding DNA Sequence Number=SeqID_22678
  Subcellular localization annotation: CTP_CleavageSite=31; ConfidenceScore=5.10e-01
MVAQRNPMSTKGGTVVVTELRLRTPARTESPAAARSALFFVRGEAPAVLFKGQTDSVFGEREGEWLAGEGRFPGASIYPSARLNGSGARGFRGGGELAQFVTAQRKRGEDGLTDGSRGVSETIPSPRDIGQLTGGSRKSVIQRRA

SEQ ID NO: 64458 - protein, 174 aa, Zea mays
  Coding DNA Sequence Number=SeqID_22679
  Subcellular localization annotation: CTP_CleavageSite=31; ConfidenceScore=5.17e-01
MVAQRNPMSTKGGTVVVTELRLRTPARTESPAAARSALFFVRGEAPAVLFKGQTASVFGEREGEWLAGEGRFPRSFYLSLGAVERVGRARIPAAAASSRSFVTAQRKRGEDGLTDGSRGVSETIPSPRGIGQLTGGVPQIIDSAPRVRMKGGGWMSGQQRARWRGSQAAREGVG

SEQ ID NO: 64459 - protein, 415 aa, Zea mays
  Coding DNA Sequence Number=SeqID_22680
  Homolog annotation: Hit_ID=Q2QXS5; Match level="QueryCoverage=9%, HitCoverage=5%, E-value=9e-13, Identity=87%"; Hit description=Heavy metal-associated domain containing protein, expressed
MEVDLATVGVYQSSIDAEQGKVTVSGLLDPDTIIRKLNKAGKPAQLWGSKPGVPQNGHGGGKGQPKDAGGGKGHSKDAGGGKAQKGGAGGGGHKGAGGAGGGGGGAKDPKMVMPQPTPQQLQQLQQQLQMKGLKLPPHLLGGNMPAFPAAAPLKDHPKSVKFALPEDSFDDDGGSEFDDDFDDDDFDDDEDYDDEGFDDDVYDEPKMMKPMAVPPPSGGGDKKGGGGKKGGGGNEIPGKKGGGGGGAVGGPMGGMLPQQAMMRPNMLGGAGAGFPGTAQMGGGPMGMPMGHPHMGIMQQGGGGGGGVPGLGFYQGNANGGGGGGMHSGAEMLQAAAASGNPMAQQQYMALLQHQQQQHQQQMMLQHGNGGGAGYPAMGYGYGRPPMMHYPMPPHSHPEPYNIFSDENPNSTCSLM

SEQ ID NO: 64460 - protein, 166 aa, Zea mays
  Coding DNA Sequence Number=SeqID_22681
MAAAGCRAGGGAGAGVVPCVPEPEDRTASRLLFCDGRARPPVKSSDDNSARSWVPDASRQHVGVEHSASLASAGQEILQCLLDAVALLAASPDAIPTNAFSDTVSAPPSSPTSSTSPRQGQILLLFSLCYVLLRPFSYVPVVLDSALDLVSHPSARRILPSIGRGS

SEQ ID NO: 64461 - protein, 965 aa, Zea mays
  Coding DNA Sequence Number=SeqID_22682
  Gene Ontology: Mol. function=RNA-directed DNA polymerase activity; Cellular component=intracellular; Biological process=RNA-dependent DNA replication
  Homolog annotation: Hit_ID=UPI00005A975E; Match level="QueryCoverage =99%, HitCoverage=56%, E-value=0.0, Identity=88%"; Hit description =PREDICTED: similar to Retrovirus-related Pol polyprotein from transposon 297
  Pfam annotation: Domain name=RVT_1; Domain location=56-225; Score =148.6; E_value=1.6e-41; Accession=PF00078.17; Description=Reverse transcriptase (RNA-dependent
  Pfam annotation: Domain name=RnaseH; Domain location=455-582; Score =0.4; E_value=5.3e-05; Accession=PF00075.14; Description=RNase H
  Pfam annotation: Domain name=rve; Domain location=773-932; Score =119.7; E_value=8e-33; Accession=PF00665.16; Description=Integrase core domain
  Pfam module annotation: Pfam domain module=RVT_1::RnaseH::rve; Domain location=56-225::455-582::773-932
MPGIPRDVAEHSLDIRAGARPVRQPLRRFDEEKRRVIGEEIHKLMAAGFIKEVFHPEWLANPVLVRKKGGKWRMCVDYTGLNKACPKVPYPLPRIDQIVDSTAGCETLSFLDAYSGYHQIRMKESDQLATSFITPFGMYCYVTMPFGLRNAGAMYQRCMNHVFGKHIGRTVEAYVDDIVVKTRKASDLLSDLEATFRCLKAKGVKLNPEKCVFGVPRGMLLGFIVSERGIEANPEKIATITSMGPIKDLKGVQRVMGCLAALSRFISRLGERGLPLYRLLRKAECFAWTPEAEEALGNLKALLTKAPVLVPPADGEALLVYVAATTQVVSAAIVVERQEEGHALPVQRPVYFVSEVLSETKVRYPQVQKVLYAVILTRRKLRHYFESHPVTVVSSFPLGEIIQCREASGRIAKWAVEIMGETISFAPRKAIKSQVLADFVAEWVDTQLPTAPIQPELWTMFFDGSLMKTGAGAGLLFISPLGKHLRYVLRLHFPPSNNVVEYEALVNGLRIAIELGVRRLDARGDSQLVIDQVMKNSHCRDPKMEAYCDEVRRLEDKFYGLELNHIAWRYNETADELAKIASGRTTVPPDVFSRDLHQPSVKIDDAPEPGAPSAQPEAPSAQPEVPSAPEGEALGVEEEQSGATPDRDWQAPYLQYLRRGELPPDQAEARRVARRAKSFVLLGDEEELYHRSPSGILQRCISIAEGRELLQEIHSGACGHHAAPRALVGNAFRQGFYWPTAVADATRIVRTCEGCQFYAKQTHLPAQALQTIPITWPFAVWGLDLVGPLQKAPGGYTHLLVAIDKFSKWIEVRPLNSIRSEQAVAFFTNIIHRFGVPNSIITDNGTQFTGKKFSDFCEDHHIRVDWPAVAHPMSNGQVERANDMILQGLKPRIYNDLNKFGKRWMKELPSVVWSLRTTPSRATGFTPFFLVYGAEAILPTDLKYGSPRTRAYTDQSNQASREKTR

SEQ ID NO: 64462 - protein, 73 aa, Zea mays
  Coding DNA Sequence Number=SeqID_22683
MRKQKDTPRAVPSRDLTDERLLAWAAAAKNQYLQAMDEKQEAVARRPCVDILRAKGLSLGLIFSLSIIITFSL

SEQ ID NO: 64463 - protein, 183 aa, Zea mays
  Coding DNA Sequence Number=SeqID_22684
  Homolog annotation: Hit_ID=Q6QP54; Match level="QueryCoverage=40%, HitCoverage=27%, E-value=8e-11, Identity=51%"; Hit description =Putative kinase
MKYFWDTLLDADIESDALGWQYISEAAGGRRPSGGWSRTSALEHLKKKSAKDLLSVFRDRGVPGPTSECRRVPQPRWVEREGEREGGRAKRPESGVREVGIPRPSCSSRAQVGVMMTPPVDVAGLRPRLGDVEAPPKPRSSLSSVAEVESEPLGRARRRPSAEARAESEPWGRAKRSFVVFWG

SEQ ID NO: 64464 - protein, 197 aa, Zea mays
  Coding DNA Sequence Number=SeqID_22685
MFTASWFLLWRRYSRRLQGAGLQAHEINNVGNSARHKRHWLSFAREAASKQRKSNVEDKRVESHMVARKCNFREWLYGPRSNWPESEATEKKKIEWAKELKSDPVLYKCGIEAKYGLVPSELGVGYFCRHMETRKCSWERYTNKEEVMHTIKSKRLMGQKIRCGSQLVDSSIKDRGQEMRRFTESMYYDSPMRVERR

SEQ ID NO: 64465 - protein, 794 aa, Zea mays
  Coding DNA Sequence Number=SeqID_22686
  Gene Ontology: Mol. function=hydrolase activity, hydrolyzing O -glycosyl compounds; Cellular component=membrane; Biological process =carbohydrate metabolic process
  Homolog annotation: Hit_ID=Q6YVW0; Match level="QueryCoverage=79%, HitCoverage=92%, E-value=1e-160, Identity=60%"; Hit description =Putative beta-1,3-glucanase
  Pfam annotation: Domain name=Glyco_hydro_17; Domain location=162-515; Score=402.5; E_value=6e-118; Accession=PF00332.9; Description =Glycosyl hydrolases family 17
  Pfam annotation: Domain name=X8; Domain location=531-627; Score =156.7; E_value=6e-44; Accession=PF07983.3; Description=X8 domain
  Pfam annotation: Domain name=X8; Domain location=631-714; Score =163.2; E_value=6.7e-46; Accession=PF07983.3; Description=X8 domain
  Pfam annotation: Domain name=X8; Domain location=717-794; Score =142.2; E_value=1.4e-39; Accession=PF07983.3; Description=X8 domain
  Pfam module annotation: Pfam domain module=Glyco_hydro_17::X8::X8::X8; Domain location=162-515::531-627::631-714::717-794
MTKLGSKQFFHRLAYLNYATYDNKPSLWVQTPTGLDLAYVQPGSKARFFLYWPQTDDHIEERAPGLSRRIARVRTPLRLAFASKLPPTNPLVHVSSSSLVTHSVRSQDSAASLVLLSPIAGPVPRATAAEPTMVMAAAVALAHFLGAALPLLLCGAAEAGEVGVNYGRVANDLPDPASVVQLLKQSGITMVRLYDANPKVLTSLANTGIKVMVMLPNEELAAAASDPSYALQWARANVAAFYPATHIHCVAVGNEVFDSRPDLNSNLVPAMANVHDALAQLGLADAVKVSTPVAFSAVQDSYPPSAGRFRDDIAQSVMKPMLGFLDRTGSYLTINIYPYLAYAEHPDQISLDYALGNPNPGVRVDDDDTGSIALDDDNGVTYHSLLDAQLDATYYAMDAMGFTSLKAHVGETGHPSGGRPRPGRRPPRGGRRHLVAGDDDGYPVASIANAHAYVNNVINRVLSGNTGTPHRPDADMDVYIFALFNENQKGDGPDDIEQNFGLFYPSEQKVYEFDFHHGGGGGGGSGGAKASWCVANAAAGDSRLQAALDYACGHGADCSAIQPGAACYEPNTKLAHASYALNDYYQRKGRASGTCDFAGAANVVYQAPAAGGELDLLFFAFSDTCSAAKASWCVANAAVGDSRLQAALDYACGHGADCGAIQPGATCFKPNTKAAHASYAFNDYYQRNGRASGTCDFAGAASVVYQEPAGACDAKSSWCVANAAVGDARLQAALDYACGHGADCSTIQPGATCFEPNTKVAHASHAFNSYYQRNGRASGTCDFAGAASVVYQAP

SEQ ID NO: 64466 - protein, 121 aa, Zea mays
  Coding DNA Sequence Number=SeqID_22687
MGTLLSIGPEPYSGLTSGLTIDSESRDYLRECQGGPRASVGTPNIGYPLLLALGRTPVPISGHGMMSNLLQLRVWASPVGSFAFEPPAPSHTLLLGLLVIYSLGSDPRGTVPDPYMCRLDL

SEQ ID NO: 64467 - protein, 54 aa, Zea mays
  Coding DNA Sequence Number=SeqID_22688
MEKYEYDRFSNANVEERRLYQMDVNSAFLIGPIKEEVYGEQPPLVSRMNGNPDH

SEQ ID NO: 64468 - protein, 494 aa, Zea mays
  Coding DNA Sequence Number=SeqID_22689
  Gene Ontology: Mol. function=protein serine/threonine kinase activity; Cellular component=membrane; Biological process=protein amino acid phosphorylation
  Homolog annotation: Hit_ID=Q6Z5A3; Match level="QueryCoverage=92%, HitCoverage=77%, E-value=1e-129, Identity=51%"; Hit description =Putative serine/threonine kinase-related protein
  Pfam annotation: Domain name=DUF26; Domain location=210-265; Score =27.8; E_value=1.9e-06; Accession=PF01657.8; Description=Domain of unknown function DUF26
  Pfam annotation: Domain name=DUF26; Domain location=86-140; Score =46.7; E_value=7.7e-11; Accession=PF01657.8; Description=Domain of unknown function DUF26
  Pfam annotation: Domain name=Pkinase; Domain location=370-490; Score=- 62.0; E_value=7.2e-05; Accession=PF00069.15; Description=Protein kinase domain
  Pfam annotation: Domain name=Pkinase_Tyr; Domain location=370-494; Score=-92.3; E_value=8.4e-07; Accession=PF07714.7; Description =Protein tyrosine kinase
  Pfam module annotation: Pfam domain module=DUF26::DUF26::Pkinase::Pkin ase_Tyr; Domain location=210-265::86-140::370-490::370-494
MHGRALLAAAAAALLASAVTLTLLPSAAAQPWVGPWPTCDDTTGNYSAGSAYAKNIKQLILSLQANASNTPALFATGSAGAGADAVYGLILCRGDLSPTDCFDCGTNAGQDVYRVCNGTRDAALVYNQCYVRLAPTDFLATTNNTGMRDLINGNSVPAGVNVTAYDGAITRLLNATARYAVDSSAPSLSPRKYFATGQMAGVDPRFPTGIWSMAQCAGDISPVQCRSCLDDLLAQWWQKFDSKEIGARLDGSRCNLRFETGNFYTGSPMVKLQMNGEEAAPAPVPSTDVLPGTTGGKKNSVGKLLGIILPIVFVAAIAAIALCIWIVRKKRTYQGTNLPQTDTTYMAEDIESIKSILLSLPSLQAATNNFDESNKLGEGGFGTVYKGNLSGQEVAVKRLPKGLDQGLEELKNELDHEKKRQLDWRKRFNIIEGVARGLQYLHEDSQNKIVHRDLKASNILLDSNMNPKIGDFGLARLFLQDQTRGITNHIVGTL

SEQ ID NO: 64469 - protein, 472 aa, Zea mays
  Coding DNA Sequence Number=SeqID_22690
  Gene Ontology: Mol. function=protein serine/threonine kinase activity; Cellular component=mitochondrion; Biological process =protein amino acid phosphorylation
  Homolog annotation: Hit_ID=Q6Z5A3; Match level="QueryCoverage=94%, HitCoverage=78%, E-value=1e-119, Identity=49%"; Hit description =Putative serine/threonine kinase-related protein
  Pfam annotation: Domain name=DUF26; Domain location=77-134; Score =24.5; E_value=5.1e-06; Accession=PF01657.8; Description=Domain of unknown function DUF26
  Pfam annotation: Domain name=Pkinase; Domain location=333-472; Score=- 34.9; E_value=1.8e-06; Accession=PF00069.15; Description=Protein kinase domain
  Pfam annotation: Domain name=Pkinase_Tyr; Domain location=333-472; Score=-46.6; E_value=1.3e-09; Accession=PF07714.7; Description =Protein tyrosine kinase
  Pfam module annotation: Pfam domain module=DUF26::Pkinase::Pkinase _Tyr; Domain location=77-134::333-472::333-472
MHGRVTVLLVVAAAVLLLASSAVAQPWPSCNGASGNYLAGSAYANNTLQLILGLQTNASDSPAYFASGSVGAGAAAVHGLMICRGDVSSNDCFDCGTRAWQDVQAVQPLCNRTRDAALADNQCYVRVAATDFLASPNNTGLVSVVGGASIPSGVDVAAYDAALRRLLNATARYAVDSSVPSSPPRLYFATGQFVGLDPRVPNIWSLAQCAGDLAPAQCRRCLDDLMTLWWNGSGFKPDGESAMFAGSRCNLKSDLGDKFYTSSPMVKLQMNSEVVVPAQAPSMAVTAIVLFVCKKRRYRGIKLPHGTHMAEDFESIKSTLLSLSSLQVATSNFDENNKLGEGGFGVVYKGDLSGQQVAVKRLSKGSGQGLEELKNELVLVAKLHHKNLVRLEDPEEKIRLDWRKRFNIIGGVARGLQYLHEESQKKIIHRDMKASNVLLDEDMNPKIGDFGLARLFGQDQTRDVTKHIVGTL

SEQ ID NO: 64470 - protein, 135 aa, Zea mays
  Coding DNA Sequence Number=SeqID_22691
MAEVKLDGIGVASGVTRCVCMAGLGSAGRKAIKIPPSEEGGTDGSRGEDGRGQSGRAGLVEDGRAGQMEISHFSGELLWSLGARILQAGGWRKASGTATSTMRLLKAEKEEEPLLRLGRGPSAPFVRWFVIVFGA

SEQ ID NO: 64471 - protein, 71 aa, Zea mays
  Coding DNA Sequence Number=SeqID_22692
MAQRVVFLTTDLDLASWEGPRRGGEILGVSSPLRAPLAARAGKPRGVCTQGDKYLAPRFPGQECSSGAALS

SEQ ID NO: 64472 - protein, 195 aa, Zea mays
  Coding DNA Sequence Number=SeqID_22693
  Gene Ontology: Mol. function=intramolecular transferase activity, phosphotransferases; Biological process=carbohydrate metabolic process
  Homolog annotation: Hit_ID=Q7XHZ2; Match level="QueryCoverage=92%, HitCoverage=33%, E-value=7e-80, Identity=85%"; Hit description =Putative phosphoglucomutase, chloroplast
  Pfam annotation: Domain name=PGM_PMM_III; Domain location=37-153; Score=3.6; E_value=0.02; Accession=PF02880.6; Description =Phosphoglucomutasephosphomannomutase, alphabetaalpha domain III
MKFITQAVLDNKADLGIIFDTDVDRSAAVDSRGRELNRNRLIALMAAIVLEEHPGTTVVTDSVTSDGLTVFIENKLGGKHHRFKRGYKNVIDEAIRLNSIGEESHLAMETSGHGALKENHWLDDGAYLMVKLLNKLAAARTLGSSIGSKVLTDLVEGLEEADVTVEIRLKIDQNHADLKGGYANSEMFFGYFTRR

SEQ ID NO: 64473 - protein, 82 aa, Zea mays
  Coding DNA Sequence Number=SeqID_22694
  Subcellular localization annotation: CTP_CleavageSite=46; ConfidenceScore=5.04e-01
MDLTLPCILNTVALNLVQKKLKVYSRRKTMTGHMHDNQSGSATRVVGALESSQLAPGAATPILALPEPGPRPLILASDDVPK

SEQ ID NO: 64474 - protein, 148 aa, Zea mays
  Coding DNA Sequence Number=SeqID_22695
  Subcellular localization annotation: CTP_CleavageSite=90; ConfidenceScore=5.69e-01
MTHPLFTPTLQSFSCHLKFLIKGQERRTVSLNRVPSRHSSSSSAPPTQPTTTTTTPAPLNRQPPQPTSAAALVPRPPTSPPPADATSVPSAMSAPTIADLAKMIEALANTVMNLQTIVVALQKEKSSSSSTTGGGINGQHHNDRPPQF

SEQ ID NO: 64475 - protein, 63 aa, Zea mays
  Coding DNA Sequence Number=SeqID_22696
MELLFVVDGCLYAAASVRVSSLLIELHPWIIMRLLNLSLKPWGRVGAAGRPSLIARPPFTRTP

SEQ ID NO: 64476 - protein, 70 aa, Zea mays
  Coding DNA Sequence Number=SeqID_22697
MELLFVMDGCLYTAASVRVSSLLIELHPWIVMRLLNLSLKPWGRVGAAGLGKRELRVMWERSAGRRIVIL

SEQ ID NO: 64477 - protein, 79 aa, Zea mays
  Coding DNA Sequence Number=SeqID_22698
MAIWPRLLLCEDWASGEPKLCADGGYQLRLGVLGVPLIMVPDTNNDWIMIESKLKDCLNSDLGQSDNSTLGSFYSKFFM

SEQ ID NO: 64478 - protein, 141 aa, Zea mays
  Coding DNA Sequence Number=SeqID_22699
MAVPYRWSGSVLTEWWQSTGGERGRGELTGDEDDGGAGSIELGEGGRGGRGRAEELGSLGWSFYRRPGRGRKGGWRAPATLTAAAMMAHSGGDGIARAYGVTGWLGQAQGDRDARRQTLLASALMARRRGGWWPVVIVPIA

SEQ ID NO: 64479 - protein, 131 aa, Zea mays
  Coding DNA Sequence Number=SeqID_22700
  Gene Ontology: Mol. function=RNA-directed DNA polymerase activity; Biological process=RNA-dependent DNA replication
  Homolog annotation: Hit_ID=UPI00004C1732; Match level="QueryCoverage =99%, HitCoverage=9%, E-value=7e-49, Identity=65%"; Hit description =UPI00004C1732 related cluster
MAVPNYTYIKLKVPGPNGVITVGPMYRHAYECDVECVDYAEALAESEALIADLESLSKEAPDAKRHTSNFEPAETVNPSDMPGIPRDVAEHSLDIRAGSRPVKQPLCRFDEEKRRAIGEEIHKLMATGFIK

SEQ ID NO: 64480 - protein, 79 aa, Zea mays
  Coding DNA Sequence Number=SeqID_22701
MESHDLPAEWESRLVGKVHNLCRVFETDISAVLAVMSGGYEIDDSGYDYDAGCQHCNHCSVEDEAMEGDFQEFQDYDEF

SEQ ID NO: 64481 - protein, 84 aa, Zea mays
  Coding DNA Sequence Number=SeqID_22702
MEKGGETVEGNAANLLELSNGGDEQRTARRKVDGSTASASRRPRRWQRASAAPIGVIRRGRLQRNGGDLVAGQNGSLARGPTQL

SEQ ID NO: 64482 - protein, 68 aa, Zea mays
  Coding DNA Sequence Number=SeqID_22703
MDVDIEMVVDEDHDEVQNDNDLVILEGNDINDELAPSDGCWTNMVGGWLRRRGRRSRTADEAEQDEAQ

SEQ ID NO: 64483 - protein, 104 aa, Zea mays
  Coding DNA Sequence Number=SeqID_22704
MAARMAGKHGLDGRKGRGPGSYGGGGAMMAARMAEGSRFMGESRTKGGRGHGARARTGTYPRASGRAERGMQIGRHRRARWTGAGARGGAGARAPSMEGGAKVG

SEQ ID NO: 64484 - protein, 530 aa, Zea mays
  Coding DNA Sequence Number=SeqID_22705
  Gene Ontology: Mol. function=dihydrolipoyllysine-residue acetyltransferase activity; Cellular component=pyruvate dehydrogenase complex; Biological process=metabolic process
  Homolog annotation: Hit_ID=Q9SWR9; Match level="QueryCoverage=96%, HitCoverage=92%, E-value=0.0, Identity=91%"; Hit description =Dihydrolipoamide S-acetyltransferase
  Pfam annotation: Domain name=2-oxoacid_dh; Domain location=297-530; Score=413.3; E_value=3.4e-121; Accession=PF00198.13; Description=2 -oxoacid dehydrogenases acyltransferase (catalytic domain)
  Pfam annotation: Domain name=Biotin_lipoyl; Domain location=105-179; Score=78.1; E_value=2.7e-20; Accession=PF00364.12; Description =Biotin-requiring enzyme
  Pfam annotation: Domain name=E3_binding; Domain location=245-281; Score=76.5; E_value=8.6e-20; Accession=PF02817.7; Description=e3 binding domain
  Pfam module annotation: Pfam domain module=2-oxoacid_dh::Biotin _lipoyl::E3_binding; Domain location=297-530::105-179::245-281
  Subcellular localization annotation: CTP_CleavageSite=70; ConfidenceScore=5.27e-01
MPFIVAIENVMPLVMSGIGKRTRGTRFSQHNQPAKQLETFSAGVNGSCTWRIASNSLTPSAASWLSGSFSCGQVVSARPFSSSAAWFYAFCNNISHTVPDLPPHQEIGMPSLSPTMTEGNIAKWLKKEGDKVSPGEVLCEVETDKATVEMECMEEGYLAKIIHGDGAKEIKVGEVIAITVEEEGDIEKLKDYKPSSSAEPVAPAEPKAEPEPSQPKAEEKKPTQAPEAKTPKIEEASQSGDRIFASPLARKLAEDNNVPLSSVKGTGPDGRILKADIEDYLASVAKGGLRESFADPGLGYVDIPNAQIRKVTANRLLASKQTIPHYYLTVDARVDKLVQLRGELNPLQDASGGKKISINDLVIKAAALALRKVPQCNSSWMNDFIRQYHNVNINVAVQTEHGLFVPVIRDADKKGLGAIAEEVKQLAQKARDNSLKPADYEGGTFTVSNLGGPFGIKQFCAIINPPQSAILAIGSAEKRVIPGSADGQFEFGSFMSATLSCDHRVIDGAIGAEFLKAFKGYIENPTSMLL

SEQ ID NO: 64485 - protein, 59 aa, Zea mays
  Coding DNA Sequence Number=SeqID_22706
MTQTIEGQKFRSFVNGIFGIMFKQLQLKLFLFAGPSATKHGPNSSPFTVLDRFSYELDP

SEQ ID NO: 64486 - protein, 175 aa, Zea mays
  Coding DNA Sequence Number=SeqID_22707
MSAGRPGTGGTPDAVAHVLHPPLGTDTAAPPACRSPARGFDRGDPLSLTARIHPSATASASPEVTDTRDHVVRAASSPTASPCMAEREDLAKSVEAPQPRRAHIVPRPPVSPTPPLILALAAATNPTEKPPPCPLGEKPPPVKLITARCLSSVLGQEDRLHMGKPFVPSIRVEHR

SEQ ID NO: 64487 - protein, 579 aa, Zea mays
  Coding DNA Sequence Number=SeqID_22708
  Gene Ontology: Mol. function=sequence-specific DNA binding; Cellular component=nucleus; Biological process=regulation of transcription, DNA-dependent
  Homolog annotation: Hit_ID=Q4R0U0; Match level="QueryCoverage=93%, HitCoverage=77%, E-value=1e-141, Identity=95%"; Hit description =Homeobox protein OCL1
  Pfam annotation: Domain name=START; Domain location=132-327; Score =70.5; E_value=5.4e-18; Accession=PF01852.10; Description=START domain
MAIREAMRSPMCGSCGSPAMLGEVSLEEQHLCIENARLKDELNRVYALATKFLGKPMPVLSGPMLQPNLSLPMPSSSLELAVGGLRGLGSIPSLDEFAGGVSSPLGTVITPARATGSAPPPMVGVDRSMLLELAISAMDELVKLAQVDEPLWLPSLSGSPDKKLLNFEEYAHSFSPSVGAVKPVGYVSEASRESGLVIIDNSLALVETLMDVRRWSDMFSCMIAKATVLEEVTSGIAGSRNGALLLMKAELQVLSPLVPIREVTFLRFCKQLAEGGGLQCCSASANAWPILMSPDTVSANDSSVITQEGKRSMLKLARRMTENFCAGVSASSAREWSKLDGAAGSIGEDVRVMARKSVDEPGEPPGVVLSAATSVWVPVAPEKLFNFLRDEQLRAEWDILSNGGPMQEMANIAKGQEHGNSVSLLRASAMSANQSSMLILQETCTDASGSMVVYAPVDIPAMQLVMNGGDSTYVALLPSGFAILPDGPSSVGAEHKTGGSLLTVAFQILVNSQPTAKLTVESVETVNNLIFCTIKKIKTALHLDGSLARSNGGGSGIDSVSVICFFSMDHGNLLSDTGS

SEQ ID NO: 64488 - protein, 72 aa, Zea mays
  Coding DNA Sequence Number=SeqID_22709
  Gene Ontology: Mol. function=3-deoxy-7-phosphoheptulonate synthase activity; Cellular component=chloroplast; Biological process =aromatic amino acid family biosynthetic process
  Homolog annotation: Hit_ID=Q75W16; Match level="QueryCoverage=97%, HitCoverage=13%, E-value=1e-19, Identity=64%"; Hit description =Phospho-2-dehydro-3-deoxyheptonate aldolase 2, chloroplast precursor
VRDDVNLPSYQSENINDKTFDEKSHVLDPYKMLYEYAQSTVTLNLLYAFSTGGYANIQRVTQWKLDVTEHSK

SEQ ID NO: 64489 - protein, 95 aa, Zea mays
  Coding DNA Sequence Number=SeqID_22710
  Gene Ontology: Mol. function=3-deoxy-7-phosphoheptulonate synthase activity; Cellular component=chloroplast; Biological process =aromatic amino acid family biosynthetic process
  Homolog annotation: Hit_ID=Q75LR2; Match level="QueryCoverage=69%, HitCoverage=11%, E-value=2e-12, Identity=60%"; Hit description =Phospho-2-dehydro-3-deoxyheptonate aldolase 1, chloroplast precursor
MAAALLRGYRGDESMVEGLRCYGDMYLYRWGDGWLHDISNQRMKKALQVSKYPNPTELETTLKTIQAFSLIVFAREARHLEECLVDVVVGRAFLL

SEQ ID NO: 64490 - protein, 135 aa, Zea mays
  Coding DNA Sequence Number=SeqID_22711
MTRMREASRRRWETSAEICHRRPVAATSFGVREGAQSIARVRGSPRSLHMWRLTGSRGIAHHRMKEGVGPAFQLADFHHCLDMITGNLIPIEFAPFSLHQVLSRADYCYRSGATTVVWCQGGEETSLIVDPGIDE

SEQ ID NO: 64491 - protein, 107 aa, Zea mays
  Coding DNA Sequence Number=SeqID_22712
  Subcellular localization annotation: CTP_CleavageSite=26; ConfidenceScore=5.35e-01
MTVSTRHSFKCRVSLAKTIGSKASIVLSVVSSYVRFGYSSNCNTYFILKKTINQEVATGRRWQLSAEVSHLAEKPPAFSSFSEWSVFSWRQLAASVSCERKRNPTVS

SEQ ID NO: 64492 - protein, 144 aa, Zea mays
  Coding DNA Sequence Number=SeqID_22713
MAWCRGEHSATSGNDQLYGCAPCGSWQANNNKRAHGMADRRGSCVVMTRFWWQGGRAAQLGLGKRWHNRGEGGGEVVVLVTRVARWRCVGDMKSDAGIGGSARCIVKYGMKKALQLPDYLKPTELKMMLNTIKVFLPIVFVREA

SEQ ID NO: 64493 - protein, 64 aa, Zea mays
  Coding DNA Sequence Number=SeqID_22714
MAAEDTKMCVGDSVFSTDKQQNGGFEGLELEEAHLDRLHIQAKNANIEDGSYQKTLAKTRCTCY

SEQ ID NO: 64494 - protein, 74 aa, Zea mays
  Coding DNA Sequence Number=SeqID_22715
  Homolog annotation: Hit_ID=Q00218; Match level="QueryCoverage=54%, HitCoverage=7%, E-value=3e-07, Identity=62%"; Hit description =Phospho-2-dehydro-3-deoxyheptonate aldolase 2, chloroplast precursor
MVKEYTQFTVMLNLLYAFSTGGYSNIQRVTQWKLDVTEHSNNNGNKTLSMGLLSKTDPTKEKTLKGMLDLKGFK

SEQ ID NO: 64495 - protein, 93 aa, Zea mays
  Coding DNA Sequence Number=SeqID_22716
MTGDGAFEGRPLAAVMAPSFTQPHTQSLRGTSGASRGARYHAGQRWTDGDIDFCGMGTGGDRCSVTARAYLKSGVSLSLLWWPHTCRGPSCSR

SEQ ID NO: 64496 - protein, 311 aa, Zea mays
  Coding DNA Sequence Number=SeqID_22717
  Homolog annotation: Hit_ID=Q7XFV9; Match level="QueryCoverage=16%, HitCoverage=10%, E-value=1e-15, Identity=72%"; Hit description=HAT family dimerisation domain containing protein, expressed
MPYENLEILCLAYLHRDQSLVFGHMIAWLTVNAEMCSKNRGKGSPPRHPAAATAVAQPLEQATRPAAATAAAQPRAGKQAVQLRPAARAASRPPSSGQPHEQPAARLVHSRQHRQAAEQLLLIRRQVQCARALSAAAACRPRPSSLGTGSSSMVSDWDSDSDCEVRMIDYPRERRAGAATQAEKGKAMVDAGTSSSVAGVMVMDRYGKPVKLNGPIDVTWSHGHISGSVEACRKVPNHVKDLMSQKVTDGRIRRAHESKLGYLEEKRLKIQHLMAAQVQLIGGINMVETIQNYKSFHVVLFLNACPLVVVN

SEQ ID NO: 64497 - protein, 219 aa, Zea mays
  Coding DNA Sequence Number=SeqID_22718
  Pfam annotation: Domain name=zf-CCHC; Domain location=186-203; Score =13.3; E_value=0.0063; Accession=PF00098.13; Description=Zinc knuckle
  Subcellular localization annotation: CTP_CleavageSite=31; ConfidenceScore=5.04e-01
MSGNRSQGPFHGGNRQVFGGPSALVGNNPIYAGFGSNTGPHRLGAPHGQVFGVVPAATRGHDAMDFGRSSQGQRARGSRSAIANRWPRPYDRQQQRPFSRQPQQVQPAITPSPSFGGGLPSSAQPARAQVPADSVGGMPRLKHVQSAEVKHGFPATGKSLSSGIMATAESGETLVHQAEVAKDKGKWCSRCRSKGHVSAECSTVLFCDICEGSDHVAAS

SEQ ID NO: 64498 - protein, 85 aa, Zea mays
  Coding DNA Sequence Number=SeqID_22719
MVIISQKAWEIAHALHAWRSLFEFPCSTIRFPTRCRCMKRNEGKPSPGYLHPLQATNIRDTELFGVHVYGTDLDVEILNAKIAAT

SEQ ID NO: 64499 - protein, 209 aa, Zea mays
  Coding DNA Sequence Number=SeqID_22720
  Gene Ontology: Mol. function=zinc ion binding; Cellular component =integral to membrane; Biological process=ubiquitin cycle
  Homolog annotation: Hit_ID=O82353; Match level="QueryCoverage=49%, HitCoverage=48%, E-value=4e-19, Identity=45%"; Hit description=RING -H2 finger protein ATL2M
  Pfam annotation: Domain name=PHD; Domain location=132-177; Score=4.5; E_value=0.02; Accession=PF00628.19; Description=PHD-finger
  Pfam annotation: Domain name=zf-C3HC4; Domain location=133-174; Score= 41.1; E_value=3.7e-09; Accession=PF00097.15; Description=Zinc finger, C3HC4 type (RING finger)
  Pfam module annotation: Pfam domain module=PHD::zf-C3HC4; Domain location=132-177::133-174
MERSTVRSGRPSVSSTTARPQLSNLGLGYSIAIALGFLILFASFLLAFYFCFGRGGDYWAGEAVTTASSSGHLSITVPRVLFVAEGSESPEDDAYPSSSAAAACSPVGLDAAAIASYPKVAFSSKAAEADAMCSICLSEYRDGETLRVMPECRHGFHVACLDAWLSRSASCPVCRSSQGLVERMFSDKKALIREASNVQVILFQGNICR

SEQ ID NO: 64500 - protein, 166 aa, Zea mays
  Coding DNA Sequence Number=SeqID_22721
MAIPDLDMPLETCCVNRGIESRICRGATGFYYVVGRLRLRELTIREFLRYLTNWKKYIWLNMIDEYDLYEVLDIYLLHGIYTMLTRSMQLLLAMGVTYNQQRTSIYLVNIEGLKDRVLRAYMLSSVHDNPLHTEVGGRSLPITAQVVYLITGLKRGNRKFPQDDQC

SEQ ID NO: 64501 - protein, 87 aa, Zea mays
  Coding DNA Sequence Number=SeqID_22722
MARSLMTIGCDCDAMPLWHLPGPTWPHAPYNKLRRCRRFDAFQSGCIALSIVKQGSLMVVTNVSDSRVVLGTAFDDSAIMSSNSSST

SEQ ID NO: 64502 - protein, 91 aa, Zea mays
  Coding DNA Sequence Number=SeqID_22723
  Homolog annotation: Hit_ID=Q5VRR4; Match level="QueryCoverage=46%, HitCoverage=5%, E-value=3e-10, Identity=69%"; Hit description =Putative far-red impaired response protein
MQYAYNLIIKSQEREESRKIFWDSVETGEKALEVLFEMRNMRTQAAKDADKNVKKKKKHQKEQTQVCAGEDLGWARCSYYLQETDKRERLQ

SEQ ID NO: 64503 - protein, 200 aa, Zea mays
  Coding DNA Sequence Number=SeqID_22724
MDGGGETLLVRRSKGKKRRQPAAPAERGSGSGDRFRALWRDYHDLLQETEAKKRRLASKKRRSLALLAEVKFLRRKYQSFPKGGSQQTHYRLKKQARYMPSPLGHGAGTEVPSTSRNPNLDLNQDSVLLKGPSCLQNDVGNDCQGQHGHPEVEKLDQVEVNEDTMTPDVKLSVCRDTGEYSPVSEGKRAVPWQDRFALKT

SEQ ID NO: 64504 - protein, 175 aa, Zea mays
  Coding DNA Sequence Number=SeqID_22725
MADTCIQLPSWPNHAEERATDGNNVRLHHTCSEVVAKLATDMNQIHDQVGFRRGNSAITEPGWEHPGQKNPATVGVRVAYGAVLLRFERGDRFPQVSQNVVVAATLLDKLFEAETLSKWRMHQDTRGLFSLTVQQQAKSSVSRRQELGANQCIVSTTMGNNALLGQPSNLKESMT

SEQ ID NO: 64505 - protein, 166 aa, Zea mays
  Coding DNA Sequence Number=SeqID_22726
  Subcellular localization annotation: CTP_CleavageSite=25; ConfidenceScore=5.38e-01
MQVAVRPLAPSAVGGGGAFSAGLVRSVREWRGRTHRRVISFSSAGQGGEEAARRETPEETRKRLEELDALLEGLVEPKMRPPTPPPPPDPYLDRATMITGRGSSADELPEFSPTYVAFSTLGLVILTIFTNVMFNLYIKPSVDGVDPPPERIQRTALVNPADRPSE

SEQ ID NO: 64506 - protein, 203 aa, Zea mays
  Coding DNA Sequence Number=SeqID_22727
  Homolog annotation: Hit_ID=Q7XII4; Match level="QueryCoverage=57%, HitCoverage=54%, E-value=7e-11, Identity=37%"; Hit description =Remorin-like protein
  Pfam annotation: Domain name=Remorin_C; Domain location=85-201; Score= 11.5; E_value=0.00022; Accession=PF03763.4; Description=Remorin, C -terminal region
MLSEQTAASTSSGEHQERSVVEDRRLQPVGENEEAEFRDIHALSPPPSQPSSYRRSRHASVGSDTASSEPFPTMSREFSAMVAAAAAIANGAAADRLGEAEDEETNPLAIVPDSNPIPSPRRARGPPTPGAGAAHAQRRRKLEEKRAKAMEKAQNEVARARHKAEAKRASAEAKRGTKVARVLELANFMRAVGRAPSAKRSFF

SEQ ID NO: 64507 - protein, 122 aa, Zea mays
  Coding DNA Sequence Number=SeqID_22728
MWRQNAVRICCQSKAVDHINAPTPARAAEARTLKARQKEWGRVERQFGHQPFSEQKIPIPGFQLPRPLNFNCGPSWSLDRDHPQDPHRSARLGGSLKPELASLQRGARRVEAPHTTHHRPQV

SEQ ID NO: 64508 - protein, 154 aa, Zea mays
  Coding DNA Sequence Number=SeqID_22729
  Subcellular localization annotation: CTP_CleavageSite=54; ConfidenceScore=5.05e-01
MSRAFDDYYIEDCGILASEVTQRRIDNKYGSSFSSRAGSLTNRAGSLTNRARMSAQLVTKFKRADPSRAELTTKREQHSVIQYLEGRIAHHEEEINEPRDGRWVLRWMTGGATGAEDDGQKKQLQVEAGLSESKLVLLHVPPFLPAPGPELLIV

SEQ ID NO: 64509 - protein, 446 aa, Zea mays
  Coding DNA Sequence Number=SeqID_22730
  Gene Ontology: Mol. function=RNA-directed DNA polymerase activity; Cellular component=intracellular; Biological process=RNA-dependent DNA replication
  Homolog annotation: Hit_ID=UPI00004C1733; Match level="QueryCoverage =99%, HitCoverage=32%, E-value=0.0, Identity=91%"; Hit description =UPI00004C1733 related cluster
  Pfam annotation: Domain name=RVT_1; Domain location=56-225; Score =144.0; E_value=4.1e-40; Accession=PF00078.17; Description=Reverse transcriptase (RNA-dependent
MPGIPRDVAEHSLDIRAAARPVKQPLRRFDEEKRRAIGEEIHKLMAAGFIKEVFHLEWLANPVLVRKKGGKWRMCVDYTGLNKACPKVPYPLPRIDQIVDSTAGCETLSFLDAYSGYHQIRMKESDQLATSFITPFGMYCYVIVPFGLRNAGATYQQCMNHVFGEHIGHTVEAYVDDIVVKTRKASDLLSDLEVTFQCLKAKGVKLNPEKCVFGVPRGMLLGFIVSERGIEANPEKITAITSMGPIQDLKGVQRVMGCLAALSRFISRLGKRGLPLYRLLRKAERFTWTPEAEEALGNLKALLTKAPILVPPAAEEALLVYVAATTQVVSAAIVVERQEEGHALPIQRPVYFISEVLSETKIRYPQVQKLLYAVILTRRKLRHYFESHPVTVVSSFPLGEIIHSREASGRIAKWAVEIMGETISFAPWKAIKSQVLADFLAEWADT

SEQ ID NO: 64510 - protein, 114 aa, Zea mays
  Coding DNA Sequence Number=SeqID_22731
MGVPRGVLRSIERTGLGGSNESGISSDEADSSDSSEEWSGDNGDGEGDGSDNDSGDGSSDDSGEGDSGDGGNGSGDGSDGSKGDGGDGSSDSDSGDGDGSGKGDGKASDIMPLV

SEQ ID NO: 64511 - protein, 696 aa, Zea mays
  Coding DNA Sequence Number=SeqID_22732
  Gene Ontology: Mol. function=protein serine/threonine kinase activity; Cellular component=cell surface; Biological process =protein amino acid phosphorylation
  Homolog annotation: Hit_ID=Q7XIH7; Match level="QueryCoverage=99%, HitCoverage=100%, E-value=0.0, Identity=71%"; Hit description =Putative lectin-like protein kinase
  Pfam annotation: Domain name=Lectin_legB; Domain location=26-265; Score=231.9; E_value=1.4e-66; Accession=PF00139.10; Description =Legume lectin domain
  Pfam annotation: Domain name=Pkinase; Domain location=351-620; Score =171.9; E_value=1.6e-48; Accession=PF00069.15; Description=Protein kinase domain
  Pfam annotation: Domain name=Pkinase_Tyr; Domain location=351-620; Score=112.7; E_value=1e-30; Accession=PF07714.7; Description=Protein tyrosine kinase
  Pfam module annotation: Pfam domain module=Lectin_legB::Pkinase::Pkina se_Tyr; Domain location=26-265::351-620::351-620
MRSRSTTTWFLALLHLIVFCNITGVSSLSFKLNFTESNSNGAATIQLQEDAFYNKAVRLTKEELDGQIAHSVGRAVLADPVTLWDSSTGELADFTTRFTFMIKARVADGSYGEGLAFFLSPYPSVVPKNSEDGNLGLFGSSSADQSSETSNQIVAVEFDSHKNPWDPDDNHVGINIHSIVSVDNVTWRSSIKDGKMANAWVTYQASSRNLSVFLTYKDSPQFSGNSSLSYSVDLRRYLPEKVAIGFSAATGQLVEAHQILYWEFSCTDVRVVKSKKAKSLLVISLTTSVSGIVCSMGLVWCFMSLKTKHTRRARKDQGKQEYDESIDGEFEKGRGPRRFRYDELVSATKNFALERKLGEGGFGAVYKGSLKDPNLTVAIKRVAKGSTQGKKEYISEVKIISRLRHRNLVQLVGWCHERGEFLLVYEFMPNRSLNTHLYDSSNLLAWPLRFKITVGVASALLYLHEEWEQCVVHRDVKPSNVMLDSSFNAKLGDFGLARLVDHDRGSQTTVIAGTMGYLAPECVTTGKASKESDVYSLGVLALEVACGRRPVVLKEDDDKINLVEWVWRLYGRNEILTAVDGRLDGALDEREAVRLMVVGLWCAHPDYSLRPCVRQVISVLKFEAPLPSLPPTMPVAVYFAPPIHLCRFSYTSSDDGTLMKELEGSGVYAKTTTTISSSATNASSSPPSVRLPQMGY

SEQ ID NO: 64512 - protein, 58 aa, Zea mays
  Coding DNA Sequence Number=SeqID_22733
MAELTNRDDSGGLRRGQGGETGRCKDCRRLVGTIVVTRAGKRKENYGKERVTPEFSGY

SEQ ID NO: 64513 - protein, 116 aa, Zea mays
  Coding DNA Sequence Number=SeqID_22734
MALSGEDCIRDGRNSSRELDFAVVAHILPGTVSALINSGEASSIRDDGHSALRGTGALFDNGLDRVDRRRVLSAINAETVRPRGLTSGSAHWLMSWATNHVAASGLRLSGERKRTG

SEQ ID NO: 64514 - protein, 151 aa, Zea mays
  Coding DNA Sequence Number=SeqID_22735
SCSTAPSASTPDRLERVRGLTLADGALGRCTTFEALSGLVWRLWRLRRASGAAAARCAGGVTDAGGSADAGGGADAGGGADVGVRAAARTSTRDVGALCGRRRRTGGGGAVGVRARGCAGVCALCASVRGVTDDVREIELFPTAKVVGRRK

SEQ ID NO: 64515 - protein, 302 aa, Zea mays
  Coding DNA Sequence Number=SeqID_22736
MDVGGAAPAHSGLVAGVGAGADSRGFKVTGVGQDRREGPGIRRDPYYYIKESLEGSFLPHFISYSLKPSKTTPTSLASSKGSMGDNNKKKEEEDDNDDEDDDDDDVEGGDEDDKEEGGSDDDGDNDGDDKGNGGGSDDDEESRESYDIFRVAQEAAKAELLWAQLAESDALEAELEKLCCRLGQISNYVEDHGSSLVEPLYNVLSCIPDIIDFVIHRGAAVVLLIGEFRSGCGLRDVVGPLSSLSDKGLEDVLEGYDEAVGRVAAHSTDLRGMVSERPPKGPRGGNRHLRLLDIPDRVLEAM

SEQ ID NO: 64516 - protein, 143 aa, Zea mays
  Coding DNA Sequence Number=SeqID_22737
  Homolog annotation: Hit_ID=Q6QP51; Match level="QueryCoverage=34%, HitCoverage=31%, E-value=1e-13, Identity=58%"; Hit description =Putative growth-regulating factor 1
MSRLLDCGTSAATRGGLAHDPTVPIWCSGHGSVSRGGTKKGDILKGILPREGNGPPSPPTDQGFEGWPLGRAGPSKGFDSRPRTHRVRDDPGYVRYMAEARATLPRGSGAALAPGYGQTVDSVNEPALKTQNLIVHPGYGQAA

SEQ ID NO: 64517 - protein, 201 aa, Zea mays
  Coding DNA Sequence Number=SeqID_22738
MSSGDGIRTARRGRSSRGAAWMGGHQWGRESNGGRSNGYFEAPLTKEKRTVTARAARSIFGARLLSRGVFSRHRAFGVAVLGSWSGAESWQGQRSRRAASDGSSAWAARRALGSSRRPGTVARSDPGLPGGAGLGREEGRARVPGALGLSAGRRGTAHGPGYWAGIEACWRGASGGIGHVQGHWSRSRWFLARVAASASVG

SEQ ID NO: 64518 - protein, 139 aa, Zea mays
  Coding DNA Sequence Number=SeqID_22739
  Homolog annotation: Hit_ID=Q10A56; Match level="QueryCoverage=33%, HitCoverage=4%, E-value=4e-12, Identity=69%"; Hit description =Glycosyl hydrolase family 38 protein, putative, expressed
  Subcellular localization annotation: CTP_CleavageSite=20; ConfidenceScore=5.10e-01
MAELGSRPHRGLRRPASPIVARGTTSGTQSKRQGFPMVDTRRFLEFNYPEMCAKIITMQSQCSLLNISYCPSTEEAISATKRLLFTNPLGWERSDFIRVPIKDPKKQFLVYGSSRARNMRRRGDSITGGGGSDSSGGGG

SEQ ID NO: 64519 - protein, 96 aa, Zea mays
  Coding DNA Sequence Number=SeqID_22740
  Gene Ontology: Mol. function=GTPase activity; Biological process =immune response
  Homolog annotation: Hit_ID=Q10C30; Match level="QueryCoverage=84%, HitCoverage=10%, E-value=5e-20, Identity=87%"; Hit description =Guanylate-binding family protein, putative, expressed
MGVSLCLQIPDRNVNADIDDNKIFALATVLSSVLIYNLPETIREADISRLSFAVEIAEEFYGSLSFANIFPFCPLACGKLESRGKMFLLSQPNFCG

SEQ ID NO: 64520 - protein, 106 aa, Zea mays
  Coding DNA Sequence Number=SeqID_22741
MERTPPVEVVAKAYDVAYAVVVAVVEARSAVVIAQKEAVAVVQYAAIDSNKVEGVVNSMKNSTFVYANTSDDALDNVDFKYHVSIKNSLVIRYSRDDKTINIVAYH

SEQ ID NO: 64521 - protein, 74 aa, Zea mays
  Coding DNA Sequence Number=SeqID_22742
  Gene Ontology: Mol. function=4 iron, 4 sulfur cluster binding; Cellular component=photosystem I; Biological process=electron transport
  Homolog annotation: Hit_ID=P62090; Match level="QueryCoverage=52%, HitCoverage=48%, E-value=1e-13, Identity=95%"; Hit description =Photosystem I iron-sulfur center
  Pfam annotation: Domain name=Fer4; Domain location=30-50; Score=12.1; E_value=0.0046; Accession=PF00037.17; Description=4Fe-4S binding domain
MSQDGGGCFANTQSLVDEILASYSTVPSRKVWNLRGCTQCVRACPTDVLEMIPWDGCKAQANCFRAENRRLCGL

SEQ ID NO: 64522 - protein, 451 aa, Zea mays; identical to SEQ ID NO: 61609
  Coding DNA Sequence Number=SeqID_22743
  Gene Ontology: Mol. function=pyridoxal phosphate binding; Biological process=amino acid metabolic process
  Homolog annotation: Hit_ID=Q2JIS3; Match level="QueryCoverage=49%, HitCoverage=65%, E-value=7e-70, Identity=54%"; Hit description =Aluminium resistance protein
  Pfam annotation: Domain name=Alum_res; Domain location=68-379; Score =261.6; E_value=1.6e-75; Accession=PF06838.2; Description=Aluminium resistance protein
  Pfam annotation: Domain name=Cys_Met_Meta_PP; Domain location=112 -356; Score=-298.0; E_value=0.09; Accession=PF01053.10; Description =CysMet metabolism PLP-dependent enzyme
  Pfam module annotation: Pfam domain module=Alum_res::Cys_Met_Meta_PP; Domain location=68-379::112-356

SEQ ID NO: 64523 - protein, 221 aa, Zea mays; identical to SEQ ID NO: 59257
  Coding DNA Sequence Number=SeqID_22744
  Homolog annotation: Hit_ID=Q6K990; Match level="QueryCoverage=31%, HitCoverage=7%, E-value=2e-18, Identity=86%"; Hit description =Putative phragmoplast-associated kinesin

SEQ ID NO: 64524 - protein, 348 aa, Zea mays
  Coding DNA Sequence Number=SeqID_22745
  Gene Ontology: Mol. function=protein binding; Cellular component =nucleus; Biological process=mRNA polyadenylation
  Homolog annotation: Hit_ID=Q8LKU8; Match level="QueryCoverage=99%, HitCoverage=100%, E-value=1e-123, Identity=60%"; Hit description =Putative cleavage stimulation factor subunit 1
  Pfam annotation: Domain name=WD40; Domain location=107-145; Score =39.3; E_value=1.3e-08; Accession=PF00400.22; Description=WD domain, G-beta repeat
  Pfam annotation: Domain name=WD40; Domain location=163-213; Score =37.5; E_value=4.5e-08; Accession=PF00400.22; Description=WD domain, G-beta repeat
  Pfam annotation: Domain name=WD40; Domain location=218-257; Score =16.7; E_value=0.086; Accession=PF00400.22; Description=WD domain, G -beta repeat
  Pfam annotation: Domain name=WD40; Domain location=307-345; Score =21.3; E_value=0.0034; Accession=PF00400.22; Description=WD domain, G- beta repeat
  Pfam module annotation: Pfam domain module=WD40::WD40::WD40::WD40; Domain location=107-145::163-213::218-257::307-345
MNEAVQEAKLLRQVNALIVAHLRSQNLGQAAAAVAAATMTPISAAESVPANHLLRLVAKGLAAEHGGGDAASAFDSAGFGVAVQPPGSSAVDFSIQDVKGSSKSFPKHEVKHVSDHKNAARCVKFSPDGKYFATGSADTSIKFFEVAKIKQTMVGDSKDGPARPVVRTFYDHTQAINDLDFHPESPILISAAKDSTISLYVTASKDGSLRIWDGVSAECVRPIIGAHGSSEAISAIFTKDERYVLSCGKDSRVKLWEVGTGRLVKQYAGAIRRQFRCQAVFNETEEFVLSVDEQNNEVVVWDALTAEKVTRLPSGSTGAPRWLDHSPVEPVFVSCGNDRSIKFWKQTV

SEQ ID NO: 64525 - protein, 510 aa, Zea mays
  Coding DNA Sequence Number=SeqID_22746
  Gene Ontology: Mol. function=protein serine/threonine kinase activity; Cellular component=cell cortex; Biological process=protein amino acid phosphorylation
  Homolog annotation: Hit_ID=Q8LKU7; Match level="QueryCoverage=99%, HitCoverage=58%, E-value=0.0, Identity=67%"; Hit description =Putative serine/ threonine kinase
  Pfam annotation: Domain name=Pkinase; Domain location=272-510; Score =208.4; E_value=1.7e-59; Accession=PF00069.15; Description=Protein kinase domain
  Pfam annotation: Domain name=Pkinase_Tyr; Domain location=272-496; Score=97.8; E_value=3.2e-26; Accession=PF07714.7; Description =Protein tyrosine kinase
  Pfam module annotation: Pfam domain module=Pkinase::Pkinase_Tyr; Domain location=272-510::272-496
MAFSPRSPWSRAKKTDVYSTFVVHGDDDEDDARGGRGPSTRAEEDEEEDPSSLPPLLQRLPKDFGGASFDDDEDPYSSDPDDASLSATAAFKSGVPASGRSPFLDLRRSSPRATDDDPYSTFVVHSTTRSGRTSSSPRGSASGTFIRRSGGSSSPRESVSGTFIRRTGSPSSPGKSASGTFIRRPGSPSSPRGSFSGTFIRHTSGGSSSHESASGGGGGFGSSFWTPAVEQSEELRQPSPLMQQQQQQHSRRKPSVSSVPDSVTREDPSTKYELLHELGKGSYGAVYKARDLRTQELVAVKIISLTEGEEGYEDIRGEIEMLQQCSHPNVVRYFGSYQGEEYLWIIMEYCGGGSVADLIGITEEPLDESQIAYICREALKGLAYLHSIFKVHRDIKGGNILLTEQGEVKLGDFGVAAQLTRTMSKRNTFIGTPHWMAPEVIQESRYDGKVDVWALGVSAIEMAEGMPPRSTVHPMRIDRLANGLSSPCLSQVIFMISSEPAPMLEDKEKW

SEQ ID NO: 64526 - protein, 156 aa, Zea mays
  Coding DNA Sequence Number=SeqID_22747
MKLTAAESSLRRHRKLRLARPWASASGEVSVSPDPRARPPPRPRKVVSASPDPGLGLNLDLGRWSPPRLTLGLGLDLDLRGWSPPRPTPGLDLNLDLGGWSPPSPDPQGSTSTPTSEGKSRPHPNPDLGLRRSFPPSPDHGLGPTTPQGGSSLPYP

SEQ ID NO: 64527 - protein, 242 aa, Zea mays
  Coding DNA Sequence Number=SeqID_22748
MVQENLKIAQSRQQSYANTRRRELCFEVGDFVSLKEEATWERQDDLMAKYPELFAARPILALARAPAPLCASYSPFPHTHDLGREKTTLFILSPTLSLPSLGSLVSGCCRSSSPVVISSLSSLPSSFSPARCTHPAVAPTRALPRHGTTPYPAALPGPDPSMCPPWRGGALPQWPPAPAQRAPPSVALPARPARPRATPILAVAYPPSVAPPLHGPCPDDRLPSRCGPTPTQPLPWRPPTLP

SEQ ID NO: 64528 - protein, 67 aa, Zea mays
  Coding DNA Sequence Number=SeqID_22749
MAENLAGAVARDPWQHNRGSTVQVSVKIFHHTYKGVEGLGRLAQVVLMKKLQQQRHEVLGTEWVKVA

SEQ ID NO: 64529 - protein, 148 aa, Zea mays
  Coding DNA Sequence Number=SeqID_22750
MARAGGPRATDGEGRRGARDGEGRRGVRDGEGRWGERDDEGRRGASAAVARRDWDACEKVQVASLRVSACSTPSEQALDSEYAWLRPCAWRAVARDLICEGIEMQGLKCKESEEETVVEEVVTQAENPPAENNFYFAICGVDPEPSAT

SEQ ID NO: 64530 - protein, 548 aa, Zea mays
  Coding DNA Sequence Number=SeqID_22751
  Gene Ontology: Mol. function=N-acetyltransferase activity; Cellular component=Ada2/Gcn5/Ada3 transcription activator complex; Biological process=metabolic process
  Homolog annotation: Hit_ID=Q8VWI2; Match level="QueryCoverage=99%, HitCoverage=100%, E-value=1e-176, Identity=62%"; Hit description =Histone acetyltransferase
  Pfam annotation: Domain name=Acetyltransf_1; Domain location=213-291; Score=54.6; E_value=3.2e-13; Accession=PF00583.14; Description =Acetyltransferase (GNAT) family
  Pfam annotation: Domain name=Bromodomain; Domain location=434-528; Score=107.2; E_value=4.8e-29; Accession=PF00439.15; Description =Bromodomain
  Pfam module annotation: Pfam domain module=Acetyltransf _1::Bromodomain; Domain location=213-291::434-528
  Subcellular localization annotation: CTP_CleavageSite=63; ConfidenceScore=5.33e-01
MDGLVAPSPSHSGATSGGGASHRKRKLPPSSLSDATGDEDDDTTAPSSPSTAPSSPSRPSSPSSSHSDDDDDDSLHTFNAARLDGAPSGGSASGRPPKPDSSSVSAAAAAAAAAVGGGPKPEPGSANAGDGKEDTKGLFTDNLQTSGAYSAREEGLKREEDSGRLKFLCYSNDGVDEHMIWLVGLKNIFARQLPNMPKEYIVRLVMDRTHKSMMVIRNNIVVGGITYRPYASQRFGEIAFCAITADEQVKGYGTRLMNHLKQHARDADGLTHFLTYADNNAVGYFVKQGFTKEITLDKERWQGYIKDYDGGILMECKIDPKLPYVDVATMIRRQRQELIFKRVEILENAQAQYQAPCRAALSYSRAALMHSRRPPVSCPAQPPANRNMESPARKDQGPSGTLLQPLLSPQDRAAAPAQRPKTAPAITQGERSWHSKKTDKARRYPWSQENLNEHPDAWPFKEPVDSRDVPDYYDIIKDPIDLRTMLRRVDSEQYYVTLEMFVADMKRMFSNARTYNSPDTIYYKCATRLENFFSGRITVLLAQLSTKS

SEQ ID NO: 64531 - protein, 146 aa, Zea mays
  Coding DNA Sequence Number=SeqID_22752
MVKEHIFLASLSNLDHDTNDTSSLSNDEFKMQVEDKLNGVFFFIDTACSLYTMALGEDIVGSNDKNIDDNSTSEVSLSTDDLTTEDKLLRLLSHERKEYKCKYKATHRELKSARASIEVYVKTECNECAIHMSNYHIVDQICHPAR

SEQ ID NO: 64532 - protein, 111 aa, Zea mays
  Coding DNA Sequence Number=SeqID_22753
MVGRVDEGKGQEPLISSWMVRIRSWGTPSWQRDMAVDRLSGHFETLRVPQLSIADPTLLVAYRFRADGSDRMSKLLRTQVFSRWRLLSRSSLKVVPAIALCGFGYGDTHYS

SEQ ID NO: 64533 - protein, 490 aa, Zea mays
  Coding DNA Sequence Number=SeqID_22754
  Gene Ontology: Mol. function=magnesium ion binding; Cellular component=chloroplast; Biological process=metabolic process
  Homolog annotation: Hit_ID=Q2NM14; Match level="QueryCoverage=84%, HitCoverage=77%, E-value=6e-83, Identity=38%"; Hit description =Terpene synthase 10
  Pfam annotation: Domain name=Terpene_synth; Domain location=26-166; Score=-14.8; E_value=2.9e-06; Accession=PF01397.11; Description =Terpene synthase, N-terminal domain
  Pfam annotation: Domain name=Terpene_synth_C; Domain location=171 -439; Score=231.6; E_value=1.8e-66; Accession=PF03936.6; Description =Terpene synthase family, metal binding domain
  Pfam module annotation: Pfam domain module=Terpene_synth::Terpene _synth_C; Domain location=26-166::171-439
MATSGPVLLVSQAQQRKSRTYTPSPWGDFFLHHVPCTPSQLLSMKGEGKGQGATSEADHTRNDRLPPTLLHVFEKFRDESGAIVSGDDASCLLMLHDAAHARTHGEEILDGIVAWSKSRLQSLVVQKNLLEPELAEEVRCALETPRFRRVKRVEARRYIPVYEKKSTRDETILEFAKLDYNISQAIYCDELKELTIWWNDFRLHIDLSFARDRMVELHFWMLGVIHDPYCSRIMIVKIFVFISLFDDLMDNYSTTEESNVFTAAMERWDEQMAQQLPAGLKALLVRIFNATNKIEEELKLQGNMHAELIKKMVINSAKFYHAEVKWRDEHFVPTSLEEHLQKSIPTSACMQMANLALVSLGNVTTREDVEWVFTFPKIIRGACIVGRIANDIVSHEREQASSDHVASTVQTCMKQYNVTIKEANEKLRAVIEEAWMDIVQDSLEQERPRALLDIAINVARVADFMYKREDAYTLSFVIKDIIASMYIYSV

SEQ ID NO: 64534 - protein, 92 aa, Zea mays
  Coding DNA Sequence Number=SeqID_22755
MVAELCWGRIRAQEAWQRGSSSELGERARSAGDVGAAISACARAVRVDERLKEGRGTSKRGLRNSDMDAPARNGPGRQQGGPNGQRGRGSAS

SEQ ID NO: 64535 - protein, 114 aa, Zea mays
  Coding DNA Sequence Number=SeqID_22756
MSRDHAKKEMVTGEKPATSHGKAPSGESGNKMKGSPSHNKTERKCALGPFLSILVIMCQHKWFKYETMSNGGRSANRHKVWVHRTVRWCTGQCLVRQAGSGEKAALGISSAAYG

SEQ ID NO: 64536 - protein, 250 aa, Zea mays
  Coding DNA Sequence Number=SeqID_22757
  Gene Ontology: Mol. function=DNA binding; Cellular component=nucleus
  Homolog annotation: Hit_ID=Q67UM4; Match level="QueryCoverage=29%, HitCoverage=21%, E-value=2e-21, Identity=66%"; Hit description=Gt-2 -related-like
MSNAGEARGVGTGRGSRLPRWTRQEILVLVEGKRVVEGSGRGRGRGRCRKRWSNLAGDYKKIREWERGYAARKEASFWDMRNDARRERRLPGFFDREVYDILEGRAGGNAAALEDVDGKEEEAKAVVHAGRAVQRGGLFSSSEDEDDQEEDAATPSPTPAPAAVAVPIPGEQAVAVPSFLEMARASSLSVHANDKDVLWYWDCYLPDKSFAFCLQLQRRRLMCPGKRAPSKSCAALKLYETELSFFMTTD

SEQ ID NO: 64537 - protein, 258 aa, Zea mays
  Coding DNA Sequence Number=SeqID_22758
  Homolog annotation: Hit_ID=Q67UM4; Match level="QueryCoverage=37%, HitCoverage=29%, E-value=1e-19, Identity=54%"; Hit description=Gt-2 -related-like
MESPWRMKSDVLDLASTKPRVFEAQIDGTCVVDDQSLELLHGVVLVRVIEGAAIDITLAGSRGVAINGKLVVRGQLVPQHHVLGSSRLGANGPAEVGQFTEAGGYGLCSGGGSSMTTTFKVRGIVGGPGTRLTGSIESYYGNSSKKSKLEEVAKVVALTNGKGASNEKQSEQITEDSPTQCGQKRQRSDDNASGEATTNLQGQLVEILDRSSQMVAAQLEAQNVNSRLNREQRKDQVSSLLGVLGKVADALYRIADEL

SEQ ID NO: 64538 - protein, 103 aa, Zea mays
  Coding DNA Sequence Number=SeqID_22759
MGRRHYRAPSDVLADVVALADRGSFLSFEDSTVKLRRPNNPALRVLQDDDEEDGYDYAYGNGKWYSFRLERVAFGAIYAQVKKKENGVEADLQEFHDFDEFED

SEQ ID NO: 64539 - protein, 173 aa, Zea mays
  Coding DNA Sequence Number=SeqID_22760
  Pfam annotation: Domain name=zf-CCHC; Domain location=85-102; Score =10.5; E_value=0.018; Accession=PF00098.13; Description=Zinc knuckle
MSGAPGPYGVEPATIGFQQARSAIFHRTVLCATGLSGDFHRHQEDRGQEPHLHWEVHAEDNLKETKNHNYKSNKRNDNSKSRSRKNHYNCGKNGHFISSCPYEKTKDKEEKNEEKKSYVKNKSYSRRGIAVKLILGRNMTQMMRVQTLLKRKALQHCPSTSHHSYPSSSILAS

SEQ ID NO: 64540 - protein, 271 aa, Zea mays
  Coding DNA Sequence Number=SeqID_22761
MCNQVNTSSIEKYKHQSEIKILGGLAANSRDDGLLENRGFILQNCKPKGYRVLPVVRSEINDQDLNWQSGARVRTPDKQGPLASGSGGAEGERRSTRVLALDGRGHGKAGPASQQRGASAGVCADACRRTGPASQRQRAGEGPDAARGTDARDRGSTGQWPRRGKEGEGGSEATGWATTVRAIFNPEPGAWPAMLDGEGAFCGARELRTQQWSHLGTRPRRREEERGRKEGVMGSPRMTPASLIAWCSGGTNVEGRRATTTTKARTTARGG

SEQ ID NO: 64541 - protein, 140 aa, Zea mays
  Coding DNA Sequence Number=SeqID_22762
MRRWRGLPESTKQRIGKEDDGLAPDSAKQRVGDGGDVLAPKPLKQRVGEVEDGIAFEPTKQRIDEAGDGLPLELAKQRVGEVGDGLAFELAKHRVGEVGEDLAPEPAKQQVSEVGDGLAFELAKQRVGEAGDGPTFEPMK

SEQ ID NO: 64542 - protein, 56 aa, Zea mays
  Coding DNA Sequence Number=SeqID_22763
MALYGYTISTMSKVPPYDSAIYDHCVCMGRTVEVDVSCIEGGFGFGIKVFSHGKDI

SEQ ID NO: 64543 - protein, 120 aa, Zea mays
  Coding DNA Sequence Number=SeqID_22764
MAGRGYDERRWVKGTSVMISRRRETHGEMPATHAVTDEGTMTSMIVSQHARALGKHTRHSGKLEEGNSGQGSRGRGWRRRGHEAIYRHPWRRGVEVEEEGMSARGKSGECRKEWRWACAR

SEQ ID NO: 64544 - protein, 123 aa, Zea mays
  Coding DNA Sequence Number=SeqID_22765
  Subcellular localization annotation: CTP_CleavageSite=36; ConfidenceScore=5.01e-01
MVIRKERPNVLKTATCIYLNKRMFTLKMAFTFRPFRTLMRGGMSRPPGGRALGHHGKTPEGGTSSGQKGKGHSSSPKVGSPERPIRPSIKARFQAKVRTSISHVAQALSMSASCSYPSHLRKV

SEQ ID NO: 64545 - protein, 480 aa, Zea mays
  Coding DNA Sequence Number=SeqID_22766
  Gene Ontology: Mol. function=protein serine/threonine kinase activity; Cellular component=integral to membrane; Biological process=protein amino acid phosphorylation
  Homolog annotation: Hit_ID=Q8LP72; Match level="QueryCoverage=87%, HitCoverage=64%, E-value=3e-96, Identity=47%"; Hit description =Receptor-like protein kinase
  Pfam annotation: Domain name=Pkinase; Domain location=179-475; Score =84.3; E_value=3.8e-22; Accession=PF00069.15; Description=Protein kinase domain
  Pfam annotation: Domain name=Pkinase_Tyr; Domain location=179-475; Score=-7.0; E_value=4.8e-12; Accession=PF07714.7; Description =Protein tyrosine kinase
  Pfam module annotation: Pfam domain module=Pkinase::Pkinase_Tyr; Domain location=179-475::179-475
MASAANTMPGKSVVLLSLVTLLVVLISAAESYDGRYAVSHSAMARRSRLGTRHAHHRRTTVPHRYVLAEKSSAPSGGGPKNHSSPAKANASSPAPAPPAAEQTGRHHRSHKNRVRNWIIGFVVGSLAGVISGMVLSVLFRLALNCIRGRYRTRSGVMIFTPKLIRRPEHLAFLEKEDGLASLAVIGRGGCGEVYKAQLPVEREGEQPRFIAIKKVKKHGGDAPSNNLSDEESRQLDKRSRQIQSEIRTVGYIRAPQPAVAGGARAAPGLPLPGALKAENAEAEDGSSGSGTGAGGLSWPARLRVAVGVAAGLEYLHVSHQPQIIHRDLKPANILLDDDLEARIADFGLAKAMPDSHTHVTASNVAGTLGYIAPEYYQTVKFTAKCDVYSFGVILAVLATGKEPSDQFFTQTEEVVGLVKWLRRVMEAGEHAQAIDPAIAGAGYDEQILLLLRIALFCTKDDPKERPTAKDVRCMLSQIKT

SEQ ID NO: 64546 - protein, 79 aa, Zea mays
  Coding DNA Sequence Number=SeqID_22767
MSEDKLRTKDSCWSVGMVYGPRGLPGLSTTDTGVDVVLHGVIVKEREKLQRLTQRRSCEAGKLRHVRRKGNRLKDEKAI

SEQ ID NO: 64547 - protein, 275 aa, Zea mays
  Coding DNA Sequence Number=SeqID_22768
  Gene Ontology: Mol. function=sequence-specific DNA binding; Cellular component=nucleus; Biological process=regulation of transcription, DNA-dependent
  Homolog annotation: Hit_ID=Q94LQ6; Match level="QueryCoverage=99%, HitCoverage=100%, E-value=2e-44, Identity=70%"; Hit description =Putative transcription factor
  Pfam annotation: Domain name=GATA; Domain location=175-210; Score =65.6; E_value=1.6e-16; Accession=PF00320.17; Description=GATA zinc finger
MASEWEMAMGVELGMGMGTYHYHHNASSITTAPMSSHHSGGASYSTPHHHHYYGMPPTGGAGDAMRVDDLLDLSTGAGAGAHEFFPTAPAPATTDKGHHHPGAMGEPSPTAANSSDHQTSLLSFADEFYIPPSPSSSSCSSSDFPSSSNRPARGRKSPGPGGDAVAGSDGGVRRCTHCASEKTPQWRTGPLGPKTLCNACGVRFKSGRLVPEYRPAASPTFVLTQHSNSHRKVMELRRQKELILIRGSHRDAAAAAGAGSAGPRPELMFRDYGVC

SEQ ID NO: 64548 - protein, 106 aa, Zea mays
  Coding DNA Sequence Number=SeqID_22769
MVGSKDSSDVLASNIIEPTMETLSAEDQQEFEEHKEQTIEEAKTKFPANFKVNRNHKVIRKRATDLASLRPTTATPKASETNEIQSLRAYIDEQREQMQQIIGGAK

SEQ ID NO: 64549 - protein, 97 aa, Zea mays
  Coding DNA Sequence Number=SeqID_22770
MAVAAAAPASVAPSPAPKASDDRKAVVPVDASELEKHVLVVDDSSVDRIVITRILRGSSYITYHFQQLKVVVAAHLEVHQVDTDIQVCLRCSIKRLP

SEQ ID NO: 64550 - protein, 210 aa, Zea mays
  Coding DNA Sequence Number=SeqID_22771
  Homolog annotation: Hit_ID=Q6QP54; Match level="QueryCoverage=35%, HitCoverage=26%, E-value=2e-14, Identity=88%"; Hit description =Putative kinase
MEQQYAYHPIGGRLPTDADGALLMLQCSTFSDGSVPKLTSTEHNIGWTDCYNYKRFEVKSEPPGRTRWRPSAEARAESEPWGRAKRSSSSFGAEPESEPWGRAKRSSSSSGAEPESEPWGRAEQSSSSSRAEPESKPWGRAERSSSSSGESEPWGRAERSSSSSGAEPESEPWGRAERSSSSSGAEPESEPWGRAERSSSSSRAEPESEP

SEQ ID NO: 64551 - protein, 209 aa, Zea mays
  Coding DNA Sequence Number=SeqID_22772
  Homolog annotation: Hit_ID=Q1G1I8; Match level="QueryCoverage=74%, HitCoverage=17%, E-value=6e-08, Identity=24%"; Hit description =Pentatricopeptide repeat protein
  Pfam annotation: Domain name=PPR; Domain location=11-45; Score=20.9; E_value=0.0047; Accession=PF01535.11; Description=PPR repeat
  Pfam annotation: Domain name=PPR; Domain location=116-150; Score =12.9; E_value=0.22; Accession=PF01535.11; Description=PPR repeat
  Pfam annotation: Domain name=PPR; Domain location=81-115; Score=11.9; E_value=0.29; Accession=PF01535.11; Description=PPR repeat
  Pfam module annotation: Pfam domain module=PPR::PPR::PPR; Domain location=11-45::116-150::81-115
MENNGTQPDAIVCSSLMEALNKGGQPERVLQLIEFMKQKKIQLNQKAYFEIISSCTMLRDWKTASQIIEHLDSSLSSISFGTLNHILNFLGKCGRTESMMKLFYKMVTSCSTVGLSTYTILLRNLLIVGKWRKYVEVLQWMEDAGVCPTLYMYQSVLPYIWRDNNALREKALQELKKRHDSIVDKSWPILLVHELMGDQDDYATVLRIY

SEQ ID NO: 64552 - protein, 171 aa, Zea mays
  Coding DNA Sequence Number=SeqID_22773
MNEEKVHTKDPCWSVGTIYDTRELTELVLVRCPFSRTLLSTSKVGPRHEGSISGSNDHIGDLEGRVEHMTVELHHGGRERVCASRHITELLELEVELMQWEIVVHDQAIDWALHPNIPHEVAEMGVGAVEAGEGGPYGELDIFGAPSSKNIVDDRPPEANSGSGATKDVED

SEQ ID NO: 64553 - protein, 243 aa, Zea mays
  Coding DNA Sequence Number=SeqID_22774
  Homolog annotation: Hit_ID=Q6RZU9; Match level="QueryCoverage=18%, HitCoverage=9%, E-value=5e-15, Identity=80%"; Hit description =ARIADNE-like protein
MALGQCGQPHEAHQGRWRVMVVGGGKDVGYSEGYMDVLEWVVVVDPRVSPTSSSLVRFCVTGVLDPILCSFILSPTISPAPGRAASAPPSAGRAAATARHWVLHSSSLAVSISSYLAARAGAHKVVVLHLAATSSSPACSLRALTRATNWRGETALHDAVRGGHEAAARALATADPDLTEACVLLRNYNWSVSKVHDEWFADEERVRKVVGLPEKHIEMPNDREIELEQSGSILCLVEESLKR

SEQ ID NO: 64554 - protein, 132 aa, Zea mays
  Coding DNA Sequence Number=SeqID_22775
MSRCSFLHLGCPFLPMLATRPTAPCSSVQAVIATSRFQSGAGDGYCDFDREPPPSSLIGNGDGDADAITSILSNVATLLAVVNCLLVLNLIGDGDLDGTTTISDNPDGGDIEHLSSTRPDNCGFGDGILDPK

SEQ ID NO: 64555 - protein, 76 aa, Zea mays
  Coding DNA Sequence Number=SeqID_22776
MGGGKTRARWRRSGESGRAGARTWALLACAARLLAALAWDRGRKGGAGRAERRSGGAPLGAARQRLFTSGPVCLKV

SEQ ID NO: 64556 - protein, 208 aa, Zea mays
  Coding DNA Sequence Number=SeqID_22777
MGWRETEHEGGNKETGVKGKPAAFVFVLRPGRVESEPRAGRGGDHRLRPRLSPSPGVGQGGVRHLPEPRPSPSPGSGEAEFVVFRSRGRVRALGSGEAEFVVFRSRGRVRALGSVEAEFVIFRSRGRVRALGRARRSSSSSGAESETGAEPWGSDEAELPMAPEAGLGCCQPHSVEWRSSRSDAGDAVLLSGRSVERRSDCGHFGSVD

SEQ ID NO: 64557 - protein, 269 aa, Zea mays
  Coding DNA Sequence Number=SeqID_22778
  Gene Ontology: Mol. function=protein dimerization activity; Cellular component=nucleus; Biological process=regulation of transcription, DNA-dependent
  Homolog annotation: Hit_ID=Q5Z6N9; Match level="QueryCoverage=81%, HitCoverage=58%, E-value=8e-90, Identity=75%"; Hit description =Putative ocs-element binding factor
MAQSVDGHDNSLPACKVEPRDHKVRYAMSRAEEACAKPRGGPEKPDEEEGALAFDLEYARWLDEHQHHMNDLRVALSAQIGDDDLGVLVDGAMLHYDQMFRLKGVATRTDVFHVLSGMWMSPAERFFMWLGGFRSSELLKVLARHVEPLTEQQLVGICGLQQSLQQAEDALSQGMEALQQALGDTLAAAATPCAADSVTNYMGQMAVAMSKLATVENFLRQADLLRQQTLKQVRRILTTRQAARALLVISDYFSRLRALSSLWLTRPTD

SEQ ID NO: 64558 - protein, 149 aa, Zea mays
  Coding DNA Sequence Number=SeqID_22779
MSAPATVSRGCARRDFIPELKQHGVEEARAEEQGEGTAVARGPGLGSCRPEPEYGELFEESQKRRRQIRTARDEADGQHNERKSENEAEKGARRELEPETEQGGRDLHGAVQGGGTSGRHGREPSVGAEQRICCAKKKNARLEIKIAKR

SEQ ID NO: 64559 - protein, 99 aa, Zea mays
  Coding DNA Sequence Number=SeqID_22780
MAEKELDGNERTSHGEQRLRATGFYPRAKAARRGRSKGRGAGRRNGCSPRPWAGELQAGTRNPEFLAIAKESTVIATVDSIQKSDKFTCGLNIWFHSHE

SEQ ID NO: 64560 - protein, 273 aa, Zea mays
  Coding DNA Sequence Number=SeqID_22781
MGEAADRERPPWRCTVAVQAALCLALYAAFSLGEPQLIPRGGVDALGRGARGGGVAFLSVAGGARGPIDQERLLRQPCVSTGSTVIDVRFDGLHMPDPRLMETTAKLYEVKFVLDVTQLGADDPLWQNGSMYFQALNIPWYSTSSHGRTVGNFLKKVKMPYDQVLDIIGLGTWPLQEPLHGGRISTSYKGQIKWLDRLLALTESNCLKKAALDFCHFACFNMFEFVALAVRTAGFNMEIYILQGKTIMFIHQIIEHTGTRSWEHSPSDTLVKS

SEQ ID NO: 64561 - protein, 442 aa, Zea mays
  Coding DNA Sequence Number=SeqID_22782
  Gene Ontology: Mol. function=hydrolase activity
  Homolog annotation: Hit_ID=Q5SMM1; Match level="QueryCoverage=74%, HitCoverage=95%, E-value=1e-135, Identity=73%"; Hit description =Diadenosine tetraphosphatase and related serine/threonine protein phosphatases-like
  Pfam annotation: Domain name=Metallophos; Domain location=12-344; Score=35.1; E_value=2.4e-07; Accession=PF00149.18; Description =Calcineurin-like phosphoesterase
MDSAAGAGRHRVRIAVVGDVVPSISLDNHVLLRREGTPEYGFGADVALCYAMLVSRFKGLEARRRERTLRTGVLHIDLIVAVLGVPRKQPYKISNQRLRELGLEFTTAAQALYNTIHNDWALEEDSKALRFLQPDLVLFTGDYGNENVELVRSISDLQLPKAAILGNHDCWHTHQFSEKKVDRVRLQLASLGEQHVGYKCLDFPSIKLSVVGGRPFSCGGDRLLRPRLLSKWLSYHMADYQGFFYGVNDMAGSAKKIYDAAAGAPEGHSVVLLAHNGPTGLGSRMDDICGRDWVPGGGDHGDPAISYATCLNKNHVDLERAISDLQREARVSIPLVVFGHMHKSLAYGRGLRKMIAFGANHIIYLNGAVVPRVKFAQTTPGHEQNQPEGSGSRAPTLRAFTIADLYEGRVEKISEVWVLVSGARTEVEEEIVLYKHPREQHM

SEQ ID NO: 64562 - protein, 100 aa, Zea mays
  Coding DNA Sequence Number=SeqID_22783
MALALGRGAELGVLCLCEARARPPAARCRTGNSASVATAHGSPRQYGGRAKFRRIRSYCPHPLVFDLLAAAAASASACPAARQRRPWLAGWQRVQAAPTY

SEQ ID NO: 64563 - protein, 82 aa, Zea mays
  Coding DNA Sequence Number=SeqID_22784
MAPLARPTACQTHSVEWHCSRSGAGGAVLLSDWPLQLYADGGYQLRIRRLEGTPNYGPRQLQDPRTRVYPKLASSLDSGRWK

SEQ ID NO: 64564 - protein, 574 aa, Zea mays
  Coding DNA Sequence Number=SeqID_22785
  Gene Ontology: Mol. function=ATP-dependent helicase activity; Cellular component=cytoplasm; Biological process=translation
  Homolog annotation: Hit_ID=Q2R1M8; Match level="QueryCoverage=74%, HitCoverage=69%, E-value=0.0, Identity=90%"; Hit description=DEAD -box protein 3, X-chromosomal, putative, expressed
  Pfam annotation: Domain name=DEAD; Domain location=134-319; Score =242.4; E_value=9.5e-70; Accession=PF00270.19; Description=DEADDEAH box helicase
  Pfam annotation: Domain name=Helicase_C; Domain location=390-466; Score=131.3; E_value=2.6e-36; Accession=PF00271.21; Description =Helicase conserved C-terminal domain
  Pfam annotation: Domain name=ResIII; Domain location=130-314; Score= -37.4; E_value=0.063; Accession=PF04851.6; Description=Type III restriction enzyme, res subunit
  Pfam module annotation: Pfam domain module=DEAD::Helicase_C::ResIII; Domain location=134-319::390-466::130-314
  Subcellular localization annotation: CTP_CleavageSite=47; ConfidenceScore=5.21e-01
MASSRTSWADVADAEPAPPPPVAAPAAASNGPARSSYVPPHLRNRPPAAAAAAPASAAPPPRSTAGLLTRTGGGAASVPFDEHQNTGINFDAYEDIPVEMSGRDIPPPVSTFADIDLGDALNENIRRCKYVRPTPVQRHAIPISLAGRDLMACAQTGSGKTAAFCFPIISGIMKAPSAGRPQRGGGMGMRTAYPSALILSPTRELSMQIHEEARKFSYQTGVRVVVAYGGAPITQQLRELERGVDILVATPGRLVDLLERARVSLQSIRYLALDEADRMLDMGFEPQVRRIVEQMDMPLPGARQTMLFSATFPKEIQKMASDFLDNYIFLAVGRVGSSTDLIAQRVEFVQEADKRSHLMDLLHAQRDTGKQTLTLVFVETKRGADSLESWLCMNGFPATSIHGDRNQQEREYALRSFKSGQTPILVATDVAARGLDIPHVAHVVNFDLPNDIDDYVHRIGRTGRAGKSGLATAFFNDNNSSLARSLADLMQESNQEVPAWLLRYAARPSYGGGGGGRNRRSGGGSRFGGRDFRNDSSSFGKGGSRGGGDYYGGGSSGGYGGGGHGGAGAPSAWD

SEQ ID NO: 64565 - protein, 251 aa, Zea mays
  Coding DNA Sequence Number=SeqID_22786
MSFSFSELPFSISFPRKKYENKNNFNVYRLFPTVFILVIPALAGGWTHRDREAFLSLSSALGGRGRLVFVFFCSKEREQRNSRGCRSSNSNLKVKVETNRKPEGKPVQYEKLPDYSRRLAMPPIKVGSLFRPALQVIRRSILDVGSRVQGEQDRFRGEINPMAQVPVIVDGRFKLFERLKLTASLVTSSLEGGTQGDAVAVTGKARTSSGGRLQPTATDELGADWEQWKLGSLGTTVGGGSLGTVEARNGG

SEQ ID NO: 64566 - protein, 181 aa, Zea mays
  Coding DNA Sequence Number=SeqID_22787
MYISFLSSETRRETLMLSKSLQPNPTCPYHKNITRLQLPLIFTNNGRDGNSSGSNQSSKFNVFNRREQATANMHAYTQVTSTQPHHTATEQHANIATTQLANTASSPARQHSQHGAGHRCQQRDVKSQLRLRSRRAAAQRCGRRVPLRQAGGAGVRTAGQKWRLDPGGQGLRRGRTSDVSA

SEQ ID NO: 64567 - protein, 134 aa, Zea mays
  Coding DNA Sequence Number=SeqID_22788
  Subcellular localization annotation: CTP_CleavageSite=48; ConfidenceScore=5.97e-01
MGAIAGVQAPSCARRRRRPTPASPMTRSSRRSASSPPTPSTASSASPRPGAASSRTRSTDSGLHRPWQGSSAAWTARRHRELVAHAPQRHGPRAEGDLGGFEVADGGGGRNARGIALIVAARCRRSADCGRVGG

SEQ ID NO: 64568 - protein, 481 aa, Zea mays
  Coding DNA Sequence Number=SeqID_22789
  Gene Ontology: Mol. function=transferase activity, transferring glycosyl groups; Biological process=metabolic process
  Homolog annotation: Hit_ID=Q2R1N0; Match level="QueryCoverage=92%, HitCoverage=94%, E-value=1e-159, Identity=63%"; Hit description=UDP -glucoronosyl and UDP-glucosyl transferase family protein, expressed
  Pfam annotation: Domain name=Glyco_tran_28_C; Domain location=272 -453; Score=-15.3; E_value=0.012; Accession=PF04101.6; Description =Glycosyltransferase family 28 C-terminal domain
  Pfam annotation: Domain name=UDPGT; Domain location=8-475; Score= -36.1; E_value=8.4e-09; Accession=PF00201.9; Description=UDP -glucoronosyl and UDP-glucosyl transferase
  Pfam module annotation: Pfam domain module=Glyco_tran_28_C::UDPGT; Domain location=272-453::8-475
MDNGGSYGSATASACCNGKINRGPHVAMLATPGMGHLIPLARGEGLAARSWPRSPPAVSSLSLPPVDLSDLPRAAAIETRMSEECARSVPALTAVLAGLRRSTAGRLAAFVADLFGADSLDAARAAGVRRRCIFFPSNLHVLTLILHLPDLDAAVPGAFRDMPEPLRLPGCVPVPGPDVLMPLQDKADPCYRWMVHHGAKYRDAHAILVNSFDAVEPGPAKVLRQPESGGPSRRWPAVYPIGPLIHADGGRKDGASSSPCLEWLDRQPPRSVVFVSFGSGGALPAEQMRELALGLELSGQRFLWVVRSPSDGGAVNDNYYDAESKRDPFAYLPEGFVDRTCAAGVGLVVPSWAPQTQVLAHAATGAFLTHCGWNSVLESLVYGVPMVAWPLYAEQRQNAVLLSDGVGAALRVPESSKRREIIADTVREVMRGEGKGAAVRAKVAELQKAAAEGLRDGGAAAAALAEVVQGWTTTTGGGEKD

SEQ ID NO: 64569 - protein, 119 aa, Zea mays
  Coding DNA Sequence Number=SeqID_22790
MDQRPWTNDLREGVDDLAECGYGVGMVGRDDGGMAKGGRGGLAVRWQGARTVEHGGGGSGRVRAPREARSTGWTDAGTGQAASPAQGRWANATREVVLRDRGRGLRASNTNTNPGDVAG

SEQ ID NO: 64570 - protein, 70 aa, Zea mays
  Coding DNA Sequence Number=SeqID_22791
  Homolog annotation: Hit_ID=Q93ZR8; Match level="QueryCoverage=42%, HitCoverage=5%, E-value=3e-09, Identity=83%"; Hit description =Putative auxin-independent growth promoter
MAKPTVGRLGAVGAPDMSGAHRTVRYAYPWWKEKVIDLDLKRKDGLCPLTPEKYLKLEVKTEYSSLKNVK

SEQ ID NO: 64571 - protein, 90 aa, Zea mays
  Coding DNA Sequence Number=SeqID_22792
  Gene Ontology: Mol. function=protein phosphatase type 2C activity
  Homolog annotation: Hit_ID=Q2HW33; Match level="QueryCoverage=62%, HitCoverage=16%, E-value=5e-07, Identity=42%"; Hit description =Protein phosphatase 2C-like
MGASLASRMRARISEILTNSDLGSYVAACVVVYNKLWHSRRLDVVQTGCIALSIIKQGDLMIVANVSDSQVVLGTVSDDGVITLSSSSST

SEQ ID NO: 64572 - protein, 103 aa, Zea mays
  Coding DNA Sequence Number=SeqID_22793
MVEEEVVSQTENIRAENNFYFDIYGVDPEPPATQGKPRDFHKEKTYDGESIMAVMGSTSKKKYLCQVWHIPRLPSGRRPDLEVCLDTSWLLDMRGAVAGVTIP

SEQ ID NO: 64573 - protein, 327 aa, Zea mays
  Coding DNA Sequence Number=SeqID_22794
MARLLARKGLKCVLGSCSLQASRGLKLGHAAHFQIPAYRPKVMLPVGVAVAKCQLPNAKKLKPYVPTPVTGRQPPSFPSRVTSQLPSPSRLPSPRRPARLQRDRRVRQCASGRARPATADRSRDLPCASATTAASAPCVPAAYASATKAAPAPTSSSTPANVYFRAKCVFQAIFVFRAARLKHGTFSEIRAGPWAEGSARGPARHDPNLILGRAGPKLNVPGLFGLGPDRAGRPECTPIGAVQVPPNPDHRAQNLRLDQNEQTDTLEPHLIRSLDDLRTPFPLAKVLCSTNLVRPSPDQRSESRLLPSSVHRDSELEHRRNPDEAHG

SEQ ID NO: 64574 - protein, 164 aa, Zea mays
  Coding DNA Sequence Number=SeqID_22795
MKRYNVCMRTQKSEQVPEGAPDSEQDLSGVPPNCLVAPLSQAPTVGTQQPGDVAGAPDSVRWRTGLSDLPIHPPPSRRLSIGIKAWYFIKSLTARSDVGSSRQEGDGDRREARHKPREGSIRESANKKREESPPRVKSHRSGDKKKKMKKVVYYETDSSSPSTS

SEQ ID NO: 64575 - protein, 118 aa, Zea mays
  Coding DNA Sequence Number=SeqID_22796
MDLPAQPSFEAVAARVCCLCGGCGRRRSDRPLFHAFVSAVSGQPHRGQRGGDDQRNGGYLCGFPVCACAGAAAAASAFSFAGMDSILRPHDSLPRLLLKINSCHNARGGGEQEEESTA

SEQ ID NO: 64576 - protein, 52 aa, Zea mays
  Coding DNA Sequence Number=SeqID_22797
MASAVTLYGAAAFPVSGGKNVRSRESEDHPRTWNLKSQASCALDHFLPNNVL

SEQ ID NO: 64577 - protein, 226 aa, Zea mays; identical to SEQ ID NO: 42275
  Coding DNA Sequence Number=SeqID_22798
  Pfam annotation: Domain name=DUF567; Domain location=8-215; Score =105.5; E_value=1.6e-28; Accession=PF04525.3; Description=Protein of unknown function (DUF567)
  Subcellular localization annotation: CTP_CleavageSite=46; ConfidenceScore=5.46e-01

SEQ ID NO: 64578 - protein, 108 aa, Zea mays
  Coding DNA Sequence Number=SeqID_22799
  Gene Ontology: Mol. function=N-acetyltransferase activity; Biological process=metabolic process
  Homolog annotation: Hit_ID=Q10R02; Match level="QueryCoverage=77%, HitCoverage=27%, E-value=2e-33, Identity=77%"; Hit description=GCN5 -related N-acetyltransferase, putative, expressed
IAAWLRAEDQYENESGNRYVESFKRKFASKEFHALKKRCNTQHREKYICLVAVKNDDIRRTVLNSVVGTLDVCVRHPLYGEKFPEFNPEKLREGKKYECDAKAKSRFA

SEQ ID NO: 64579 - protein, 296 aa, Zea mays
  Coding DNA Sequence Number=SeqID_22800
  Homolog annotation: Hit_ID=Q10R09; Match level="QueryCoverage=87%, HitCoverage=83%, E-value=5e-29, Identity=40%"; Hit description =Expressed protein
MERPVEGQGQGSGRLRRRGGRGRSMDEPDDGVTSSSSTAAKKQNQDLRHSCYYYKVSLAAGSYRGSSRAAAPRGPQAATTSSSSDQCSSYGGFSSSEAESSQHRRLRPIRTSLATTAVAVAAPALAPEKKKAGVSIRARLRDLRRKPASPGPGARLAGFLNAIFSGRRAPPSASSCSRSCLSETPSTRGQPKRTVRFLDSDGGGERRRTVPVGVAPELEQMLLHRMEVDSGDDDDDESSDASSDLFDLENFAAVDPDGGAAYSDELPVYETTRLVLGHRAIGHGYARTGGVPTRVV

SEQ ID NO: 64580 - protein, 423 aa, Zea mays
  Coding DNA Sequence Number=SeqID_22801
  Gene Ontology: Mol. function=pepsin A activity; Cellular component =endoplasmic reticulum; Biological process=proteolysis
  Homolog annotation: Hit_ID=Q5Z4D7; Match level="QueryCoverage=98%, HitCoverage=86%, E-value=4e-74, Identity=43%"; Hit description =Putative nucleoid DNA-binding protein cnd41
  Pfam annotation: Domain name=Asp; Domain location=80-421; Score= -200.5; E_value=0.092; Accession=PF00026.14; Description=Eukaryotic aspartyl protease
  Subcellular localization annotation: CTP_CleavageSite=84; ConfidenceScore=5.33e-01
LANNKLPVVHRQSPCSPLHGLPSLTAADVLRRDTSLIRRRFALQSSAVSAPASAPAPSPAPTIIPVNGSSDGRTLTGALDYSVLVSYGTPEQQFPVFLDTFLDVSLLRCKPCASGSNSCDPAFDTSRSTTFTNVPCGSPDCPTTNCSGGSVCPYDNPIFSIEGAFAQDVLTVAPSAAVHDFTFVCVDVDHPSDDMPEAGILDLSRDRNSLPSRLPGPATFSYCLPHSPSSPGFLSLGGDATVGEDNRTSHAPLVSNGHPELANMYFIDLVGMSLGGDDLPIPTGTFGNASTLLNVGTTFTMLAPDAYTPLRDAFQEEMAQYNRSSPGFAGFDTCYNFTGLDVIQVPLVEFKFGNGESFLIDGDQMLYFDDPAVGPFGMTCLAFSALKDGGGVLSAVIGSYTQVSTEVVYDVAAGKVGFIPGSC

SEQ ID NO: 64581 - protein, 311 aa, Zea mays
  Coding DNA Sequence Number=SeqID_22802
  Gene Ontology: Mol. function=tubulin-tyrosine ligase activity; Cellular component=nucleus; Biological process=protein modification process
  Homolog annotation: Hit_ID=Q10QY4; Match level="QueryCoverage=83%, HitCoverage=29%, E-value=1e-141, Identity=91%"; Hit description =Tubulin-tyrosine ligase family protein, expressed
  Pfam annotation: Domain name=TTL; Domain location=36-307; Score =123.6; E_value=5.4e-34; Accession=PF03133.5; Description=Tubulin -tyrosine ligase family
MYASKATLSHLFYVSAATDPKEADIIWVSMQVDSEVKNAVGLTDQQYTNQFPFEACLVMKHHLAETVHKAWGSPEWLQPTYNLETHLSPLIGDYCVRKRDGMDNLWIMKPWNMARTIDTTVTGDLSAIIRLMETGPKICQKYIDRPALFQGRKFDLRYIVLVRSIRPLEIFLSDVFWVRLANNQYTLEKTSFFEYETHFTVMNYIGRMNHMNTPEFVKGFEKEHQVKWLDIHESVRSTIRRIFEAAAAVHPEMQNPFSRAIYGVDIMLDNRFKPKVFRGKKDLCILILCSTQYGITYECVNELAAIDSMLA

SEQ ID NO: 64582 - protein, 58 aa, Zea mays
  Coding DNA Sequence Number=SeqID_22803
MKKMFIPMLRMYTLHNHMKNKVLRERCANNDENAPLAKKRQQPTDKKVIHMSRYYDKT

SEQ ID NO: 64583 - protein, 369 aa, Zea mays
  Coding DNA Sequence Number=SeqID_22804
  Gene Ontology: Mol. function=pepsin A activity; Cellular component =endoplasmic reticulum; Biological process=proteolysis
  Homolog annotation: Hit_ID=Q5Z4D8; Match level="QueryCoverage=98%, HitCoverage=72%, E-value=3e-73, Identity=43%"; Hit description =Putative nucleoid DNA-binding protein cnd41
  Pfam annotation: Domain name=Asp; Domain location=26-367; Score= -192.7; E_value=0.032; Accession=PF00026.14; Description=Eukaryotic aspartyl protease
  Subcellular localization annotation: CTP_CleavageSite=30; ConfidenceScore=5.00e-01
PAPSPAPTIIPVNGSSDGRTLTGALDYSVLVSYGTPEQQFPVFLDTFLDVSLLRCKPCASGSNSCDPAFDTSRSTTFTNVPCGSPDCPTTNCSGGSVCPYDNSIFSIEGTFAQDVLTVAPSAAVHDFTFVCVDVDHPSDDMPEAGILDLSRDRNSLPSRLAGPATFSYCLPHSPSSPGFLSLGGDATVGEDNRTSHAPLVSNGHPELANMYFIDLVGMSLGGDDLPIPTGTFGNASTLLNVGTTFTMLAPDAYTPLRDAFQEEMAQYNRSSPGFAGFDTCYNFTGLDVIQVPLVEFKFGNGESFLIDGDQMLYFDDPAVGPFGMTCLAFSALKDGGGVLSAVIGSYTQVSTEVVYDVAAGKVSFIPGSC

SEQ ID NO: 64584 - protein, 337 aa, Zea mays
  Coding DNA Sequence Number=SeqID_22805
  Gene Ontology: Mol. function=zinc ion binding; Cellular component =nucleus; Biological process=ubiquitin cycle
  Homolog annotation: Hit_ID=Q10R01; Match level="QueryCoverage=99%, HitCoverage=100%, E-value=1e-104, Identity=54%"; Hit description =C3HC4 zinc finger containing protein, putative, expressed
  Pfam annotation: Domain name=zf-C3HC4; Domain location=285-324; Score= 7.3; E_value=0.028; Accession=PF00097.15; Description=Zinc finger, C3HC4 type (RING finger)
MSARDRETAEALVRLAASLDGAVLGLGTAAVAVASWVKYLAVSGQLRLVASAATASIADARSLLSGDGAEPRIAAVRGYVRAHDKFFRAPFSGEAGVVTKHTQMVPFVLVSTELGNPTGVVHINVDKADQPLPLTTVFHKLIPLETTPYTLFQTIIGNGYPIALLDEEKILPIGKKITAIGLCQAKDAESVEITSCPEIPFFLSELTKDEMQAQLASRARILFWGSIVLGTLSVCLVGHAIYRGWTRIKLRREARHARQMFEEAEDAIHRDDSSDDDEIGDGQLCVVCLRKRRRAAFIPCGHLVCCSECALTIERTPHPLCPMCRQDIRYMMRVYDS

SEQ ID NO: 64585 - protein, 75 aa, Zea mays
  Coding DNA Sequence Number=SeqID_22806
  Homolog annotation: Hit_ID=Q10QZ1; Match level="QueryCoverage=88%, HitCoverage=25%, E-value=4e-07, Identity=53%"; Hit description=YGGT family protein, expressed
  Subcellular localization annotation: CTP_CleavageSite=30; ConfidenceScore=5.07e-01
MAMQCSTILAFLVLNAFTSTAAALPAELPSCSATAQHHQRTAVSPCSAPHEATLSQRKWMRRMRSQKPQGDDGDH

SEQ ID NO: 64586 - protein, 105 aa, Zea mays
  Coding DNA Sequence Number=SeqID_22807
MPPCRVRCGSGVRTWLGFEPEITLGAPPVVLLEEYGFEPEITRSTSSPPQCHPATFASTTCTPLTGYSTKASTVIRQMHMRRQLPSLRVQRHDSARWSLVVEITM

SEQ ID NO: 64587 - protein, 54 aa, Zea mays
  Coding DNA Sequence Number=SeqID_22808
  Subcellular localization annotation: CTP_CleavageSite=48; ConfidenceScore=5.12e-01
MTISTSLFGFQPFDPFQSGFFSRANTCNAFSNTTDDTEPLSQFECPLKVSNDSG

SEQ ID NO: 64588 - protein, 253 aa, Zea mays
  Coding DNA Sequence Number=SeqID_22809
  Gene Ontology: Mol. function=pepsin A activity; Biological process =proteolysis
  Homolog annotation: Hit_ID=Q5Z4D7; Match level="QueryCoverage=100%, HitCoverage=50%, E-value=8e-33, Identity=38%"; Hit description =Putative nucleoid DNA-binding protein cnd41
  Subcellular localization annotation: CTP_CleavageSite=19; ConfidenceScore=5.21e-01
MTPSSVAFLFFCVLIILLPAQHGHAASSHASYKLGSRQIFFKTPSKSPANSKQASTATTCSSFANGLANNKLPVVHRQSPCSPLHGLPSLTAADVLRRDTSLIRRRFALQSSAVSAPASAPAPSPAPTIIPVNGSSDGRTLTGALDYSVLVSYGTPEQQFPVFLDTFLDVSLLRCKPCASGSNSCDPAFDTSRSTTFTNVPCGSPDCPTTNCSGGSVCPYDNPIFSIEGAFAQDVLTVAPSADVHDFTFVCVD

SEQ ID NO: 64589 - protein, 235 aa, Zea mays
  Coding DNA Sequence Number=SeqID_22810
  Gene Ontology: Mol. function=N-acetyltransferase activity; Biological process=metabolic process
  Homolog annotation: Hit_ID=Q10R02; Match level="QueryCoverage=63%, HitCoverage=49%, E-value=1e-49, Identity=64%"; Hit description=GCN5 -related N-acetyltransferase, putative, expressed
MEEGNGDNEINERRKEPWDFRASFRHWVSLVQLHLHAIDFVTGKTTQSVQCRITLSPFPFFAQNLAELASSITSCLDRMLIVPQFHAQSFFSPRKDESVISTDGGNEETDTDSLHVARGLSHPGLSSSLSNKASVVPTPLLPSGQSDLRFNRLRPSIDESDCKYKRLFGCYVAREAVIDEEYWIAAWLRAEDQYENESGNRYVESFKRKFASKEFHALKKRCNTQHREKYICLVA

SEQ ID NO: 64590 - protein, 83 aa, Zea mays
  Coding DNA Sequence Number=SeqID_22811
  Homolog annotation: Hit_ID=Q1RTN3; Match level="QueryCoverage=63%, HitCoverage=14%, E-value=1e-07, Identity=58%"; Hit description=ATP -requiring DNA helicase RecQ
MQGGCARVLQLAIAAALAIWVGVRGACVRGIVGANGPFDPFTRKRSLLFDANWWWKVHVLSDFSSGENMHCSCHFIYDRSHVN

SEQ ID NO: 64591 - protein, 39 aa, Zea mays
  Coding DNA Sequence Number=SeqID_22812
MARRQTYLMWLVIYDGAVPERFLQIVPKDWFYGKEIGGG

SEQ ID NO: 64592 - protein, 134 aa, Zea mays
  Coding DNA Sequence Number=SeqID_22813
  Gene Ontology: Cellular component=mitochondrion
  Homolog annotation: Hit_ID=Q6K456; Match level="QueryCoverage=60%, HitCoverage=20%, E-value=2e-34, Identity=81%"; Hit description =Putative plastid protein
  Subcellular localization annotation: CTP_CleavageSite=52; ConfidenceScore=5.56e-01
MASASRALLLSRALQAGASRRVPALLRPVAAAASLLPAVAGPAGAALGARVRCFATQPATSSLRDSSPNWSNRPPKETILLDGCDFEHWLVIMEPPPGDASNPDITRDEIIDSYIKTLAQVVGRIDKSALVYYS

SEQ ID NO: 64593 - protein, 204 aa, Zea mays
  Coding DNA Sequence Number=SeqID_22814
MATTLRLRKKCSGERDPDEPEGERTNQRGKRAGERARLKAQVSRGKWASGAQALKGRGHAEVAGERADVGTSTAGDVGGRKKEKPFWPKPAQLGPARPHARAHAAPDRRALPVLASPPSPRPPWTSECALAHVAGILGHVDLRTPQLLLSPCPCPHSLPCLISRSPALARALLMPPDLAEDPRPPPRPSASREATPIDPELRSE

SEQ ID NO: 64594 - protein, 122 aa, Zea mays
  Coding DNA Sequence Number=SeqID_22815
  Subcellular localization annotation: CTP_CleavageSite=62; ConfidenceScore=5.61e-01
MGLAIYPSGSCSSESSVSWLKLPPASLSSTSGSPPTDRMPVVVQGASLAEVLGKTASQTPPPAKARGKSPIALAPSVGAPAPRASNDAVSPGDWTDLAPCGALDAPLSEKAKRGSLTYVQCT

SEQ ID NO: 64595 - protein, 155 aa, Zea mays
  Coding DNA Sequence Number=SeqID_22816
  Subcellular localization annotation: CTP_CleavageSite=55; ConfidenceScore=5.85e-01
MAIAPSKLPSCALPGPGASSSSPARTPRPSPSFLPLRSATPDRPARARSPPELTSAATLGVVPNSSTACLLTGLVFPNARLLPVPPPGRAAPQAPLAPATLLSCAAPRTRAPSLSPGAEPPWRSSPRREAVPSVWYSNNGSTGFQAGSAGIQKPA

SEQ ID NO: 64596 - protein, 145 aa, Zea mays
  Coding DNA Sequence Number=SeqID_22817
  Homolog annotation: Hit_ID=Q69NN2; Match level="QueryCoverage=33%, HitCoverage=5%, E-value=8e-13, Identity=77%"; Hit description =Hydroxyproline-rich glycoprotein-like
  Pfam annotation: Domain name=DUF1296; Domain location=77-128; Score =68.9; E_value=1.6e-17; Accession=PF06972.2; Description=Protein of unknown function (DUF1296)
  Subcellular localization annotation: CTP_CleavageSite=59; ConfidenceScore=5.55e-01
MTLPPSPPYHLVQAALASFDAIPAAIVSASNTTRSPVLACVRAISPLAAGMAGVGGGARSSDRAGAARSPTTTTTTTTTAIQSTIQSIKEVVVGHSDADILDTLRESNMDPNETAQKLLNQGPIGELELLTSCRCALNPILHLKE

SEQ ID NO: 64597 - protein, 98 aa, Zea mays
  Coding DNA Sequence Number=SeqID_22818
  Gene Ontology: Mol. function=electron carrier activity; Cellular component=mitochondrial respiratory chain; Biological process =electron transport
  Homolog annotation: Hit_ID=P00055; Match level="QueryCoverage=59%, HitCoverage=53%, E-value=2e-20, Identity=79%"; Hit description =Cytochrome c
  Subcellular localization annotation: CTP_CleavageSite=23; ConfidenceScore=5.34e-01
MTSAVLSSLRKQGNVSRIHAAPPAALLQGSSTSPTATLARQVGNEIGSLLGLLEPLEDHLCAWNVLLGVEEVVVQGALLLDDDHVLVGRGVGIAEGGV

SEQ ID NO: 64598 - protein, 134 aa, Zea mays
  Coding DNA Sequence Number=SeqID_22819
MGKSKKGGGSSHHSDDKRKREPTPPSEDFGDSEYSEEEFLLRNDSHGIAAEVWTYIRAVERAGLEGSDESEYSLVEENSSDPSEEGSGGDNGDGDDDGGDGDVGGDSGKGGDGSGKGGSGDGGGGSKGSNKASG

SEQ ID NO: 64599 - protein, 1206 aa, Zea mays
  Coding DNA Sequence Number=SeqID_22820
  Gene Ontology: Mol. function=phosphatidylinositol phosphate kinase activity; Cellular component=mitochondrion; Biological process =phosphatidylinositol metabolic process
  Homolog annotation: Hit_ID=Q2QVA9; Match level="QueryCoverage=78%, HitCoverage=65%, E-value=1e-160, Identity=58%"; Hit description =Phosphatidylinositol-4-phosphate 5-Kinase family protein, expressed
  Pfam annotation: Domain name=PIP5K; Domain location=1007-1200; Score =80.6; E_value=5e-21; Accession=PF01504.9; Description=Phosphatidylino sitol-4-phosphate 5-Kinase
MTSRFPVALIEVGAPLGRGGSFHEASDEPSRDMCHSQRSGLPRDSQRSGWSRPSSGEAENSSEGRTRRRARQRNRPRARLGVRRGVVLYPNMEGKHIFSIAPDGHYSARIAYMGLFIGSCSFGHYRQIWKVWVPPKYRFFLWLVAMNRCWTADRLARFIGTLLLEGLASTLHSLAPQHGDLFLQWWKGASAIVSGGLEPTNEKREKWQATGAKGLSFLAASSRTECMQEIVKGPERFLVVCLSASIPTPHIHAIRPAPMRILLKGATREELKKIKRVLHFTVFAAYHLILETSFFADQKLFTTDKTTTGKEKCFKTNQQLLGSCYDNSKNSDTMNNTPTCDDQYPNQEKLIHTEKSVPLHLHDSKTMASEDSAGEEHIDSKGIQSYSSLPVSDPSTNFMQDMPSPDCAESKISGGFDGSTFTDTSKEVQKKELSSDNFQGTFDVICAESGAALNTQDILVSMSSQHIRNQAVCEQSHLSRITYYGYFDTSLGRYLQDTLLNEKHSCLSCGESPESHMYSYTHHNGTLTVLVKRLPLELTLSGETQGRIWMWTRCLRCNAKPTHRVIISSSARNLSFGKFLELSFSTHSATKKLPTCGHLLHRDCLRFFGFGSRVAMFIYSSVEIYSACKPPLSLEFNNRNKNDWLDIEVKNPIAYLHANIILFFKVLLKWKQLFTTIENVIQDLRSRYSSQAMGEDTNVSVDEDEGLLLEVSRMLTQEKNKVEVSLREFSRIAIPESFAHGILGLNWLYQQLLLGFYIWDLRLLHILQYTKVNTASSDNSIHESTAKNEPKSSAKKLNTIPFMNDEQPAASNVLHHVVIPSDDEGKWFWNQFNQLEMEYKKELEGGSLYKFYLINKYTPCSSPLAQLKHQMDLGHFIAGHGGNIFSISEEEASSIIAYALIISEQQGFYYEAASSNLDKNASMLPSMSSPNESFENNHKFSRFAPTEELTSGFYDSFLSALKDLHHEIDLNNEKIALRSKYTVICIYAKQFHDLRKMCCPSELAYISSISRCKNWNAQGGKSKVFFAKSMDDRFIIKQIKKTEFDSFLKFGLEYFKHFGASQVSSNPTCLAKILGIYQVKETRNGKETRVNFMVMENLLFGHNILRRYDLKGALFSRYIPDSENSEKNMNVMDYSLLVGVDKEKKELVFGIIDYLRQYTWDKQLESWVKTSLVVPKNLSPTVILPREYKMRFRAFMSQYFLSVPDA

SEQ ID NO: 64600 - protein, 151 aa, Zea mays
  Coding DNA Sequence Number=SeqID_22821
MAMYCSITGWRSMDVGPALEKLKPTCHRTLPIIARPFWGRHDPAHYRTLAWSGQHQRRPDAAATRAFHSIHDSPDTQKPRVFYSCSAIFTAKALPARDCDQGTSESQTRSCSLLLASRSRCQLLLATGPAQIISTTDSEIVLPTGRDRGPY

SEQ ID NO: 64601 - protein, 70 aa, Zea mays
  Coding DNA Sequence Number=SeqID_22822
MLHLHLFSPLLAPPLSGLLRHFENENPAVDVERGTKTAPMNRRWLRSNERDETRGATELDQAVVVRTGVK

SEQ ID NO: 64602 - protein, 124 aa, Zea mays
  Coding DNA Sequence Number=SeqID_22823
MGNWSSVVVRASKLCREASPWHRERFCGPFWRIGLFVALESLTGATPTPQIRHDRGWVPAPRRSPSPFSGSIVRRNQVLAWSGHGAAVDPWPLFFLVGGKKKPGGPLRVRWVIQIRLGMRDEGS

SEQ ID NO: 64603 - protein, 258 aa, Zea mays
  Coding DNA Sequence Number=SeqID_22824
  Gene Ontology: Biological process=response to stress
  Homolog annotation: Hit_ID=Q2QQA6; Match level="QueryCoverage=38%, HitCoverage=47%, E-value=6e-07, Identity=35%"; Hit description =Universal stress protein family protein, expressed
MASSAGNRFLRQLSASNGDEAVCGGLQMDQQEYGGAGVGRRGSRRWSKKRAAAAAAARGYGAGSGNGVKQPASAAGKPGDGGGGRELGSQPRHDVGAHPRRRQGGLPHAAPRPAALRQRQGRGGLLPRQLARHALQGLQARVVPNKPIAINSKGSGGRSACDPRAQAGHRAQPGEEAGGLRAGAQPVQAISLLVKLQNIRLVSDLAYPLSFLRSSGEEFVEQCINQAECLTLAVRKQSKGVGGYLISTRWQKNFWLLA

SEQ ID NO: 64604 - protein, 96 aa, Zea mays
  Coding DNA Sequence Number=SeqID_22825
MNWLGEPVAFLPLLFPFGAVSWREKLGESRHYGLVRTPYAGFWCRVWELQLVTGMMLMAAMLRIGREFAVVGELARLAIANRGRLSNLRLGLRSGG

SEQ ID NO: 64605 - protein, 175 aa, Zea mays
  Coding DNA Sequence Number=SeqID_22826
MAPPKLYDGGGSQLSYGSRTAIAAKSSRGPPYTDHSPTALAPFGLLWTGPQFPDLDPAVLTTATLYLIMAAHSRINGRWLFFNIRLSGTRRRAPKATEKSSNVPHDEPPPDSRTRLGLHEHMPTTNHEANPHSRNDAPSPLPTADARFTVALTQPDGIRRRAARLCPNSDFPVCN

SEQ ID NO: 64606 - protein, 1059 aa, Zea mays
  Coding DNA Sequence Number=SeqID_22827
  Gene Ontology: Mol. function=zinc ion binding
  Homolog annotation: Hit_ID=Q10J83; Match level="QueryCoverage=76%, HitCoverage=79%, E-value=0.0, Identity=64%"; Hit description=JmjC domain containing protein, expressed
  Pfam annotation: Domain name=AT_hook; Domain location=1019-1031; Score=0.0; E_value=23; Accession=PF02178.9; Description=AT hook motif
  Pfam annotation: Domain name=AT_hook; Domain location=31-43; Score =11.3; E_value=0.25; Accession=PF02178.9; Description=AT hook motif
  Pfam annotation: Domain name=AT_hook; Domain location=995-1007; Score= 11.1; E_value=0.28; Accession=PF02178.9; Description=AT hook motif
  Pfam annotation: Domain name=JmjC; Domain location=802-919; Score =63.5; E_value=6.7e-16; Accession=PF02373.13; Description=JmjC domain
  Pfam module annotation: Pfam domain module=AT_hook::AT_hook::AT _hook::JmjC; Domain location=1019-1031::31-43::995-1007::802-919
  Subcellular localization annotation: CTP_CleavageSite=47; ConfidenceScore=5.14e-01
MAIPEDLEGTSGDGGVTNRGSRGRRKGAAKGRGRGRPRSADRSFPPPAMAGVAVGDRVLRERRHTTNVFCERDTDVDDEWANFYAERFCSQIWPCINQNLNALSKFVFDLVYLQLPLVQRLSIRVIYSSLDDVETVRSKDSRSGDVLQTAKKRKKGGAGKVSVTKRSKREGEEQKKASPSKDKDCAETNGKRKMLTGDNALMCHQCQRNDKGRVVWCNSCRNKRFCVPCIERWYPNLSEDEFAAKCPYCRKNCNCKGCLRMRGVEEPPKKEISEENQISYACNVVRLLLPWLRKLRQEQMEEKKLEAKIKGVLVNEMKLEQAEYNLDERVYCNNCKTSIVDFHRSCKYCFYDLCLDCCVEIRRGEIPGGEEIMRVKPEDRGRAYLFGTTNSKDGSKRFSMRRHSSSLENEPSNVVGSSEGANNSLELWKAESDGSIPCPPKELGGCGGSILDLKCFFPEKMLSNLEERADRIMRSEVFAKAVAKRSDQCPCYDHSGNIRTQDVRETANTKGSSDNHLYCPVATAIKEDDLAHFQMHWTKGEPVIVSDVLHLTSGLSWEPLVMWRALREKKTNGDVEDEHFAVRALDCLDWCEIDCSQLCCQQVEINIHMFFVGYMKGRTHHMTHWPEMLKLKDWPPSSSFDQRLPRHGAEFISALPFPEYTDPRYGPLNLTVKLPDGALKPDLGPKTYIAYGFYQELGRGDSVTKLHCDMSDAVNILTHTAQVPYARYQLEKIEETRKKMKEQDLQELYGVSELNLSSPFTDSRNISADEMSKTSCNYGLDVNDVPPVNNESEVQSGAGQCSDYIDKDRSYAGMHNGERTGGALWDIFRREDSDKIQDYLRKHATEFRHIFCNPVKQVIHPIHDQTFYLTEEHKRKLKEEYGVEPWTFEQKLGEAVFIPAGCPHQVRNLKSCIKVAMDFVSPESVNECMKLTGEFRRLPPDHRAKEDKLEIKKIALHALNQVVNFLDPSSEWSKSWFAQLKNKKKAGAEEQEKPKRKRGRPCRKSNDEAAGDRHRKKGGRQRGRKRGYGKSKDGAGAVDVKPPKRQRNLLKGSGNRVGG

SEQ ID NO: 64607 - protein, 131 aa, Zea mays
  Coding DNA Sequence Number=SeqID_22828
  Homolog annotation: Hit_ID=Q10HC5; Match level="QueryCoverage=88%, HitCoverage=17%, E-value=3e-37, Identity=71%"; Hit description=CBS domain containing protein, expressed
  Pfam annotation: Domain name=DUF21; Domain location=1-131; Score= -49.1; E_value=0.0044; Accession=PF01595.10; Description=Domain of unknown function DUF21
MAMPRGARTPLLHGPARGPSGLLQLENRDKIPTTKVEIRVVNIGATAIVTEAATAMFGEAGVSAATGVMTVAILLLTEITPKSVAVHNATEVARFVTGRMAFTDPLSSWADCYFSVNGDAKDSRPEREKLS

SEQ ID NO: 64608 - protein, 180 aa, Zea mays
  Coding DNA Sequence Number=SeqID_22829
  Gene Ontology: Mol. function=magnesium ion binding; Cellular component=integral to membrane; Biological process=hemolysis by symbiont of host red blood cells
  Homolog annotation: Hit_ID=Q10HC5; Match level="QueryCoverage=69%, HitCoverage=18%, E-value=7e-64, Identity=97%"; Hit description=CBS domain containing protein, expressed
  Pfam annotation: Domain name=CBS; Domain location=46-162; Score=63.6; E_value=6.3e-16; Accession=PF00571.18; Description=CBS domain
MAAQTFDLVHCDLWTSPVFSLSGYKYYLDMIENVLEIKDTHVREVMTPLVDVVAIDAIATLIDFKNLWETHQYSRVPVFEERIDNIVGIAYAMDMLEYVEEVEKLNAITVKEIAHMPTYFVPDSMSVWNLLREFRIRQVHMAVVLNEYGGTIGRRRTASHYIKRKNGWGTKKSPNTKRSL

SEQ ID NO: 64609 - protein, 75 aa, Zea mays
  Coding DNA Sequence Number=SeqID_22830
MAAAARPRVAAALMAGGCGGLCAQPGLRARALGGADGLDLAPTVPRRGRAGPRLVGGHEPAPELGREGAAAGRGT

SEQ ID NO: 64610 - protein, 119 aa, Zea mays
  Coding DNA Sequence Number=SeqID_22831
  Homolog annotation: Hit_ID=Q10HC5; Match level="QueryCoverage=59%, HitCoverage=10%, E-value=6e-14, Identity=57%"; Hit description=CBS domain containing protein, expressed
MVLNKVVREDWSQPPPNGTKGPRTLTLDDGLQIVEANARKVGKVLFKPISSECVDVDNKGVNRLISKKIIKRKKKGSDDSSNDDECPDVTENGCPAELLSYSDDNSALLEDASSSSAKR

SEQ ID NO: 64611 - protein, 157 aa, Zea mays
  Coding DNA Sequence Number=SeqID_22832
  Gene Ontology: Mol. function=peptide deformylase activity; Biological process=translation
MMLLLLLGSAKGNQRRNQSFVEERSFAYREILLFKKLRFRAEEKARVSVDADIVIKEAMRRLESAVKGKKDLLGRMDALQSQIERPETNTIHVCEERSKLCSTALKHMEDGNVEEVCVSDTNPIPVTGNIAELDDEGVDIPTVGDSGIIPTLMKCLM

SEQ ID NO: 64612 - protein, 133 aa, Zea mays
  Coding DNA Sequence Number=SeqID_22833
MRGWGSLRHSTPRSASWGGLGLQRHGHDATGAAEIHEQRAQAEQLGAASILADVPVPSINDLVDQIADVIDFFQIRRLVAKVALQCDDDELVAMNDPLISTNYMVYPWSLYRLIWYFNGLTGPEFVGQHGSVP

SEQ ID NO: 64613 - protein, 110 aa, Zea mays
  Coding DNA Sequence Number=SeqID_22834
  Subcellular localization annotation: CTP_CleavageSite=26; ConfidenceScore=5.44e-01
MGHVLPLVCPASRPQSAPPPPQPFLRAAPFQKSTIPEPPRTPRARPLPPPTVGACVTWPLKRGIHLSGIFLTCGKRWRGGTESEEPGSRSGREGAEDLHLCIDNNLYLML

SEQ ID NO: 64614 - protein, 150 aa, Zea mays
  Coding DNA Sequence Number=SeqID_22835
MKQYVITSLGSKSNEDNPARDAMVDLPSGLVKVMDSTRGAKGGTAGNSTVAAMEWLGGDDLLTEFAQGGWSRPRGQKGAGVCVLIPMDPAQGGRGSTAPKKLRRHAQSCRARSTISWGRRPDSLGPFVRDQCSAREREWMTGMAPHASGY

SEQ ID NO: 64615 - protein, 73 aa, Zea mays
  Coding DNA Sequence Number=SeqID_22836
MTKLQNWFILRPDPAFHIVYSFIPNPKAPEHILHLGNIVSHVFEDLRKTKVPNKFHVPININDLDMNINNITE

SEQ ID NO: 64616 - protein, 154 aa, Zea mays
  Coding DNA Sequence Number=SeqID_22837
  Subcellular localization annotation: CTP_CleavageSite=64; ConfidenceScore=5.69e-01
MDSASPDPRARTQPRLWKTVSASPDPRARTQPRLRKTVSASPDPRARTQPRPWRIYRLARPRARTDHAAGGGLERFLECLSIRTCSLDDRSGKQCNHEGGDEEDGYDYDYGNGKWYSFRLERVAFGAIYAQVKKKENSVEADLREFQDVDEFED

SEQ ID NO: 64617 - protein, 99 aa, Zea mays
  Coding DNA Sequence Number=SeqID_22838
MQESLAGPPSQQNPPEGLPTLTTPLLPLPLSGIGHTYPQLGSRDTPTSGGADLCRHTNDGEKFLDNQPGLCSQRRIEHVPEHLAKPIDLSFMLRTAIGP

SEQ ID NO: 64618 - protein, 802 aa, Zea mays
  Coding DNA Sequence Number=SeqID_22839
  Gene Ontology: Mol. function=RNA-directed DNA polymerase activity; Cellular component=nucleus; Biological process=RNA-dependent DNA replication
  Homolog annotation: Hit_ID=Q8S472; Match level="QueryCoverage=99%, HitCoverage=77%, E-value=0.0, Identity=83%"; Hit description =Putative gypsy-type retrotransposon RIRE2
  Pfam annotation: Domain name=Retrotrans_gag; Domain location=290-381; Score=71.5; E_value=2.6e-18; Accession=PF03732.7; Description =Retrotransposon gag protein
MRDFMTACDYCLSDCSDGSRSLDDEDCGPSRECFHVELGDPSEGNHLGMPEDGDLPRPVPRADIPRELAVVPVPVGGHDPQLEQVRGAQVRLDEGAGALESIRRDVGQVWAGQPPAGEIRHLPQGFQHRVANDVRVRPPPASSGVGQNLAASAMLLRAMPEPSTTEGRRIQGELKNLLEGAAVRRAESSASRRQGYPSEPHAATSRFMREASVYTERTRNTAPAAPGHLGNEHHRRDRRAHLDERVRRGYHPRRGGRYDSGEDRSPSPEPPDYRLACQLGGTDDDNLIIRNLPPFLSDTARAWLEHLPPGQISNWDDLVQAFAGNFQGTYVRPGNSWDLRSCRQQPGESLRDYIRRFSKQRTELPNITDSDVIGAFLAGTTCRDLVSKLGRKTPTRASELMDIATKFASGQDAVEAIFRKDKQPQGRPSEEAPEASTPRGAKKKGKKKPQAKRDAADADLVAAAEYKNPRKPPGGANLFDKMLKEPCPYHQGPVKHTLEECVMLRRHFHRAGPPAEGGRAHDDDKKEDHQAGEFPEVRDCFMIYGGHAANASARHRKQERREVCSVKVAAPVYLDWSDKPITFDQADHPDHVPSPGKYPLVVDPIVGDVRLTKVLMDGGSCLNIIYAETLRLLRVDLSSVRAGAAPFHGIIPGKRVQPLGRLDLPVCFGTPSNFRRETLTFEVVGFRGTYHAVLGRPCYAKFMVVPNYTYLKLKMPGPNGVITVGPTYKHAFECDVECVEYAEALAESEALIADLENLSKEVPDVKRHASNFEPAETVKAVPLDPSGDTSKQIRIGSGLDPK

SEQ ID NO: 64619 - protein, 80 aa, Zea mays
  Coding DNA Sequence Number=SeqID_22840
MWPWAVELAAGQLHSCMRLTMDLGQESVYGRPWRLGLPGPNMKVDTNGNMMRSIKLYSGACVRVCKETEKETEIERQQPL

SEQ ID NO: 64620 - protein, 565 aa, Zea mays
  Coding DNA Sequence Number=SeqID_22841
  Gene Ontology: Mol. function=oxidoreductase activity; Cellular component=integral to membrane; Biological process=electron transport
  Homolog annotation: Hit_ID=Q69XM6; Match level="QueryCoverage=91%, HitCoverage=97%, E-value=0.0, Identity=79%"; Hit description =Putative cytochrome P-450 protein
  Pfam annotation: Domain name=p450; Domain location=88-544; Score =209.2; E_value=9.2e-60; Accession=PF00067.12; Description=Cytochrome P450
MEAEAEAEAASSGRWCTWNLAAVAAVGACLLLMHVAARVADALWWRPHRLEAHFARQGVRGPPYRFLLGCVREMVALMAEATAKPMSPPDSHDALPRVLGFYHYWRKIYGPMFLIWFGPTPRLTVADPELVSEVLLTRADAFDRYEAHPVVRKLEGDGLVSLHDDKWALHRRVLTPAFYPDNLNRLAPHVARSVVALAERWRAMASAAGGEVEVDVAEWYQAVAEEAITRATFGSSYDSGRVVFRMQARLMAFASEAFRKVFVPGYRFLPTKKNRLQWSLDREIRRGLVTLIGHRSDEAAQDDDSELNDKGSSNGFRDLLGLMINASDKKEEKKQEEARAMPVEDMLEECKTFFFAGKQTTTNLLTWATVLLAMHPDWQERARQEVLAVCGADELPSKEHLPKLKTLGMILNETLRLYPPAVATIRRAKRDVTLGGVSIPRDTELLIPIMAMHHDGALWGPDATQFNPARFGGGAAKAAAHPLAFIPFGLGPRMCIGQNLALLEAKLTLAVVLQRFRLARSPSYVHAPTVLMLLYPQYGAPVIFRPVSSQLSVSDRTETTRPPRH

SEQ ID NO: 64621 - protein, 135 aa, Zea mays
  Coding DNA Sequence Number=SeqID_22842
MDNEAYRRGIGLEHDARGSPAANPSLGESFKFSEREGFVGEAMPEDGRRQVFLCPPHPRESRSIHNKFPVDTELGLSHRELLQGADSGKKADLTSGLHRVSDRALGERVGQRGCKWDPQVSTYASVRRSYWAARV

SEQ ID NO: 64622 - protein, 52 aa, Zea mays
  Coding DNA Sequence Number=SeqID_22843
MEADYVKNKSLLGYLEEQFDAQATDLMEVEFLGFDISKTVALKYITGSLERD

SEQ ID NO: 64623 - protein, 171 aa, Zea mays
  Coding DNA Sequence Number=SeqID_22844
  Subcellular localization annotation: CTP_CleavageSite=15; ConfidenceScore=5.15e-01
MAAFSPGRRPSPPLRLAGDFHNPFPSPAVDDGFLPRPVASTASLPSWRLPQLLPQLGGLHSPTQPPCAADPLIIGATALPRPHFPWSADSPNSRAPLPRHNRLHDFHFAWDNTQSMKINRYPYHDSKEDEDYARDRELGRLQSLSTCCQVQWCSGAKGPSTTILSRLSGIP

SEQ ID NO: 64624 - protein, 135 aa, Zea mays
  Coding DNA Sequence Number=SeqID_22845
  Gene Ontology: Mol. function=nucleic acid binding; Cellular component= intracellular; Biological process=chromatin modification
  Homolog annotation: Hit_ID=Q94FY3; Match level="QueryCoverage=65%, HitCoverage=15%, E-value=3e-35, Identity=79%"; Hit description=C2H2 zinc-finger protein
DPKAHGCTPIMQQPAPRGNGRQRPPIESRMRDERGNHRFDRNVDSPTRDGSGENPDDPIYDVFGDPAMHGAFHPDIPAPPVLMHVPGAGLKAKICLGLASKHTQISIRMCLTVSKFWEQKIQIGPFRVVKRKLLW

SEQ ID NO: 64625 - protein, 39 aa, Zea mays
  Coding DNA Sequence Number=SeqID_22846
MTPRRTDNNDQFVILTTVGVAFVTFVGADPGANHRNEDR

SEQ ID NO: 64626 - protein, 83 aa, Zea mays
  Coding DNA Sequence Number=SeqID_22847
MAPGADRCPLEPENHPNRSTRYTPYFLAYKAEAVLHIDLEYGAPRGSWSLQRKQSKGQLVTGTLGAMILMHEALRVSPARVRV

SEQ ID NO: 64627 - protein, 87 aa, Zea mays
  Coding DNA Sequence Number=SeqID_22848
MAARGPRKHRIMRIKDRNSDAHLEAAAEGQARPLPRSVLRPPSSGLAWAQAVWVVFWALTRAQTSVAVRRKERIQVYNRGCSRVLRV

SEQ ID NO: 64628 - protein, 257 aa, Zea mays
  Coding DNA Sequence Number=SeqID_22849
  Gene Ontology: Mol. function=sequence-specific DNA binding; Cellular component=intracellular
  Homolog annotation: Hit_ID=Q655V5; Match level="QueryCoverage=75%, HitCoverage=77%, E-value=6e-57, Identity=60%"; Hit description =Putative CCAAT-box binding factor HAP5
  Pfam annotation: Domain name=CBFD_NFYB_HMF; Domain location=107-171; Score=89.4; E_value=1.1e-23; Accession=PF00808.13; Description =Histone-like transcription factor (CBFNF-Y) and archaeal histone
  Pfam annotation: Domain name=Histone; Domain location=101-174; Score =50.5; E_value=5.6e-12; Accession=PF00125.14; Description=Core histone H2AH2BH3H4
  Pfam module annotation: Pfam domain module=CBFD_NFYB_HMF::Histone; Domain location=107-171::101-174
MDDDLGSLKWMTTLEPMGVAAGGSQVYPASAYPPAATVAPASVVSAGLQSGQPFPANPGHMSAQHQIVYQQAQQFHQQLQQQQQQQLQQFWVERMTEIEATTDFKNHNLPLARIKKIMKADEDVRMISAEAPVVFAKACEIFILELTLRSWMHTEENKRRTLQKNDIAAAITRTDIYDFLVDIVPRDEMKEDGIGLPRAGLPPMGAPADAYPYYYMPQQQVPGSGMVYGAQQGHPVTYLWQEPQQQQEQAPEEQQSA

SEQ ID NO: 64629 - protein, 278 aa, Zea mays
  Coding DNA Sequence Number=SeqID_22850
  Subcellular localization annotation: CTP_CleavageSite=23; ConfidenceScore=5.24e-01
MAMAPPSSDWVIDYGASYHTSPTAGVLSRSHPPHPSHPPLTIVGNGSTLPITSIGTSSCATCGPIDHACTTRGPVIPACALRGAVDPSHAIGGPINERRSLRRPHPRLLPPRGATTLTPTDLGPSMSTARFTNPVIDYHCHEPDLPAVPDIPTARSDPSVYHPVAIHRDPGHIHLMGTWSDADVLYPVDRLMLVTDWTTTPPDASSVPPPFALPSPTHTSVALWRRTDLKLLPQPLQGPFGSFGAFTQRPGMDYDKTLSLVIKFATFRGIISLAHSRD

SEQ ID NO: 64630 - protein, 1026 aa, Zea mays
  Coding DNA Sequence Number=SeqID_22851
  Gene Ontology: Mol. function=hydrolase activity, acting on acid anhydrides, catalyzing transmembrane movement of substances; Cellular component=integral to membrane; Biological process=calcium ion transport
  Homolog annotation: Hit_ID=Q8S856; Match level="QueryCoverage=99%, HitCoverage=99%, E-value=0.0, Identity=71%"; Hit description =Putative calcium-transporting ATPase
  Pfam annotation: Domain name=Cation_ATPase_C; Domain location=866 -1005; Score=47.0; E_value=6.4e-11; Accession=PF00689.11; Description= Cation transporting ATPase, C-terminus
  Pfam annotation: Domain name=Cation_ATPase_N; Domain location=99-180; Score=28.2; E_value=5.1e-06; Accession=PF00690.16; Description=Cation transporterATPase, N-terminus
  Pfam annotation: Domain name=E1-E2_ATPase; Domain location=195-444; Score=189.2; E_value=1e-53; Accession=PF00122.10; Description=E1-E2 ATPase
  Pfam annotation: Domain name=Hydrolase; Domain location=448-770; Score=72.8; E_value=1.1e-18; Accession=PF00702.16; Description =haloacid dehalogenase-like hydrolase
  Pfam module annotation: Pfam domain module=Cation_ATPase_C::Cation _ATPase_N::E1-E2_ATPase::Hydrolase; Domain location=866-1005::99 -180::195-444::448-770
MECADYLIGVGTMATAADPLRWTKQWRKATNVIRTCHRLARLSFSRAILRRTGSYVEIKIDDDGCGPGAAASTSRSDDAAPAEFSVAAHDEGFRCLVKDKRHDCFRRLGGAAGIASALASDAETGIRGDDRDVRLRREAFGGNTYPRRKPKGFWTHVWDALSDAFLLVLLVCAAVSLGFGIKEHGLKDGWYDGVSIFLAVFLVAAVSAVSNHGQARRFDRLATESDNITVAVVRGGRRQELSIFDVVVGDVVVLNIGDAVPADGVFMQGHALQVDESSMTGEPHPVDIDAEKNPFLASGVKVIDGCGHMLVTAVGTDTAWGEMMGSITREKTEPTPLQERLEALTSSIGKVGIAVAVLVFAVLTARHFTGSTRDEQGNPTFDRHHVSFNTVFTALVGIFQQAITIIVVAIPEGLPLAVTLTLAFSMKRMVKEHALVRTLSACETMGSVTAICTDKTGTLTLNQMKVTEFWVGTDRPKAAATVAAAVVSFLRQGAGLNTTGSVYKPDNVSPPEISGSPTEKALLSWAVAELGMDADALKRSCKVLHVEAFNSDKKRSGVMIRDNATGALTAHWKGAAEMVLASCSAYVGSDGAARELDAGKRRKLQEIISGMAAASLRCIAFAYKHVDSEHSKIDDEGLTLLGFVGLKDPCRPEVRSAIEACTKAGVAVKMVTGDNVLTARAIAKECGIISNSDHDAIVIEGQEFRAMSPEEQLEIVDRIRVMARSLPMDKLVLVQRLKQKGHVVAVTGDGTNDAPALKEADVGLSMGIQGTEVAKESSDIVIMNDNFDTVVTATRWGRCVFNNIQKFIQFQLTVNVAALIINFVSAMTSGKMPLTTVQLLWVNLIMDTMGALALATDTPTKALMRRPPIGRTAPLISNAMWRNLAAQAAFQVAVLLALQYRGREIFGISEKANGTMIFNAFVLCQVFNEFNAREIERRNVFAGVLRNKMFLGIIAVTIAMQVLMVELLTRFAGTQRLGLAHWGVCVAIAAVSWPIGWAVKFIPVPDRPLREILATRMKTISRIMTQ

SEQ ID NO: 64631 - protein, 153 aa, Zea mays
  Coding DNA Sequence Number=SeqID_22852
  Homolog annotation: Hit_ID=Q2QNL8; Match level="QueryCoverage=74%, HitCoverage=21%, E-value=6e-16, Identity=47%"; Hit description=PAPA -1-like conserved region family protein, expressed
  Pfam annotation: Domain name=PAPA-1; Domain location=55-113; Score =27.5; E_value=4.6e-05; Accession=PF04795.3; Description=PAPA-1-like conserved region
MAAAAAAVLLSSLMGYLQLLQEFNSIKTSNFVLLLNALRHVSVGPGKKDKLSEEEMLAKKAEAAQRRRMQVEKDTKESEEQATRAQHMAANSIRWVMGPTGTVISFQHAAGLPGIFNSKTHMSPSHPLHALLVRQNRAKVMISSTTFFGEQLS

SEQ ID NO: 64632 - protein, 124 aa, Zea mays
  Coding DNA Sequence Number=SeqID_22853
MPPSVCSKTQLTRLEQTWRLSYHARDRVIAPITQTTKAYANQARDNPVIENMGLGQMGLADQRQAPTYLAHPRGTIIGRQSEELKATRPTVKEATKGRYILWGSGATVGDWILGPTGGHESDRG

SEQ ID NO: 64633 - protein, 100 aa, Zea mays
  Coding DNA Sequence Number=SeqID_22854
MASPAAHRGVWRWPVRGARPDVPAAGEGGHDWRERFAAWGPMAKRLVAVSWGVGGRKKGAVTAASMARENGLMVGALVVGDCGSAATVGGGRQRSCCRRL

SEQ ID NO: 64634 - protein, 408 aa, Zea mays
  Coding DNA Sequence Number=SeqID_22855
  Gene Ontology: Mol. function=protein binding; Cellular component =nucleus; Biological process=ubiquitin cycle
  Homolog annotation: Hit_ID=Q7XED4; Match level="QueryCoverage=62%, HitCoverage=64%, E-value=2e-57, Identity=49%"; Hit description =BTB/POZ domain containing protein, expressed
  Pfam annotation: Domain name=BTB; Domain location=310-402; Score =44.8; E_value=3e-10; Accession=PF00651.21; Description=BTBPOZ domain
LGAIIYGAKVCHVSRQYLDAKIYDDETCYLAFLMLGPATALPIGPYRHGPDTSRTVPCPGTTGRAMLRAGPISPARLAIYIPKEATRIAGRRLVFFRNPDDGAVRARPYKNLSLIDVLQSAKLPRLENRRYRDTNRDCPIKQVRRAISHVVHLGLTAIPAPRWFQPERTSSPDLLPSAVTAGTSTITPTGHDPDTKDYISLFLVLEEPASGSTAKGVKAQQRFRFVGEVPEEEELPAVLLAAEEVSNYGSHRGWGDARFVRREDFEKSEHLKNDSFAVRCDIVVAINEFRGEDETAAFVSVPPPDLHRHLGELLQTGQGADVVFEAGGETFPAHRCVLAARSPVFAAEFFGAMEESKSGSAVHIHDMEARVFKALLHFTYTDLFWKTNEVEEEEEDDVMAQHLLVAAD

SEQ ID NO: 64635 - protein, 660 aa, Zea mays
  Coding DNA Sequence Number=SeqID_22856
  Gene Ontology: Mol. function=protein kinase activity; Cellular component=integral to membrane; Biological process=protein amino acid phosphorylation
  Homolog annotation: Hit_ID=Q9AXB6; Match level="QueryCoverage=98%, HitCoverage=93%, E-value=0.0, Identity=52%"; Hit description =Phytochrome / protein kinase-like
  Pfam annotation: Domain name=DUF1221; Domain location=21-233; Score =370.1; E_value=3.6e-108; Accession=PF06760.2; Description=Protein of unknown function (DUF1221)
  Pfam annotation: Domain name=Pkinase; Domain location=234-507; Score =84.0; E_value=4.8e-22; Accession=PF00069.15; Description=Protein kinase domain
  Pfam annotation: Domain name=Pkinase_Tyr; Domain location=244-507; Score=61.8; E_value=2.9e-16; Accession=PF07714.7; Description =Protein tyrosine kinase
  Pfam module annotation: Pfam domain module=DUF1221::Pkinase::Pkinase _Tyr; Domain location=21-233::234-507::244-507
MDQLRQVGEALGGIHTLMAFADDLRINPRQCRLLADACAMAFAAVAAEVRAHLRFNERLSKWKPLEAPLRELHRAVRDAEGYVRHCMEPRGSWWGRAAAATHGADCVEQHMHSLLWSVAVALEAVELVSEVTGSDPDELARRRLLFAKDYDRDMLEPALFVQRLGARYLATRELAARMDAAWKEDRWLLSQYLEERMSPGSPEPVPRSKHRLADLLTAPRGQVHPASVLLQGDFHVRKRLMGNLKEVQWMGEAFAVKHLVGAGADADAACAEAALLTSVAHPNVAHCRYCFHDEDKKEFFLVMDQVMTKDLATHVKEANSGKRRVPFPLVVVVDVMLQIARGMEYLHSRNIYHGDLTPSNVLVRTRHADAHLHVKVAGFGQHAAAAAAAAAGHCHRPSPRASAKASNATSAPCIWYAPEVLEQQEAAKRTEKADVYSFGMVCFELLTGKVPFEDNHLQGEHMSKNIRAGERPLFPFQAPKYLTSLTRRCWHGDPAQRPSFASVCRVLRYVKRFVVMNVNPAPAEQPDAAVPPPVPAVDYLDIEASLQRRFPAWQPGSGNAAPRVSDVPFQMFAYRVAEKERSRAAILHIGGGKGASDSSSDGNSLCGDESGGTALSEAEALTVSSRGATTTRSLPDRAGNRKVDGSRVASRLAGKPYVHS

SEQ ID NO: 64636 - protein, 81 aa, Zea mays
  Coding DNA Sequence Number=SeqID_22857
MAHRTVNKTCPVHHRTVRWPTCQKLQQSNPNSWVTWLAHRTVSGGAPDFSGITRHKKINSYFMQRAGGRLYGTVKMCHTRL

SEQ ID NO: 64637 - protein, 180 aa, Zea mays
  Coding DNA Sequence Number=SeqID_22858
  Homolog annotation: Hit_ID=Q6QP51; Match level="QueryCoverage=84%, HitCoverage=98%, E-value=6e-24, Identity=59%"; Hit description =Putative growth-regulating factor 1
MGAGSHMPCEQTGNRRRQTAACEAGTEKGVRRLAPQKGSIAAPEHSGSEPITDQGFEGWPLGRVRQLLQSTRAPRPLLIRALKASPSEGFDSRPRARRVRDDSRYVCYMAEARATLPRSGKSPAASGATGSSASPDLRPQPREEVSASTDPSLGLRRSLCLARPWARTDRATGDTSLPYP

SEQ ID NO: 64638 - protein, 891 aa, Zea mays
  Coding DNA Sequence Number=SeqID_22859
  Gene Ontology: Mol. function=RNA-directed DNA polymerase activity; Cellular component=intracellular; Biological process=RNA-dependent DNA replication
  Homolog annotation: Hit_ID=UPI00005A975E; Match level="QueryCoverage =99%, HitCoverage=50%, E-value=0.0, Identity=87%"; Hit description =PREDICTED: similar to Retrovirus-related Pol polyprotein from transposon 297
  Pfam annotation: Domain name=RVT_1; Domain location=56-225; Score =142.8; E_value=9.3e-40; Accession=PF00078.17; Description=Reverse transcriptase (RNA-dependent
  Pfam annotation: Domain name=RnaseH; Domain location=455-583; Score =9.2; E_value=8.1e-06; Accession=PF00075.14; Description=RNase H
  Pfam annotation: Domain name=rve; Domain location=787-891; Score =20.0; E_value=0.00013; Accession=PF00665.16; Description=Integrase core domain
  Pfam module annotation: Pfam domain module=RVT_1::RnaseH::rve; Domain location=56-225::455-583::787-891
MPGIPRDVAEHSLDIRAGARPVRQPLRRFDEEKRRVISEEIHKLMAAGFIKEVFHPEWLANPVLVRKKGEKWRMCVDYTGLNKACPKVPYPLPRIDQIVDSTAGCETLSFLDAYSGYHQIRMKESDQLATSFITPFGMYCYVTMPFGLRNAGATYQRCMNHVFSEHIGRTVEAYVDDIVVKMRKASDLLSDLEVTFRCLKAKGVKLNPEKCVFGVPRGMLLGFIVSERGIEANPEKIAAITSMGPIKDLKGVQRVMGCLAALSRFISRLGERGLPLYRLLRKTECFTWTPEAEEALGNLKALLTKAPILVPPADGEALLVYVAATTQVVSAAIVVERQEEGHALPVQRPVYFVSEVLSETKIRYPQVQKLLYAVILTRRKLRHYFESHPVTVVSSFPLGEIIQCRKASGRIAKWAMEIMGETISFAPRKAIKSQVLADFVAEWVDTQLPTAPIQPELWTMFFDGSLMKTGAGAGLLFISPLGKHLRYVLRLHFPASNNVAEYEALVNGLRIAIELGVRRLDARGDSQLVIDQVMKNSHCRDPKMEAYCDEVRRLEDKFYGLELNHIARRYNETADELAKIALGRTTVPPDVFSRDLHQPSVKIDDTPEPEAPSAQPEGPSAQPEAPSAQPEASSVQPEVPSAPEGEALDVEEEQSGAMPDRNWQTLYLQYLRRGELPLDQAEARRVARRAKSFVLLGDEEELYHRSPSGILQRCISIAEGQELLQEIHSGACGHHAAPRALVGNAFRQGFYWPTAMADATRIVRTCEGCQFYAKQTHLPAQALQTIPITWPFAVWGLDLVGPLQKAPGGYTHLLVAIDKFSKWIEVRPLNSIRSEQAVAFFTNIIHRFGVPNSIITDNGTQFTGKKFLDFCEDHHIRVDWAAVAHPCRMGK

SEQ ID NO: 64639 - protein, 58 aa, Zea mays
  Coding DNA Sequence Number=SeqID_22860
MKACLSSVAQAATGRWAGPGKARLAETPAGTLGAVGSGPRDSFFPNDDNASPALDESL

SEQ ID NO: 64640 - protein, 336 aa, Zea mays
  Coding DNA Sequence Number=SeqID_22861
  Gene Ontology: Mol. function=kinase activity; Cellular component =nucleus; Biological process=fatty acid biosynthetic process
  Homolog annotation: Hit_ID=Q18PR9; Match level="QueryCoverage=90%, HitCoverage=89%, E-value=1e-116, Identity=71%"; Hit description=Beta subunit 1 of SnRK1
  Pfam annotation: Domain name=AMPKBI; Domain location=248-334; Score =119.9; E_value=7.1e-33; Accession=PF04739.5; Description=5'-AMP -activated protein kinase, beta subunit, complex-interacting region
MGNASGRDEDAAAVDGDGADVEDGGGDSSERDFPSYGSGGANHVRRACSVGVVGGGAAAGSPPGSPGHSLSPRMFVPQVILYMVLLFLSCGVCTTKITALTQNCEKQVHIVPVTPVLQTPVPPLQRAADVTPVFNQILMDEQEEYDGPPQKEIPALIVWTLGGKNVYVEGSWDNWKSRKAMQKSGKDHSLLLVLPAGVYRYRFVVDGERRCLPDLPCEIDAMGNAVNLLDVNDYVPESVESVAEFEPPPSPDSSYSFQAPEDKDFAKEPPVLPSQLHLGVLNSQNSEESCARPQHIVLNHLFIEKGWGAHPLVSLGLTHRFESKYVTVVLYKPIER

SEQ ID NO: 64641 - protein, 91 aa, Zea mays
  Coding DNA Sequence Number=SeqID_22862
MNIDDGYKDIIILAISPANADLANSGALLLARVADPDDLANSGALLLARVADPDDLANSGALLLARVADPDEILDVFTLYDQSIGILNKST

SEQ ID NO: 64642 - protein, 93 aa, Zea mays
  Coding DNA Sequence Number=SeqID_22863
  Homolog annotation: Hit_ID=Q10MC5; Match level="QueryCoverage=56%, HitCoverage=9%, E-value=9e-17, Identity=77%"; Hit description=O -acetyltransferase, putative, expressed
MAEAVASAGRLAMDSSTSVSPGQVSAILGFLWVFAAWAYAEVLFHRKNTASIKTILSAIMVLPPASITCFLQPNATDYKLIWLPETLSNTDRR

SEQ ID NO: 64643 - protein, 141 aa, Zea mays
  Coding DNA Sequence Number=SeqID_22864
  Gene Ontology: Mol. function=calcium ion binding; Cellular component =plasma membrane; Biological process=G-protein coupled receptor protein signaling pathway
  Homolog annotation: Hit_ID=Q7DMP0; Match level="QueryCoverage=87%, HitCoverage=100%, E-value=7e-65, Identity=99%"; Hit description =Calmodulin-2/4
  Pfam annotation: Domain name=efhand; Domain location=113-141; Score =43.2; E_value=8.8e-10; Accession=PF00036.22; Description=EF hand
  Pfam annotation: Domain name=efhand; Domain location=40-68; Score =38.9; E_value=1.7e-08; Accession=PF00036.22; Description=EF hand
  Pfam annotation: Domain name=efhand; Domain location=77-105; Score =42.1; E_value=1.9e-09; Accession=PF00036.22; Description=EF hand
  Pfam annotation: Domain name=efhand_Ca_insen; Domain location=71-140; Score=1.2; E_value=0.071; Accession=PF08726.1; Description=Ca2+ insensitive EF hand
  Pfam module annotation: Pfam domain module=efhand::efhand::efhand::efh and_Ca_insen; Domain location=113-141::40-68::77-105::71-140
MRMCILGMCNAGCSRFLGCITTKELGTVMRSLGQNPTEAELQDMINEVDADGNGTIDFPEFLNLMARKMKDTDSEEELKEAFRVFDKDQNGFISAAELRHVMTNLGEKLTDEEVDEMIREADVDGDGQINYEEFVKVMMAK

SEQ ID NO: 64644 - protein, 217 aa, Zea mays
  Coding DNA Sequence Number=SeqID_22865
  Gene Ontology: Mol. function=metal ion binding; Cellular component =intracellular; Biological process=mRNA editing
  Homolog annotation: Hit_ID=Q10MC4; Match level="QueryCoverage=94%, HitCoverage=76%, E-value=2e-75, Identity=44%"; Hit description =Pentatricopeptide, putative, expressed
  Pfam annotation: Domain name=PPR; Domain location=173-207; Score =24.0; E_value=0.00052; Accession=PF01535.11; Description=PPR repeat
MLTVSILDAQLSRCCSARHLLQIHAQFLASGLLADAYAASRLLLFTTSATAARLLPHPLHHSLQLFGLVRSPNAFTCNTLLKAALRQGFPHLCFPLYASMPAAPDTYTHPLLAAACAARGDVREGLQVHSHSVKHGFSDNLYLRNALMHMYSACGCVASARRVFDAGPVWDAVSWNTILATYVRDGDVEQAVKVFTRMPERSAAAICVKRGGLWTRQ

SEQ ID NO: 64645 - protein, 137 aa, Zea mays
  Coding DNA Sequence Number=SeqID_22866
  Gene Ontology: Mol. function=catalytic activity; Biological process =cellular metabolic process
  Homolog annotation: Hit_ID=Q6H817; Match level="QueryCoverage=78%, HitCoverage=34%, E-value=8e-26, Identity=53%"; Hit description =Putative cinnamoyl-CoA reductase
MHSMDRTRTNWYCYAKTVVWEAVVTPVGGGARRAAAAQSEHQHPAQTRVPRWAGQGVVEYVNESHAYVHVKNAAEAHVSVLEAPGAGGRRYVCAAHTLHRGELRRILVGLFPEYPIPAASLQSRIKIHNVTSLRTNL

SEQ ID NO: 64646 - protein, 102 aa, Zea mays
  Coding DNA Sequence Number=SeqID_22867
MESPSPSSSLSALRHRLRATVCCCFGQGGGPGERTWWRRRAGVGEFRYDPLSYALNFDEGDLDVEEEEQQQQRGVHAHRGDGLLYHGFSSRLSTPAVVVEVA

SEQ ID NO: 64647 - protein, 347 aa, Zea mays
  Coding DNA Sequence Number=SeqID_22868
  Gene Ontology: Mol. function=sequence-specific DNA binding; Cellular component=nucleus; Biological process=regulation of transcription
  Homolog annotation: Hit_ID=Q6QHF4; Match level="QueryCoverage=79%, HitCoverage=94%, E-value=8e-65, Identity=47%"; Hit description=WRKY transcription factor
  Pfam annotation: Domain name=WRKY; Domain location=207-267; Score =129.7; E_value=8.1e-36; Accession=PF03106.6; Description=WRKY DNA -binding domain
GPLSQHHMRGAGKEDRTAAGNLHGPSFSSDRAGPVASSAAESPRTIERVCETASGVGDDGDPSLSLDLRVGLPPLSLHQAPVAVALARPKVLVEENFLLPPKKEPEVAAALESELRRMSEENRRLAEALAAVVSKYEALRSQHTEMVAASSASEGGSVSPSRKRKSESADTAPVQRLHQQHAAADLSDPRVSKLYVRADPADLSLAVRDGYQWRKYGQKVTKDNPCPRAYFRCSFAPACPVKKKVQRSAHDASVLVATYEGDHTHGPPPSGSGSGSGASSKNAAKPPSPPRRQEAAVAVTAAAAASEMVRRNLAEQMAVTLARDPSFKAALVSALSGRILELSPTKD

SEQ ID NO: 64648 - protein, 400 aa, Zea mays
  Coding DNA Sequence Number=SeqID_22869
  Gene Ontology: Mol. function=N-acetyltransferase activity; Biological process=metabolic process
  Homolog annotation: Hit_ID=Q67UR2; Match level="QueryCoverage=62%, HitCoverage=60%, E-value=2e-60, Identity=53%"; Hit description=GCN5 -related N-acetyltransferase-like
  Pfam annotation: Domain name=Acetyltransf_1; Domain location=239-336; Score=50.4; E_value=6.1e-12; Accession=PF00583.14; Description =Acetyltransferase (GNAT) family
MGGHRRIVQTDPDLGVPWKGVVHSVELLVLAEAYAQAEELSVEREHLIAELQFLQSASRERGEISQACLQQEGDAVVQGQAVVVGGGGGGLLRRQQSSRSLWMRHVKVIDVVVCLVLFAAWLAGVQGFQSLLNVRTKKRRTFSSAMGELDAKPVKKTTIRVREFDVERDLRAVEELERLCQVGLSGDQGSDHPVADHYGGAEKTTRSSKKKKGMSLYVEQIGDPFARVRHAPDNVILVAEYGEEDEVVGVIKACTRMVSRGKKKQSLGSSSKQFVKVACLLGLRVSPSHRRLGVATELIRRAETWCAARGAAYATMATTESNAASLALFTGRFAYAPFRRPAFLGRPVHRHRVRVPRAHRVLRLPPPLASAAYAALLPPSAAEFLPADLPALLNHLLTLG

SEQ ID NO: 64649 - protein, 437 aa, Zea mays
  Coding DNA Sequence Number=SeqID_22870
  Gene Ontology: Mol. function=diacylglycerol kinase activity; Cellular component=nucleus; Biological process=protein kinase C activation
  Homolog annotation: Hit_ID=Q9FLS9; Match level="QueryCoverage=74%, HitCoverage=73%, E-value=1e-77, Identity=42%"; Hit description =Similarity to selenium-binding protein
  Pfam annotation: Domain name=Herpes_UL82_83; Domain location=7-342; Score=-160.1; E_value=0.1; Accession=PF05784.2; Description =Betaherpesvirus UL8283 protein N terminus
  Pfam annotation: Domain name=PPR; Domain location=119-153; Score=9.8; E_value=0.52; Accession=PF01535.11; Description=PPR repeat
  Pfam annotation: Domain name=PPR; Domain location=182-216; Score =45.9; E_value=1.4e-10; Accession=PF01535.11; Description=PPR repeat
  Pfam annotation: Domain name=PPR; Domain location=217-251; Score =10.6; E_value=0.42; Accession=PF01535.11; Description=PPR repeat
  Pfam annotation: Domain name=PPR; Domain location=252-286; Score =11.3; E_value=0.34; Accession=PF01535.11; Description=PPR repeat
  Pfam annotation: Domain name=PPR; Domain location=320-354; Score =11.2; E_value=0.35; Accession=PF01535.11; Description=PPR repeat
  Pfam annotation: Domain name=PPR; Domain location=386-420; Score =16.0; E_value=0.094; Accession=PF01535.11; Description=PPR repeat
  Pfam module annotation: Pfam domain module=Herpes_UL82_83::PPR::PPR::P PR::PPR::PPR::PPR; Domain location=7-342::119-153::182-216::217 -251::252-286::320-354::386-420
MAPPLSLPPPHHSLPHLLRHRLPLRRLVAAHALAAVAGHLSLPDPRPHTILIVAYSRLERPFPAVLLLFRSCLRRSLAPTRHSLPLAISAAASAGLRHLPLALSLHAVAVYRNLLPFQHVANALVSLYARHTRLGDARRVFEEMPSAPDVVSYNTLMHAYVNTGSVAVAREVFEGMPVRDATSWGTVIAGSAKAGQLEEAMALFDRMLEEGFRPDDVALAAVLSCCAQLGALDKGREVHGLVKLSRPRPNVFLCTGLVDLYAKCGCVEAAREMFEACQDRNVYTWNALIVGLAIHAGLVDLARRIFHDMESVHNVPRELKHYGCMADLLGRAGLIEEAMNMVRKMPMEGDNYVWGGILAGCRMHGNVEAAELAARHLLQLNPDDSGVYSAMAGIYAAAGRWEDVVRIRKLMDERIVRRNVACSSITTELKDGTIMLS

SEQ ID NO: 64650 - protein, 176 aa, Zea mays
  Coding DNA Sequence Number=SeqID_22871
  Gene Ontology: Cellular component=chloroplast thylakoid membrane
MCHHKLATYKHELIGLTDIPLRPLFHLPNEIHIAIMDNEEVYSDLTVDYLKMLLLNVPAAVVALALFFFLDDFTGFEITYLLELPEPFSFIFTWFAALPLIFWVAQAITNVIVKDFLILKGPCPNCGNENLSFFGTILSVPSGGSKNSVKCASCGTELEYDSSTRLITLPEPAEAK

SEQ ID NO: 64651 - protein, 149 aa, Zea mays
  Coding DNA Sequence Number=SeqID_22872
  Subcellular localization annotation: CTP_CleavageSite=49; ConfidenceScore=5.11e-01
MERVRLSTVDASVASNVHAKASLRINYVIAHRAYQRRHRTTRVGGLAMVASGRWRWSRALVVCCGMGIPSKDVVVTSLECHVEDLKVPHDGSQGLEVVDAEDEEGKEPMTMGGGMEGDDYGVGLVIMVHLGARIPGCHVKQIFSDLKIE

SEQ ID NO: 64652 - protein, 248 aa, Zea mays
  Coding DNA Sequence Number=SeqID_22873
MQESKEPSPLGRRDHQRQTQVSEAALAQRLDHRGLIQEARRITTPLVDEGVQDLEIRRVVLYYELATWSHLLPPYVVQHSVYVGLEAKAAALSNGISVFPSLVSSIPSRPLLRGSEQLLLHKAVAPLWERLCSKAKLYPMEGRRSNEVSSAEAVLVGALSSGVNAPTWFVLKITFLLLALCFTAMLALAFSSKNFVIVAHVLLLVTIGTVLFVLLNRFLAEVGLVPVEQQMKEMGIHKTEATDEDKRN

SEQ ID NO: 64653 - protein, 443 aa, Zea mays
  Coding DNA Sequence Number=SeqID_22874
  Gene Ontology: Mol. function=RNA-directed DNA polymerase activity; Cellular component=mitochondrion; Biological process=RNA-dependent DNA replication
  Homolog annotation: Hit_ID=Q8S463; Match level="QueryCoverage=99%, HitCoverage=23%, E-value=0.0, Identity=90%"; Hit description =Putative prpol
  Pfam annotation: Domain name=RnaseH; Domain location=1-123; Score= -11.9; E_value=0.00075; Accession=PF00075.14; Description=RNase H
  Pfam annotation: Domain name=rve; Domain location=314-443; Score =70.3; E_value=6.2e-18; Accession=PF00665.16; Description=Integrase core domain
  Pfam module annotation: Pfam domain module=RnaseH::rve; Domain location=1-123::314-443
MFFDGSLMKTGAGAGLLFISPLGKHLRYVLRLHFPASNNVAEYEALVNGLRIAIELGVRRLDARGDSQLVIDQVMKNSHCRDPMMEAYCDEVRRLEDKFYGLELNHIARPYNETADELAKIASGRTTVPPDVFSRDLHQPSVKTDDTPEPEKASAQPEAPSARPEVLSAPEGEALRVEEERSGVTPNRNWQIPYLQYLHQGELPLDRAEARRLTRRTKSFVLLGDGKELYHRSPSGILQRCISIAEGQELLQEIHSGACGHHAAPRALVGNAFRQGFYWPTAVADATRIVCTCQGCQFYARQTHLPAQALQTIPITWSFAVWGLDLVGPLQKAPGGYTHLLVAIDKFSKWIEVRPLNSIRSEQAVAFFTNIIHRFGVPNSIITDNGTQFTGRKFLDFCEDHHIRVDWAAVAHPMTNGQVERANGMILQGLKPRIYDDLNKFDK

SEQ ID NO: 64654 - protein, 203 aa, Zea mays
  Coding DNA Sequence Number=SeqID_22875
MSGAITDGRPQLGGCRGHEHGARGDDGGFPRMARSGSWDCATQRGEGGGCRGQNMVHMWTPTMETCQFPRPRYRFRRRRCLLVRGWRLVAAQTACADLVAEAEAGAVPVVEACAAHSNDASGWATPVDGRGIGARQLWLAIIGSVDGRIAPMEGCGEDVGGRSPIEGHGWEDVGGMNTAHGAMMGGRMMEVFLGLRDREPGIA

SEQ ID NO: 64655 - protein, 190 aa, Zea mays
  Coding DNA Sequence Number=SeqID_22876
MGISIEGGVGTEKGAPSLCPREVDRVQVRIPSFDGGDGDLTMELTTACAHDRGMGTGVLSGGRRALASSCRKLGAEWGNGVEGAELPIRGGRRGRRAHNHGGAEGSGLSWQVVSSAMGEMAPAPWGRMDLCLGASAASAHGSEAKQGEPRPWVITPWEALSRGHRRGKCCWGMGAATPCSEQIGGELSVC

SEQ ID NO: 64656 - protein, 141 aa, Zea mays
  Coding DNA Sequence Number=SeqID_22877
MGGAAVLLSNRRSDWQRANFRIFRDKHDELLSIREHPETNTTSCILVIECQHKCFCVNLYKVVDKVQIMSKVLEIGKIKLEKRWLRSAKVYSVWVHRTVRWYTGQCPVRQADSGELAALGTSTAVYDYYSPDCPVVHQTVR

SEQ ID NO: 64657 - protein, 338 aa, Zea mays
  Coding DNA Sequence Number=SeqID_22878
  Gene Ontology: Mol. function=pyridoxal phosphate binding; Cellular component=peroxisome; Biological process=metabolic process
  Homolog annotation: Hit_ID=Q6ZFI6; Match level="QueryCoverage=76%, HitCoverage=64%, E-value=1e-136, Identity=91%"; Hit description =Putative aminotransferase
  Pfam annotation: Domain name=Aminotran_5; Domain location=1-297; Score=-123.6; E_value=3.2e-06; Accession=PF00266.9; Description =Aminotransferase class-V
MEGIRRFAKSIAAKSGERGSRERAGRAVPAHVPGQQPRHGLLHWAVPARAHSIRAGPGANRAKKNRPRAGLTGPCLMYIYMHNETATGVTNDLAAVRALLDKHAHPALLLVDGVSSICALDFRMDEWGVDVALTGSQKALSMPTGMGIVCASPRALEASKTARSVRVFFDWKDYLRFYDMGTYWPYTPSIQLLYGLRTALDLIFEEGLDNVVRRHNRLGTATRLAVEAWGLSNCCQKEEWFSDTVTAVVVPPNIDSAEVVRHAWKRYNLSLGLGLNKVAGKVFRIGHLGNLNELQLLGCLSGVEMVLKDVGYPVKLGSGVAAAAAYLSNSTPLIPSRI

SEQ ID NO: 64658 - protein, 77 aa, Zea mays
  Coding DNA Sequence Number=SeqID_22879
MESSVMAAQTMESQAMMAQLSICVLDCDDKLKPVIGTSFGSLEEVEELYKIYALENFIGCNIPEHIEIHPPSDVHSQ

SEQ ID NO: 64659 - protein, 70 aa, Zea mays
  Coding DNA Sequence Number=SeqID_22880
MEQGTKSDDTRHRDAAAGHFVEQHASMTRSKMEIDGVLSGRACYGGAAKKQHDDGGTSRRWTTATMHKEQ

SEQ ID NO: 64660 - protein, 73 aa, Zea mays
  Coding DNA Sequence Number=SeqID_22881
MASERVRGMRESSGRGEREERALGFIGNRREKESRLGREERLASSRPLMRRFLSMALMESKWEREKKRSREAP

SEQ ID NO: 64661 - protein, 154 aa, Zea mays
  Coding DNA Sequence Number=SeqID_22882
  Homolog annotation: Hit_ID=Q6QP51; Match level="QueryCoverage=31%, HitCoverage=22%, E-value=2e-15, Identity=77%"; Hit description =Putative growth-regulating factor 1
MEAQAHTSCNRCAGYYVRETTLPLAPVPHLLDCGTSAATRGNPAHGPAVPTRHAGHGAGGTFGRQRGRRFTSAIMTASKRDRERGYSERDPSPRRKRAPSPPTDQRFEGWPLGRVQQPPQSTRAPRPLLVRGSKAGPSEGFNSRLRPLGLRAHY

SEQ ID NO: 64662 - protein, 62 aa, Zea mays
  Coding DNA Sequence Number=SeqID_22883
MEQMAHDEEVDDLGDLESIVSLVVDARAGIEEQPAPPTDVGEGPVEASAPTGEDTSVAVEST

SEQ ID NO: 64663 - protein, 44 aa, Zea mays
  Coding DNA Sequence Number=SeqID_22884
MGSACAVSLRRGALGSVGGWKKHCWPFDLQRMTSVRSSSYRKFI

SEQ ID NO: 64664 - protein, 113 aa, Zea mays
  Coding DNA Sequence Number=SeqID_22885
  Gene Ontology: Mol. function=kinase activity
  Homolog annotation: Hit_ID=Q6QP54; Match level="QueryCoverage=66%, HitCoverage=26%, E-value=7e-11, Identity=51%"; Hit description =Putative kinase
MGRREAEREGGREVAGDGRERGGNLAAFVFVPRPGRHESAWGRVMMAPPVDVAGPRPRLGDVEAPPKSRSSLSSVAEVESEPLGWARRRPSAEARAESEPWGRAKRSSSSSGA

SEQ ID NO: 64665 - protein, 108 aa, Zea mays
  Coding DNA Sequence Number=SeqID_22886
MELEGDLEGDGARVVPEQEGAPPRQGGERAEAPSGGPRRTKKLARNHGRRDLVGRGLRRSSTRSRDQGHTTANWAQKMEAEGGARLWLGRAEGAAMGEDEGAHREERA

SEQ ID NO: 64666 - protein, 62 aa, Zea mays
  Coding DNA Sequence Number=SeqID_22887
MDRSWERGTQGGRHGWELLAAAGAGRIELEEDDAVEKKIDWAAGFYPPAAGDLFSPERRPDG

SEQ ID NO: 64667 - protein, 87 aa, Zea mays
  Coding DNA Sequence Number=SeqID_22888
  Subcellular localization annotation: CTP_CleavageSite=30; ConfidenceScore=5.03e-01
MGDPTAAPAFSLLSLVARRLDGYREKRPTSGSHRTVTEVVPTRDDDSVSQTNGPRVSSTTWRQEWKLGCAAGNPGGLESQDWAQARP

SEQ ID NO: 64668 - protein, 130 aa, Zea mays
  Coding DNA Sequence Number=SeqID_22889
MASARCAPSLIDRAHAATICQGRHQRRDRVLRRPLQPGCPRCGLRWVTGVHRSAPRVLEARWSLRDLSSGLGVPRIRFSSSSGHLVALTRDEVSPILFPFSLLRLAYLRMVFGILGIGGHTPAMAWPWVG

SEQ ID NO: 64669 - protein, 183 aa, Zea mays
  Coding DNA Sequence Number=SeqID_22890
  Gene Ontology: Mol. function=protein binding; Cellular component =integral to membrane
  Homolog annotation: Hit_ID=Q8LNN5; Match level="QueryCoverage=98%, HitCoverage=96%, E-value=2e-40, Identity=78%"; Hit description =Putative transmembrane protein
  Pfam annotation: Domain name=DUF1084; Domain location=1-183; Score =335.2; E_value=1.1e-97; Accession=PF06454.2; Description=Protein of unknown function (DUF1084)
MAGSSNGGDGTQAAAWWDDVNNSTLWQDRTFHALAALYGIVAVVALVQLIRIECRVPEYGWTTQKVFHFLNVIVNGVRSTEFVLRRDVQLVHPERFPVESKGRRKKLNEVGYVTTICFGCFLIRCIMMCLSAFNKDADLDVLNHPILNFFYYLLAEIAPSSLVLFILRKLPPRRGIAQYHPIH

SEQ ID NO: 64670 - protein, 392 aa, Zea mays
  Coding DNA Sequence Number=SeqID_22891
  Homolog annotation: Hit_ID=Q6L4C3; Match level="QueryCoverage=61%, HitCoverage=98%, E-value=1e-74, Identity=55%"; Hit description=RIKEN cDNA 1500006O09, related
  Pfam annotation: Domain name=DUF783; Domain location=175-379; Score =256.1; E_value=7.2e-74; Accession=PF05615.3; Description=Protein of unknown function (DUF783)
MAEKEETKGRCPACRTRYDKDMIVKMAATCDRVIQRNLVYIIGLPAHLCNESVLERREYFGQYGEVLKVLVSRLTGPPSQQASANSSISVFSLKDRPGAVVRGLSTEPKGLGLTQPLRKNVGLRIASVITSPDPTHAGAVSTGYRIPHRGMLAKGRKVAGRREEMSANYAFGPQDDDAIIKHRLLTRTTTTRGEPPLKKLQKKFMSFATEIEKDADNISDCERLYKAFLHEINTFELPLLKSKAVVDANIREKESFNELQVEIERQILHAKTDIEDLKKQLEQSKIERQHKEECEAIRKLISLQPPRSETEKLIADLEKEITDLKAENVACIRNLELRKKHFALILHVVEELQISIEDEQKSIADELRAIAGEQKMSMEEGSVGASDSMVVD

SEQ ID NO: 64671 - protein, 611 aa, Zea mays
  Coding DNA Sequence Number=SeqID_22892
  Homolog annotation: Hit_ID=Q10SJ8; Match level="QueryCoverage=66%, HitCoverage=96%, E-value=1e-122, Identity=59%"; Hit description =Remorin, C-terminal region family protein, expressed
  Pfam annotation: Domain name=Remorin_C; Domain location=375-486; Score=135.5; E_value=1.4e-37; Accession=PF03763.4; Description =Remorin, C-terminal region
GCLQSSALPLQRGSPLMEYERIHGPLPRHQVPALPRSPPQFGGLSVQFAFCFTIPILPPPHFTLSLALAVSLTEPFLLPPCSAPQSGGFSPAKLRAMLRGIEKRQRNNGEDSSPEANDSGELDDRRSLECSTSTEMSSNSGHRSRNRAPDDDSFDSESSSSGPPTVKRSAAVAALLPPFSRPTPSKWDDAEKWISSPTSNRTGRTGPTAGAVPKKSALAFPDYGGRPPAVAKVVADVPTNAGPDGLAHPDLLKPGHNASVVVDGTAPAVRSVCMRDMGTEMTPIASQEPSRTATPIIASSPTSSRTPTPQRTAEFSVSNIDPKKIEMPEEEEVQMSTRQEIMDLGERLGKTTIAAWASKEEKSAARFTDTTAYKAADIGRENRAADWQETEKAKYLARFQREEAKIQAWENLQKAKIEAEMKGIEAKIERKRAREQDRLASKLAAVSHRAEAKRETAEARRNQEAARTEEQAARIRYTGHTPSSFSCWCWVAPPVLVHLPPLSPGAINDTPAGSNHPMESSAAMTMDHHRAAPSLSTEEKRRIERVARCVARDRDGGDLTEKLLLRLLGLTRNARRWGFLAPDHPLHPYYLQHKVSERCRILRPRHAAADR

SEQ ID NO: 64672 - protein, 79 aa, Zea mays
  Coding DNA Sequence Number=SeqID_22893
MAVAGIGLSSQPQRTYVRTRKRSINAEAQDIGEDDSDAQEDGAAAVQAEVEQQQTQETAGDTDEDGVAADAFCLDADLL

SEQ ID NO: 64673 - protein, 174 aa, Zea mays
  Coding DNA Sequence Number=SeqID_22894
MRASGGRIWAGCWTRVRVAVAGAAVGEPWPSAGGRRAGGCAGEQEEGADVVERVLGRARAGVGEGGRRHHRGRWGGRDRCARGTAVRGGQRRRLGARHTNAPAPRAGKAGRPGLPQPEADGGGWERGVEERGPAARMWPPLCSMYCTEKELQYRLNPNPNGPAAQQWCRPTHTV

SEQ ID NO: 64674 - protein, 288 aa, Zea mays
  Coding DNA Sequence Number=SeqID_22895
  Homolog annotation: Hit_ID=Q656K0; Match level="QueryCoverage=66%, HitCoverage=37%, E-value=5e-53, Identity=61%"; Hit description =Putative ES2 protein
MVVDGNKSRITHSKTIKKPEHPITQASALNFDNIIAPLRGSLSPRITEDHQQALKEPGHLLNSFNESSYTINQKKKEKKGHVVGFLIKQSRAVPTNPLILRDEQLKILDRRRRAQRHAAGPVPTPTPATSTALRSPSFLTTPAGSVAGGVGGPDADHDDDVAAAVSLDGFFRRFTSEDNDSFSRILDKVNQRRRERYAHLLEPPPPTEAGSKASEGAKRDRITDGYGTSGQPPSTLEGAKFTAKNQLMYYPADQGEAPLTEEERAERLRGMTKEINKPNTRLHGRATG

SEQ ID NO: 64675 - protein, 136 aa, Zea mays
  Coding DNA Sequence Number=SeqID_22896
MEFRSSRIYSSHVHEMQRLGYFGMELGGHRGLKMSPRWRKKIGGLIAQFGSCTFTPRTGKTSVEVVEIVPCAKNKWDRMVQSPAFTIDLRGWDAVAFVKEVELEAVKIVGIDGDMRWAWGGYDFARTPGNIFTNVK

SEQ ID NO: 64676 - protein, 151 aa, Zea mays
  Coding DNA Sequence Number=SeqID_22897
MVGGKGGKGKYDRKDQGGKRKRHPTPPSEDFGISDFSEEQFSFKGEEYLPPVLLSSSSKGLDDLMQLSARTGLEGSYYSKEEDSSEDDSLEDSEEEDSGGEDGSGYDGDDEGGSGSDKGDDGSDDSGYDGGDEGSNSKGGSGNVGGKEPLM

SEQ ID NO: 64677 - protein, 175 aa, Zea mays
  Coding DNA Sequence Number=SeqID_22898
MSVVDGVLEDIIPEDFLLKLSEIRVIDVRIDHPNEVSSTSLLAGPEVNLSVCHGTSAPEGPSGPKGALAPKVASMGVHVGSPMPQTDDVVVTSSVVPIGPADQTTLEVRCSSTKNLMGVSSAEFPMGVSSVEIPMGVSGAEIPMSVTLSLGDRILQRLYLLKPGLLLMSLPLGAP

SEQ ID NO: 64678 - protein, 183 aa, Zea mays
  Coding DNA Sequence Number=SeqID_22899
  Homolog annotation: Hit_ID=Q6QP51; Match level="QueryCoverage=41%, HitCoverage=30%, E-value=4e-10, Identity=55%"; Hit description =Putative growth-regulating factor 1
  Subcellular localization annotation: CTP_CleavageSite=68; ConfidenceScore=5.59e-01
MQANSGQKKPNRRARCIQPPSGYKRPSTFAQTNGRKGGQPCRRHATAPSGRAPPTPNTPGMEAQAHASCNRRSGRRFPFAKMTVSKKGPRKGDTPKRILPREGTMLRAPLLIRGSKAGPPEGFNSRLGSRGPYTHYWSEVRRPAPRKGSTTASGYSGSAPNTDQGFEGWPPKGSQPPQTPSEG

SEQ ID NO: 64679 - protein, 289 aa, Zea mays
  Coding DNA Sequence Number=SeqID_22900
  Homolog annotation: Hit_ID=Q94CC0; Match level="QueryCoverage=41%, HitCoverage=25%, E-value=2e-19, Identity=42%"; Hit description =Hypothetical protein At5g49945 precursor
  Subcellular localization annotation: CTP_CleavageSite=22; ConfidenceScore=5.42e-01
MADLSRPSDAIAITRLPARPLRVSLASPLGSREGRWNTTTSASNPNPSTRTPRDPTLALDLWDEDKFEGISVLEAIPSDDSVAPAEADQSDPSIEAPAETIPTAKRSPAELLRAFSVEIACVSFLIYFVLNYFMGKRQNENIALAWATKFTTRDSIFDKNFSLLGTGDGKDSGHIVKDSNSDNIEKVCHLCFGLLDRVFERIQVLTVDPSQSNSEYLYYPAQHIQNIVDSVLRHPVITLSLSCSLSNCQNLAYGSLEHLEEALAIFATENLHLIDRFVLNLLGNCMTIC

SEQ ID NO: 64680 - protein, 124 aa, Zea mays
  Coding DNA Sequence Number=SeqID_22901
  Homolog annotation: Hit_ID=Q5VRY8; Match level="QueryCoverage=40%, HitCoverage=16%, E-value=4e-09, Identity=60%"; Hit description =Putative choline kinase
WPNGEAEGRGLLKVLVCIYGWSVKIFFDHADEDSTFECMTRHNQGPRRFANVDLDRSKLTAELNCPTAHFNESWRTEGVDDMRGRPPLMGAEPVLATVDAWDATKGEDATSTTRLERGPGCDER

SEQ ID NO: 64681 - protein, 161 aa, Zea mays
  Coding DNA Sequence Number=SeqID_22902
  Gene Ontology: Cellular component=chloroplast thylakoid membrane
  Subcellular localization annotation: CTP_CleavageSite=54; ConfidenceScore=5.37e-01
MASPLLKSHSQLAAAAALHSLGKFHDHGLRSGRSKRSGSAKVGAFPSLDVVPLMVTMVEHVDMSRDYVVTKSIWHLSDAALKSVSCLRAWVKSKQDPFYDSETYRSQGGDGTVHWYYDRQEDLEASAREELLREELLEEIEQRVGGLRELEEASKEEQLTK

SEQ ID NO: 64682 - protein, 244 aa, Zea mays
  Coding DNA Sequence Number=SeqID_22903
  Gene Ontology: Mol. function=metal ion binding
  Homolog annotation: Hit_ID=Q6Z2U9; Match level="QueryCoverage=77%, HitCoverage=81%, E-value=2e-50, Identity=62%"; Hit description =Putative NEP1-interacting protein
  Pfam annotation: Domain name=Rick_17kDa_Anti; Domain location=40-80; Score=6.9; E_value=0.035; Accession=PF05433.5; Description =Rickettsia 17 kDa surface antigen
MEVAEAPDEDGLDERGVALHLHLPRLLAGVVSGALTGLFALAGALTGAVTGAVAGRASDSGGVLRGAGLGAVAGAVLSIEVLEASRAYWCSDRLRLGSHGASSMANFIEQLLRARFVQEQFTTSGYASYRWQVSISDFGHDDLYDIFGDISSKGLPQESLKKLPHYVVTDQTRADSFGQILSCPICLQCRHCVWNQVFDISGTDSARCSARAGNIIAALVLADADPVFGIECFGDWSVFGPQGH

SEQ ID NO: 64683 - protein, 132 aa, Zea mays
  Coding DNA Sequence Number=SeqID_22904
  Gene Ontology: Mol. function=protein serine/threonine kinase activity; Cellular component=membrane; Biological process=protein amino acid phosphorylation
  Homolog annotation: Hit_ID=Q6Z2V3; Match level="QueryCoverage=75%, HitCoverage=10%, E-value=4e-40, Identity=83%"; Hit description =Putative MAP kinase kinase kinase
METVLFWFLQQQVGLPSFFSCGLSNFPHGNNLERRSGWHQKYFGMNDRMKNAMFLATESYYGNFVHYYSLGKNRRLEIPDNIDPAVAEIIVQCWHTDPKLRPSFADIMAALKPLLKNLTSNLAPKRVQQTDE

SEQ ID NO: 64684 - protein, 171 aa, Zea mays
  Coding DNA Sequence Number=SeqID_22905
  Subcellular localization annotation: CTP_CleavageSite=41; ConfidenceScore=5.07e-01
MAPRRGSGELHKQWGPTPGAKRAAQAVGHAGQHRAAPSMPRAGERAGTTGSPCRASGRDTAARAAGEEGLRRVAGRGTPGRARARSRASMSGHRELGRARYGREEGRDRARRASCRAGKGPRAPERAAAREGAERARVSRVRRGVRAEPAGAMAAGAKEEEGFWGKVMQCG

SEQ ID NO: 64685 - protein, 823 aa, Zea mays
  Coding DNA Sequence Number=SeqID_22906
  Gene Ontology: Mol. function=protein serine/threonine kinase activity; Cellular component=membrane; Biological process=protein amino acid phosphorylation
  Homolog annotation: Hit_ID=Q6Z2V3; Match level="QueryCoverage=94%, HitCoverage=71%, E-value=0.0, Identity=63%"; Hit description =Putative MAP kinase kinase kinase
  Pfam annotation: Domain name=Pkinase; Domain location=653-823; Score =58.1; E_value=2.9e-14; Accession=PF00069.15; Description=Protein kinase domain
  Pfam annotation: Domain name=Pkinase_Tyr; Domain location=653-823; Score=55.5; E_value=7.1e-16; Accession=PF07714.7; Description =Protein tyrosine kinase
  Pfam module annotation: Pfam domain module=Pkinase::Pkinase_Tyr; Domain location=653-823::653-823
MWEGWELDTAWGYGSRTRRYLKAQFEDEFASGPLHNFNALGYDDKILDGFYDLFYVGNGPAAVTMPSFAELRVQPFSHKVDWEAVLVHRGEDPELMKLQQEALIMNHELHSRTSESVGNALVLADGLDVPCRLLKGKRYTGSDDGALNIVKFKDGRNLLRNPLPPYNKPPILRLWRHALKIDFTEDMEPKFSGKDTTNQQIPWEFIVDLVSDPGTLIPSDVSVLSTELDRNFVSDNQHFGQDDNTNLLGSSLSGVSSSAYGSFEYELLDRRSTSSNVGPSDTDGPTTNLTSNQQNMSSNSFDKLSVSTFTSENRPVSKESTNPDYIIVGKNKEKYTAAVDSSSSSPSTPDMGSAPAVRRMKVKDISEYMINAAKENPQLVQKIHEVLLENGVMAPPDLFSEDSMEEPKDLIVYDTTLFQSKDEMKRRMNELGSREYTDRGHDPLLPHHPGHELQPKVAPHRAPLESLKPVEGLGIYHPHDIRDIASPFVSQYEPSAPPQEASSQLTKQLPVTAAAVATAAVVASSMVAAAALSTNDVNFDVPVAAAATVTAAAVVATTAAVSKQYEHSDPGNQLFSVPSTSQGNKSVEKAGGDLWDKHHVETDHGQDNCLDQEVPQEAERTSDKSNKSSGTEDVKSDLALDNVAEFEIQWEEISIGERIGLGSFGEVYRGEWHGTEVAVKKFLQQDISSDALEEFRAEVRIMKRLRHPNVVLFMGAITRVPNLSIVTEFLPRGSLFRLIHRPNNQLDERKRLRMALDVARGMNYLHNCSPVIVHRDLKSPNLLVDKNWVVKVCDFGLSRMKNNTFLSSRSTAGTVYPNCLKCV

SEQ ID NO: 64686 - protein, 96 aa, Zea mays
  Coding DNA Sequence Number=SeqID_22907
  Subcellular localization annotation: CTP_CleavageSite=48; ConfidenceScore=5.04e-01
MEVVSSEGQKRLLVWPSMMLISPSPAGQTRRYRSEGESGMVVGASSVSGAAASGGTSVPNYVVDEPKEDATAQGHDLRRFRGLEVGFPLLSQSENL

SEQ ID NO: 64687 - protein, 334 aa, Zea mays
  Coding DNA Sequence Number=SeqID_22908
  Homolog annotation: Hit_ID=Q652K6; Match level="QueryCoverage=48%, HitCoverage=51%, E-value=1e-35, Identity=50%"; Hit description =Putative ear1 protein
  Pfam annotation: Domain name=RRM_2; Domain location=181-288; Score =88.0; E_value=3e-23; Accession=PF04059.3; Description=RNA recognition motif 2
MAPLSHTAPAYIPTKRGAPWIPPPPASGLPTYISWMPTPPPRFLPWPHLAPPPPPPLPCWSVPQVPCATATGMVQRPLACVASAAAGNANEAATNQPSPRSVLAVTSPPISPTTSLPTSFPYRLAPPAPPPTAGHAAPTPPPTAKRSVAARPRHGRRSSRVRRTRSAPKPRRLFDPTSELTSFMIRNIPNDFTRARLIHILDQHCSIENEKIAPGGVRSQYDFLYLVVDFRSRANKGYAFVNMTSPEAARRLWTHLHGHLWAFKSSAKTCAVDYADLQGQDNLVSHFSGSRFDCDTDEYLPVRFEPPRDGTRPAEGAMNVVGRRITRSRPSDEN

SEQ ID NO: 64688 - protein, 238 aa, Zea mays
  Coding DNA Sequence Number=SeqID_22909
  Gene Ontology: Mol. function=unfolded protein binding; Cellular component=mitochondrion; Biological process=cellular protein metabolic process
  Homolog annotation: Hit_ID=P29185; Match level="QueryCoverage=98%, HitCoverage=42%, E-value=1e-119, Identity=92%"; Hit description =Chaperonin CPN60-1, mitochondrial precursor
  Pfam annotation: Domain name=Cpn60_TCP1; Domain location=1-238; Score= -169.3; E_value=0.00077; Accession=PF00118.14; Description=TCP-1cpn60 chaperonin family
TTCATVLTKAIFTEGCKSVAAGMNAMDLRRGISMAVDAVVTNLKGMARMISTSEEIAQVGTISANGEREIGELIAKAMEKVGKEGVITIADGNTLYNELEVVEGMKLDRGYISPYFIANSKTQKGELEDPLILIHDKKVTNMHAVKQKPLLIVAEDVESEALGTLIINKLRAGIKVCAVKAPGFGENRKANLQDLAILTGGEVITEELGMNLENFEPHMLGTCKKTVTVFSHDLTVLC

SEQ ID NO: 64689 - protein, 148 aa, Zea mays
  Coding DNA Sequence Number=SeqID_22910
  Gene Ontology: Biological process=response to stress
  Homolog annotation: Hit_ID=Q1SJW3; Match level="QueryCoverage=26%, HitCoverage=17%, E-value=3e-09, Identity=68%"; Hit description=UspA
MAPIDLGRGGRASGTGSGAAPGTPRLVMVVVDPVRESTAALEWALSHAIVEGDDILLLHVNMPYPHNGAAGRSGPSRSSSGGSTGFPDRRAPRRRLRSPSGSSSRGHDSTAEFLIEHSKCLCVSVQKKGQNAGYLLNTKTHKNFWLLA

SEQ ID NO: 64690 - protein, 545 aa, Zea mays
  Coding DNA Sequence Number=SeqID_22911
  Homolog annotation: Hit_ID=Q8H918; Match level="QueryCoverage=7%, HitCoverage=13%, E-value=2e-09, Identity=74%"; Hit description =Putative hypersensitive-induced response protein
  Pfam annotation: Domain name=DUF593; Domain location=114-209; Score =91.8; E_value=2.1e-24; Accession=PF04576.6; Description=Protein of unknown function, DUF593
MTTPCLGAAALSASWTAPSLTGAFLDLTLAWACLCLAALAAVAARLLALLGLPLPCTCARPHLPCLLAFLARYPPRAVGSLHAALRARFPFAGPTDDEARLQKGVEEEGEEEAIDAPKEEGDFRRRVEARAELQMELEKERSAAASAAEEAMSMILRLQKEKSALEIEARQQRRTADERCAFYEDEVEELRDIVLVREREVRALRKEVDAYRRLLGFSATEEDEEEDDEQEMVTPHSFPMYEGEPSSSKSVDANRMQHFGNDSGFSFKTPSPREQPTVPPLTAGQINVGSDDCVAVQTPAKVPVVQSRLELDSSEDEDEDEDDGAETVEILPLSARSQDLDQGSHFHADTAQGMESTCTKEQTAHAFQEIECPGIDKIVNDQIGSKNDANVYDVHVVDDIRFSTEVKGLIGRSFSEATMQAERLQSRAVADDLLEKSLNAIKGAQDKIRNAANERRQSLQLQLLEDIADQLQGIKDAAEAGRQVDQSTVDIKERFGKFKDVLDPGCRFVPWIIGNRVEGSILQIFCSPYLIMFLNAYLFKHPVAG

SEQ ID NO: 64691 - protein, 73 aa, Zea mays
  Coding DNA Sequence Number=SeqID_22912
MAPRARGAPRPSSSVVVIHVLNRELTDEIRCTEMRDLGTEIPMGVALKSGSFSLYALMHVNPIVSVISWPLGW

SEQ ID NO: 64692 - protein, 76 aa, Zea mays
  Coding DNA Sequence Number=SeqID_22913
MNQLKKQSAQLRERLSPLMRFEVIVLRKQLVDLENSQASHNAVASKRYSDLEDKLARCQLELHQVTVFLDGARVES

SEQ ID NO: 64693 - protein, 111 aa, Zea mays
  Coding DNA Sequence Number=SeqID_22914
MMVAERRWSLVSGGGARLVACAGRESSAEGANERGEWASGVRASKGGEGREKVAREHAVVGMSTTGTWARAKQQLWSGAPDCPVVHPTVSGAPRWSAVNSSLSSFDGGVRL

SEQ ID NO: 64694 - protein, 122 aa, Zea mays
  Coding DNA Sequence Number=SeqID_22915
MGSVKGSSVGSSWLEQWPLLSSGSWESRKVLCATPRATEAEVELLRSRLVKSNGLVMALKVELRELQLHLGRALDFIGARGSSLVERVDDVPCRVRGIVGLGARGGAPATLLVGELRTCCDL

SEQ ID NO: 64695 - protein, 145 aa, Zea mays
  Coding DNA Sequence Number=SeqID_22916
MAEPNKGGWATSSPRLRRLGVSVARMMMPRTIIAPHVIRHNKYETTSVEYLGTRIPENSRGARTYQATLRIMFQLKELDERQGTLSGKSPNPSRNGKGLLFGKDPNLLGIPFAGTEERKTHGKTTMNSRVERLVREGLATAPAKN

SEQ ID NO: 64696 - protein, 610 aa, Zea mays
  Coding DNA Sequence Number=SeqID_22917
  Gene Ontology: Mol. function=protein binding; Cellular component =microtubule; Biological process=electron transport
  Homolog annotation: Hit_ID=Q8H919; Match level="QueryCoverage=75%, HitCoverage=72%, E-value=0.0, Identity=94%"; Hit description =Putative WD domain containing protein
  Pfam annotation: Domain name=WD40; Domain location=140-177; Score =19.8; E_value=0.0098; Accession=PF00400.22; Description=WD domain, G- beta repeat
  Pfam annotation: Domain name=WD40; Domain location=188-224; Score =12.4; E_value=1.3; Accession=PF00400.22; Description=WD domain, G -beta repeat
  Pfam annotation: Domain name=WD40; Domain location=240-279; Score =22.6; E_value=0.0014; Accession=PF00400.22; Description=WD domain, G- beta repeat
  Pfam annotation: Domain name=WD40; Domain location=290-327; Score =21.8; E_value=0.0025; Accession=PF00400.22; Description=WD domain, G- beta repeat
  Pfam annotation: Domain name=WD40; Domain location=335-373; Score =30.0; E_value=8.3e-06; Accession=PF00400.22; Description=WD domain, G-beta repeat
  Pfam module annotation: Pfam domain module=WD40::WD40::WD40::WD40::WD4 0; Domain location=140-177::188-224::240-279::290-327::335-373
MIGPPRPPPAPAGEEDDEDGGGIMIGPPRPPPPSARGEGDDGDGMIGPPRPPPADDEDVDDDEDDDEEEMEDDGEGGFNRIPLSNEIVLRGHNKPVAEPHTNHKLGHHTQSEEGRGEHFTEQRAVGPGHGQASLPQAAVGRVWPVPGGWAVVSALAVDHTGSRVLSGSYDYTVRMYDFQGMNSKLQSFRQLEPFEGHQVRSLSWSPTSDRFLCVTGSAQAKIYDRDGLTLGEFVKGDMYIRDLKNTKGHISGLTGGEWNPKSKETILTSSEDGSMRLWDVSDFTSQKQVIKPKLVRPMRIPVTSCAWDHEGKRIVGGIGDGSIQVWTIKAGWGSRPDIHVEKTHTEDITGVKFSTDGQSLLSRSMDSTLKIWDLRRMKTPLKVFEDLPNHYAETNAAFSSDEQLIFTGTSIEKDGDNGGLLCFFDRKKLELVSRVGISAHYSVIRCLWHPRINQVFATVGDKKEGGTHILYDPSISQRGALVCVGRAPRKKSVDDFEVQPVIHNPHALPLFRDQPSRKRQREKILKDPLKSHKPEAPVNGPGFGGRVGTTKGSLLTQYLLKETWMDEDPREAILKYADAAEKDPKFIAPAYSQTQPKPVFAESDSDNEEK

SEQ ID NO: 64697 - protein, 63 aa, Zea mays
  Coding DNA Sequence Number=SeqID_22918
MARGNLCTGTKRLFGRAPEQLQLWLLAGALPNKVPKTAPPQEQEPIRGQKPRAQKTGSKLLRD

SEQ ID NO: 64698 - protein, 41 aa, Zea mays
  Coding DNA Sequence Number=SeqID_22919
MDEVVKQMSPLQDVNDMASASPRPRSTQRAKVGVACRYPEM

SEQ ID NO: 64699 - protein, 59 aa, Zea mays
  Coding DNA Sequence Number=SeqID_22920
  Subcellular localization annotation: CTP_CleavageSite=21; ConfidenceScore=5.01e-01
GYSVATPLLNFDPPSFRWPLMSALHSARDTSSLRTLQDCQAHHTSMHPSFQSSNLIQEL

SEQ ID NO: 64700 - protein, 89 aa, Zea mays
  Coding DNA Sequence Number=SeqID_22921
  Subcellular localization annotation: CTP_CleavageSite=75; ConfidenceScore=5.25e-01
MEAQDDGGGSRASAGDATRPVRQQCGHIISLSTKANASFPRMVMEARNPAAGLCSRRMESGTEIPDREDPNPAVMASAGDQEVVASTES

SEQ ID NO: 64701 - protein, 68 aa, Zea mays
  Coding DNA Sequence Number=SeqID_22922
  Subcellular localization annotation: CTP_CleavageSite=34; ConfidenceScore=5.14e-01
MAMRPTSFLSPPKANASFPRMVMEARNPAAGLCSRTMESGPEILDREDPNPAAMASTGDQEVVASTES

SEQ ID NO: 64702 - protein, 107 aa, Zea mays
  Coding DNA Sequence Number=SeqID_22923
MKAPNTDSRGLCSSSDPHEPLPTKRLEGGWNRSLPSCVNLGLGAAKLSATVWVGPRSLGGVRELGHREGDRTPYSATATMVDQLATALVGAEEDESVNRRSSVDGVD

SEQ ID NO: 64703 - protein, 337 aa, Zea mays
  Coding DNA Sequence Number=SeqID_22924
  Gene Ontology: Mol. function=protein dimerization activity; Biological process=regulation of transcription, DNA-dependent
  Homolog annotation: Hit_ID=Q6L3Y1; Match level="QueryCoverage=91%, HitCoverage=38%, E-value=1e-63, Identity=41%"; Hit description =Putative hAT family dimerisation domain containing protein, identical
MERFLKRKLPQPASDEGTSHRDQGASTINAQTRPSLILSPRDVNLDELAYDPADRKRITEYPGLKLQEEIRRRYLVRGPHRPQPGFKYPQTIIAKKPRRFNPEWFEQYDWLEYSEKVDKAFCLYCYLFRDCIEGQAGNDAFVTKGFFGWNNKKRLDTHVGGIGSYHNEAVKRCNNLLNPNQSIEFALKKQQDIAKEEYFIRLSTSINAVRYLLHQGLAFRGHDESEESDNKGNFLELVKLLAEQNEKIKRVVLKNAPDNHQMVAPCIQKDITNCFSEIIVSSIIEEIGGDVFCLLVDESADVSDKEQMAVVLRFLSQVYIDALFSKYKLSWKQSEAK

SEQ ID NO: 64704 - protein, 189 aa, Zea mays
  Coding DNA Sequence Number=SeqID_22925
  Gene Ontology: Mol. function=electron carrier activity; Biological process=electron transport
  Homolog annotation: Hit_ID=Q56UT7; Match level="QueryCoverage=58%, HitCoverage=54%, E-value=2e-36, Identity=71%"; Hit description=Blue copper-binding protein
  Pfam annotation: Domain name=Cu_bind_like; Domain location=50-131; Score=136.5; E_value=7.4e-38; Accession=PF02298.8; Description =Plastocyanin-like domain
  Subcellular localization annotation: CTP_CleavageSite=43; ConfidenceScore=5.44e-01
MPSIAAQGGAASEARSWTVRAPSESTVRQPSCWAWRRRRPTTSASRPGSWDLRTNYGTWVSSKRFHPGDQTVFKYSPQAHDVVEVNKADYDSCSIASPVATHNSGNDAIALASPGTRYFICGFPGHCDAGMKIQINVVPSANSLGPASAPAANSPVSPPPMSAPSSAATKATGFGALAAVMIAAGLMAY

SEQ ID NO: 64705 - protein, 254 aa, Zea mays
  Coding DNA Sequence Number=SeqID_22926
MQTTRRSTGKELTVDVVRRKLQPRHRVACGGAMPMGNDGPSCDVVCPSPGSGEAEAPPRSRSSLSPWVGRGGDRRLRPGPSPRVGRGGVRRLPGPRPSPSLGSGEAKFVVFRGRGRVQALGRARRSSSSSGAEAESEPSGRARRSSSSSGAEAESEPWGRARWSFLWRPRIDLAAVSLTLSSGTTVGVAQEALSSCQAILALNAPAIRSVGVAIWPRLLLGEGWALGEPKLCADGGYQLRLGVLGGTPNYGPRQ

SEQ ID NO: 64706 - protein, 189 aa, Zea mays
  Coding DNA Sequence Number=SeqID_22927
MGDAGAGRSGSRAAGVEEGELKGLSAMEASGHGGFASRRPWREKQRVLEQGPSNEGAVPGLGERPALEGEGGRALSAGLEMASCAIGSSASPDPGLRLGLGPGRRRTPPRLTQGSDSASAPEDDELRLARPQGSALASADGLRLTRPRGSDSTSTSEDRLDLDLGGASASPDPGLGPTTSQEGPSLPYP

SEQ ID NO: 64707 - protein, 546 aa, Zea mays
  Coding DNA Sequence Number=SeqID_22928
  Gene Ontology: Mol. function=protein serine/threonine kinase activity; Cellular component=membrane; Biological process=protein amino acid phosphorylation
  Homolog annotation: Hit_ID=Q9LJU5; Match level="QueryCoverage=61%, HitCoverage=89%, E-value=1e-121, Identity=65%"; Hit description =Receptor protein kinase-like protein
  Pfam annotation: Domain name=APH; Domain location=237-417; Score= -16.3; E_value=0.083; Accession=PF01636.13; Description =Phosphotransferase enzyme family
  Pfam annotation: Domain name=Pkinase; Domain location=235-510; Score =111.6; E_value=2.3e-30; Accession=PF00069.15; Description=Protein kinase domain
  Pfam annotation: Domain name=Pkinase_Tyr; Domain location=235-510; Score=111.8; E_value=2e-30; Accession=PF07714.7; Description=Protein tyrosine kinase
  Pfam module annotation: Pfam domain module=APH::Pkinase::Pkinase_Tyr; Domain location=237-417::235-510::235-510
  Subcellular localization annotation: CTP_CleavageSite=12; ConfidenceScore=5.19e-01
MGRRRDRSGRGRSARRQQSSSFGSDSSESRKRSLPRGVVSIGAISLAGGLVLSAVNDLAIFNGCTTKAIEHAADNPAVVEAIGVPIVRGPWYDASLEDGLLSFLRHHDWKILLLEAHLEAPSDDEDQRKLVKSHTSDHAVASSPATSSSSAPSSCRNNDRRAPPERQAPGEEKSRRRNDSVDNSNLVDLVNDIVAESVSYRHRRVAEDILKMEKAGKVTARAFTYAELSEATGGFRPESLLGEGGFGPVYRGRLGSSSGPEVAVKQLDRNGMQGTREFLVEALMLSLLKHSNLVTLLGFCTDADHRMLIYEYMPLGSLEDHLLDLPPGRAPLDWATRMRVAQGAARGLEYLHDTARPPVIYRDFKASNILLDTGFRARLSDFGLAKVGPVGDKSHVSTRVMGTYGYCAPEYALTGKLTTMSDVYSFGVVFLEIITGSRAIDTTRPPEKHNLVLWAAPRFKDKRRFAEMADPLLKGAYPTKGLYQALAIAAMCLQEDATMRPAISDVVTALDYLTVAGGGAAANEPPAPNPNQQQQQTDIIGHAGEQ

SEQ ID NO: 64708 - protein, 572 aa, Zea mays
  Coding DNA Sequence Number=SeqID_22929
  Gene Ontology: Mol. function=RNA-directed DNA polymerase activity; Cellular component=mitochondrion; Biological process=RNA-dependent DNA replication
  Homolog annotation: Hit_ID=UPI00004C1731; Match level="QueryCoverage =99%, HitCoverage=43%, E-value=0.0, Identity=75%"; Hit description =UPI00004C1731 related cluster
  Pfam annotation: Domain name=RnaseH; Domain location=194-321; Score =13.0; E_value=3.6e-06; Accession=PF00075.14; Description=RNase H
  Pfam annotation: Domain name=rve; Domain location=323-505; Score =69.4; E_value=1.1e-17; Accession=PF00665.16; Description=Integrase core domain
  Pfam module annotation: Pfam domain module=RnaseH::rve; Domain location=194-321::323-505
MGPIKDLKGVQRVMGCLAALSRFISRLGERGLPLYRLLRKAECFTWTPEAEEALGNLKALLMNAPILVPPTAEEALLIYVAATTQVRPVYFISEVLSETKIRYPQIQKLLYTVILTRRKLRHYFESHPVTVVSSFPLGEIIQCREASGRIAKWTVEIMGETISFAPRKAIKSQVLADFVVEWVDTQLPAAPIQPELWTMFFDGSLMKTGAGAGLLFISPLRKHLRYVLRLHFPASNNMAEYEALVNGLRIAIELGVRRLDARGDSQLVIDQVMKNSHCHDPKMEAYCDEVRRLEDKFYGLELNHVARRYNETADELAKIASGRTTVPPDVFSRDLHQPSVKTDDTPEPEKASAQPEAPSALEGEALRVEEERSEKAPRGYTHLLVAIDKFSKWNEAVAFFTNIIHRFGVPNSIITDNGTQFTGRKFLDFCEDHHIRVDWAAVAHPMTNGQVERANGMILQGLKPRIYNDLNKFGKRWMKELPSVVWSLRTTPSRATGFTPFFLVYGAKAILPTDLEYGSPRTRAYDEQSNRTNREDSLDQLEEARDMALLHSARYQQSLRRYHARGVRSRDL

SEQ ID NO: 64709 - protein, 170 aa, Zea mays
  Coding DNA Sequence Number=SeqID_22930
  Subcellular localization annotation: CTP_CleavageSite=31; ConfidenceScore=5.10e-01
MTRGDCLLSSNAAKLAMKATTPTTAVHALGRAATAPGTESPCDAQSSPDAMVVDFPPLSSGVLKQALAMAAASTRLATPAAPPSTDFPGIARSSVTMTTNSSPMSATIEAHNLETPMSDSRLHTAALASDEPVSALPTIGYLTQQPSHDCLPAAMEVVPPSTAIALARSL

SEQ ID NO: 64710 - protein, 403 aa, Zea mays
  Coding DNA Sequence Number=SeqID_22931
  Gene Ontology: Mol. function=sugar porter activity; Cellular component=integral to membrane; Biological process=transport
  Homolog annotation: Hit_ID=Q10SL9; Match level="QueryCoverage=75%, HitCoverage=98%, E-value=1e-141, Identity=78%"; Hit description=UDP -galactose transporter, putative, expressed
  Pfam annotation: Domain name=TPT; Domain location=250-372; Score=1.5; E_value=0.00045; Accession=PF03151.7; Description=Triose-phosphate Transporter family
  Pfam annotation: Domain name=UAA; Domain location=123-378; Score =253.5; E_value=4.4e-73; Accession=PF08449.2; Description=UAA transporter family
  Pfam module annotation: Pfam domain module=TPT::UAA; Domain location =250-372::123-378
MKDAKPAKTPMGTDGHVDLNKGDSDYARCKVDRKSTSGTCQFLGSRTKHIDIRYHFLRDHQQKGDIEGKDDPRQEEEEEEEEEEEEEEEEEEEDSAAMTGGGEEQGRSLFGVSLTNRPRWQQFMICSSGFFFGYLVNGICEGFVYLALIRLQGFTVKQMVNPWRTYVRLSAVLMGSNGLTKGSLAFLNYPAQIMFKSTKVLPVMVMGAFIPGLRRKYAFQEYVSAVMLVVGLILFTLADAQTSPNFSMAGVAMVSGALVMDAFLGNLQEAIFKMNPDTTQMEMLFCSTVVGLPFLAVPMVLTGELVTAWTSCSQVSVLSLIALFGAATTAMVTTARKAVTLLLSYLIFTKPLTEQHATGLLLITMGIVIKLLPENKERRPRRLPKNDDDDKPRESREAGEETA

SEQ ID NO: 64711 - protein, 164 aa, Zea mays
  Coding DNA Sequence Number=SeqID_22932
MANGNHGDGYKHRHMRWKTSGSDLKARVTTVNIIVNSGMKLHFKLQTTDVVWPSPATLCRRPVTDDCSKLHCSSHLRLVQAPVTCAAAASPVHRTNSSDPQSRWARHLKFDGGCGHANNVEVIFPESNVVGSASGSAFVPPKLKILEKMTVMLKKMVLLQYKQK

SEQ ID NO: 64712 - protein, 67 aa, Zea mays
  Coding DNA Sequence Number=SeqID_22933
MDPAAAGLWTSYVYQQDAHAAATVFTVAAPGFTSDATLLERLAGPLRHRDGAATNGHSKFEKSCMQK

SEQ ID NO: 64713 - protein, 127 aa, Zea mays
  Coding DNA Sequence Number=SeqID_22934
MKPIITQTRTSSQGPAGNRKHAVYDDEAAHRLRACVEPSPDQMTTIGVDQPPTPAPNVGGEQLGGYDSRGQRRQRAPPVAQEGHGTLDAQEGGGAPTPKEEEDYISKEDRKIFRKIARVLLHEDKDA

SEQ ID NO: 64714 - protein, 204 aa, Zea mays
  Coding DNA Sequence Number=SeqID_22935
MRVYEGGSGKINDFADNASSSAACLAVGIDSFPECALGNEMTLGIDSGSRAAYTRHCLVRAKAFPGELLHPTKGYNCHCTVTCWFSQCRNKPQKVWLEKEKNGNKLCQVSTAQSGIRWGPSSSEGGFGFGMKVFFHDKGMLDMKIQPEEDRDECEAMARYIDEDQGRNQPKEEKTTSSLLTRIIIKSKSHGDGCNLVRAASRAY

SEQ ID NO: 64715 - protein, 87 aa, Zea mays
  Coding DNA Sequence Number=SeqID_22936
MLDEVARWDDLVAGLRPMTYETKEAFILGTFGRKRADFLWHFAEGVYVLRTFGGVEDPQQCPTSPHLKQVVTVPCPAGLAGVPVGAT

SEQ ID NO: 64716 - protein, 160 aa, Zea mays
  Coding DNA Sequence Number=SeqID_22937
  Gene Ontology: Biological process=protein folding
  Homolog annotation: Hit_ID=Q10T60; Match level="QueryCoverage=90%, HitCoverage=44%, E-value=1e-67, Identity=81%"; Hit description =Expressed protein
MDFVSIEWLSRVDHFIELLGLRNCAGCRFYRAEGRGNVWDAKGDHEKNVAFGPPYALLQGTLEVDGVPFKKIPREACPAVKRGSVAWVGSGPEFLISLADHEEWRDAYTVFGNVLPMDMAIAEEMTLLPTSTDVWSNVKVKVLKDPVYFKVKRSSNASAV

SEQ ID NO: 64717 - protein, 141 aa, Zea mays; identical to SEQ ID NO: 42409
  Coding DNA Sequence Number=SeqID_22938
  Homolog annotation: Hit_ID=Q8RZA2; Match level="QueryCoverage=45%, HitCoverage=16%, E-value=2e-09, Identity=52%"; Hit description=Zinc finger protein-like

SEQ ID NO: 64718 - protein, 281 aa, Zea mays
  Coding DNA Sequence Number=SeqID_22939
  Gene Ontology: Mol. function=glutathione transferase activity; Cellular component=cytoplasm; Biological process=auxin mediated signaling pathway
  Homolog annotation: Hit_ID=Q9FQB4; Match level="QueryCoverage=80%, HitCoverage=100%, E-value=9e-98, Identity=81%"; Hit description =Glutathione S-transferase GST 25
  Pfam annotation: Domain name=GST_N; Domain location=5-78; Score=59.4; E_value=1.1e-14; Accession=PF02798.10; Description=Glutathione S -transferase, N-terminal domain
MAGADDLKVLGLWTSPFVIRVRIVLNLKGLAYEYVEDDLSNKSALLLSSNPVHKTVPVLLHAGRPVNESQIILQYIDEVWAGTGPAVLPRDPYERAAARFWAAYIDDKVKSAWLGMLFECRDEGERAEAVARAGEALGTLEGALRGKPFFGRATASASWTPCSAGTLGWFGAVGRIIGRRLIDPAKTPLLAAWEDRFRAADVAKGVVPDDVDKMLAFLETLLANYYSQVTVLRANYCSKKTTRWQCWVSACGTFYIEEGAGGAHPQAAGEMGGTLAPTLSL

SEQ ID NO: 64719 - protein, 177 aa, Zea mays
  Coding DNA Sequence Number=SeqID_22940
MDEGAHYLVLVIMCVFVVRQTLMYLAPTEIGPLEMRVMGSYKEICSRNFTKSRRWLDFVKLAFYTDTSLACIELVTTVIGSGCSYVCCCYSAVPDNKADPITEGTKNAWKHTVYDNCARPDMGGGRFNLGHQERDAEDLMAIDVGELSSYWGGAATIEELRRGRGCELPLDRLEGGR

SEQ ID NO: 64720 - protein, 180 aa, Zea mays
  Coding DNA Sequence Number=SeqID_22941
  Gene Ontology: Cellular component=integral to membrane; Biological process=autophagy
  Homolog annotation: Hit_ID=Q1S3N8; Match level="QueryCoverage=97%, HitCoverage=64%, E-value=2e-51, Identity=51%"; Hit description =CD9/CD37/CD63 antigen
  Pfam annotation: Domain name=Tetraspannin; Domain location=2-152; Score=-36.8; E_value=0.0027; Accession=PF00335.10; Description =Tetraspanin family
KKGTTGSSGHRVPIRDFLEYDLDDYSGWLRARLDAPGRWDRIKACLAATPTCTDFNATYATAQDLFSAAPNRMSPLQSGCCKPPTKCGYTLVTPTYWISPISATADPDCAAWSNEEAKFCYSCASCKAGLLQNLRGEWRRADLILAVATAALLAVYAMGCYAFRTAKTDELFRRYRQGYT

SEQ ID NO: 64721 - protein, 114 aa, Zea mays
  Coding DNA Sequence Number=SeqID_22942
  Gene Ontology: Mol. function=structural constituent of ribosome; Cellular component=intracellular; Biological process=translation
  Homolog annotation: Hit_ID=Q84Z89; Match level="QueryCoverage=66%, HitCoverage=56%, E-value=2e-22, Identity=63%"; Hit description=30S ribosomal protein S16-like
MAAATVAPPWTSLGPDISKGPVWKCRIFCSFETILWYWLSVGAQPSDPVQSILFRAGLLPPPPLLAMARKGGPRDRRPIHPMTGRPLDLEGVAIIDNSNAPEGDTEVPTDEVAQ

SEQ ID NO: 64722 - protein, 78 aa, Zea mays
  Coding DNA Sequence Number=SeqID_22943
MNCRPDRSSVLSFLDRLIKPQIYFTGGFVKDTANRSPHTSGYLKLIISVNKGFAPLDYCRFVVGVAAKYLILSLVYGI

SEQ ID NO: 64723 - protein, 86 aa, Zea mays
  Coding DNA Sequence Number=SeqID_22944
  Subcellular localization annotation: CTP_CleavageSite=42; ConfidenceScore=5.62e-01
MAVVAYLPVPCSYFVVVSCARAIRSLPAPSPGMSIAVPRAARCRLLSTSPMVVNPPIRVRDVLVIPSDSFPAARYTEPGSRIPSAY

SEQ ID NO: 64724 - protein, 106 aa, Zea mays
  Coding DNA Sequence Number=SeqID_22945
MEESFTAARRTGRNGFVDCADGQSWDEVFTAGVTALARLTRVGRATTMVRWPPTNHVAPPQRFDATPRKIFTAVADPSPSRGGNLIAGKFFLKFDEQCTTFQLKIA

SEQ ID NO: 64725 - protein, 165 aa, Zea mays
  Coding DNA Sequence Number=SeqID_22946
  Gene Ontology: Mol. function=5-formyltetrahydrofolate transporter activity; Cellular component=membrane
  Homolog annotation: Hit_ID=Q6ZA55; Match level="QueryCoverage=97%, HitCoverage=38%, E-value=7e-49, Identity=58%"; Hit description =Putative integral membrane protein
  Pfam annotation: Domain name=BT1; Domain location=1-163; Score= -179.7; E_value=0.0026; Accession=PF03092.7; Description=BT1 family
MSQTNRELAMLITNKIGFTPEFLGRVKLVTSFASLLCVGLYNYFLKEVPLRKIFIVTTIICSALGMTQVLLASFMPVLVLAGKLCPPGMEATLFATLMSISNARSVTGGLVGAGLTRIFGVTRDTFGNLPLLIVVYNLSSLLPLPLLGLLPEESGDTDNGETKNI

SEQ ID NO: 64726 - protein, 32 aa, Zea mays
  Coding DNA Sequence Number=SeqID_22947
MAVDSVSGWVDSACNGLIALASGGYAWSDLIG

SEQ ID NO: 64727 - protein, 456 aa, Zea mays
  Coding DNA Sequence Number=SeqID_22948
  Gene Ontology: Mol. function=transferase activity; Biological process= paclitaxel biosynthetic process
  Homolog annotation: Hit_ID=Q5I2Q5; Match level="QueryCoverage=95%, HitCoverage=95%, E-value=1e-136, Identity=55%"; Hit description =Putative alcohol acyl-transferases
  Pfam annotation: Domain name=Transferase; Domain location=7-436; Score=302.8; E_value=6.1e-88; Accession=PF02458.6; Description =Transferase family
MASSLKFTVRRGPAVLVAPASATPRELKRLSDIDDQDGLRLHVPIIQFYRQNALMGGREPAPVIRDAIARALVPYYPFAGRLRELEGRKLAVDCTGEGVLFIEAEADVRLDHFGDELQPPFPCLEELIFDVPGSSEVLGSPLLLFQARDGVLVSAHPRLEKKIRITAAMRLVSRVTRLACGGFILGVRLHHTMADAQGLVQFLGAVAELARGAAGPTVRPVWGRELLEARDPPRPAFAHREYDEVPDTKGSIIPLDDMVHRSFFFGRHEVAAIRANLPPDLRSRASKFDLPHGAPMEVPHRSARPGRRRAAVATAGDLVAKPLGYAVELVKRAKGEVNVEYMRSVADLMVLRGRPHFTVVRAYLASDLTKAGFSNLDFGWGNPVYGGPANVGVGTSPGMATFLVPCKNAKGEDGIIVPMCLPGPAMETFVKEMGTLVSLPAEQKQDPMLPVNRSAL

SEQ ID NO: 64728 - protein, 111 aa, Zea mays
  Coding DNA Sequence Number=SeqID_22949
MWVLTGTSSDQRGPCADQGEWRALCRGRGQRKGALCRAPTAPRELLWQGTEGRGMGAVGCWRNQGAMAGAEVAAPMEQGWNSAAMGGRELPARWGRKLLACSRVGEGGRKL

SEQ ID NO: 64729 - protein, 142 aa, Zea mays
  Coding DNA Sequence Number=SeqID_22950
  Gene Ontology: Mol. function=acyltransferase activity
  Homolog annotation: Hit_ID=Q7EYV6; Match level="QueryCoverage=64%, HitCoverage=19%, E-value=1e-29, Identity=69%"; Hit description =Anthocyanin 5-aromatic acyltransferase-like protein
MEMKQQAALPPAMEKFDVTPSPAPAAGQPRALPLRFYDLVFLAIPPVQRLFFYDRADLLDVSDFTLGELPRFRDSLAAALHHFYPLAGKLTCELVDEEAAAPPEGPRDQGAPGGGGGEIEGAGSVGWMEQPSREPASQGPPG

SEQ ID NO: 64730 - protein, 69 aa, Zea mays
  Coding DNA Sequence Number=SeqID_22951
MTATKAFAMAVVCGGRIVACGVHGGGRSLRRAGFAAGRGGRITVGGGLFAAFTGCEEDWTKTLRMQHLK

SEQ ID NO: 64731 - protein, 99 aa, Zea mays
  Coding DNA Sequence Number=SeqID_22952
MVREFPVRRGFGASAAGVGAGVQVVGGHAATNILTLLSKVWPKKVEELTARVHNTSTTGGGGQGRRRVRHATRFLEASLRSLDGHDDVYECAGERSQGC

SEQ ID NO: 64732 - protein, 57 aa, Zea mays
  Coding DNA Sequence Number=SeqID_22953
MQSPGDLFRLSSEILEFNRTFPSLLFHLNDILIGKMYTSKTSIMLSRLESGSSSSTT

SEQ ID NO: 64733 - protein, 81 aa, Zea mays
  Coding DNA Sequence Number=SeqID_22954
  Gene Ontology: Mol. function=protein kinase activity; Biological process=protein amino acid phosphorylation
MRDRRKLRVALFNSAKENTLRLDGRSMKLGYCVLLIDSALMSETFKEVKSEPERTSRSVDMQKVEINWRDYQYFTFERELK

SEQ ID NO: 64734 - protein, 73 aa, Zea mays
  Coding DNA Sequence Number=SeqID_22955
  Subcellular localization annotation: CTP_CleavageSite=66; ConfidenceScore=5.45e-01
MANSAAPGGMRPFLQAVSAVLVEARTSLRVAQMEGSSLNPRRRQTPPRCCRAPPWSGSASWAGSLRTSNPGAK

SEQ ID NO: 64735 - protein, 35 aa, Zea mays
  Coding DNA Sequence Number=SeqID_22956
MSRPGAAKLAGEPAHSGADEGALMRGSSILVCART

SEQ ID NO: 64736 - protein, 120 aa, Zea mays
  Coding DNA Sequence Number=SeqID_22957
MGKNNKRKSEPTPPSEDFGDSEYLEEEFSFESEGSSAPIPLQYSSDEEDSSEEDGGGDGEDDDDDDDNDEGGGGGDGDNGGKGGSSDSKDGDGDSSRSGGGSNRGSNRGGSGRGSNRASG

SEQ ID NO: 64737 - protein, 107 aa, Zea mays
  Coding DNA Sequence Number=SeqID_22958
MDGGSWWYGNVRTLNPVMSQATSISASLGLTISANHALESESDSDSESLYEVEGVPYERGYELFSTSVIYWYLLIRFVSMDLLPRSYGTPSTSYNDSLSESDSLSRA

SEQ ID NO: 64738 - protein, 59 aa, Zea mays
  Coding DNA Sequence Number=SeqID_22959
MQDAARRALSQYCSLFSGVADGLNLKYYPHRSTGITGSVIVSPMSDNRHQGGRRAHPEK

SEQ ID NO: 64739 - protein, 84 aa, Zea mays
  Coding DNA Sequence Number=SeqID_22960
MKGHWELTDVELLSLGNATPSGLVLHSGNILGLLLALGMSDHSVDCSDGTAVTIAEGTVSDTVVDAEVDVGVGASASVPGGDSA

SEQ ID NO: 64740 - protein, 60 aa, Zea mays
  Coding DNA Sequence Number=SeqID_22961
MAAAEAAGQLPSAREADERVHALRTGGWAVVGAARWATDAARKKIRKATKERVTPEFGEY

SEQ ID NO: 64741 - protein, 150 aa, Zea mays
  Coding DNA Sequence Number=SeqID_22962
MGGGSRLGRKNKAKAGKTNETSYNGKNNDEYGEETPAPTPSAENGVAQRRRHEGREKSSMANEVAATEARIMIIVWSRTVLGRPFGHLHAKGWDLDSREEEDDPVPSWTVWCDTGKVSLLCPGHGPSNLEPLTAAQRALLGGTPLVIGVA

SEQ ID NO: 64742 - protein, 65 aa, Zea mays
  Coding DNA Sequence Number=SeqID_22963
MAQGRLPPLWNLDPTPAGEILGRFGSTSHPERPQTTWSRQGIKKQSRYTSFQIQRSTNNRSHGGF

SEQ ID NO: 64743 - protein, 56 aa, Zea mays
  Coding DNA Sequence Number=SeqID_22964
MALGEKVVSDNDKNNDKDSTSNVSRSTDELATETKYATLLDECDELRSRSSLLGAS

SEQ ID NO: 64744 - protein, 60 aa, Zea mays
  Coding DNA Sequence Number=SeqID_22965
MTEETTLKGISRAPRLQGMQQSSYRPPGYKRQRRQKLWRKMVDKDINVLLLGLRPVAINR

SEQ ID NO: 64745 - protein, 205 aa, Zea mays
  Coding DNA Sequence Number=SeqID_22966
MPRLEPGRVADHGAEARARRARWPSGRHAGQRPRQQGNAGLAASHADCALWAASRRVRGCRPRRLAAGGWPRRDRAHPCRDATPGDEGEGRRWRFGRGENERVLVLEWEIVGKHGEKMRKGERWAGGGLVGGTHPQAAVALWFWGEGRTAPGGHTGPREWAGGGPQEMEADGVEVFFIINSEDFLLVRSGFATFCFFRRANFVPK

SEQ ID NO: 64746 - protein, 141 aa, Zea mays
  Coding DNA Sequence Number=SeqID_22967
MSATSGSTIQVLPRRTSPTLSTEEEVSSESEGSLALASPPTSSDDSDDSQGIAAEVWMYIRSIERAGLEGSDELEVSSDEEDSFSSSEERSGDDSDDEGGGGGGDSDDGDDGGGDDDGGRGSEGDDSGSGGGKASGNAPLV

SEQ ID NO: 64747 - protein, 161 aa, Zea mays
  Coding DNA Sequence Number=SeqID_22968
  Subcellular localization annotation: CTP_CleavageSite=74; ConfidenceScore=5.06e-01
MAARVQDFVTIRFGSMWVDVPMGPIQASNSAGSLQTTATSPAVVAHDQEVNSKAEEGFTPVMSKVAKRRARRVIAKARVAATNECAANWHKATPTNSTPDSSKYKGAKPSSFMMTPKLFHPITLGEWPICARKGATNQVNSADGVFIFSKGKGSDATCCHS

SEQ ID NO: 64748 - protein, 143 aa, Zea mays
  Coding DNA Sequence Number=SeqID_22969
  Gene Ontology: Mol. function=RNA-directed DNA polymerase activity; Cellular component=mitochondrion; Biological process=RNA-dependent DNA replication
  Homolog annotation: Hit_ID=Q9FE41; Match level="QueryCoverage=97%, HitCoverage=4%, E-value=1e-43, Identity=58%"; Hit description=Oryza sativa (japonica cultivar-group) genomic DNA, chromosome 1, PAC clone:P0433F09
MTPYSLVYGGEAVLPLEVQIASLRVVIQEKLNEDESVKLRLRELDNLEETRLRALQNLEAYQARMSRAFDKRVKRSFKEGDLVLAVIRPMNITHKMQSKFEPKWEGPYIVKDVYSSSAYRIISPDGEYCPPPVNGKFLKRYFA

SEQ ID NO: 64749 - protein, 147 aa, Zea mays
  Coding DNA Sequence Number=SeqID_22970
MFLKTTQQVVQMVLHGLDVTTLREPGRCADLRRTSANLPVNFPSIAKIKAMLEQLVVISEQLQLAYSALDASSGEVDQAVEGFKQELLAKSNTLQVIAEEIASVEKKEAEISAEIEKLKLTLLEQGEKKKQLSELQSAQDLEVKQQE

SEQ ID NO: 64750 - protein, 105 aa, Zea mays
  Coding DNA Sequence Number=SeqID_22971
MTKTEGLNTENFVKTIRTTMMNAKRLFRSGAPYCLVVHRTVSGGAPDSVRKEIGHRDSVRCAPDCPVRPMTEGKISLPELLSTAPSCLGAIKGTPRRMEDNTKQP

SEQ ID NO: 64751 - protein, 65 aa, Zea mays
  Coding DNA Sequence Number=SeqID_22972
MAGLSWFNLGHFGQPLKNPTDIEEEMALIGHLTHISDIPRRKADRMMLGNLRFSPTNLMDGCQKR

SEQ ID NO: 64752 - protein, 354 aa, Zea mays
  Coding DNA Sequence Number=SeqID_22973
  Homolog annotation: Hit_ID=Q1SJP5; Match level="QueryCoverage=47%, HitCoverage=46%, E-value=1e-59, Identity=66%"; Hit description =Cyclin-like F-box; Serine/threonine protein phosphatase, BSU1
  Pfam annotation: Domain name=Kelch_1; Domain location=4-50; Score =34.1; E_value=4.7e-07; Accession=PF01344.15; Description=Kelch motif
  Pfam annotation: Domain name=PPR; Domain location=219-253; Score=5.1; E_value=1.8; Accession=PF01535.11; Description=PPR repeat
  Pfam annotation: Domain name=PPR; Domain location=254-287; Score=2.5; E_value=3.7; Accession=PF01535.11; Description=PPR repeat
  Pfam annotation: Domain name=PPR; Domain location=290-324; Score=8.2; E_value=0.79; Accession=PF01535.11; Description=PPR repeat
  Pfam module annotation: Pfam domain module=Kelch_1::PPR::PPR::PPR; Domain location=4-50::219-253::254-287::290-324
MNLPRRLSSGFFMDGKFYVIGGVSSQRDSLTCGEEYNLETRTWRRIFDMYPGGTSASQSPPFVAVVNNQLYAADQSTNVVKKYYKANNAWNILKPLSVRADSSNGWGLAFKACGNRLLVIGGHRGPRGEVILLHSWCPEGGEDGADWEVLSVKERAGVFVYNCAIMGNDYFSGESKKHSDVFCDISELDFFPYATYLDSEELELKEHVEYLPGARLAPIDGLRIIGLYGKAGMPGHALRTFQEMGMYGCPRTAKSLNATMKVLLRARMFDEALSLFEEGPEKYDVEVDDISCNAVVKMFYDMGDLRAAYRVMQGMERADTVQAEDIKEICKLLVVVSREAVKAYVGTAIVFTLI

SEQ ID NO: 64753 - protein, 166 aa, Zea mays
  Coding DNA Sequence Number=SeqID_22974
  Subcellular localization annotation: CTP_CleavageSite=27; ConfidenceScore=5.14e-01
MDVPSRFLPSRPSWVPGSPPNLIWNCCASASICRIPAHRRARACFLCAQPLPPQPQSTPLSSPPPGCRTCETARDRHRFNRSTLFPGHRSTLSSGSCALLFPSQPVEVDLGSVPIAVELPYMFLSVRLSLVPARSRARGFEALRVRRAALCASVLFRQNSPSTMFK

SEQ ID NO: 64754 - protein, 87 aa, Zea mays
  Coding DNA Sequence Number=SeqID_22975
MATAGDPPLPIDVESVPSALLNGTCSFKPSLTLPLPAIVFIIQAASQGNRSVPYDPSKDPLRRPAKPKDRAWKYAFWSKLEKKDVRA

SEQ ID NO: 64755 - protein, 232 aa, Zea mays
  Coding DNA Sequence Number=SeqID_22976
  Gene Ontology: Mol. function=nucleic acid binding; Cellular component= intracellular; Biological process=DNA integration
  Homolog annotation: Hit_ID=Q8H6I0; Match level="QueryCoverage=91%, HitCoverage=13%, E-value=2e-66, Identity=58%"; Hit description =Putative gag-pol polyprotein
MSGDHAKKMVIGGEKSATSHGKAPSRESANKKKDGSPSRIRPHKSGEKKKKMKKVVYYETDSSSPSTSGSDSSSVTSKRQERKKYSKIPLHYPRIPKHTPFLSIPLGKPPTFDGEDYSRWSDMMRYHLTSLHKSIWDVVEFGVQVPSVGDEDYDEDEVAQIVHFNSQATTILLTSLSREEYNKVQGLKSARRFGTYSDVHEETSDQIPAETSRGARRFCSQGRTTECQRSDW

SEQ ID NO: 64756 - protein, 218 aa, Zea mays
  Coding DNA Sequence Number=SeqID_22977
  Subcellular localization annotation: CTP_CleavageSite=29; ConfidenceScore=5.31e-01
MVWPAGGGQQDGWAAPPASVRARRAAQLRAAVAARRRLRRWGARARAGEGDGAETVGAGARAGGVAGGRVARRRQEGRRGRGGRRGGGAAARGRGAAPRAVVIRAGGHRAHGQGPRPPQRPQRRAPADRVLGPVNVRRQPTLLCVQPYTSVPSEEPLVDMVDLTNPSWIDASSVNEPPADVVDLLHASNEPLVNLDGLPNHPDMSFGGSSGEHTDSLI

SEQ ID NO: 64757 - protein, 299 aa, Zea mays
  Coding DNA Sequence Number=SeqID_22978
  Gene Ontology: Mol. function=helicase activity; Biological process =viral genome replication
  Homolog annotation: Hit_ID=Q5VR06; Match level="QueryCoverage=74%, HitCoverage=29%, E-value=1e-55, Identity=72%"; Hit description =Helicase-like protein
MGKIIRSHKQGIDIDHPTKRKRKLYIFDTKNEIENRIRALTNEEPGEHPNDRPDIIVRVFHMKLQQLLDDLQSGKMKSNDKLEDIAKDPKYRKTILTEWFNANKQYEDAKELTYYEFPKQWRWDGEKRQWKKRQHGFKIGRLYYVNPAEGERFYLRMLLMIVKGTGKTFLWNAIVSYLRAIRKIVLTVASSGVASLLLPNGCTTHSRFRIPIDLDQLSMCDIKRGTNLAKLLIDTNLIIWDEALMTNKQCFEAFDRSLRDIIGETYEKALDIPFGGKVVVLGGDPKQILPVIENGTKEQ

SEQ ID NO: 64758 - protein, 521 aa, Zea mays
  Coding DNA Sequence Number=SeqID_22979
  Gene Ontology: Mol. function=binding; Cellular component=integral to membrane; Biological process=transport
  Homolog annotation: Hit_ID=Q6ESH9; Match level="QueryCoverage=99%, HitCoverage=93%, E-value=1e-110, Identity=49%"; Hit description =Mitochondrial substrate carrier protein-like
  Pfam annotation: Domain name=Mito_carr; Domain location=352-433; Score=45.3; E_value=2.1e-10; Accession=PF00153.17; Description =Mitochondrial carrier protein
MNSTRRASKAAKSTINYHRFSLDEHHLFEPDALITKERDANHQSRQSSQSCRTYAYRRLTTPQFVSALSGIWNLVGQPESSGTAQRSSIHGISSREDPVCFSRDQQGNILTPCCVENSSGLRSQYCFSTPKEIYEDLIYVKKKMLTLTPFNNIVGASSTWMHMHSTNKVEGAHYLQFGTIYSVQAEKMEKIETSQNSKRSMCEETCASSNNMDIRDNSYSNQTRHMPNELFTISNEEASSTHDCESSRHNTECNLEKNQEDSNFLACPVHEMEIAKEVRIMPGSQVFSKACTDAQLDKSKHMSCLVGDAVVLNSANADESACREDVCLQLSLDKCSQELQPTFQHRFDGAVTINRHAVAGALAGTAVSVSLHPIDTVKTIIQANSYGQSSVYHTLRRTLIERGLASKLACSAPISAIYTLTYETVKGALLPVFPKFYAYESLKQSLLKSAPDRAKLNSGQTVYKLLCGGFAGSTAALCTTPFDVIKTRVQLQCFHYLISDPYLTISDIIRICKENKYHESI

SEQ ID NO: 64759 - protein, 114 aa, Zea mays
  Coding DNA Sequence Number=SeqID_22980
VYVGEIISEGSEREFLQTKPAPYNVVLEDGTYKGVLKLGLKFISSVSLEQSSDCVRCPAPAPAPAPTRQTSAGHGLFFLLNSFALPSIPWRRLFSFASRWAWNHGQAPRERCGN

SEQ ID NO: 64760 - protein, 930 aa, Zea mays
  Coding DNA Sequence Number=SeqID_22981
  Gene Ontology: Mol. function=ubiquitin-protein ligase activity; Cellular component=ubiquitin ligase complex; Biological process =protein amino acid phosphorylation
  Homolog annotation: Hit_ID=Q6ESH4; Match level="QueryCoverage=68%, HitCoverage=82%, E-value=1e-170, Identity=51%"; Hit description =Putative serine/threonine-specific protein kinase
  Pfam annotation: Domain name=Pkinase; Domain location=655-901; Score =20.4; E_value=8.9e-10; Accession=PF00069.15; Description=Protein kinase domain
  Pfam annotation: Domain name=Pkinase_Tyr; Domain location=655-905; Score=-27.1; E_value=8.2e-11; Accession=PF07714.7; Description =Protein tyrosine kinase
  Pfam annotation: Domain name=TolA; Domain location=385-723; Score= -154.5; E_value=0.082; Accession=PF06519.2; Description=TolA protein
  Pfam module annotation: Pfam domain module=Pkinase::Pkinase _Tyr::TolA; Domain location=655-901::655-905::385-723
MEEWEPLRSARCSPAATPSSLLQDELAAHEVFVAVPEEVSDGRSTLLWALRNLVKDGSKLAIAHVHYCPAPAIAQTACDFRYISDRSHTSMKPEEIKEYRKQKRAKAEKSLDAYVQMAKAVTFQVACAKVIIETDDVAEGLEELISLNNVTEFVMGAAADRHFSREMNTPKSMTALKLFKTAAPSCKMWFTCKGHLICTREANESLPAILASPEKSNAPLSPAHNVSSQMGSMATELEYKESSHKGYISSSSAAAEMTEWDYLFGVIGDTHETTQVVHFTTQEPDSTYLLLASTYNQEDEPSVHEEKYEKLQDSCIEAKLLKDEADDDESNKIRKAEMDLLSALQRVQCDQNSEISLQIKELEDSYIHEVSQRKEIEKTLARQRLEIDEMRRQRCTLSDKLHDSDKHKLVLEQRITQIKSAAKDHVEEITEHFIRQSSEESKKHQKVKMGLLSTLQRVKEVESLLQNEKAQREYMEEKVSRQRTEIEETRRQRDKLYHDLQDLKEQKLKLEQVGMSEETNRRRKAERDRLSYLQRIKDLEHQHIHQVKKQETMEETMTRQKEEIQASKRKLHETHGKHMSEIKSAVKVHEEKLADSKQLLQELQAKHDKLLRERDTAAMEAKESRQKNKQRALGTTETANTEFSIVELQKATRGFDAELKISEDGFASVYRGFVRNTDVAIKLFHSRSLKGQARFYQEVAVLSRVRHPNIVTLVGVCPDDFALVSEFLPNGSLEDWLSCKKSMPPLTWKARTRIVGEICSALAFIHSHKPYPIVHGDLNLGNILLDANFVSKLGGLGICCLLLGGGEDDITATSLRSRPSAADRSKGTLRYTEQGGGFKSAAELMLWSDVNSFGVTILRLLTGRSQQGIGEMVEEAMEKGNLHSIIDASAGEWPLVQASQMAHLLGLGASPWARGASQISPGRCGRRSSN

SEQ ID NO: 64761 - protein, 913 aa, Zea mays
  Coding DNA Sequence Number=SeqID_22982
  Gene Ontology: Mol. function=protein serine/threonine kinase activity; Cellular component=ubiquitin ligase complex; Biological process=protein amino acid phosphorylation
  Homolog annotation: Hit_ID=Q336U5; Match level="QueryCoverage=90%, HitCoverage=95%, E-value=0.0, Identity=44%"; Hit description=U-box domain containing protein, expressed
  Pfam annotation: Domain name=Pkinase; Domain location=545-816; Score =134.0; E_value=4e-37; Accession=PF00069.15; Description=Protein kinase domain
  Pfam annotation: Domain name=Pkinase_Tyr; Domain location=545-815; Score=74.7; E_value=2.9e-19; Accession=PF07714.7; Description =Protein tyrosine kinase
  Pfam annotation: Domain name=U-box; Domain location=839-913; Score =69.3; E_value=1.2e-17; Accession=PF04564.6; Description=U-box domain
  Pfam module annotation: Pfam domain module=Pkinase::Pkinase_Tyr::U -box; Domain location=545-816::545-815::839-913
EVVAAFDTNETRKRNKEIPPCCFSVRVTPKPLSHLGALRMEGGSGAAHRPWDTASQLQYSFRTSVSSLSEVEEEEASPPPVAVEDRVFVAVPEDAKNGKSTLLWALENPAKDCAGVVVAHVHCPAQMIPMMGAKVHHSTVNPQRVNEYRKKVRAEVEEKLDEYVLVCRRQKVSCQKVVIEMDDAVRGLEQLITLHGVAKLVMGAAADKHYSKKMKSLKSKTALRLTEVAAPSCKIWFTCKGRLICTREANTTVPAMPPPSPALTSASRSSVSSVASQLRSMLLSRSESDGSSSNGSPRHDLTRSRTEAGLLLYPSHETVNIGTPSRLYESYGRRPPTTASVSSSDSWNEFGRRSQNSWHDDLSRNDGAATTTVVVSGSAMQEPDDENFSSPSHELMAQVGLDSGAAQENPGVDANIYRRLTEALSEAERCRKEAYQESAKRLRAELDMASALENVNELYQHEVRQRKAIEETLARQAQEMEEMKRQHGVASKELHDVKEQRLVLERQVTEMASAVQGYEEKVAAAETLNTAEFSYSELEQATQGFDEGLKIGEGGFGSVYRGFLRNTAVAVKLLDPESMQGPSEFNQEVAVLGRVRHPNLVTLIGACREALGLVYEYLPNGSLEDRLACTNDTPPLTWQVRTRIICEMCSALIFLHSNRPHPVVHGDLKPGNILLDANLVSKLGDFGICRLLMMSQSTTTTTMPVATTKLHRTTTPKGTFAYMDPEFLSTGELTPRSDVYSLGIIILRLLTGRPPKSIAEVVEDALERGQLHAVLDAAAGDWPFVQANQLAHIGLRCAEMSRRRRPDLAGEVWKVVAPLTMAAAGRPLPFAPSPLDDARAPSYFVCPIFQEVMSDPRIAADGFTYEAEAITGWFDSGRDTSPMTNLKLEHCELTPNRALRSAILEWRQQQQRR

SEQ ID NO: 64762 - protein, 48 aa, Zea mays
  Coding DNA Sequence Number=SeqID_22983
MVGLVECKVYAYKVGLDVIKLLERMQIRQELCLQLETLVSPMYRWQWM

SEQ ID NO: 64763 - protein, 46 aa, Zea mays
  Coding DNA Sequence Number=SeqID_22984
MGCAGAVLPAGSTVVDPFHHLHRGHADEPATMRGLATAAWVVVGSR

SEQ ID NO: 64764 - protein, 102 aa, Zea mays
  Coding DNA Sequence Number=SeqID_22985
MANLPDLQQTRGTRRVCLSPPNLLDMHRNNGGATALAYLLQSKEQGEEAATRFLYPRYGSAPVEEENGPREITVVVQIRAYGSTRARGELGISLTCLATGRH

SEQ ID NO: 64765 - protein, 128 aa, Zea mays
  Coding DNA Sequence Number=SeqID_22986
MACSKKILAVLIVPILLALLASTMHASQGSRALFGGEQCSTSNNCNEQLCGATCAVLGENGIGIIVTSTKHTSVARLDADSRLIIGNSFDLVGNVKMFGCGRNKTDDGEKDDLTNPSNPMYIKKLLVV

SEQ ID NO: 64766 - protein, 63 aa, Zea mays
  Coding DNA Sequence Number=SeqID_22987
GERLQLVEIPRKREEYLLGAFFSAEGPLSKNTFGKTICKQAQHEVIKDINVILTGLRPVPINW

SEQ ID NO: 64767 - protein, 390 aa, Zea mays
  Coding DNA Sequence Number=SeqID_22988
  Homolog annotation: Hit_ID=Q6K1V9; Match level="QueryCoverage=39%, HitCoverage=16%, E-value=3e-50, Identity=64%"; Hit description =Ribosomal protein-like
MYACSSAFLLLAVAAVSMMISKRRRSIRHQEVEEVDDEFDHILDLMMGEYRKRKNEEQRKRRRGSVFGHEVYDRSRGEHDLKLFNEYFAERPTYLEKYFRRRFRMSRPLFMRIAEGVKQHDRYFHQKRNAVGALGFSCLQKVTATFRQLAYGVPADYVDEYLRIGESTAIESLRKFVRAVCEVFGPEYLRPPNEYDTTRLLTIAEQRGFPEMLGSVDYDVPGEPWKETRRSLQDDRSGIPRMVTPKGDDGWRAAAAAGRWIRDSEDGGTEGRRDGWQLQPGRRRIKDSEDGCTKGRKGFVKCQWGLRYEGTNDLLVSVYGDYTLGSRDLHAQEDDICLAAVINEYFVQIPPCHSAIFHQCISMGRTMEIDILCIEELDPSEIMWITPLKG

SEQ ID NO: 64768 - protein, 191 aa, Zea mays
  Coding DNA Sequence Number=SeqID_22989
MARLPLRRADYAGAAAGMNDDGNDNTLGSRRMRTRLRRACASESRARQPHAGRAEGTHTGRTGREREATTGAHGRVAPDATARPRWGHTHGPRRSTAWLRAAGRADVRARCTKRAAPAARHAGRMSRTKQAAPGTQGRAQRLHLQAARPSHAQQLRRPRTDGSSGCMGEPRATGRAGEMSWLRKRGKKRGQ

SEQ ID NO: 64769 - protein, 75 aa, Zea mays
  Coding DNA Sequence Number=SeqID_22990
MVEGTLRTGWGYSGEQSRPQGGGIGCAGASSSSGKGGGTPRAKTRVSGGCKVDIADRAGPRRRGTGTCAGETVRR

SEQ ID NO: 64770 - protein, 131 aa, Zea mays
  Coding DNA Sequence Number=SeqID_22991
MAADTSTHHGREQYFLYHGREVSRHELFIQSSFDRSPFRYPLTRRHLPKFRIHCFPSNLFQPAAGEHAPVEGGRTRDKDGGFGAYAGYRGSGGKGRRIGRRRLGFACMASCCLLLLALAPNRGARPQLMPP

SEQ ID NO: 64771 - protein, 123 aa, Zea mays
  Coding DNA Sequence Number=SeqID_22992
MASSGQTHDAEPARCALLWTPGPCIRSHRRSTVPLAVVGPPLSPPPGPFCILHVPPAASCQRAPPMAPEQQHFRDRWSSREATTRRSSRGDSAVARQRMRGVRKRRVTDWVRKRTQVVSNAMK

SEQ ID NO: 64772 - protein, 61 aa, Zea mays
  Coding DNA Sequence Number=SeqID_22993
MEAEPKKVLTPMPSSETSKKDERITPVISAFFFEDVKEEGDKAETVVEALEKVTATMKVLL

SEQ ID NO: 64773 - protein, 167 aa, Zea mays
  Coding DNA Sequence Number=SeqID_22994
  Homolog annotation: Hit_ID=O24567; Match level="QueryCoverage=75%, HitCoverage=100%, E-value=3e-60, Identity=90%"; Hit description =ESR3g2 protein
MASRMGMVAIMSLFVYAIVVPTSVNANAWQTDDKPGVNRNMEMQQQQGGFIGHRPRLASFNRASNQEGDRKRTVPSGPNHKHNNIPSHTPHHPPSYVQALYEDDRTITSPASQSRFYGIKDVNDGYCVTIYLRLAASTSVNANVWQTDENAFASAKKPSVNRDGNGS

SEQ ID NO: 64774 - protein, 242 aa, Zea mays
  Coding DNA Sequence Number=SeqID_22995
  Gene Ontology: Mol. function=ribonuclease H activity
  Homolog annotation: Hit_ID=Q6YXH6; Match level="QueryCoverage=84%, HitCoverage=95%, E-value=3e-83, Identity=85%"; Hit description=FH protein interacting protein FIP1-like
  Pfam annotation: Domain name=GRAM; Domain location=116-195; Score =52.3; E_value=1.6e-12; Accession=PF02893.10; Description=GRAM domain
MGCRLRHAVPPNPIARIQESVQLKRCGDWRVGHEGDGEECAVAVGAEGRGGDQEGRGPVAQHMAALWATLLCSSTLSNYIHHRRSDWLRTAPSIAEAAVGRIAQGTKVLAEGGHDRIFRQAFSAPPDEQLRKSYACYLSTAAGPVMGVLYLSTARVAFCSDSPLSYEASGGDRTEWTHYKVAIPLQRLRAASPSANKTKPAEKFIQLVSVDSHEFWFMGFVNYDGAVAHLQEALSGFRNLQA

SEQ ID NO: 64775 - protein, 123 aa, Zea mays
  Coding DNA Sequence Number=SeqID_22996
MGKSKKGGSSSHHSGDKRKRELTPPSEDFGDSEYSEEEFSSESEEVWTYIRAIERAGLEGSDESEVSSDEENSSDSSEEGGGDGDGEGDDDDGGDGDDKGGGGDGDGKDGSKGSSKGSNKASG

SEQ ID NO: 64776 - protein, 53 aa, Zea mays
  Coding DNA Sequence Number=SeqID_22997
MATPDWRGTRNPAAYTERMIALGCSHKQLSGPRVMGPTCRLRLIFDTGTRDTA

SEQ ID NO: 64777 - protein, 81 aa, Zea mays
  Coding DNA Sequence Number=SeqID_22998
MDGRTELGDHASSYDSKRRWGGGGLGAREWSMATDDGRQAALNDPRVQLHANSSQPNTQIDSIQQYSACRASAAVATFIDK

SEQ ID NO: 64778 - protein, 671 aa, Zea mays
  Coding DNA Sequence Number=SeqID_22999
  Gene Ontology: Mol. function=glucose-6-phosphate isomerase activity; Cellular component=extracellular space; Biological process =gluconeogenesis
  Homolog annotation: Hit_ID=Q6YXI1; Match level="QueryCoverage=94%, HitCoverage=94%, E-value=0.0, Identity=70%"; Hit description =Putative glucose-6-phosphate isomerase
  Pfam annotation: Domain name=PGI; Domain location=98-579; Score=20.1; E_value=9.2e-12; Accession=PF00342.9; Description=Phosphoglucose isomerase
  Subcellular localization annotation: CTP_CleavageSite=70; ConfidenceScore=5.66e-01
MASISGAAAAPSSAACRLRLRRHILLRPSHLRLRAPHSIADLSRSSSSSSSAPTRAQPLGSRPENGGGVRAVEKDPIKLWERYVEWLYQHKELGLFVDVSRMGFTEDFLRQMEPRMQRAFAAMRELEKGAIANPDEARMVGHYWLRDPALAPNSFLRSKIETTLDRILAFSQDVVSGKVAATFSIFLFAYIPAIASAADFELHGMLGVHHLGGKYSNRHGRYIVQPIDAMYLIETFGTFLFVLMYYNKGFRIRFIDNTDPAGIDHQIAQLGPELATTLVIVISKSGGTPETRNGLLEVQKAFRDAGLQFSKQGVAITQENSLLDNTARIEGWLARFPMFDWVGGRTSEMSAVGLLPAALQGIDIKEMLAGAALMDEETRNTVVKENPAALLALCWYWASEGIGNKDMVVLPYKDSLLLLSRYLQQLVMESLGKEFDLDGNRVNQGLSVYGNKGSTDQHAYIQQLREGVHNFFVYFLSRSCVTGLLVMIGSLKPGVTCGDYLFGMLQITEVYDILQGTRSALYANDRESISVTVQEVTPRAVGALVALYERAVGLYASLVLRLGKRQQEKCWPFRKRVLTVLNEATCKDPCEPLTIDEIADRCHCPEDKHNAFPPSITHAQRLLPQIEMIYKIVQHMAANDRAIIAEGSCGSPRSVKVYLGECNVDEDLQAA

SEQ ID NO: 64779 - protein, 92 aa, Zea mays
  Coding DNA Sequence Number=SeqID_23000
MTHEGNRYTLGADSDNSNENCNLLAKRWKSSFIPFAAADVAGRAYTSVPGRPMGRDGGRSGMARGIERRGRHADALVLVLASKVIDIFDALE

SEQ ID NO: 64780 - protein, 209 aa, Zea mays
  Coding DNA Sequence Number=SeqID_23001
  Subcellular localization annotation: CTP_CleavageSite=78; ConfidenceScore=5.30e-01
MASGQCNPVTCPSIGPRCPKHLTRARGRPRCARLPLPAASINHRSTLDPPKTPPPPFNHLESRSHGQNPTTEFAGYPSLALASSGDHRPPGTRAHLISSNFTAAGESGIAKVVNPLGAGSQPLVPDPTVWISGYWFALAPLPLGPARRLPTPLVLGLTGQPRPHPEPLTTLDRLGLGLFPEYLSVRTCSLDDHLGKQYNYESGMGLKVA

SEQ ID NO: 64781 - protein, 86 aa, Zea mays
  Coding DNA Sequence Number=SeqID_23002
  Homolog annotation: Hit_ID=Q6IWA2; Match level="QueryCoverage=56%, HitCoverage=6%, E-value=3e-08, Identity=55%"; Hit description=Beta -amyrin synthase
MSRAFDDNYIKDCGIISAPEVTQRMTDSNDYSPLSGTVECTSSVLQALVLFGDFNSEYRSKEIKENVDKAAIFIESNQNKDGSWFV

SEQ ID NO: 64782 - protein, 128 aa, Zea mays
  Coding DNA Sequence Number=SeqID_23003
  Subcellular localization annotation: CTP_CleavageSite=63; ConfidenceScore=5.61e-01
MAMPRSALRPDPSARAWPRQGAALGAATRVRPARPVAQLPVPSVAVCSPAHATMRFLRPCALRCGQLGPGVPVGSNARAPYRCLACHDADHALVVTVVRESSVSPREFVVALLSSLHSRVYVALVVAE

SEQ ID NO: 64783 - protein, 140 aa, Zea mays
  Coding DNA Sequence Number=SeqID_23004
  Gene Ontology: Mol. function=catalytic activity; Cellular component =cellular_component; Biological process=metabolic process
  Homolog annotation: Hit_ID=Q53MS8; Match level="QueryCoverage=59%, HitCoverage=15%, E-value=2e-28, Identity=69%"; Hit description =Similar to beta-amyrin synthase
MVYVEGHSTHVVQTAWAMLALIYTGQMERDPTPLHRAAKVLINMQLETGDYAQQEHVGSTNCSVYFNYPNYRILFPVWALGEYHRKWLVKFTIFARRALRTVCKNQYLLADALSQPPAKIIFLPETELSQPLVKIDHCKR

SEQ ID NO: 64784 - protein, 72 aa, Zea mays
  Coding DNA Sequence Number=SeqID_23005
MPILLVLNEVDDHANMECKYSPKMARTGGLATEECECMAEPILRRAIHATPTTKLAWRDYGCPQGGEAKLPH

SEQ ID NO: 64785 - protein, 145 aa, Zea mays
  Coding DNA Sequence Number=SeqID_23006
MAVSCVCATADAPDPFGGELRDSKPVRWHTQAPGNLLPRAGPTLARYHAQLKCFSLSQTREAALSAPNQHPAQPPPRGISALDRGSRRPWLCPGQPCAPTPLPARRAASARPQQGAALGAATRAQPARPVAQLPVPSAAQERSSA

SEQ ID NO: 64786 - protein, 98 aa, Zea mays
  Coding DNA Sequence Number=SeqID_23007
MGEMFTEISWVILYASGPLLPSSRARRRRNRRREGGREREMDKANKLSAGAGEKATKSRSHGSTALFVAVDYAFLLAFAGFLAYLVGSRILPSAAGSA

SEQ ID NO: 64787 - protein, 85 aa, Zea mays
  Coding DNA Sequence Number=SeqID_23008
  Gene Ontology: Mol. function=DNA binding; Cellular component=nucleus; Biological process=regulation of transcription, DNA-dependent
  Homolog annotation: Hit_ID=Q2QWZ2; Match level="QueryCoverage=87%, HitCoverage=12%, E-value=8e-16, Identity=49%"; Hit description=SWIRM domain containing protein, expressed
MEGMEMVAFLAAEVGPRVAASCASATLSILTWDDSRMHAEGIDAMGHATQLNYAAATKSKLFVDQEEHEFQRLSATIINHQGLLQ

SEQ ID NO: 64788 - protein, 35 aa, Zea mays
  Coding DNA Sequence Number=SeqID_23009
MIKGRERLQLVEIPQKRNQSIEKNIVTLKFDLWIT

SEQ ID NO: 64789 - protein, 322 aa, Zea mays
  Coding DNA Sequence Number=SeqID_23010
  Gene Ontology: Mol. function=L-ascorbate peroxidase activity; Cellular component=chloroplast; Biological process=hydrogen peroxide catabolic process
  Homolog annotation: Hit_ID=P0C0L0; Match level="QueryCoverage=93%, HitCoverage=93%, E-value=1e-130, Identity=76%"; Hit description =Probable L-ascorbate peroxidase 5, chloroplast precursor
  Pfam annotation: Domain name=peroxidase; Domain location=50-291; Score=165.2; E_value=1.7e-46; Accession=PF00141.13; Description =Peroxidase
MAIHYLLRRGVSGGSLLHPIRGLFLASKELGRRPLGSAAAGDAAAELRGAREDVRQLLKATSCHPILVRLGWHDAGTYDKNITEWPKCGGANGSLRFEVELKHGANAGLVNALKLIQPIKDKFSGVTYADLFQLASATAIEEAGGPKIPMIYGRVDVIAPEQCPPEGRLPAAGPPSPAEHLREVFYRMGLNDKEIVALSGAHTLGRARPERSGWGKSETKYTKDGPGAPGGQSWTSHWLKFDNSYFKAIEERRDDHLLVLPTDAVLFEDSSFKSHDDFSYLEIYATKYAKDQDTFFEDYAEAHAKLSNLGAKFDPPKGISLE

SEQ ID NO: 64790 - protein, 66 aa, Zea mays
  Coding DNA Sequence Number=SeqID_23011
MATHTAATTSVPTATAPEVRSIEDGRRDKGAQQAACPSSAPPRPPHSLDTPVGHVRLLARQQSWRR

SEQ ID NO: 64791 - protein, 806 aa, Zea mays
  Coding DNA Sequence Number=SeqID_23012
  Gene Ontology: Mol. function=phospholipase D activity; Cellular component=membrane; Biological process=phosphatidylcholine metabolic process
  Homolog annotation: Hit_ID=P93844; Match level="QueryCoverage=99%, HitCoverage=100%, E-value=0.0, Identity=84%"; Hit description =Phospholipase D alpha 2
  Pfam annotation: Domain name=C2; Domain location=10-114; Score=35.0; E_value=2.5e-07; Accession=PF00168.20; Description=C2 domain
  Pfam annotation: Domain name=PLDc; Domain location=323-361; Score =45.7; E_value=1.6e-10; Accession=PF00614.12; Description =Phospholipase D. Active site motif
  Pfam annotation: Domain name=PLDc; Domain location=652-679; Score =40.7; E_value=5.2e-09; Accession=PF00614.12; Description =Phospholipase D. Active site motif
  Pfam module annotation: Pfam domain module=C2::PLDc::PLDc; Domain location=10-114::323-361::652-679
MAHLLLHGTLDATILEADHLTNPTRATGGAPGIFRKFVEGFEDSLGLGQGSTRLYATVDLGRARVGRTRVITGDPVNPRWYEVFHIYCAHFASDVVFSVKAAQPIGATLIGRAYLPVRDLIAGQEIERSLDILDASKKRLPHGPKIRVRLRFQDVSADPRGWGRGVGGARYPGVPYTFFSQRPGCRVTLYQDAHTPDAFAPRIPLAGGRLYQPGRCWEDVFDAISNARHLIYITGWDGSRPRPGGEATLGELLKRKASEGVRVLMLVWDDRTSVESLGMKWGFMSTHDAETAEYFRGSGVHCVLCPRNPDAGSSAVMGAQIAYMITHHQKIVVVDHEMPAKRSDRRRILSFVGGLDLCDGRYDTQFHSLFRTLDTAHHKDFHQPNLAGASIDNGGPREPWHDIHSKIEGPAAWDVLYNFEQRWRKQGGGIDLLVNLKAMADLIIPPSPVMFPEDQDSWNVQLFRSIDGGACFGFPSTPEAAAQSGLVSGKNNVLDRSIHDAYIHAIRRAKHFIYIENQYFLGSSFAWKADGIKPEEIEALHLVPRELSLKIVSKIEAGEHFAVYVVLPMWPEGPPASGSIQGILDWQRRTMEMMYNDISVALEAKRIDRDPRDYLTFFCLGNREVKMDGEYEPSGRPLDGTDYARAQNARRFMIYVHSKMMIVDDEYIIVGSANINQRSMDGGRDSEIAMGAYQPCHLNTKGQVARGQVHGFRMSLWYEHLGMLHDDFLNPGSLECVRRVNQMADRYWDLYAGDSLDADLPGHLLRYPVTVTKEGTVTELPGAKFFPDTQALVLGALSKLPPILTT

SEQ ID NO: 64792 - protein, 125 aa, Zea mays
  Coding DNA Sequence Number=SeqID_23013
MAIAEHVESRAGEGPSRASMLPFPARGFAENREREKMGRREQPLTERWLRELLQRDAMTAGSGVVSVSGSRGGLCLCSGPKADVFLLDDDALTASVGKIEEVSASLALDNEATGGPLCQFLCRVL

SEQ ID NO: 64793 - protein, 270 aa, Zea mays
  Coding DNA Sequence Number=SeqID_23014
  Gene Ontology: Mol. function=phospholipase A1 activity; Cellular component=cellular_component; Biological process=lipid metabolic process
  Homolog annotation: Hit_ID=Q6QP54; Match level="QueryCoverage=34%, HitCoverage=32%, E-value=5e-17, Identity=52%"; Hit description =Putative kinase
MAPPVDVVGPCPRLGEVEAPPRSRSSLSSKVEVESEPPGRTRRRPSADARPESEPWGRAKRSSSSFGAEPESEPWGRARRSSSSFGTEPESEPWGRARRSSSSSGAEPKSEPWGRAERSSSSSGAEPKSEPWGQAERSSSSSGAEPKSEPWGRAERSSSSSGAEPKSEPWGRAERSSPSSGAEPESEPWGRAERSSSSSGAEPESEPWGRAERSFPWHLGPDLTAVSLTLSSGSAVGATQVALSSCETGQWSGEVTAVTSALSTGGRASG

SEQ ID NO: 64794 - protein, 236 aa, Zea mays
  Coding DNA Sequence Number=SeqID_23015
  Homolog annotation: Hit_ID=Q6QP54; Match level="QueryCoverage=39%, HitCoverage=32%, E-value=1e-17, Identity=52%"; Hit description =Putative kinase
MVPPVDVVGPCPRLGEVEAPLRSRSSLSSKVEVESEPPGRTRRRPSADARPESEPWGRAKRSLSSFGAEPESEPWGRARRSSSSFGAEPESEPWGQARRSSSSSGAEPKSEPWGVGRSGAERSSSSSGAEPKSEPWGQAERSSPSSGAEPESEPWGRVEQSSSSSGAEPESEPWGRAERCFPWHLGPDLTAVSLTLSSGSAVGAAQAALSSCQTGQWSGEVTAVTSALSTGGRASG

SEQ ID NO: 64795 - protein, 745 aa, Zea mays
  Coding DNA Sequence Number=SeqID_23016
  Gene Ontology: Mol. function=protein binding; Cellular component =membrane; Biological process=defense response
  Homolog annotation: Hit_ID=Q2QZF2; Match level="QueryCoverage=89%, HitCoverage=55%, E-value=6e-77, Identity=34%"; Hit description =Leucine Rich Repeat family protein
  Pfam annotation: Domain name=LRR_1; Domain location=270-292; Score =5.0; E_value=33; Accession=PF00560.23; Description=Leucine Rich Repeat
  Pfam annotation: Domain name=LRR_1; Domain location=294-315; Score =11.4; E_value=2.1; Accession=PF00560.23; Description=Leucine Rich Repeat
  Pfam annotation: Domain name=LRR_1; Domain location=317-338; Score =2.9; E_value=80; Accession=PF00560.23; Description=Leucine Rich Repeat
  Pfam annotation: Domain name=LRR_1; Domain location=340-361; Score =10.4; E_value=3.2; Accession=PF00560.23; Description=Leucine Rich Repeat
  Pfam annotation: Domain name=LRR_1; Domain location=363-384; Score =15.1; E_value=0.26; Accession=PF00560.23; Description=Leucine Rich Repeat
  Pfam annotation: Domain name=LRR_1; Domain location=386-407; Score =5.8; E_value=24; Accession=PF00560.23; Description=Leucine Rich Repeat
  Pfam annotation: Domain name=LRR_1; Domain location=409-430; Score =8.7; E_value=6.8; Accession=PF00560.23; Description=Leucine Rich Repeat
  Pfam annotation: Domain name=LRR_1; Domain location=432-454; Score =3.3; E_value=70; Accession=PF00560.23; Description=Leucine Rich Repeat
  Pfam annotation: Domain name=LRR_1; Domain location=457-479; Score =3.2; E_value=73; Accession=PF00560.23; Description=Leucine Rich Repeat
  Pfam module annotation: Pfam domain module=LRR_1::LRR_1::LRR_1::LRR _1::LRR_1::LRR_1::LRR_1::LRR_1::LRR_1; Domain location=270-292::294
MRFVEDNGVFLYKIAGLSMDASVSLCERIFKESCKDGGTVVSSGLCSSIAKMAGGMPLAVICLSSAVAAQAQLATEEDVGRVHDPPDWFRMAEARALAGLTNIPCLKPLADSLCLAYNQLSVHLKTCLLHCSSLCPPYHIFGTDDLVRLWIAERFVYDEGDARSYVDQLVSTGMISVQSCSSDLLIGPKKVQMNTMMLHFLRCIASHEGYCIASSDCGSGMSSLLVGPIRRLSIQSCKNKVEISRLHASDIRSLYVFDRTWTTLFKNLTNLRVLQLLGNNLRNEDLTAICGLPHLTYLNLSGTLVNLLPEELGRLKLLKTLIVRGTGILRLPVGIGELMQLETLDLGDTMVVELPSQIVKLHNLRTLDLRNSSLCELPNEIGDLLLLETLDVGDTMVAELPSQIGKLQRLRALGISGTGIEKLPAEIGELEHLEILDVSCTTVAELPLPTAGGSMAMLQQLNICNTEIRELPWESGRRSVRVLCGDSDAPHVCNLADLSEGLLQPSVVVVLFDRFGSIWVPVPFPRIKVPGKHRSVPQFVASICYLEISLWKLEEDSLKSLREMPNLRGLALRVDVLPTKPAISILGFRKLESLCIDCRVPRITFEKEAMPELTYLEFKFYACRPTTEHNMGIANLQRLQRVVFRSASWYTSDPSAGIHAVINRVREEAREHPNTIILSVNGNVESYHEKKAAAAAAQGIKPSLSGDVSRRSDSRARQSAAPAGFDLNVPTADNDNNVVADDWDA

SEQ ID NO: 64796 - protein, 843 aa, Zea mays
  Coding DNA Sequence Number=SeqID_23017
  Gene Ontology: Mol. function=protein binding; Cellular component =membrane; Biological process=defense response
  Homolog annotation: Hit_ID=Q2QZF2; Match level="QueryCoverage=85%, HitCoverage=73%, E-value=3e-58, Identity=36%"; Hit description =Leucine Rich Repeat family protein
  Pfam annotation: Domain name=LRR_1; Domain location=356-377; Score =3.7; E_value=59; Accession=PF00560.23; Description=Leucine Rich Repeat
  Pfam annotation: Domain name=LRR_1; Domain location=379-400; Score =4.6; E_value=39; Accession=PF00560.23; Description=Leucine Rich Repeat
  Pfam annotation: Domain name=LRR_1; Domain location=402-423; Score =10.9; E_value=2.5; Accession=PF00560.23; Description=Leucine Rich Repeat
  Pfam annotation: Domain name=LRR_1; Domain location=425-447; Score =5.9; E_value=23; Accession=PF00560.23; Description=Leucine Rich Repeat
  Pfam annotation: Domain name=NACHT; Domain location=662-790; Score= -38.2; E_value=0.055; Accession=PF05729.3; Description=NACHT domain
  Pfam annotation: Domain name=NB-ARC; Domain location=2-221; Score= -86.4; E_value=8.9e-05; Accession=PF00931.13; Description=NB-ARC domain
  Pfam module annotation: Pfam domain module=LRR_1::LRR_1::LRR_1::LRR _1::NACHT::NB-ARC; Domain location=356-377::379-400::402-423::425 -447::662-790::2-221
MDSTGRRGGGGLARIETRKPFPTLGGRGQNLRAASWIGLRYLVVVDDVWHWEQWEIIRKSLPKNNLGSRIITCTRVEAVAMKFMMESDACLYEMAGLSMDAAAALSRRIFEDGSVRATSELHNSWSASIAKMSGGMPLAVICMSLAVARAQLTPEEAVERLTNIPCLRPLVESLSLGYHGLPLHLKTCLLHCSMYPPQHILDRDGLARMWIAEGFVYEEEEARSYVDQLFKMGLIRRCSSALVPSPKFQIDAMMLYFLRCRSQETFYYLGCGRRRNGAGRRVHHRLSIISAQKNGPAGGTSTLPHVDVVSNNNTRSLYVFDRSWRVPFNEFERLRVLHLHCSSRNADLVDICGLVWLRCLSLSGSPITMLPKQIGRLQLLRTLDVSSTGILCVPGEIGALQQLEILDVSDTMVQKLPAEIGQLRRLKALYARNSSLRELHTSQIRELQLLETLDVSNTVLAEGGGLMMLIGDDENLKVVDAAGGGGMLMMAEGGGSTATVATGALGPVLAKLRKNAADDDGGRYLGDIEFIISELESLHSFLTRMWESSEGGGIDENAACQSWMAEARELSYHIEDDIDRFMLDLEHGGDRTTTTAPFRRIKLRIKGLVDRYQEEWRMAADCRIKAPQLGPPSRYYSRKDASELLEIDDKETEVKELLQEHELLCIFGFAGMGKTTLANQVYQAIGKQFECQAFMSISPRMDASQILTTFYAQVTAQQREIIAASDSLSDQQFMIDSISKFLFNKRLVPWIPWEQPHLGYKGQDMADVTPRPLPDSWYLLLASIKDHISSPQTNMSFFVHTLYSLMRTREDFPVDYPSKIALGQARLTPELLSRQASEKDAPC

SEQ ID NO: 64797 - protein, 769 aa, Zea mays
  Coding DNA Sequence Number=SeqID_23018
  Gene Ontology: Mol. function=RNA-directed DNA polymerase activity; Cellular component=intracellular; Biological process=RNA-dependent DNA replication
  Homolog annotation: Hit_ID=UPI00005A975E; Match level="QueryCoverage =98%, HitCoverage=42%, E-value=0.0, Identity=82%"; Hit description =PREDICTED: similar to Retrovirus-related Pol polyprotein from transposon 297
  Pfam annotation: Domain name=RVT_1; Domain location=56-225; Score =142.5; E_value=1.2e-39; Accession=PF00078.17; Description=Reverse transcriptase (RNA-dependent
  Pfam annotation: Domain name=RnaseH; Domain location=455-582; Score =14.4; E_value=2.7e-06; Accession=PF00075.14; Description=RNase H
  Pfam module annotation: Pfam domain module=RVT_1::RnaseH; Domain location=56-225::455-582
MPGIPRDVAEHSLDIRAGARPVKQPLRRFDEEKRRAIGEEIHKLMAAGFIKEVFYPEWLANPVLVRKKGGKWRMCVDYTGLNKACPKVPYPLPRIDQIVDSTARCETLSFLDAYSGYHQIRMKESDQLATSFITPFGMYCYVTMPFGLRNVGATYQRCMNHVFGEHIGRTVEAYVDDIVVKTRKASDLLSDLEVTFRCLKAKGVKLNLEKCVFGVPRGMLLGFIVSERGIEANPEKIAAITSMGPIKDLKGVQRVTGCLAALSRFISRLGERGLTLYRLLRKAECFTWTPEAEEALGNLKAHLTNAPILVPPAAGEALLIYIAATTQVVSATIMVERREERHALPVQRPVYFISEVLSETKTRYPQVQKLLYAVILTRRKLRHYFESNPVTVVSSFPLGEIIQCREASGRIAKWAVEIMGETISFAPRKAFKSQVLADFVAEWVDTQLPTVPIQPELWTMFFDGSLMKTGAGAGLLFISPLGKHLLYVLRLHFPTSNNVAEYEALVNGLRIAIELGVRRLDARGDSQFVIDQVMKNSHYRDPKMEAYCDEVRRLEDKFYGLELNHIARRYNETADELAKIASGRTTVPPNVFSRDLHQPSVKTDDTPEPEKASAEPEAPSAQSEVPSARPEAPSAQPEAPSVRPEVPSAPEGEALRIEEERSGVTPNQNWQTPYLQYLHRGELPLDRAEARRLARRAKSFVLLGDGKELYHRSPSGILQRCIPITEGQELLQEIHSGACGHHATPRAFVGNAFRQGFYWPTVVARDVNG

SEQ ID NO: 64798 - protein, 576 aa, Zea mays
  Coding DNA Sequence Number=SeqID_23019
  Gene Ontology: Mol. function=RNA-directed DNA polymerase activity; Cellular component=mitochondrion; Biological process=RNA-dependent DNA replication
  Homolog annotation: Hit_ID=Q8S463; Match level="QueryCoverage=99%, HitCoverage=32%, E-value=0.0, Identity=82%"; Hit description =Putative prpol
  Pfam annotation: Domain name=RnaseH; Domain location=200-327; Score =11.5; E_value=4.9e-06; Accession=PF00075.14; Description=RNase H
  Pfam annotation: Domain name=rve; Domain location=484-576; Score=0.5; E_value=0.0054; Accession=PF00665.16; Description=Integrase core domain
  Pfam module annotation: Pfam domain module=RnaseH::rve; Domain location=200-327::484-576
MGCLTALSRFISRLGERGLPLYRLLRKAECFTWTPKAEEALGNLKALLTKAPILVPPAAGEALLVYVAATTQVVSATIVVERQEEGHALPVQRPVYFVSEVLSETKIRYPQVQKLLYAVILTRRKLRHYFESHPVTVVSSFPLGEIIQCREASGRIAKWAVEIMGETISFAPRKAIKSQVLADFVAEWVDTQPPTAPIQPELWTMFFDGSLMKTGAGAGLLFISPLGKHLRYVLRLHFPASNNVAEYEALVNGLRIAIELGVRPLDARGDSQLVIDQVMKNSHCRDPKMEAYCDEVRRLEDKFYGLELNHIARRYNETADELAKIASGRTTVPPDVFSRDLHQPSVKIDDTPEPEAPSVQPEVPSAQPEAPSSWPEAPSVQPEVPSASEGEALRIEEERSGATPDRNWQTPYLQYLRQGELPLDRAEARRVARRAKSFVLLGDEKELYHRSPSGILQRCISVAEGCQFYAKQTHLPAQALQTIPITWPFAVWGLDLVGPLQKAPGGYTHLLVAIDKFSKWIEVRPLNSIRSEQAVAFFTNIIHRFGVPNSIITDNGTQFTGRKFLDFCEDHNIRVD

SEQ ID NO: 64799 - protein, 124 aa, Zea mays
  Coding DNA Sequence Number=SeqID_23020
MNDLEIRPDGSAVVRKTVRNWNDYGAPSYQQMPWEHAMHQSESSVPYRVARAAVSRWFINGGPRSWWWSKECGERGGRGHGFIAGDGDIHGRPNPEISAGLGGSVAANSAEDSSSRSTIRLRWR

SEQ ID NO: 64800 - protein, 61 aa, Zea mays
  Coding DNA Sequence Number=SeqID_23021
MGIIVRVILELKGPSWEKMLKHNIQDLPKVFSFFWIFGYEAYPQQPLLVVYLQKTYTRVYL

SEQ ID NO: 64801 - protein, 743 aa, Zea mays
  Coding DNA Sequence Number=SeqID_23022
  Gene Ontology: Mol. function=RNA-directed DNA polymerase activity; Cellular component=intracellular; Biological process=RNA-dependent DNA replication
  Homolog annotation: Hit_ID=Q8W0Y2; Match level="QueryCoverage=99%, HitCoverage=37%, E-value=0.0, Identity=78%"; Hit description =Putative gag-pol
  Pfam annotation: Domain name=RVT_1; Domain location=56-225; Score =148.2; E_value=2.2e-41; Accession=PF00078.17; Description=Reverse transcriptase (RNA-dependent
  Pfam annotation: Domain name=RnaseH; Domain location=455-582; Score =8.7; E_value=8.9e-06; Accession=PF00075.14; Description=RNase H
  Pfam module annotation: Pfam domain module=RVT_1::RnaseH; Domain location=56-225::455-582
MPGIPRDVAEHSLDIRAGARPIKQHLRRFDKEKRRAIGEEIHKLMAAGFIKEVFHPEWLANPVLVRKKGGKWRMCVDYTGLNKACPKVPYPLPRIDQIVDSTAGCETVSFLDAYSGYHQIRMKESDQLATSFITPFGMYCYVTMPFGLRNAGATYQRCMNHVFGEHIGRTVEAYIDDIVVKTRKASDLLSDLEVTFRCLKTKGVKLNPEKCVFGVPRGMLLGFIVSERGIEANPEKIATITSMGPIKDLKGVQRVMGCLAALSRFISRLGERGLPLYRLLRKAECFTWTPEAEEALGNLKALLTNAPILVPPAAGEALLIYIAATTQVVSVAIVVERQEEGHALPVQRPVYFISEVLSETKIRYPQVQKLLYAVILTRRKLQHYFESHPVTVVLSFPLGEIIQCREASGRIAKWAVEIMGETISFAPRKAIKSQVLADFVAEWVDTQLPTAPIQPELWTMFFDGSRMKTGAGAGLLFISPLGKHLRYVLRLHFPASNNVAEYEALVNGLRIAIELGVRRLDARGDSQLVIDQVMKNSHCRDPKMEAYCDEVRRLEDKFYGLELNHIARRYNETADELAKIASGRTTVPPDVFSRDLHQPSIKIDDPRPSPRYSRLSPRHLRHGPRHPQPGPSHPRFSLRHPRRPRVRHCASRRSEAGSRLIKTGRPCTCNISTEESYLSTEPKLGGWRGAPSRSSCWEMGRSSTTAAPQASSSDASPSPKVRNSYERYTRGLAAITQRLEPLS

SEQ ID NO: 64802 - protein, 338 aa, Zea mays
  Coding DNA Sequence Number=SeqID_23023
MKGIIPVITSWSSPSAVQAGFTAERQLQPDEWRDHSPTLVVLLPLGDGGGVRRGRWRSEDAGDSVEGAATQTGKEGPPVSAWFDAHTKIRVGWCGGRVAARPSATRFTPPRGPPGQCPARPSRSLPARDPASSQARHKSQASLAHPLRTARHISQARVHGRRSRHAFRLPFLQPPPVNLAPTTRELPTISLCCANLPGNNPIRVASVLPSSPNRMVPSFETVPYQSSPDVLRLHPVPVEPGVLLGPCLLAARAARLLAEAPATLCGLLVASPARLLASAPCGLLMARLPGSARPPAACARVQSSGTVRPTPARSWLAASAPGAAWLAASAPNAVLAHG

SEQ ID NO: 64803 - protein, 222 aa, Zea mays
  Coding DNA Sequence Number=SeqID_23024
  Homolog annotation: Hit_ID=Q2QNH1; Match level="QueryCoverage=36%, HitCoverage=9%, E-value=7e-19, Identity=58%"; Hit description=HAT family dimerisation domain containing protein, expressed
MQDAPKQSCHLVVNELLTPRATFVSEEDGSGYRPRRQFPLSGVGYYRGFTPNDELQGLEGEFEASLVAPMDSSVEACAVVPLVGRPIRGSSSGGLGTFFGYRVPRTFAADAYAEPLRIPEVAAASRLPSPGEIAEEQPNINLEDQGLPSDENFDINMDDNNVSGHEPIFNSYPTENANVDEQSDFIEDIYDPRNQNNLDNKSRDILVQKGAIREEKYCISFG

SEQ ID NO: 64804 - protein, 384 aa, Zea mays
  Coding DNA Sequence Number=SeqID_23025
MADAVGALPPPPLPPPPECESGRSSPSHAASPEFEFWMVGRNPSPALLTADELFSGGVVLPLHTLQAPGAPDGDGAPQPQADADADADAAALPLPDAQAQVEGEAAQPLAESAIAPTPDLPAVTFKWKDIFKAGAGAGAEGKERKKVERRVSSVSGNAELININIWPFSRSRSAGAGAGTLSRAKPNPNPNPNPNPNAAVAASGGASVNANTTANATAPSAPPAPAPVPRKVSSAPCSRSNSRGESSGPVPTIPTATATAAPEAAAGEEDADAATQVQAAPLTAAGTSSATSMLRSAVWKLRRNKLQQTAAEQKQVGGKKKAAPAQEPAAAADADADAASDDKASPSVAAPAAGCRNNVEGAGEEGNPPQVLFGLRTFFSKKVY

SEQ ID NO: 64805 - protein, 239 aa, Zea mays
  Coding DNA Sequence Number=SeqID_23026
  Homolog annotation: Hit_ID=Q5VR06; Match level="QueryCoverage=20%, HitCoverage=3%, E-value=8e-16, Identity=75%"; Hit description =Helicase-like protein
MMRLHRKGGGGSGRRSDHVLQLPQPLAVEAGCYSRPRCAPSTLTDDAEIVSVGPQNAKKGPAPLTCMQAGRVLSSDQVVNSRIAIGSPSEKILGCERHHHAGQEEAPPSPSLWRSESEAGKAKAKAKGKARQPEQVRYAAPGEGDRARVSSLTKLSASAPWNSVPALSTPFPLLPASGFRPSHIGPLFREGTPLDNSLSICYFSYMENSDLMLRMDRGSYVLPPNSTPKGQCLDLESQH

SEQ ID NO: 64806 - protein, 67 aa, Zea mays
  Coding DNA Sequence Number=SeqID_23027
MAVPRKGGAGHWGWGRGSRWGGESRVEGVPVTSRWILKYSNKVVLEMVAVKGMEPDRSTPPCHPATT

SEQ ID NO: 64807 - protein, 73 aa, Zea mays
  Coding DNA Sequence Number=SeqID_23028
MAKIVVGVLGVEGGHLSSPEVDANVGADARAITIQREQYEGTFHLFIGNHKDSDVGETKTVEWSTSSQKARAL

SEQ ID NO: 64808 - protein, 956 aa, Zea mays
  Coding DNA Sequence Number=SeqID_23029
  Homolog annotation: Hit_ID=Q2QNU0; Match level="QueryCoverage=69%, HitCoverage=53%, E-value=0.0, Identity=85%"; Hit description =Expressed protein
MSDIPVIQYADDTLIIMNASQRDLFCIKGILHSFSPATGLKINFHKSCLLPINLDTVKASQLAAIFGCQVGTFPFTYLGLPMSLTKPKVKDYIPLITKIERRSNATSTWVSMAGRFTLVNSTFSAMPIFAMCTLKLLYSVINTIDHIRRDCLCRGNNESAHRNPLIAWERHAIPGLILSGTHIMPQAGFLMPLRSSASAPRIDAAAIAWAWTPVRRASGPETEFWTPDKEAAMGTVLVAPEPPQRQHTTDPYQGPSDPHSRMAESIPLALEPMMAMSRQAGIAALACSHRNAGVGGKRYMELTKGAADNYHRSWWKRHGVVLDGEIAALFFKHGNYDLAVKSYEKVCALYSAEGWEELLADVLPDLAECQKILNDEAGYLASCVKLLSLDSGLFSSKERQGFQSEVVRLAHSEMKHLVPLDVSSLITFAGNAGPPLELCDGDPGTLSVAVWNGFPDDITLESLSLRLSASSSADEGIKAIKSSDSHVLVPGRNIISFDIPRQKPGSYVLGALTGQIGKLSFRSHGFSQDGPVETDEFMSFEKPTRPVLKVRKPRALVDITPAVSSALLMNELQWIGLIVKPIDYSLKGGILHIDAGAELKIEESQMIEIEIYVSDMECANSANSSIKAGKVEKVPIENGKIELPDWASDVTTLVWFPVRAIDDTIARGESLVSQKQSVVDGMRMIALKLEFGVFRNQVFERTIAVHFTNPFHVSTRVVDKCNDGALLLQVILSSGVKATLHVKDVRLDLQSGFDHLGKGDGRPALSLFPLVIAPSSKAGILFMLRLSGTKDVDDAENADSTLNITYGISGDRKTGAHSPIPVKSGDSEELVFKIALRLKRPVLDPCVAVGFLPFSTDCLRVGQLVNMRWRVERLKTPEDASISIDEILYQVEANPQNWMVAGRKCGHVSLSNEQGSRMEITVTCVPLVSGYVHPPQLDLPEVGEANISCNPAGPHL

SEQ ID NO: 64809 - protein, 368 aa, Zea mays
  Coding DNA Sequence Number=SeqID_23030
  Gene Ontology: Mol. function=aminoacyl-tRNA ligase activity; Cellular component=cytoplasm; Biological process=tRNA aminoacylation for protein translation
  Homolog annotation: Hit_ID=Q6K1T2; Match level="QueryCoverage=83%, HitCoverage=52%, E-value=1e-148, Identity=86%"; Hit description =Putative lysyl-tRNA synthetase
  Pfam annotation: Domain name=tRNA-synt_2; Domain location=8-313; Score=126.2; E_value=9.2e-35; Accession=PF00152.11; Description=tRNA synthetases class II (D, K and N)
MSFFLKKGPYAIGVVEPMAQGAAGGAEARPFITYHNSLQRDLYLRIATELHLKRMLVGGLEKVYEIGRIFRNEGISTRHNPEFTTIEMYEAYSDYESMMNMAEEIVTRCAMATHGKLKVDYEGTEISLERPWRRETMHSLVKEATGIDFNSFGQDVESAKRAVRGLPGFVVGNSESTSLQACSSVGHVLNEVFETFVESTLVQPTFVLDYPVEISPLAKPHRSHVGLTERFELFICGREIGNAFSELTDPIDQRSRFENQIKQHNAKRAAMAKEVKSTEGEGDDDYSYEVSLDEDFLTSLEYGMPPASGMDIFIDHFVGVSVRCREEPEPGSDLRRASKKNFIHFQFVLKERKKAFVGSLIAWLPVTE

SEQ ID NO: 64810 - protein, 450 aa, Zea mays
  Coding DNA Sequence Number=SeqID_23031
  Gene Ontology: Mol. function=oxidoreductase activity; Cellular component=integral to membrane; Biological process=electron transport
  Homolog annotation: Hit_ID=Q75LK7; Match level="QueryCoverage=92%, HitCoverage=75%, E-value=0.0, Identity=79%"; Hit description =Putative cytochrome P450
  Pfam annotation: Domain name=p450; Domain location=37-448; Score =174.2; E_value=3.3e-49; Accession=PF00067.12; Description=Cytochrome P450
MAVFGGGPVLVAVALACAGLVVWLRSRSSSSKEMGDIPGTMGWPVVGETFSFISDFSSPAGILSFMRDRQRRFGKVFKTYVLGRVTVFMTGRDAAKILLSSGKDGVVSLNLFYTGKQVLGPTSLLTTNGDEHRKLRRLIGEPLSVDALKKYLGFINDLAVQTLDTWHGRSRVLVLEEASSFTLKVIANMLVSLEPEGEEQEKFRANFKVISSSFASLPLKVPGTAFHRGLKARNRMYAMLDSVIARRRSGSEGEAAAPSDFLQTLLRKHAGDEADKLTDAQLKDNILTLLVAGHDTTTAGLTWLVKFLGENPDVLDKLREEHLEIKESLNGSSRLRWSDVNNMPYTNKVMNETLRRATILPWYSRKAAQDFSIDGYAIKKGTSVNLDVVSIHHDPAVFADPNRFDPNRFDETLKPYSFLGFGSGPRMCPGMSLAKLEICVFVHHLVCRYT

SEQ ID NO: 64811 - protein, 784 aa, Zea mays
  Coding DNA Sequence Number=SeqID_23032
  Gene Ontology: Mol. function=transferase activity, transferring glycosyl groups; Cellular component=membrane; Biological process =cellulose biosynthetic process
  Homolog annotation: Hit_ID=Q9LLI3; Match level="QueryCoverage=99%, HitCoverage=76%, E-value=0.0, Identity=86%"; Hit description =Cellulose synthase-7
  Pfam annotation: Domain name=Cellulose_synt; Domain location=7-778; Score=1889.2; E_value=0; Accession=PF03552.5; Description=Cellulose synthase
MDEARQPLSRKIPLPSSQINPYRMIIIIRLVVLCFFFHYRVMHPVPDAFALWLISVICEIWFAMSWILDQFPKWFPIERETYLDRLSLRFDKEGHPSQLAPVDFFVSTVDPLKEPPLVTANTVLSILSVDYPVDKVSCYVSDDGAAMLTFEALSETSEFAKKWVPFCKRYSLEPRAPEWYFQQKIDYLKDKVAPNFVRERRAMKREYEEFKVRINALVAKAQKVPEEGWTMQDGTPWPGNNVRDHPGMIQVFLGQSGGHDVEGNELPRLVYVSREKRPGYNHHKKAGAMNALVRVSAVLTNAPYLLNLDCDHYINNSKAIKEAMCFMMDPLLGNKVCYVQFPQRFDGIDRHDRYANRNVVFFDINMKGLDGIQGPIYVGTGCVFRRQALYGYDAPKTKKPPSRTCNCWPKWKTKKKTKTSKPKFEKIKKLFKKKENQAPAYALGEIDEAAPGAENEKASIVNQQKLEKKFGQSSVFVASTLLENGGTLKSASPASLLKEAIHVISCGYEDKTGWGKDIGWIYGSVTEDILTGFKMHCHGWRSIYCIPKRAAFKGSAPLNLSDRLHQVLRWALGSIEIFFSNHCPLWYGYGGGLKFLERFSYINSIVYPWTSIPLLAYCTLPAICLLTGKFITPELNNVASLWFMSLFICIFATSILEMRWSGVGIDDWWRKRAVFGSLEACLSHLFAVFQGLLKVIAAGISNAINNGYESWGPLFGKLFFAFWVIVHLYPFLKGLVGRQNRTPTIVIVWSILLASIFSLLWVRIDPFLAKDDGPLLEECGLDCN

SEQ ID NO: 64812 - protein, 321 aa, Zea mays
  Coding DNA Sequence Number=SeqID_23033
  Homolog annotation: Hit_ID=Q6Z836; Match level="QueryCoverage=46%, HitCoverage=27%, E-value=2e-42, Identity=55%"; Hit description =Putative L-aspartate oxidase
MGPIAILRGNVSVAQRGASIPSDIVISNCSSNSNNTVYKLQQLELARIAKIRRLLQPNYLDFVCLCNGLELHVSSCTAAGKMTVGFLLLSSRYGKSSVKCRPRLSRLASALLTTSLAQQKRLRISQTSTPFSRPVERTMPTYSHITYCSSILACLVCPTMSDSAPSPSADRGSVSRAHLAASDGRGELSRSGEILRPWIRRKKQTAVTTRITGLKLTRILKFRISMDYNTTIPIALFGIPIFRSPNVRDITVPKKLLLERVRSGSPPHRQSRGGLIPAGEPPLPSAGEVVLTLGLWWQTVLNIAAKNATLLAALLYLGDLA

SEQ ID NO: 64813 - protein, 241 aa, Zea mays
  Coding DNA Sequence Number=SeqID_23034
  Gene Ontology: Mol. function=aminoacyl-tRNA ligase activity; Cellular component=cytoplasm; Biological process=tRNA aminoacylation for protein translation
  Homolog annotation: Hit_ID=Q6K1T2; Match level="QueryCoverage=91%, HitCoverage=38%, E-value=5e-79, Identity=68%"; Hit description =Putative lysyl-tRNA synthetase
  Pfam annotation: Domain name=tRNA_anti; Domain location=119-197; Score=77.2; E_value=5.1e-20; Accession=PF01336.15; Description=OB -fold nucleic acid binding domain
  Subcellular localization annotation: CTP_CleavageSite=70; ConfidenceScore=5.51e-01
MEALRAWRASSNLIGFAASRAAASASRPLGLRIRCCSAAAATTNPPAQPQDRRRRSASSSASTSDRDSIRAIRLKKVDELRGKGYEPYAYRWDRTHTTKALQEQYTHLMNGEVCEDVSVSVAGRIVARRAFGKLVFMTVRDDAGTVQLYCEKDSLTEDQFEQLKAFIDIGDILGASGSIKKTEKGELSVYVKNFEILTKSLLPLPDKYHGLTDVDKRYRQRTHLIQQQQQQQSLFVPSTLG

SEQ ID NO: 64814 - protein, 112 aa, Zea mays
  Coding DNA Sequence Number=SeqID_23035
  Gene Ontology: Mol. function=nucleic acid binding; Cellular component= intracellular; Biological process=translation
  Homolog annotation: Hit_ID=Q3LRV2; Match level="QueryCoverage=99%, HitCoverage=69%, E-value=4e-37, Identity=53%"; Hit description=Gag
MKKVVYYETDSSMPSTSGVDDKMRHQLTSLHESIWDIIEFGAQAPQEGDEDYDFDEAAQVRHFNSQATSILLASLSREEYKKVQGLKSAKEIWDVLKTAPEGDEVTKITKQE

SEQ ID NO: 64815 - protein, 208 aa, Zea mays
  Coding DNA Sequence Number=SeqID_23036
  Gene Ontology: Mol. function=N-acetyltransferase activity; Biological process=metabolic process
  Homolog annotation: Hit_ID=Q6H820; Match level="QueryCoverage=68%, HitCoverage=31%, E-value=2e-26, Identity=52%"; Hit description=GCN5 -related N-acetyltransferase-like
  Subcellular localization annotation: CTP_CleavageSite=63; ConfidenceScore=5.71e-01
MKPQPTKLFPISAQLLPSKVQSEKKKKHSTRAFKKLVVVFALFNLLRNSKKTSPRLISKKQLRGMGVMDEAEPVKKTMLRVRGFDVERDLRAVEELERLCQVGLSGDQGSDPVADLDGGAKKTRSSKKKKGMSLYVEQIGDPFARVRHATDNVMLVAEYGEKDEVVGVIKACTRMVSRGKKQQSFSGSSKQFVKVACLLGLRVSPSHR

SEQ ID NO: 64816 - protein, 79 aa, Zea mays
  Coding DNA Sequence Number=SeqID_23037
MASAKPRWEHRRVEIHGKAAALTAPTSNYTHRRVREGTRGGRGGSLPQGEYRGILGGDNGVAVGLEPQWRLWGCMGNDG

SEQ ID NO: 64817 - protein, 75 aa, Zea mays
  Coding DNA Sequence Number=SeqID_23038
MGEDEREMISPRVLEPAILQKEPSSRNDVRRRVKGAPRNQLHFPRWTTVGSALVRTLRGGTLTTIHGQSGGSQRV

SEQ ID NO: 64818 - protein, 114 aa, Zea mays
  Coding DNA Sequence Number=SeqID_23039
MEEIWRGEDGAEIAYGWARIRSTFCYRRRGADIAFGNFGTFCYWGGVPTPPHAQITPIAAARADRRTRRSSRPQSTLWDGDPPWNSVREIVAHPARRERAARGRGPTLWDGDFP

SEQ ID NO: 64819 - protein, 226 aa, Zea mays
  Coding DNA Sequence Number=SeqID_23040
  Subcellular localization annotation: CTP_CleavageSite=28; ConfidenceScore=5.10e-01
MGGPAGQIRVQLGRQRPWRRFAAARGIPAAGAGSSRWRGPSSEAKARAPPSARAHGLNSTQARDPRRIGVASATARAQSPRRHACAAGRGRGTRPHMAQARDPAWAWPARRVPVRARGLATGVRPRPGPGAVSTLGVPLLGGRGLDGTGAAGMAPSGRGCPRRGHGPSSPGGVAWPQQPKRSGRETPLAQVLAGSATTVCPQDCSTHVCKNSAIADEDRQIHNKTE

SEQ ID NO: 64820 - protein, 346 aa, Zea mays
  Coding DNA Sequence Number=SeqID_23041
MDCQLLGVQCCWRTNLLLCRILCNDVLLQQPVPVPETERLRAMVGGLRSVSFRSCCVNDAADAMATASERVPEFLRSTRKSDGSDPQLQATAADARRGKTRKPRIQKDPASADLRITRPGGLEEVIRTPVRVRVPATCAAKDTAHWPITISGRTAQVTRGETQHARLSRHTLSDSFCSTIMGACNSCEATAVAAAPGPATAEARVVLADGALRRFPGGTRASQAVKAAAGGAAPTASWFLCSADGLELGGAVAPVRPEEALQPGQLYFVLPAAMRRRPLQAEEMAALAIRASAALAGDHDGPLVFPEAAAAAAAGAGARCGKACRRSRRGGSRGRDFAPDLGAIAE

SEQ ID NO: 64821 - protein, 204 aa, Zea mays
  Coding DNA Sequence Number=SeqID_23042
MTERQVLAEVERVVLGVADVVCAGVRPRSWELEPAARELGGGHGGRRRWVECIVGSERGRLDDVAAGAGGWAGKHRPGVECIVGCDSFNAETGSMEETSSGGAIHAGHPWIRGRGLCPRMAGAGVREIWGRGSGGNVRSGGCGRLHYYLNSSTRTHVDTRTGTSRMKCSSAKECQRTKYAAGTNVQVAPIAIPAEVQDIPVQHT

SEQ ID NO: 64822 - protein, 151 aa, Zea mays
  Coding DNA Sequence Number=SeqID_23043
MVVRWWPSLERSRRKASGSMKTMLVPASPSWPVDLSRCHGSLLPHSPHGYVAGVCDGRAPGWGLHRGVGAGAAFTGTGGGTGPCCGGTRHFASLLWMLLSRTGLQEDNAKTIKNQKHTHVVPPHKFEPVTMYKLYSPLVALMLKHPNEVFK

SEQ ID NO: 64823 - protein, 36 aa, Zea mays
  Coding DNA Sequence Number=SeqID_23044
MADEFLNRMIAATTNDTPPGPFVSAPQLLICPYPFA

SEQ ID NO: 64824 - protein, 525 aa, Zea mays
  Coding DNA Sequence Number=SeqID_23045
  Gene Ontology: Mol. function=RNA-directed DNA polymerase activity; Cellular component=nucleus; Biological process=RNA-dependent DNA replication
  Homolog annotation: Hit_ID=Q8S472; Match level="QueryCoverage=96%, HitCoverage=46%, E-value=0.0, Identity=83%"; Hit description =Putative gypsy-type retrotransposon RIRE2
  Pfam annotation: Domain name=Retrotrans_gag; Domain location=15-104; Score=49.2; E_value=1.4e-11; Accession=PF03732.7; Description =Retrotransposon gag protein
MPEPSTTKGRRIRGELKNLLEDATAWLEHLPLGQISNWDDLVQAFTGNFLGTYVRPGNSWDLRSCRQQLGESLRDYIRRFSKQRTELPNVTDSDITGAFLAGTTCRDLVSKLGRNTPTRASELMDIATKFASGQEAVEAIFRKDKQPQGRQPEDVPEASAQHGTKKKGKKKSQVKRDAADADLVAAAEYKNPRKPPGGANLFDKMLKEPCPYHQGSVKHTLEECAMLRRHFHRARPPAEGGRAHHDNKKEDHKAEEFPEVRDCFMIYGGPVANASAQHRKQERREVCLVKVAAPVYLDWSDKPITFDQGDHPDRVSSPGKYPLIVDLVIGNVRLTKVLMDGGNSLDIIYAETLELLQIDLSSVRAGAVPFHGIIPGKRVQPLGRLDLPVCFGTPSNFRRETLTFEVVGFRGTYHAVLGRPCYAKFMAVPNYTYLKLKMSGPNGVINVGPTYRHAYECDVECVEYAEALTESEALIADLESLSKETPDVKRHAGNFEPAETVKSVPLDPSNDASKQIRIGSELDPK

SEQ ID NO: 64825 - protein, 80 aa, Zea mays
  Coding DNA Sequence Number=SeqID_23046
  Subcellular localization annotation: CTP_CleavageSite=30; ConfidenceScore=5.08e-01
MEAVGIDLALGGGAASLPPSPARSSRAPQRAMETVGVGLALGGLHVPTGRKNCEGGAPPWLMGSDHLSGNRCVLSVSPLL

SEQ ID NO: 64826 - protein, 95 aa, Zea mays
  Coding DNA Sequence Number=SeqID_23047
MAQWHISLSRARVRIRCQATFALKAPAIRSVGVAAWPRLLLGEVWASGEPKVCPLLEGVLGRDLCADGGYQLRLGVLRLCTDGGYQLRLGVLGYP

SEQ ID NO: 64827 - protein, 187 aa, Zea mays
  Coding DNA Sequence Number=SeqID_23048
MAACTTVDSLVWQDTSANTAVSALGEMPTRIFVTKIHRETYLTNNEAIVGEFEVYSCQMISTEQTIKVPSETSTLLQVVTSVEDVILVKDVSYDEEATLVAQSTFVESIFLTTIEDCPSHSMVEENTKPVLVEDGSDDEEATLVAQTTFEGPIFLTTIKDAFLDPLLGAIAYGAEVTQLGAIGYGAE

SEQ ID NO: 64828 - protein, 102 aa, Zea mays
  Coding DNA Sequence Number=SeqID_23049
MARSVRAQGRARQRLPLRPRPGSGEDAIPPEVEVEAEPWGRARRRPPSEAEPHPSGWHSSRSGASGAVFLSGRSVKGEVTAVTSTLSTEARVSGKGVRQSSH

SEQ ID NO: 64829 - protein, 1133 aa, Zea mays
  Coding DNA Sequence Number=SeqID_23050
  Gene Ontology: Mol. function=nucleoside-triphosphatase activity; Cellular component=membrane; Biological process=peroxisome organization and biogenesis
  Homolog annotation: Hit_ID=Q9FQ60; Match level="QueryCoverage=95%, HitCoverage=98%, E-value=0.0, Identity=43%"; Hit description =Peroxisome biogenesis protein PEX1
  Pfam annotation: Domain name=AAA; Domain location=552-754; Score =77.3; E_value=4.7e-20; Accession=PF00004.19; Description=ATPase family associated with various cellular activities (AAA)
  Pfam annotation: Domain name=AAA; Domain location=840-1039; Score =246.6; E_value=5.1e-71; Accession=PF00004.19; Description=ATPase family associated with various cellular activities (AAA)
  Pfam annotation: Domain name=AAA_3; Domain location=840-959; Score= -18.0; E_value=0.03; Accession=PF07726.2; Description=ATPase family associated with various
  Pfam annotation: Domain name=PEX-1N; Domain location=99-175; Score =126.9; E_value=5.8e-35; Accession=PF09262.1; Description=Peroxisome biogenesis factor 1, N-ter
  Pfam module annotation: Pfam domain module=AAA::AAA::AAA_3::PEX-1N; Domain location=552-754::840-1039::840-959::99-175
MSGGGLEVQVHVVGGARSCFAALPLHLIHDLERTSATGDLPPVLALELRGPAGARWSLAWSGAASRSSAIEVAQELADCISLPDGTIAQLSVARSLAKADSISIEPYSEDDWEILESRADLAEETILKQVGIVYEGMKFPLWLDGHNIVKFVVLSSFPEKTVVQLVPGTEVVVAPKKRKEKPSQDLQKQSALKEQVKIKALLRVQAADRKYAHTFKYEGVEIGVVVSYAVLIHPDTAASISVGNLQLVAVSPKSSKKGLPLKGKEVGRKKGISVTKERSHEAIVYILLSDSVAKGHVMLPYSIRHFISADVHSWVYIKTYSANIKEDEPLVTISPLKFKMHVKDAHDSSKLVSQEVDTSRITRIPSENGDFFQKARYSENKNIRGADIESISESVSRQKFFIKHWLIGHLKEMGLHASHTEMNSIVLPTNILLHLEATDKEGTKGVEFLYFLKLTSENSNFNDSQLNIETTWSVPTSNADDLELHFGKFELGEPVSFDSLVDSGSSDGFKLTRSSLGWMENAMSDVTKRLSVLLSATSLRLFNRIKFPFPGHVIVYGPRGSGKTALTRASAKYFEDHKDILAHIIYIDCSKLALGKAKETRQEIEDSMSEALLHSPSIIIFDDLDSVVSVSSDPQVSQSSSSSDSLVQYLADIMDEYKDKIQNTCGYGPIAFMASVQSLQSLPQDLTSSGRFDFHIELSALAVPERKALLQHQVEEHDLLCSEEVLSEIASKCEGYDAYDLEILVDRAVHTAAYRFLLPSNACHNSLKRTLLMEDFFKAMHGFLPVAMRDLRKYAPDDKDGGWEDVGGLDEAVTIIKETLELPSKYPNIFTRAPVRLRSNILLYGPPGCGKTHIVRAAAAACSLRFISVKGPELLNKYIGSSEQSVRDFFAKAVAAAPCLLFFDEFDSIAPQRGTHSAGVSDRVVNQKTKEQSKPAFFVCKQFLTELDGVETLTGVFVFAATSKPQLIDAALLRPGRFDRLVFCDFPRWDERLEILKVHSRTVSLASDASLEDVASLTEGFTGADLAAILTDAGLAAIHELLDNQENGVPETEPCISKELLMSVTRKARPSTPADEKMRYDREFGEFVSSRKSISTKVTSFLFLNPQKSNHDISIEKPQYLVTFFGYMMKFIG

SEQ ID NO: 64830 - protein, 79 aa, Zea mays
  Coding DNA Sequence Number=SeqID_23051
  Subcellular localization annotation: CTP_CleavageSite=41; ConfidenceScore=5.33e-01
MYPADGPMLKASVAPFTRDFSPPLQAAAALPPPLQAAAQPRQAAAQPPAAPGRSKSLPLSAGHYRDNPASSFTSLVIGE

SEQ ID NO: 64831 - protein, 81 aa, Zea mays
  Coding DNA Sequence Number=SeqID_23052
MDHEEGRGIDGYIYSAGDGVRVEDNWLARKGKILTTRPRGNRAQVGALHPKRKDKSNQSKAEIDEKKIKKSLERIRVAKVR

SEQ ID NO: 64832 - protein, 78 aa, Zea mays
  Coding DNA Sequence Number=SeqID_23053
MDHEEGRGIDGYIYSAGDGVRVEDNWLARKGKILTTRPRGNRAQVGALHPFKFTIFNSNSNFLSHFNPKFDSEFQAYI

SEQ ID NO: 64833 - protein, 423 aa, Zea mays
  Coding DNA Sequence Number=SeqID_23054
MDLRGRDKTTFVREVVAEAVKIVGKYAPKTDTLRSWDIRGSNARLNRVFELNHLSYGDYPEGDSADTADHRGKQTRPLADEGPSRDKAPGAAARKRKLGTTPEDLGLRVSGHFVGELLEMCAAPGSDGERSPGRAVKETLGPRQVGGPKAGGVGGAAQREVHRLKCRGRRSLHGAVRGRLLGGRCRHVRRPDGAATAGAESGQLAVVPAASSASSVVAATGMKGDTGVSEDPWARFCTDGEIASDAAAMGVATSVVQLLKYATTFAERIASGALTLEFATERRRLEGRIERLRTQHTEAMRDKSTVENKSRNLLEKLSAAEKKLKPRTKADLTLKRATDKESELKSLRNYCEKTETSTHAGVERAHTLFVEEELESLPFIVTGLMSYAYLVTCEGAANAFSHEGCRHFEVFDRASEDFDRRIF

SEQ ID NO: 64834 - protein, 151 aa, Zea mays
  Coding DNA Sequence Number=SeqID_23055
MERAEDVVDLGGLAGAPPESAEDNLVLPSDADALKVVAEPAVEDPTPAAGPSQGFGPAHATATDNANFVAASIVVAEDNSDDSVSKFFESEDSGSSVVWTEESSDEDLDYFAALDVAAAEASPCVMGVEVLSGASARRRRRRAVAKRRISE

SEQ ID NO: 64835 - protein, 680 aa, Zea mays
  Coding DNA Sequence Number=SeqID_23056
  Gene Ontology: Mol. function=protein serine/threonine kinase activity; Cellular component=cell surface; Biological process =protein amino acid phosphorylation
  Homolog annotation: Hit_ID=Q9LDT8; Match level="QueryCoverage=98%, HitCoverage=85%, E-value=0.0, Identity=59%"; Hit description =Putative S-domain receptor-like protein kinase
  Pfam annotation: Domain name=APH; Domain location=382-572; Score= -8.3; E_value=0.022; Accession=PF01636.13; Description=Phosphotransfer ase enzyme family
  Pfam annotation: Domain name=B_lectin; Domain location=6-118; Score =49.7; E_value=9.7e-12; Accession=PF01453.15; Description=D-mannose binding lectin
  Pfam annotation: Domain name=PAN_2; Domain location=226-291; Score =67.9; E_value=3.3e-17; Accession=PF08276.2; Description=PAN-like domain
  Pfam annotation: Domain name=Pkinase; Domain location=379-649; Score =206.9; E_value=4.5e-59; Accession=PF00069.15; Description=Protein kinase domain
  Pfam annotation: Domain name=Pkinase_Tyr; Domain location=380-649; Score=119.4; E_value=1e-32; Accession=PF07714.7; Description=Protein tyrosine kinase
  Pfam module annotation: Pfam domain module=APH::B_lectin::PAN _2::Pkinase::Pkinase_Tyr; Domain location=382-572::6-118::226 -291::379-649::380-649
MPGTSPTFWVGDRVVISDISAAALEVFGGSLCITEAGSTLWCSSVAGAGPGPPPPSAAAAAVLLGNGNLVVRDQADDASSRVLWQSFDYPGDSLLPGARLGLAAGTGANVSLTYRDFSHNGSLSVDPSRRNGFVLSTDGHPSSLGTFPDWMVTSQDNGTSLVLNPPPDSSNLTEFLQFSLGQVSLMRWSNGECSCVRGFEPSYPAEWSLGYFATGCSRPRSLPLSCQTNGQTEQDDSFILLDKLQGLPYNPQDGLAATDEDCKQACLSRCYCVAYAYHSGCKLWYYNLYNLSFASRGPPPYSKVYVRWGSKLRPKSGLRTGLIVSMVVGSVALAAVIVILALLWRSRTWRGVFTCSRREFEAGGSLAFYSYAQMKKATRNFSDKLGEGGFGSVFRGTMAGPTAVAVKRLKRSGQADKQFRAEVQTLGVIKHANLVRLLGFCVRGDTRLLVYEYMPNGSLDAHLFSERSARLSWSLRYQIALGIAKGIAYLHEECEDRIIHCDIKPENILLDSELRAKIADFGMAKLLGREFDSALTTVRGTMGYLAPEWISGRPVTRKADVYSFGIVLLEIVSGRRSTARLRSGSGSHRYFPLHAAARVSEGDVLCLLDSRLGGDADVEELDVACRVACWCVQDDEGDRPSMGQVVRMLEGVVSVAVPPIPSSFQNLVEGEGSVIYSDEE

SEQ ID NO: 64836 - protein, 322 aa, Zea mays
  Coding DNA Sequence Number=SeqID_23057
  Gene Ontology: Mol. function=transcription factor activity; Cellular component=nucleus; Biological process=regulation of transcription, DNA-dependent
  Homolog annotation: Hit_ID=Q5NAQ6; Match level="QueryCoverage=85%, HitCoverage=83%, E-value=2e-55, Identity=47%"; Hit description=Pti6 -like
  Pfam annotation: Domain name=AP2; Domain location=112-176; Score =127.2; E_value=4.7e-35; Accession=PF00847.10; Description=AP2 domain
MEEEEVFVTVRRTEHVDVTSRAVVVAAGRAAVAGPRTVRVFCDDYDATDSSGDEAEEEEEKKAARRRVKRYVQEIHLERAAKEEEEATAAASLGAVLPGPKRKRKPDGEASEPRFRGVRRRPWGKYAAEIRDPWRRVRVWLGTFDTAEEAAKVYDSAAVQLRGRDATTNFQQQVDPERLSQPAASKSAATSTYDSGEESVTAVASPTSVLRSFPPSADAGGTRSKAAARNPETGDSTIVFGCPFSLASELPALYTEFDLLADLPLDFLADAPEVEALSLPPFSACTPEEEEECPSDAVRWRQVDELFQDITDLFQIDPLPVA

SEQ ID NO: 64837 - protein, 199 aa, Zea mays
  Coding DNA Sequence Number=SeqID_23058
  Gene Ontology: Cellular component=chloroplast outer membrane; Biological process=chloroplast fission
MGPEQEEAVLETIWDLHDKVSDAIHALSRAHFLRAVRRRSSASAPGLVDVKGGGLGLGARGGDEVVALAALAEEARSLHAIRAALEDLEDQFECFLAVQTQQQTERDFAMARLEQSRIMLAIRLKEHHGRNHKVIDEASAFVRDVYQDVWPSLSATKAERRADSSGNPAKGPSFLARMVQEDHQREELVVAGIIISERR

SEQ ID NO: 64838 - protein, 113 aa, Zea mays
  Coding DNA Sequence Number=SeqID_23059
MEEGGKARSGGGAHEKTLELVLEVLQRGADGVQAPGLLSQGRQGDDLVSAARAETQTPALDVHEAGGGGRGAAANGAQEVGAGEGVDRVADLVVEVPDGLQHGLLLLGPHRDP

SEQ ID NO: 64839 - protein, 114 aa, Zea mays
  Coding DNA Sequence Number=SeqID_23060
MSISSTSALGQRSLVSSPGGDGGAAVCELAGPLILDPSTVNTRDELCQRVPTLFDLPVPAAPEPATAASTPPTSCADFASLAGYRFPPALSVNPGNAYRLANEHGDELPEPWND

SEQ ID NO: 64840 - protein, 132 aa, Zea mays
  Coding DNA Sequence Number=SeqID_23061
MGVMAKNKKKKKEEICPIVTNGASTGKAKRDIKTGAIAATPPALSGQRYLFSMSEDSGITPRMEHYECMIELFRAQKSVTNDVGGPGQAKENCLFNDVVTGIRSDKRDAEEYALLKGSSTRSELNHPAALTA

SEQ ID NO: 64841 - protein, 147 aa, Zea mays
  Coding DNA Sequence Number=SeqID_23062
MRKTNCGAVGFKVRGGPRLYTQQQRGIEGLAWLEGKLVCYCLLGIVFFKKGRNRGFRARLFGSMFRKGMPSGKKEESSIAEKRISVLSLSRNEQIPFSRARDSSLISLGFNSNAREEKRKAWDFQYDRAGPQWSFMSEADVSVVNRI

SEQ ID NO: 64842 - protein, 367 aa, Zea mays
  Coding DNA Sequence Number=SeqID_23063
  Homolog annotation: Hit_ID=Q36271; Match level="QueryCoverage=40%, HitCoverage=39%, E-value=3e-56, Identity=75%"; Hit description =ATPase subunit 6
  Pfam annotation: Domain name=COX2_TM; Domain location=160-226; Score =27.0; E_value=1e-06; Accession=PF02790.6; Description=Cytochrome C oxidase subunit II, transmembrane domain
MTNGSNTSNANGVPIPRVGGSTGIYEDHPGLNPTDEMVVEYQAGIREQMSELMRMDGEHPEVVAAAKPRGFKGAWKKSEAFKYGVSNDADLPGGGNPAGSSRGVDLANGNEAGSSAGVDLMNVDDAAGFAAESPLDQFGIHPILDLNIECRFLTIALCDAAEPWQLGSQDAATPMMQGIIDLHHDIFFFLILILVFVSRMLVRALWSRCPVWAARVFTLLSVTTALFYYSSLMTTAEWVMNLIRMRGGSTAGNPDGTSSPSSSFFQGLSREIPGAPVEPRQEVQQPEMALAVPNPSIQPTDRGEPSSAPLGPDQPEDSSAPSRPLTEQDIRTMEQLFDIEEELKPIIIGFYNELGSKKVGELCPLGG

SEQ ID NO: 64843 - protein, 357 aa, Zea mays
  Coding DNA Sequence Number=SeqID_23064
  Gene Ontology: Mol. function=RNA binding; Cellular component =mitochondrion; Biological process=translation
  Homolog annotation: Hit_ID=Q6R9N5; Match level="QueryCoverage=63%, HitCoverage=63%, E-value=1e-110, Identity=86%"; Hit description =Ribosomal protein S4
MAKLMPGRDHQEILVAAERIHGGSANIGFLRSQLRDLVANGTESEAFKYGMAELANENLAANFAVMHLAESPLDQFGIHPLALALGLGSGKKERKTSYVGSSRSKNAAVPQVLIHWSNLEATWEDYELIAISHGDLISFKENDARTRGEEIRRSFYIDISVGKIIGKFLPVRIWRRTKTEWFRLLTTQRGCRLLLKSGFLQELCSYMQEEDLERTKKFGSAKVCLGSSFAEHNRMKRNLFHFKYFFLWKRRKEEEEGVEEILKVIEQNENRKRAISPFVYTNKLYRNSTYCSGSPFTITRKIRIKRIELPTHYSEVNHRTLKAVVSYGPNIGHIPHDIRLKDPNLPLRSGNGPGQNI

SEQ ID NO: 64844 - protein, 140 aa, Zea mays
  Coding DNA Sequence Number=SeqID_23065
MGPNEPRATHQAKIGNARPARPNKLFHSPTWTDGIYIVDKDRSRLIRLPVGESRPPSSALRLLLVSSARDSESQQPSRSRSWWWSSCSEAAADDQQGSPPTCWATAALVGGVWRLRWVRAVPTICMHACKPSSFVFVSIG

SEQ ID NO: 64845 - protein, 279 aa, Zea mays
  Coding DNA Sequence Number=SeqID_23066
  Gene Ontology: Mol. function=inorganic anion exchanger activity; Cellular component=integral to membrane; Biological process=anion transport
  Homolog annotation: Hit_ID=Q1ZYR6; Match level="QueryCoverage=85%, HitCoverage=43%, E-value=2e-91, Identity=61%"; Hit description=Boron transporter
MVQTAKEGMMNNATSSEVYVKMQDVFIKMDHGGDTVSAHKELKDLKDAIIPEGNGSRTVPEVFDPEKHVDAYLPVRVNEQRVSNLLQSLLITGCIGVTPLIQKIPTSVLWGYFAYMSIDSLPGNQFWERIQLLFITPQRRYKYALLAIHFIPKYFDPSHLRELDAAEYEELKGFTPDPSVCEDESVRSGDAQPGYASEILEEFTTHRGELKRRNSTFHDGRLLQLNSVKMTRELSRVPSWLTRILEEYAVSESELQLSMGNIWLRSAFSEEKSSKNRTV

SEQ ID NO: 64846 - protein, 191 aa, Zea mays
  Coding DNA Sequence Number=SeqID_23067
  Gene Ontology: Mol. function=nucleic acid binding
  Homolog annotation: Hit_ID=Q10RA9; Match level="QueryCoverage=64%, HitCoverage=24%, E-value=5e-21, Identity=52%"; Hit description =Expressed protein
  Pfam annotation: Domain name=Alba; Domain location=48-136; Score =13.9; E_value=0.00085; Accession=PF01918.11; Description=Alba
MDRYQRVEKPPPEPAAIGENEVRITTQGLVRNYVTYATSLVQSCLLVAGGVLVVRYVTVLRFASPYVLYRISFLRAFSNQEKQVKEIVLKAMGQAISKAVAIAEIIKTFVIRASTELQKRIPGIKLLYIRILSHKDISNLSNINSTSQDNIKFKRIHMDAAEAEAGAEEGAGVLGVGTAEAMVDMNMITTK

SEQ ID NO: 64847 - protein, 316 aa, Zea mays
  Coding DNA Sequence Number=SeqID_23068
  Gene Ontology: Cellular component=integral to membrane; Biological process=vesicle-mediated transport
  Homolog annotation: Hit_ID=Q10RB1; Match level="QueryCoverage=89%, HitCoverage=98%, E-value=8e-94, Identity=72%"; Hit description =Vesicle-associated membrane protein 724, putative, expressed
  Pfam annotation: Domain name=Synaptobrevin; Domain location=161-231; Score=36.3; E_value=1.1e-07; Accession=PF00957.11; Description =Synaptobrevin
MGQQRTLVYSFVARGTIVLADHAEVSGNFASVAAQCLQKLPANNNRFNYNCDGHTFNYHIYDGFSNAPCSCFALSLPHAYKSTNVILLPMQVLLDDTTYCVVATESAGRQLPVGFIERVKEDFSKKYSGGKAKNASANGLKREYGPKLKEHMRYCDQHPEEIDKLAKVKAQVTEVKGVMMQNIEKVLDRGEKIELLVDKTEDLRSQVPHIYDLMHVQSIGSIDLTITKLTALVSPVGTRFQATGNKDTTEDVVGKHEDEAHRFRHRGCADPPHCLDSLQGLELLVMWNYRAEISHVTTDVLYLCFSFSLMLFCSCR

SEQ ID NO: 64848 - protein, 422 aa, Zea mays
  Coding DNA Sequence Number=SeqID_23069
  Gene Ontology: Mol. function=endoribonuclease activity
  Homolog annotation: Hit_ID=P93641; Match level="QueryCoverage=57%, HitCoverage=90%, E-value=1e-137, Identity=95%"; Hit description=S -like RNase
  Pfam annotation: Domain name=Ribonuclease_T2; Domain location=200 -385; Score=93.2; E_value=7.6e-25; Accession=PF00445.9; Description =Ribonuclease T2 family
MAPPVDVAGLRPRLGDVEAPPKLRSSLSSVDEVEFEPPGRARRRPSAEARAESEPWGRAKRSSSSSGAEPESEPWVGQSGVRCLLGLSPSPSPGSGGAEFAVFRDLARVRALDRAERSGAVLLSGRSVERRSDGGHFGSAGWGARVRIKLYADGGYQLRIRSLEGTPNYGPRQIPMALLLGLLLLVVASPAIADDDSGIYYQLALMWPGAYCEQTSAGCCKPTTGVSPARDFYITGFTVLNATTDAAVTGCSNKVPYDPNLITGIQGLNQYWSNIRCPSNNGQSSWKNAWKKAGACSGLSEKDYFETALSFRSRINPLVRLKAKGIEPDFGLYGLKAITKVFKSGINATPVIQCSKGPFDKYMLFQLYFCAAGNGTFIDCPAPQQYTCSKEILFHPFKKWMLKQQLNQDDDPFQLPGVAMDN

SEQ ID NO: 64849 - protein, 302 aa, Zea mays
  Coding DNA Sequence Number=SeqID_23070
  Gene Ontology: Mol. function=peptidyl-prolyl cis-trans isomerase activity; Cellular component=membrane; Biological process=protein folding
  Homolog annotation: Hit_ID=Q69JF7; Match level="QueryCoverage=61%, HitCoverage=86%, E-value=5e-94, Identity=87%"; Hit description =Putative peptidylprolyl isomerase
  Pfam annotation: Domain name=Pro_isomerase; Domain location=125-292; Score=347.3; E_value=2.6e-101; Accession=PF00160.11; Description =Cyclophilin type peptidyl-prolyl cis-tr
MAAPTVLRPLQRTFRIRTPSVPNLPLRTGGVIFWGALGDALTWESFSLPQQVDLNNISSIREWWEQTETLFSQDRKRAFNGVVIYTMWNLWKERNRRIFEHCSLSPLQITGRGVAEVQLPAVTHRVYLDVEIDGQHIGRIVIGLYGEVVPKTVENFRALCTGEKGVGSNGKPLHYKGTPFHRIIPGFMIQGGDIVRGDGKGSESIYGGIFPDENFTVKHTHPGVVAMANSGLDSNGSQFYITTIKTSWLDGEHVVFGRVIQGMDTVYAIEGGAGTYNGKPRKKAVITDAGEIPKEKWGDQEA

SEQ ID NO: 64850 - protein, 181 aa, Zea mays
  Coding DNA Sequence Number=SeqID_23071
  Homolog annotation: Hit_ID=Q2PW34; Match level="QueryCoverage=39%, HitCoverage=25%, E-value=2e-10, Identity=47%"; Hit description=L -asparaginase 2
MVVDLAAGVHYYAAVFHRAPAGAAPRAKWRMYAVYAACFAIREQGGQRQRTQGGHGDERVVHQCVRIRDVGVCGGHVHRRLMSKMLGRNGDSPLIRFGTYTCGACAVSGTLKWDMATVMEYKGLPLQQVVDYYVRDMATVMEYKGLPLQQVVDYYVRGTMQNIRSQLLSIISRYKLFTNLY

SEQ ID NO: 64851 - protein, 120 aa, Zea mays
  Coding DNA Sequence Number=SeqID_23072
MDCTTPGFAPNRRAWIWDRAAYIRSGDALGLSRRIVIGRPLFGTGSGEIRSNLDRQFQIERPRTKNTPFTMLICKRAPGLPFIQPVVHCGSRLSLWKLTLEPLRFPEFMRPVHNSENSVI

SEQ ID NO: 64852 - protein, 43 aa, Zea mays
  Coding DNA Sequence Number=SeqID_23073
MSSTLVGNLELRIAMLVGGGRSRTKRTNEKLAHDVVEEEIDSR

SEQ ID NO: 64853 - protein, 42 aa, Zea mays
  Coding DNA Sequence Number=SeqID_23074
MATVRMVIWMNAFRLTDGVDDQIEAGERFPCSPEVYNINVVT

SEQ ID NO: 64854 - protein, 130 aa, Zea mays
  Coding DNA Sequence Number=SeqID_23075
  Homolog annotation: Hit_ID=Q5SMR4; Match level="QueryCoverage=28%, HitCoverage=6%, E-value=5e-08, Identity=67%"; Hit description=ALM beta-like
  Subcellular localization annotation: CTP_CleavageSite=36; ConfidenceScore=5.25e-01
MPRAFPRHALKANSDGSLQGKPSLHSTRPLKRPRIRSLSREACNPYYKHPAYSLRILRCNDINLQLQFYESQKEPGQGRPSWLIPYVSPLRSYGIVRLTDPVGMDVLKDCDESGFHTHRETTNGSPLSSL

SEQ ID NO: 64855 - protein, 72 aa, Zea mays
  Coding DNA Sequence Number=SeqID_23076
MAHGAEVTYLAIIAYGAEVSGELTTRYALAADVAYLDATVCGAELGDGVGRVMVIGPYLLPATTAVALTTRR

SEQ ID NO: 64856 - protein, 83 aa, Zea mays
  Coding DNA Sequence Number=SeqID_23077
  Subcellular localization annotation: CTP_CleavageSite=69; ConfidenceScore=5.16e-01
MAHGAEVTRLVAMAYDAERTSSRPSRDRLRLSRVGRGRPPASQTAFNPYPPLSACRGYRVTLKRTSLIPSSSLSVKKLIIVHR

SEQ ID NO: 64857 - protein, 910 aa, Zea mays
  Coding DNA Sequence Number=SeqID_23078
  Gene Ontology: Mol. function=kinase activity; Cellular component =cytoplasm; Biological process=phosphoenolpyruvate-dependent sugar phosphotransferase system
  Homolog annotation: Hit_ID=Q5JNC1; Match level="QueryCoverage=88%, HitCoverage=99%, E-value=1e-179, Identity=58%"; Hit description =Putative kinase interacting protein 1
  Pfam annotation: Domain name=KIP1; Domain location=116-189; Score =151.7; E_value=1.9e-42; Accession=PF07765.3; Description=KIP1-like protein
MDPAKSNQKRLSGVTGFGFGLSQLRRGSCPAKRKLDLDLGGTGRCKPPHIQKRGGGRRRDGSVAVEWMCRRAGAEEENGRAKRLVPLDWILDKEEEEKEEEEEEEMLQRAASNAYSWWWASHIRSKQSKWLDNHLQDMEHRVKCMLLLLGEEADSFSKRAEMYYKRRPEVITQVEEVYRAYKALADRYDIMSGELHKANHTIATAFPDQVQYAMLEEEEDNIPKAFTPVDPRKIHKSTVDGLMMKKNKKNPGRSMDDGGEKTTPLVAVSKENAREEISRLQKAILVMQTEKEFIKSSYESGIAKYWDLEKEINDMQEQACHFQDKFDESAVIEDDEARALMTATALKSCEDTIVRLQEQRKASAQRAVGESERVRVLRDKFEAIMNKHGRSLPAVSLEEERNTRKNHCPEETMESVHVKQEVAVDIVADKIKEHFERGCDISIAQVTERIDEVVNTVVDLELMVSSQTSQIDRLCQENKELESSLQSLEDGSADELTEKLIRQAEEELVRAQALESSFHKDESTIRSNFVEAISRFHDVSELLLSPVCDSAHTSHDVPESSMEEIAEQPHAEADNALVAAKSESSSCMEMEQQLDVAQDKISCDDHGTSLLEDAKRKLAEMEQKNQDCLNEIRALREQITSCSCSRRGHRRRPSISSDASISLLKGPTLSTIAENASPLQDKFRRDIDTLLDNNLELLMKFSSSLQRVQEFQSKHDGLQHLIKDQDGGKQDGTTEKQLRAFKTELQVWSEQNAMLRGELQCRFASLCDIQEEITAALDDQYQAAKFQGEILNMQQENNRVSDELQAGLDHIKGLHAEVEQALAKLHKSVSLPPQQAGDDGGGDSSSPAHGGSSSNLGLVPSNKSNVPLQSFLFPAKPTPAKPKKTSLLARVTPVLPKQPVDMRFLAKLPR

SEQ ID NO: 64858 - protein, 188 aa, Zea mays
  Coding DNA Sequence Number=SeqID_23079
MGGIAGGGAAQIRAADFGGEAPGRYLDDYVTAATMAAHDSSDEEEDFSRLGVTYLVAYAAYHMQNVPPNEQCEMQNTYLREKGDRDRKEGVSQGSGATGEQRRSRAGEGGGGQANRGPAASGEPRDAGAQGAGATGEHRAGEAREQDKAASDWRWRGRRRRPGCLAEDGCGRSVSAACTALEPEGVGG

SEQ ID NO: 64859 - protein, 440 aa, Zea mays
  Coding DNA Sequence Number=SeqID_23080
  Gene Ontology: Mol. function=heat shock protein binding; Cellular component=cytoplasm; Biological process=protein folding
  Homolog annotation: Hit_ID=Q5JNB5; Match level="QueryCoverage=70%, HitCoverage=65%, E-value=1e-127, Identity=75%"; Hit description =Putative P58IPK
  Pfam annotation: Domain name=TPR_1; Domain location=111-144; Score =9.9; E_value=0.35; Accession=PF00515.18; Description=Tetratricopeptid e repeat
  Pfam annotation: Domain name=TPR_1; Domain location=145-178; Score =28.4; E_value=2.5e-05; Accession=PF00515.18; Description =Tetratricopeptide repeat
  Pfam annotation: Domain name=TPR_1; Domain location=260-293; Score =23.9; E_value=0.00055; Accession=PF00515.18; Description =Tetratricopeptide repeat
  Pfam annotation: Domain name=TPR_1; Domain location=344-377; Score =10.2; E_value=0.33; Accession=PF00515.18; Description=Tetratricopepti de repeat
  Pfam annotation: Domain name=TPR_1; Domain location=378-411; Score =19.4; E_value=0.013; Accession=PF00515.18; Description =Tetratricopeptide repeat
  Pfam annotation: Domain name=TPR_2; Domain location=111-144; Score =23.3; E_value=0.00087; Accession=PF07719.7; Description =Tetratricopeptide repeat
  Pfam annotation: Domain name=TPR_2; Domain location=145-178; Score =25.3; E_value=0.00022; Accession=PF07719.7; Description =Tetratricopeptide repeat
  Pfam annotation: Domain name=TPR_2; Domain location=260-293; Score =28.5; E_value=2.4e-05; Accession=PF07719.7; Description =Tetratricopeptide repeat
  Pfam annotation: Domain name=TPR_2; Domain location=306-339; Score =5.4; E_value=7.7; Accession=PF07719.7; Description=Tetratricopeptide repeat
  Pfam annotation: Domain name=TPR_2; Domain location=344-377; Score =11.2; E_value=1.6; Accession=PF07719.7; Description=Tetratricopeptide repeat
  Pfam annotation: Domain name=TPR_2; Domain location=378-411; Score =19.2; E_value=0.015; Accession=PF07719.7; Description=Tetratricopepti de repeat
  Pfam module annotation: Pfam domain module=TPR_1::TPR_1::TPR_1::TPR _1::TPR_1::TPR_2::TPR_2::TPR_2::TPR_2::TPR_2::TPR_2; Domain location
MAAFGGVGCGCGCDDGLIGVCAAAIADGGLIGRKPLRASQRGRQASQRGVSATQANNGTETPAVTAPELETEIMVRAWGRRTALPPLLILGLLRLHYSSLVVAQEGQEKDPATLFAQASGMMDLRKYDGALGLLNAVLEIDPNHSEAYRQRASVLRHKCRYEEAERDYNKHLELSPGSASVVKELSQLLQAQNSLQSAYGQFDSGDFSKVVEYINKIVLVFSPGCLKAKLLKAKALLALKDYSSVISETGFILKEDEDNLDALLLRGRAYYYLADHDVASRHYQKGLRLDPEHSELKKAYFGLKNLLKKTKSAEDNAAKGKLRVSVEDYKAALAMDPDHTAYNVHLYLGLCKTLVRLGRSKEAISTCTEALIIDSELVDALTQRGEAKLLSEDWEGAVQDLKEAAQKSPQYNEKLLLVQHKVEKGAVVLSRQKSYASMAM

SEQ ID NO: 64860 - protein, 209 aa, Zea mays
  Coding DNA Sequence Number=SeqID_23081
  Gene Ontology: Mol. function=DNA binding; Biological process=DNA integration
  Homolog annotation: Hit_ID=UPI00004C1732; Match level="QueryCoverage =69%, HitCoverage=9%, E-value=5e-77, Identity=95%"; Hit description =UPI00004C1732 related cluster
MAALGPLTEARGRQQGLDSPDSCPSARLQRSSDGHDTTRNGCQNLSGCHDGMDLPVSKRRQLTRQVGEFPEVRDCFMIYGGQAANASARHRKQERREVCSVKVAAPVYLDWSDKPITFDQADHPDHVPSPGKYPLVVDPVIGDVRLTKVLMDGGSSLNIIYAEILGLLRVDLSSVRAGAAPFHGIIPGKRVQPLGQLNLPVCFGTPSNF

SEQ ID NO: 64861 - protein, 434 aa, Zea mays
  Coding DNA Sequence Number=SeqID_23082
  Gene Ontology: Mol. function=metabotropic glutamate, GABA-B-like receptor activity; Cellular component=membrane; Biological process =ion transport
  Homolog annotation: Hit_ID=Q69NA4; Match level="QueryCoverage=89%, HitCoverage=48%, E-value=1e-123, Identity=71%"; Hit description =Putative Avr9/Cf-9 rapidly elicited protein 141
  Pfam annotation: Domain name=ANF_receptor; Domain location=24-356; Score=118.6; E_value=1.8e-32; Accession=PF01094.18; Description =Receptor family ligand binding region
MELPLDVQGGGSRLDVDKRIEQYRAVAGVLHVLVWFVLVLQMQHLQGVDLLKNVHVQAIVGPQTSTQAKFLTELGNKTSVPIISFSANSPSRSSSQTPYFIRTAWNDSCQAEAIASLVQKYNWREVIPIIEDDDSNTRFIPDLVDALGHVDTRVPYRCKIHPSAGEDEIKHAISSLKEYWTSVFVVRMSYQLALKFFQLAKDEGMMGQGFVWITAYGLTDIFNVVGYPALDVMEGVVGIEPYVQETAKLNKFRQRWCEKYRSENPGTSINESITSGLYAYDTVWAIALAAEKAGYVNSDFVLSETNNGSTDFNKISTSRAAKKFHAAFLEVNFTGITGQFVIQDMQFHSFIRSEDGIPKGFCIDIFEEVISKLPYKVPKHYVEFGNGKGESNGTYDELVYKVYLKEFDAVVGDITILANRSLYVDYTLPYTESG

SEQ ID NO: 64862 - protein, 91 aa, Zea mays
  Coding DNA Sequence Number=SeqID_23083
MATVGTPILGYPLLLDLGETPMVVRSHGVTGAARHGPLRASGVGTTRIECGQDTRISTLVVGSMHSPQSMGHANNPHITKAIPLTRCVAHG

SEQ ID NO: 64863 - protein, 46 aa, Zea mays
  Coding DNA Sequence Number=SeqID_23084
  Gene Ontology: Mol. function=transposase activity; Biological process= transposition, DNA-mediated
  Homolog annotation: Hit_ID=Q8RV31; Match level="QueryCoverage=89%, HitCoverage=7%, E-value=4e-11, Identity=71%"; Hit description =Transposon protein, putative, CACTA, En/Spm sub-class
MARLVHDMRVFNEANHKYGHKFPRPPQGKFYLVDSGCPNRLGCFAP

SEQ ID NO: 64864 - protein, 174 aa, Zea mays
  Coding DNA Sequence Number=SeqID_23085
MDMYTGSRCGTRRAEFSHYSWDLDLMDKEMRESSRQQQSRGTEEEEEQRKHGSKRERKFLAPAETHNLISSLNPSSSGAFLGFRYSTTRFCFEPALEAAHPLVVAALDSPDPSTALTAPHSESPLRLGLGVRGPNHSHCDVDRRPLRCASPLRPLRKTSSKISHEGLCVNLFYI

SEQ ID NO: 64865 - protein, 85 aa, Zea mays
  Coding DNA Sequence Number=SeqID_23086
MEEKQWRQEEYVRRRLRTETSSFVRNPGLCTAERAPIVRQRRAVVLLARTAGLEEAAGVAGHPPHSADPGGPLQGGHGEWKAGRS

SEQ ID NO: 64866 - protein, 95 aa, Zea mays
  Coding DNA Sequence Number=SeqID_23087
MCDDVQLCNRCVHGPSYIHCTGVADGLDLKYYPRRSTGSTGGVIVSPVGVGNPRLSSMVNLVVVLNTKLDHALDELGKAWVEIAEMCVERAERRH

SEQ ID NO: 64867 - protein, 222 aa, Zea mays
  Coding DNA Sequence Number=SeqID_23088
  Subcellular localization annotation: CTP_CleavageSite=20; ConfidenceScore=5.07e-01
MRSNSARSVEIAAPSAGRVNLATRSHAQARREISQAGSTANAQRPLVAGPILVRCLRRLPRNKQDELDLGPQVRMMHMKNVSVPGGGDDEDPPRPFRQVKGKTVYLEQQEGRKKQRLDRAARAALAVAAATEQGTLKASRLQFGSYRPTPEDPMPIPDPVLDTQAEDTVFHQFETQGTAIPDDDVDDDFGIPPSPPVPPCSHDHEAGSPVLPLLPLLLLTLL

SEQ ID NO: 64868 - protein, 210 aa, Zea mays
  Coding DNA Sequence Number=SeqID_23089
MDMKITFLNGPIKEEVYVEQPPDFEYDRMQNPSRHRWEEMKMRTSTGEPVALLDSVTSHWDLFVRGIPDPSVRTAPTSREKLTGDLGARKTTEHLHILKPRPHHLKPLTIFRPLELKRASRHYLGELEGGKWVAPPQNHGKHHHIRKCLDGEIGGLWSQRFTGVASIAHQTQRTTVDPPIAATSTNQASIRGKMYTSVFVIFRTPYNPES

SEQ ID NO: 64869 - protein, 328 aa, Zea mays
  Coding DNA Sequence Number=SeqID_23090
  Gene Ontology: Mol. function=protein transporter activity; Cellular component=integral to membrane; Biological process=intracellular protein transport
  Homolog annotation: Hit_ID=A0F0A7; Match level="QueryCoverage=90%, HitCoverage=100%, E-value=2e-75, Identity=52%"; Hit description =Syntaxin
  Pfam annotation: Domain name=SNARE; Domain location=236-298; Score =79.1; E_value=1.4e-20; Accession=PF05739.9; Description=SNARE domain
  Pfam annotation: Domain name=Syntaxin; Domain location=34-138; Score =25.7; E_value=0.00017; Accession=PF00804.15; Description=Syntaxin
  Pfam module annotation: Pfam domain module=SNARE::Syntaxin; Domain location=236-298::34-138
MNNLLTDSFELPRRDSSRDADIEMGMHQADASDNLKDFLKKTANEESKAVTKASSMKEIASMLMVRSNNSFFTAIKQRMEKDIDEVGKIARQAKTKVDELERDNLSNRQKPGCGKGSAVDRSREQTTGAVKKKLKERMDDFQKGFKFVNHCEYLPIADKIMEKIKIYCLYHTLREAIRQEYREVVERRVFTVTGNRPDEETIDDLIETGKSEQIFKDAIQHQGRGQILDTVAEIQERHDAVRDLERKLLELQQIFMDMAVLVEAQGDMINNIETHVSNATNHIQQGVSALQNAKKLQKNSRKWMCYAIILLLVIVAVIVVAVIQPWKK

SEQ ID NO: 64870 - protein, 1219 aa, Zea mays
  Coding DNA Sequence Number=SeqID_23091
  Gene Ontology: Mol. function=iron-sulfur cluster binding; Cellular component=peroxisome; Biological process=electron transport
  Homolog annotation: Hit_ID=Q8LHR9; Match level="QueryCoverage=96%, HitCoverage=85%, E-value=0.0, Identity=66%"; Hit description =Putative aldehyde oxidase
  Pfam annotation: Domain name=Ald_Xan_dh_C; Domain location=674-784; Score=114.7; E_value=2.6e-31; Accession=PF01315.12; Description =Aldehyde oxidase and xanthine dehydrogenase, ab hammerhead domain
  Pfam annotation: Domain name=Ald_Xan_dh_C2; Domain location=795-1218; Score=330.5; E_value=3e-96; Accession=PF02738.8; Description=Aldehyde oxidase and xanthine dehydrogenase, molybdopterin binding domain
  Pfam annotation: Domain name=CO_deh_flav_C; Domain location=482-595; Score=136.2; E_value=9e-38; Accession=PF03450.7; Description=CO dehydrogenase flavoprotein C-terminal domain
  Pfam annotation: Domain name=FAD_binding_5; Domain location=277-455; Score=205.7; E_value=1e-58; Accession=PF00941.11; Description=FAD binding domain in molybdopterin dehydrogenase
  Pfam annotation: Domain name=Fer2_2; Domain location=121-215; Score =58.0; E_value=3.1e-14; Accession=PF01799.10; Description=[2Fe-2S] binding domain
  Pfam module annotation: Pfam domain module=Ald_Xan_dh_C::Ald_Xan_dh _C2::CO_deh_flav_C::FAD_binding_5::Fer2_2; Domain location=674 -784::795-1218::482-595::277-455::121-215
  Subcellular localization annotation: CTP_CleavageSite=17; ConfidenceScore=5.26e-01
MAASPSPSTATATASPSASAAAVLAVNGERVELREGDVNPGTTLLEFLRTRTRFTGPKLGCGEGTSPRPPPPSPRALPFRGCGACVVLLSAYDAASGAVSHAAASSCLTLVHGLHHRAVTTTEGLGGGGRLHAVHERLAGFPRPRIAAFCTPRGCACPSPPRSRGAEAEAKAKAGRRPAPPEGFARLTAAEAEWAVAGNLCRCTGYRPIADACKSFAADVDLEDLGLNSFWRKGDAHASKLPRYDEGSIGVFPEFLKAEIRASSGVDQYTPPALLGSATTWHRPRSVEEYYKLVDSELFDQSKTKVVVGNTASGVYRETEVYDRYIDLRCIPELNSVSKEANGVQIGAAVTISQAIEILRVEAGGCNDVIFCKIADHMEKVASPFVRNTASLGGNLVMAQRDQFASDIATILLAAGSSICIQASSKRLTVMMEDFLQMPPCDHKTLLLSICIPRWTPIGGLFSGDKTMAGTESKTGTSVLFETYRAAPRPLGNAVAYLNSAFLAQVSSDGTSSRLILREICLAFGAYGSQHAIRARNVEKLLVGKPITTSVLLEACRRLKETIVPKEGTRHAAYRSSLAVAFLFTFLYPVTEGTLKTVKEVHLNGYATFGTNGNPNCGPDAHVDVSLKKVIDVNSGSCTNERILEYSNQIIEINKDYFPVGIPTKKVGAELQASGEAVFVDDIPAPKDCVYGAFIYSTKPLAHVKSIELDLSLKQLKTLGVVTVKDIPECGSNVGANTIFGPEPLFGDPVTQCAGEPLGVVIAETQRFANIAAKKAVVNYSTENLDAPILSIEEAVKRCSYFETPPFLLPLKIGDFSKGMAEADQKIYSEVKLNSQYYFYMETQAALAIPDEDNCMVVYSSSQCPETAQNVIAKCLGLPCHNVRVITRRVGGGFGGKAVRSLPVATACALAAFKLHRPVRMYLDRKTDMIVTGGMTKDISLIIPHNFIEALKKYNWGAFSYEAKVCRTNLATKSAMRGPGEVQGSYVAEAIIEHVASTLSADANLVRRKNLHTVESLALFHSECTEDAMGYTLHSICDQVTASENYQHRLEIIQSFNKNNKWKKRGLSFVPIVHKVLSRPTPGKVSILNDGSVAVEVGGIELGQGLWTKVKQMTAFGLGQLCPNRSQELLERIRVIQADTLSNVQGGWTTGSTTSESSCEAVRLACNVLVNRLKPVKEQSQEKQDNVSWDELISKVISQFLSYKLSFEMTGVIRGCPPD

SEQ ID NO: 64871 - protein, 62 aa, Zea mays
  Coding DNA Sequence Number=SeqID_23092
MEEVDEDMHHAFMVFYADDHSLIMLIKLACVLRSLEGGGFQTDTMATVNTLESSTPVVDGKQ

SEQ ID NO: 64872 - protein, 75 aa, Zea mays
  Coding DNA Sequence Number=SeqID_23093
MAHAHDQRREICLSPLWGDAIWTQGSGCKGASQGVSKSEYMCGYSLDATVREQRERRGAWGSGGSDAETWAWGGP

SEQ ID NO: 64873 - protein, 333 aa, Zea mays
  Coding DNA Sequence Number=SeqID_23094
  Homolog annotation: Hit_ID=Q10D98; Match level="QueryCoverage=22%, HitCoverage=11%, E-value=4e-13, Identity=56%"; Hit description =NOT2/NOT3/NOT5 family protein, expressed
  Subcellular localization annotation: CTP_CleavageSite=71; ConfidenceScore=5.80e-01
MAAAGMFCWSTPSAPSTPSSSPTTSSSFPWPRAPLDTAVFDPAAPTRSTRPGHLSRPHPTHILPAPVLDADCSKKREIERQMATAKLFAEEQLAEVVALKRGIFVGTGCFAEKKIPIMEIHGAKCYLIYQLPSLGFFLLATCNESVVSTFCWFIQGRRKDINIIKKAFISYQLLASASTMHISLSAEFDYSVGPTIARGRISIFDGVQKSLPVVSPILLFTILIFTILIRMWPPMATIEFLTSHLSGLNQQSYLSYQVQNAGLETIGLRPANSPSLSTNSGVYEQFMQKYHQPQTQNSLRLQASSDPQQYKDQSQKSVQGTQAVLDPYSLLGC

SEQ ID NO: 64874 - protein, 485 aa, Zea mays
  Coding DNA Sequence Number=SeqID_23095
  Gene Ontology: Mol. function=metal ion binding; Biological process =vesicle-mediated transport
  Homolog annotation: Hit_ID=Q5N6Z8; Match level="QueryCoverage=78%, HitCoverage=84%, E-value=1e-174, Identity=81%"; Hit description =Copine III-like
  Pfam annotation: Domain name=Copine; Domain location=159-307; Score =316.8; E_value=3.8e-92; Accession=PF07002.6; Description=Copine
  Pfam annotation: Domain name=zf-C3HC4; Domain location=442-474; Score= 10.5; E_value=0.013; Accession=PF00097.15; Description=Zinc finger, C3HC4 type (RING finger)
  Pfam annotation: Domain name=zf-P11; Domain location=439-483; Score =6.2; E_value=0.021; Accession=PF03854.4; Description=P-11 zinc finger
  Pfam module annotation: Pfam domain module=Copine::zf-C3HC4::zf-P11; Domain location=159-307::442-474::439-483
MGQRQSHSKRDGSSHGRRSRSFQQQPSAQWGAGGGGYYQQDPSTGYYGAPVPQQGGGYYQQDPGTGYYGAPVPQQGGGYAAPYRDKPAAAAAVAAPAPQAAKPRQLDRRYSRIADEYHSVDQVTDALAQAGLESSNLIVGIDFTKSNEWTGKFSFHGRSLHHISNTPNPYEQAISIIGRTLSKFDEDNLIPCFGFGDASTHDQDVFCFSPDEKPCNGFEEALDRYRELVPHLRLAGPTSFAPIIEMAMTIVEQSGGQYHVLLIIADGQVTRSVDTASGQLSSQEQKTVDAIVKASELPLSIVLVGVGDGPWDMMKEFDDNIPARAFDNFQFVNFSEIMSKNMAQSRKEAAFALSALMEIPPQYKATVELGILGRRSFKSPDRVPLPPPSGSHGAYSYYSSKGFSKPSTYPQSSSSSSPYPHYETPHTATPAAPSATYDNQVCPICLVNPKDMAFGCGHQTCCDCGQILESCPICRTPITTRIKLY

SEQ ID NO: 64875 - protein, 192 aa, Zea mays
  Coding DNA Sequence Number=SeqID_23096
MGSFHFQSCDSYSNPSVRCVRRKGEEQPLFYVAAAVGDYCLWALAGYCGIYFWSSTARIACGAEVTQLDAIGYGAEHPSFFLPLTRSLSSEPRTRVRPTPATLRIPLRIRILHGLRHYCALQQAPHPSPQNGRRVPALPISTLSLSSPQLSACARACWRAPGVIDCMRSGMGSVAGNGDGYGEERECVGRAF

SEQ ID NO: 64876 - protein, 86 aa, Zea mays
  Coding DNA Sequence Number=SeqID_23097
MRPSRPLARPQRLAARPPPDGTARTTNEARREQAPPPSAAPHGGGWDLVPGGCGRLRGGGPKATCFGCVGFAAFSVAIEKFFDRHT

SEQ ID NO: 64877 - protein, 92 aa, Zea mays
  Coding DNA Sequence Number=SeqID_23098
  Subcellular localization annotation: CTP_CleavageSite=18; ConfidenceScore=5.35e-01
MARLTVLLNLGLSSPTARAAVATSVARVSSDSYSSGWGAQWWCGAHPAGAQGSSSSQTLSPAEVRKKSPTAPAPVIDAPAPRAGGSVASPNA

SEQ ID NO: 64878 - protein, 66 aa, Zea mays
  Coding DNA Sequence Number=SeqID_23099
MTGGIFFSVETDFGRSREIGRTSTNPAIPPAGVLTRGRRSRFIPISNSKVKFDSKFKVSKIKCTNK

SEQ ID NO: 64879 - protein, 190 aa, Zea mays
  Coding DNA Sequence Number=SeqID_23100
MAALRARAGATLRVAAPDRSRGTARHGHREEGDAEEGERGRLTSGSNDGTDGLGGSGFRGWAMGRREGSVGRANRVGGREKCASWGEGDEQGRFEELTGGPHRMAAAAGQPPCPHQPGELSAPHALAVGPPSRPKARGGRDRAWELGHARGKACGLAWGESRWATRGIGQVGREGGKNRLGRKGGKGERG

SEQ ID NO: 64880 - protein, 235 aa, Zea mays
  Coding DNA Sequence Number=SeqID_23101
MGSYQPQWPRIPRPRRCDVVGPRKGMESRRSFDSGKKFPRAGHQSAEASSQSYPAWPDDAPAQWIWFLGGGWWTIGVQPRQKSCNSTTARSWFLLLVNSGLGEEKSTTLWARLMSELAELGHVVPVKASTNPTEEPKLEKAAHELKVLSPPVFQGLILSKALKAQKDEEDESYLIALGNLRLVDKLKSNEAKLAAQAEAHKAEVQELNRKVAEATENFEVEVVKHEICKIERSRA

SEQ ID NO: 64881 - protein, 90 aa, Zea mays
  Coding DNA Sequence Number=SeqID_23102
METEHENTEGNMGAEELDWGGACMHLLELSHSRWGFWSKPFQFLIGVLISRTGIISKTLNIALRTHHPKATDTPVDIVKARTLRKIPAED

SEQ ID NO: 64882 - protein, 206 aa, Zea mays
  Coding DNA Sequence Number=SeqID_23103
MDTRRERSAGCVGRASVGASAGHRKDAGQDELEGTTAEPPGRGCGEPTRLLVGGGRLGTHDRAGRRAACLRETSWRGAAMAREMGGTRPALGKEMREAEEQGRGIRGRAEPAGALARGLSDAARAGREMARPWIKARATRAARRLELTAMGRAPASWSRREEGLACGELEEDKARKEYQGGARGWKRGWAQGGLEGAQHATQYFEN

SEQ ID NO: 64883 - protein, 127 aa, Zea mays
  Coding DNA Sequence Number=SeqID_23104
  Homolog annotation: Hit_ID=Q6A4M2; Match level="QueryCoverage=48%, HitCoverage=21%, E-value=2e-11, Identity=81%"; Hit description=Beta -ketoacyl reductase GL8B
MVSSHFFSSLDYVWQHSVRDPRDALDVDPDQAAHQLLVHLIEVAGVWLRQLVVVVDGVLSASTPATNPSRSLQEALASRRRRRVKVREGTKGDLSRWGRGARRPGQHTRQAQVGAKVERGENGGRLA

SEQ ID NO: 64884 - protein, 152 aa, Zea mays
  Coding DNA Sequence Number=SeqID_23105
MPRRLDAAAAPRLGGQSWALGVVARNERQGKWMDDNAEVDGDGGAEAVGFCGGARARRTVVRSRPRGGKEWISLGSCNGRLIARAKRNNRRRHKRIAYGVLIPGGSAHGPGGGCTTGPPMMCDVRRSTRSAYLRGGGISAGNNDAKFTRIIA

SEQ ID NO: 64885 - protein, 176 aa, Zea mays
  Coding DNA Sequence Number=SeqID_23106
  Homolog annotation: Hit_ID=O48629; Match level="QueryCoverage=15%, HitCoverage=20%, E-value=8e-07, Identity=88%"; Hit description =Putative auxin-repressed protein
  Pfam annotation: Domain name=Auxin_repressed; Domain location=7-148; Score=54.1; E_value=4.6e-13; Accession=PF05564.3; Description =Dormancyauxin associated protein
  Subcellular localization annotation: CTP_CleavageSite=85; ConfidenceScore=5.37e-01
MGLLDQLWDETVAGPRPDSGLGKLRKYSSFSPSSSSSSSILAPAPAPAPAVTRSITIARPPSLSVESYSSSSVPSSPASTPDSPLAAATPPKADVWRRFRRKTKVSDGPEPAVGPRSPTVYDCISREYVDDDDDDDEDQFAAGRSTPHRSPATAPEFGPWNRGRRSLFWVVWPSLG

SEQ ID NO: 64886 - protein, 629 aa, Zea mays
  Coding DNA Sequence Number=SeqID_23107
  Gene Ontology: Mol. function=threonine ammonia-lyase activity; Cellular component=chloroplast; Biological process=isoleucine biosynthetic process
  Homolog annotation: Hit_ID=Q10DZ5; Match level="QueryCoverage=63%, HitCoverage=67%, E-value=1e-172, Identity=77%"; Hit description =Threonine dehydratase biosynthetic, chloroplast, putative, expressed
  Pfam annotation: Domain name=PALP; Domain location=113-406; Score =342.0; E_value=1e-99; Accession=PF00291.15; Description=Pyridoxal -phosphate dependent enzyme
  Subcellular localization annotation: CTP_CleavageSite=33; ConfidenceScore=5.69e-01
MAAASTATAASHSASFPAASLRHDARRPSCVAPAAAAATTAAETGLTAVPAPPPTPMLRVVPESLQRDSGCLVAGFRERGAGAADGEGFGDAVGEGGGPGAMEYLTSVLSSKVYDVAIESPLQLATKLSDRLGVNLWIKREDLQPVFSFKLRGAYNMMAKLSREQLERGVICSSAGNHAQGVALSAQRLGCDAVIVMPVTTPEIKWKSVERLGATVVLEGDSYDEAQSYAKLRCQQEGRTFVPPFDHPDVITGQGTIGMEIVRQLQGPLHAIFVPVGGGGLIAGIAAYVKRVRPEVKIIGVEPSDANAMALSLCHGKRVMLEHVGGFADGVAVKAVGEETFRLCRELVDGIVMVSRDAICASIKDMFEEKRSILEPAGALALAGAEAYCKYYNLKGETVVAITSGANMNFDRLRLVTELADVGRKREAVLATFLPERQGSFKKFTELVCHMSLRCSSVRLSFPPHGWRLLGSHHCRRRRLWHARGASSALGASIDITATHSTLVVTLATTKAVVAAVGNRERVATLAWEHERTTVDAIASQLAKRYALDDHILADTVPHLLLSWHRMDNMVLLWILSTLTVELEDVVRERRAPLTRHGLPLRHSSLKSKRLALSTSMPPFGSSPKGTSS

SEQ ID NO: 64887 - protein, 253 aa, Zea mays
  Coding DNA Sequence Number=SeqID_23108
  Gene Ontology: Mol. function=threonine ammonia-lyase activity; Cellular component=chloroplast; Biological process=isoleucine biosynthetic process
  Homolog annotation: Hit_ID=Q10DZ5; Match level="QueryCoverage=62%, HitCoverage=25%, E-value=6e-79, Identity=89%"; Hit description =Threonine dehydratase biosynthetic, chloroplast, putative, expressed
  Pfam annotation: Domain name=Thr_dehydrat_C; Domain location=161-248; Score=130.9; E_value=3.5e-36; Accession=PF00585.9; Description=C -terminal regulatory domain of Threonine dehydratase
  Pfam annotation: Domain name=Thr_dehydrat_C; Domain location=90-155; Score=16.4; E_value=2e-05; Accession=PF00585.9; Description=C -terminal regulatory domain of Threonine dehydratase
  Pfam module annotation: Pfam domain module=Thr_dehydrat_C::Thr _dehydrat_C; Domain location=161-248::90-155
  Subcellular localization annotation: CTP_CleavageSite=64; ConfidenceScore=5.08e-01
MKDLGPLHHFLRVVVERHSRDSSLASVSTPSTFWSGLACQKASPASCLLTLSTKHVKINLYLVRERVVVRVLRVLRVLATSQFVDIFTKGRRSTVGRMNITEFKYRYDSNAKDALVLYSVGIYTDNELGAMMDRMESAKLRTVNLTDNDLAKDHLRYFIGGRSEIKDELVYRFIFPERPGALMKFLDTFSPRWNISLFHYRAQGEAGANVLVGIQVPPAEFDEFKSHANNLGYEYMSEHNNEIYRLLLRDPKV

SEQ ID NO: 64888 - protein, 135 aa, Zea mays
  Coding DNA Sequence Number=SeqID_23109
  Subcellular localization annotation: CTP_CleavageSite=42; ConfidenceScore=5.48e-01
MGVGAGAFFTHGCDPNPTRTFSGSGSGFSLHPRVTHGYPNMNANPLVSPVPSLELLAQAQLTNTTTTVHHRDLNLIPSQVPAAASRSLAVLLAGSQPPPTGHRKSQQPSRAQVLPATKFPKSQQPSHTRAASAEC

SEQ ID NO: 64889 - protein, 64 aa, Zea mays
  Coding DNA Sequence Number=SeqID_23110
MDPYLGAVIIGAETRKNIDHQCAQSTPGWPMNKENALACVTALINLAREPSPFESQAHNPCTLF

SEQ ID NO: 64890 - protein, 911 aa, Zea mays
  Coding DNA Sequence Number=SeqID_23111
  Gene Ontology: Mol. function=binding; Cellular component =intracellular; Biological process=regulation of transcription, DNA -dependent
  Homolog annotation: Hit_ID=Q10DZ7; Match level="QueryCoverage=79%, HitCoverage=94%, E-value=0.0, Identity=78%"; Hit description =Expressed protein
  Pfam annotation: Domain name=PPR; Domain location=190-224; Score=2.0; E_value=4.3; Accession=PF01535.11; Description=PPR repeat
  Pfam annotation: Domain name=PPR; Domain location=225-259; Score =11.2; E_value=0.35; Accession=PF01535.11; Description=PPR repeat
  Pfam annotation: Domain name=PPR; Domain location=262-296; Score =44.1; E_value=4.8e-10; Accession=PF01535.11; Description=PPR repeat
  Pfam annotation: Domain name=PPR; Domain location=297-331; Score =27.4; E_value=5.1e-05; Accession=PF01535.11; Description=PPR repeat
  Pfam annotation: Domain name=PPR; Domain location=332-366; Score =33.6; E_value=7e-07; Accession=PF01535.11; Description=PPR repeat
  Pfam annotation: Domain name=PPR; Domain location=367-401; Score =30.5; E_value=5.8e-06; Accession=PF01535.11; Description=PPR repeat
  Pfam annotation: Domain name=PPR; Domain location=440-474; Score=4.5; E_value=2.2; Accession=PF01535.11; Description=PPR repeat
  Pfam annotation: Domain name=PPR; Domain location=609-642; Score=5.8; E_value=1.5; Accession=PF01535.11; Description=PPR repeat
  Pfam annotation: Domain name=PPR; Domain location=644-678; Score =23.6; E_value=0.0007; Accession=PF01535.11; Description=PPR repeat
  Pfam annotation: Domain name=PPR; Domain location=679-713; Score =42.6; E_value=1.3e-09; Accession=PF01535.11; Description=PPR repeat
  Pfam module annotation: Pfam domain module=PPR::PPR::PPR::PPR::PPR::PP R::PPR::PPR::PPR::PPR; Domain location=190-224::225-259::262-296::297- 331::332-366::367-401::440-474::609-642::644-678::679-713
MPLGLAAAAPIGRRLSTAAPTPLSSLTDALLATRLASHLLTTPHLPAALLPTAPLPLPVHLHILRHPALPPASKLSFFLAATPPASPLLESTFPVLLRALAAGSPPLLDALLPFALSASPSTLLPALLSFLLSASRLDAALSLLDSAPPDLLPRLAAAALPSLIASQNLSAAVPAIRRLLPIASHPPPVRETNRLLLALSKENLSDDFRYVFEEMSRRGLPSNVRLYNICIHAFGKWRQLDMSLGLFAAMKAATPPVEPDICTYNSVIRALVVGGRVPDALVIYDEMKSSGIEPDVFTYRAVMNGCCKSFRMDDALRVFHEMRGIIGVSDVVVYNSLLDGLFKVKKLDEACSFFETMVADGIQCSASTHNTVIDGLFNNGRAEAACRLFYELRRKGQLLDGIAYSIMVREFCKEGIGDQVAEAVELVKEMEQQGFSVDLVTITSLLIGFNKSKRWDLEEQIVKFIRDSTVLPDAIRWKSNMMVALRGPHGREKDGTPLFSFDGNMEDVMSLVNHVGHTGTDEEIPNSDPKDDWTLSPHLDHLAKHADSLNSSVVFTMHRGQRVEGMGPKTFDADMINTYLSIFLAKGKLSVACKLFEIFTNLGNKGTSYTYNSLMTSFVKKGYLKQVWAVLHERGGQLCPNDVATYNLIIQGLGLMGKADVARTIIDRLSKKGVYMDIVMYNTLISQLGKVGKVEEAGCLFEQIIRSGMKPDVVTFNTLISINAKADLLESRHLAQSTSKYVVNQSMELVPMWRMKESVVHTLENSLNQTEVRLTGIIHEETNLLNRVCQVGVGNINHHVLKGIDETLVVGGIDNESTIRSRKFVSSVYSCRGGVTLDHAYTLKKIIQRKVSELAETKPRHRIESTLFTNPRWSTLTSVSLPLGMCKDQSLSMSWFFVTLYGDPLTKVYKS

SEQ ID NO: 64891 - protein, 120 aa, Zea mays
  Coding DNA Sequence Number=SeqID_23112
MEVPARGLMIGEEAADVWLRHHHAPPRTRGTGILEIGERCLAVAGGGWPLASSRSCRLQRHSLTLTPWLIGLDHWTLHTITLMGHGILAFVLHVMSKAHFSTPTDVQTTTVHGVQSQPQA

SEQ ID NO: 64892 - protein, 361 aa, Zea mays
  Coding DNA Sequence Number=SeqID_23113
MDLSIFYAKEGTWCFGVKHPSDTANSQTYMSISLQGCHRNCNQKGVCHSSVDESGLTFYSASTLQYLIFKIRLDKSFCTCDRDHGGFDCSDELVSPNGPTRLRLQSKARRTPYVLGSPYRLGDTLTSMLSVLHLVSFYLKARPPFNCLTLLFTYAKNRSVMLLKCLLCKIPMLTPMLRPAATILAPIPKAPSTPLASPSPVAHPISPTGRTKSQRWEDASPLVPSTEPRDEEGPSHCCPTNEEFIVFPFQVISNMPMDLDMEVLEAIANNHNLEAGALHLVTELSVMEEPTQPLKRALSYPIDVTVSVILGLANDPPNPPPPPTANGDDTYEDSDRPSQRRRGNSSPRSGTASSLVGQCPV

SEQ ID NO: 64893 - protein, 120 aa, Zea mays
  Coding DNA Sequence Number=SeqID_23114
MAAARRQAAVLVLVLALVMGAGLAPGPRGCAAQGEAVVVSSYGQGRLSLKPYDWTYLRVELPPSFSSVTMDFAADIDLQRERLKGIPRNKLAIICLMNSNPPIPDISDSYLDNLCECHIS

SEQ ID NO: 64894 - protein, 289 aa, Zea mays
  Coding DNA Sequence Number=SeqID_23115
  Homolog annotation: Hit_ID=Q7XDY7; Match level="QueryCoverage=96%, HitCoverage=73%, E-value=1e-23, Identity=28%"; Hit description =Expressed protein
  Pfam annotation: Domain name=WRC; Domain location=164-209; Score =43.7; E_value=6.3e-10; Accession=PF08879.1; Description=WRC
MRIRRRTSHVLGSGYSTPATPPPMLVTPPPISEPCLEPLTSHIHDDFLSPTTTRESLCKLSRSPWDLLDDLSLSDPQEVDDLLDGYYVNMDSHAWSLSSATMPVTSVKNEKTTTMAAASSERAQLQILNKNTTLKKATVGEKRVREIQNQKTANVKKKEGKEEAARTWQCKKNDGKGWNCRHNASHPNSLCEYHLMKKRSYLNLQHASPAEEDKAMAAAPTSAASKPSSSSNTQKTKLPNNYDANEGFYYYHGFRPSRGKRRCRNHPKNDEEVKVEPIQICFSSESCQS

SEQ ID NO: 64895 - protein, 172 aa, Zea mays
  Coding DNA Sequence Number=SeqID_23116
  Homolog annotation: Hit_ID=Q6QP51; Match level="QueryCoverage=73%, HitCoverage=57%, E-value=6e-07, Identity=38%"; Hit description =Putative growth-regulating factor 1
MGRREVKHEGGQERGRQAEKGKPVAFVLPCAQVGHKERAQGNDAPPCDVVGPSPGSGEAVAPPRSRSSLSSEVEVESEPRVGRGGDHRLRTRLSPSPRVRRCGVRRLLEPRPSPSPGSGEAEFPMAPEAGLGCCQPHSVEWHSSRSDAGGAVLLSGRSVERRSDCGHFGSVD

SEQ ID NO: 64896 - protein, 131 aa, Zea mays
  Coding DNA Sequence Number=SeqID_23117
MSATKHRRPTTCALRPKIANDKCIQLVHCKIQARNREKQTNRIVGVVLVFDSTESPRLKSCQALVNIESIVTDLDQLSLQRKCEVRSIDQGNDDEVVNPNDIVPMDYEPRNNADCYDYNDSLLRVSSDYSD

SEQ ID NO: 64897 - protein, 49 aa, Zea mays
  Coding DNA Sequence Number=SeqID_23118
MTAVAGCHCLWPFWAVAGLQRLELGACCTFSGSTCGTHDKVFLVPCAQP

SEQ ID NO: 64898 - protein, 47 aa, Zea mays
  Coding DNA Sequence Number=SeqID_23119
MGHAAEKGIWAGQSSICNTQILGLTLTNKNSAQRQLLIRDATVSKAT

SEQ ID NO: 64899 - protein, 201 aa, Zea mays
  Coding DNA Sequence Number=SeqID_23120
  Gene Ontology: Mol. function=protein serine/threonine kinase activity; Biological process=protein amino acid phosphorylation
  Pfam annotation: Domain name=DUF150; Domain location=38-175; Score= -38.8; E_value=0.028; Accession=PF02576.8; Description=Uncharacterised BCR, YhbC family COG0779
MVLLKCQTFSLPSFMGIYRYGCPDIEEIEKFNRLYKQKLDEIVERGEISLDLALEARLPKPKCKPRTHLQLNTCSQKSFGRLQVSSPGAERLLKVPEDLDRFKDMAMRVQYLAEGNSDLASKQSLLKDGIFLLESVNAEAGHCVWRLADVKENRAEAGKGRPAEQETERLEAADLLHRSEEGDLVLGRQLVNPGQEDYYGL

SEQ ID NO: 64900 - protein, 71 aa, Zea mays
  Coding DNA Sequence Number=SeqID_23121
  Homolog annotation: Hit_ID=Q6K2K4; Match level="QueryCoverage=43%, HitCoverage=3%, E-value=8e-08, Identity=83%"; Hit description =Putative 5'-3' exoribonuclease
MAEGIARRGYTAVTFNMRDVGRSTGRVSLTRSIENIEFLNMWVLREYLEIEFKILEPFCESDIERLIDGTL

SEQ ID NO: 64901 - protein, 110 aa, Zea mays
  Coding DNA Sequence Number=SeqID_23122
MTRRHKAGATIVELAGDDGGGGGAWERRSGAAVSLGEAVGGSGGTWGRGRRSGRRSGAAAALGVTPSFGRGCTVYPQAVIPIMLGVLASPLITTKVLTERYSGNILSPLK

SEQ ID NO: 64902 - protein, 248 aa, Zea mays
  Coding DNA Sequence Number=SeqID_23123
KRVEGPRRYCTYARSRPPGSAKPATAAASNHAAAHTTGAQPISATLQPEAHRRAPKTKRDSPLTAATATGSAVDCGRGGGLEVEEWEGREGEVPPSSGRDLIKGSTGRAVAVAFAWREVGRRRGGEARSRLAVTNANTFDGGGVNDGVRERRVGGYKTIRFTQTKEKRGALKKKNKIMSLSRALYEGIYRCPGAQRPDTVITEEPLQTGPVTRFFVRGLSRWVVVPRGPPGWVRTWDGGTSSWVFVLR

SEQ ID NO: 64903 - protein, 84 aa, Zea mays
  Coding DNA Sequence Number=SeqID_23124
MPPGSASAAAIATRFATHWIADALAGDEYIDFSVLKGEAPNPKLLRRSPGRFRSQGLSPGMVNWLVGEHQWWIHWDGAWNMTWN

SEQ ID NO: 64904 - protein, 230 aa, Zea mays
  Coding DNA Sequence Number=SeqID_23125
  Subcellular localization annotation: CTP_CleavageSite=54; ConfidenceScore=5.12e-01
MASELNASGVQLTDRSSGSMGTSRTRHGLTTRSKGVSQHTKGDTKMLGTDYDVRADSWDSTSWAEPRANPTLRQRQRGSGKATQALDEENDGLDGMRSYHQRRHDDGDMGERGSEPEKPSARCQQLRRADRSVPWATRGKAGAWASTGREQAQLGWVTMAREQRRRAEQAAMGAGELRAGTTGKLHGGGRGLDRAEGTTRLVSTTNRGDSPAQGRAGRTRHGWKPSAGAG

SEQ ID NO: 64905 - protein, 145 aa, Zea mays
  Coding DNA Sequence Number=SeqID_23126
MGKSKKGGSSSHHSGDKRKREPTPPSEDFGDSEYSEEEFSSESEGSPGIVAEVWTYIWAVELAGLEGSDESEVSSDEGDSSDSSEEGSDGDDGGEGDSGGGDGGGDGSRGDGKGDGGNGSGNGKGDDGNGSDNGKGGSGSGKASG

SEQ ID NO: 64906 - protein, 183 aa, Zea mays
  Coding DNA Sequence Number=SeqID_23127
  Homolog annotation: Hit_ID=UPI00004BD080; Match level="QueryCoverage =94%, HitCoverage=23%, E-value=8e-08, Identity=32%"; Hit description =UPI00004BD080 related cluster
MATWASADRCQRSRAHDVNNRGGGRELDTMSELLGHQRGSTSSGENTQGSHELSDGRADRSAPWATRGKAGAWASTGREQARLGWVTMAREQRRRAEQAAMGAGELRAGTAGVAAWTEQRELLGWCPRWTEVIHLRRGMQGAPARRVGRARHGWKPSAGAGQSVDGRDSGWARAGHQGDEALG

SEQ ID NO: 64907 - protein, 155 aa, Zea mays
  Coding DNA Sequence Number=SeqID_23128
  Subcellular localization annotation: CTP_CleavageSite=15; ConfidenceScore=5.06e-01
MATGHNIWYQSCAPRLGSLTSTTSPVPKPSVQTWFIFDTMTTKEKEDADRWEKLTLKMERLTKRVIGMDDVQQQLLAQTDLAATVVQRVAEEWVHLAQQLEQAVVELKLELVVQDLESPEPAIDGRNQGGAPRMVRPEPARRYDEDDLNHHRNGE

SEQ ID NO: 64908 - protein, 95 aa, Zea mays
  Coding DNA Sequence Number=SeqID_23129
MAAGVLDKRIHANARGKGTEHGGVVAGRFLYPRIASRFRSAGAWRRLHPQNMAEQDEGVDRTETCATPFALVWQDEGPADVYGPHVPSPSGDAHV

SEQ ID NO: 64909 - protein, 210 aa, Zea mays
  Coding DNA Sequence Number=SeqID_23130
MAQEDVTTAATEGVVSPSVSVVEELGRKAAEAEARLREKEEENAALKRQIESYHVRWLEHEIRAKALEEAFHEQVAALQDDARMAQGTAHDRRGAGSSEETAAEEDPPPVRLWHGRDRMSSSAGAMRGAVGRLLVVAEFRRQSRTLEHAAEPPPPWQPAAPVANSAADLKKLKAQLRAWAKDYKARLRRAQAGIGRDRWRRGNCWIRTST

SEQ ID NO: 64910 - protein, 304 aa, Zea mays
  Coding DNA Sequence Number=SeqID_23131
  Gene Ontology: Mol. function=DNA binding; Cellular component=nucleus; Biological process=RNA-dependent DNA replication
  Homolog annotation: Hit_ID=Q9LGH0; Match level="QueryCoverage=95%, HitCoverage=94%, E-value=2e-29, Identity=30%"; Hit description=NAM -like protein-like
MASDSSTLNSHGGYYTSLLSQDVADDFVSDDYVLVDNEAVQSPVLHEMSSQVTKRCRSKNFSEEEDTLLVSAYLNVSKDPITGRDQKDGTFWERVCKYFHKNRTFESDRNWSSLKHRWGIIQKEVNIFQQYYDAIERKNESGKTSDDKLAEAKAKFREDHQGKAFSVFHAWIILRHEPKWTFRDSKLKDLHEANCNGPVNADRPLGRKAEKEKARARKHDGCDADGDFFFEEVKKMREAREESEKDRKARDDKFYELEMTKVQLEQNRQDKEIMLTDTSTMDDDSKLYFKMMKQEILARRFGSS

SEQ ID NO: 64911 - protein, 347 aa, Zea mays
  Coding DNA Sequence Number=SeqID_23132
MSVIQMKVVGVQSASKMSYRCRTVTEMQVEGMQRHRMTWDLLILAELHLWRCLARTFDDPFVAVAPSFDPCVEFEIAGAGNADWLQQGTATRCQSCAGGALAEEDGRDQVVRLRLQAGRTGGAAPVRRRLRITVADGPSTKETKIHGGLFLVIIRFLIAGIPSGLVRFYPNPYGLRGIEGVSIPRRSKCRADPDHAQRAKPRGRARAPRVPQPSATAPCTVHPDPHRPRRPRTRRSRPVHGAPRCTSSSSSSDSNGSPDAIVLLRRLRPRRPPSGCTGGRGGGRSPTGGGGSGERMTERPYEEDHVLGYGAEGKAGGGSPARAMPGMQARRRDRGKGQGRDDPRERE

SEQ ID NO: 64912 - protein, 313 aa, Zea mays
  Coding DNA Sequence Number=SeqID_23133
  Homolog annotation: Hit_ID=Q2HVJ6; Match level="QueryCoverage=81%, HitCoverage=50%, E-value=2e-10, Identity=25%"; Hit description =Cyclin-like F-box; FBD
MVATLEVIHLHSVFLTDAALRRMVAACPRLRELDLRYCRRLRRVDFSSVGVPNLSSFTVVDCSRTTELRVPVAPRLRSFRFSGTFLSSNILSGAKGSLEHLYLCSGGPETGLPATNLPYAVPRLSNLTVLTLCSIALQYVSSFTAKAGSEGNLHGLRELQLLTFGMANSNLADIYSFLKTCPCPRLERLFVQLPTNTGDAFTENFLEVAEEDPPKGGLENLCLAKLTNFKGHRNEMQLVGFLLRKSCSLKKLFLIAPKEDHPQGLRKTLSDTLPDFLKKEILHLERASTDTQIFFSEPDAQTQQLHSEVFVRF

SEQ ID NO: 64913 - protein, 551 aa, Zea mays
  Coding DNA Sequence Number=SeqID_23134
  Gene Ontology: Mol. function=sugar porter activity; Cellular component=integral to membrane; Biological process=carbohydrate transport
  Homolog annotation: Hit_ID=Q6H7U6; Match level="QueryCoverage=99%, HitCoverage=100%, E-value=0.0, Identity=72%"; Hit description =Putative monosaccharide transporter
  Pfam annotation: Domain name=DUF81; Domain location=161-434; Score= -64.9; E_value=0.03; Accession=PF01925.9; Description=Domain of unknown function DUF81
  Pfam annotation: Domain name=MFS_1; Domain location=67-477; Score =83.9; E_value=5e-22; Accession=PF07690.6; Description=Major Facilitator Superfamily
  Pfam annotation: Domain name=Sugar_tr; Domain location=27-520; Score =443.8; E_value=2.2e-130; Accession=PF00083.14; Description=Sugar (and other) transporter
  Pfam module annotation: Pfam domain module=DUF81::MFS_1::Sugar_tr; Domain location=161-434::67-477::27-520
MPGAVIVHHHTRYKTYPGEVTGIAIFSCFIASVAGCIFGYDIGLTSGAWLALTLTSYGCCCCHAVAVAAVVVVREAGLTSTEPFLVKFFPSIYEEMKRQVVVNQYCKFDSQVLTLFSSSLFLAATVATFFAGPMTRAFGRKWTLFAAASAYVVGACIGGVSVNFPMLLTGRVLVGSGVGISIQAAPLYISEVAPAQQRGMLNILFQLMITVGILTANMTNYLASKVSGGWGWRIPVTFGAIPAAVIALGALAIPDTPASLVERGDTATARKTLSQIRGVGDVREEFDDLAAASEDAKAVQCPWRELFFGGKYKPQLTFALLIPFFQQLTGINVIMFYAPVLFKTVGFKQNATLVSSVITGLVNVFSTFVAIATADKIGRRALFLQGGTQMIISQILVGTFIGLQFGMSGTGDISEQYAMCIVLFVCVYVAGFAWSWGPMGWLVPSEIYPLAVRSAAMSVTVAVNMFFTAFIGQIFLTLLCHLRFGLFYFFGAWVLLMTLFIAMLLPETKSVPVEEMAHVWKKHWFWRKFVIDTGNDARNAEMRKRIALEMS

SEQ ID NO: 64914 - protein, 215 aa, Zea mays
  Coding DNA Sequence Number=SeqID_23135
MARSHYFLRSLPFRPEQSRTLSFGSEPHALEYLATPPCLGPRPPAGERNRRHSDPPPHSWMLTDRSSLIRTDGRADGRPVQSSPVHWAPTRRRGGPAPVDDGWLYKPAGSVSICQRRHGGDEKWRAPRAGLVRGYGRSGAAAAAAMSSGSESTTASRWPELATLRALARDAAEQLRLPRAGTSASASSPWRGREDHLHGHGKTAKVMHLLLWGPK

SEQ ID NO: 64915 - protein, 120 aa, Zea mays
  Coding DNA Sequence Number=SeqID_23136
  Homolog annotation: Hit_ID=Q6H7U2; Match level="QueryCoverage=38%, HitCoverage=10%, E-value=4e-12, Identity=67%"; Hit description =Putative BRI1-KD interacting protein
MSRDRSHGLHEQPFTEKNIQPDLQIYNERYTTRGSRSQRLNIRLKRKAYERIMGAREKAVYTGAGWERGARSGEPAELGVSVREAACVAGTAAALPQRAQLRLVMPSATAAASRCTRQLL

SEQ ID NO: 64916 - protein, 325 aa, Zea mays
  Coding DNA Sequence Number=SeqID_23137
  Gene Ontology: Mol. function=nucleic acid binding
  Homolog annotation: Hit_ID=Q6H7U2; Match level="QueryCoverage=96%, HitCoverage=79%, E-value=1e-86, Identity=59%"; Hit description =Putative BRI1-KD interacting protein
MEIPGAIAPFVTDDQIPKKGNLAIHGLPVGRVVAFIHHTIHCIGICIEMRHDKKPDDGETNSSRSLSVSDNNDDRKKETLLSGDDKEDHEIQIILDEKNAEVRKISSRLNDLDLQLRKEKEECHRMTSKIKKFLKAHARFLKAQEELKRSQARFERLGDLLASDILKRGANEEVSSINVDEDPNVPYERSPNAAIAKKRSIPYSTSEEAKAGFEKLSKGTEPTKSLYLKKKLWEDEKDKIGNFVSSANTDKVKESPVKHVLPSTGMAAHALDDLFEAVELEDRRDTSIENDADDETRSPVMPPQPPPVVNTYEQYEADDEEVDVE

SEQ ID NO: 64917 - protein, 286 aa, Zea mays
  Coding DNA Sequence Number=SeqID_23138
  Gene Ontology: Mol. function=oxidoreductase activity; Cellular component=vacuole; Biological process=response to oxidative stress
  Homolog annotation: Hit_ID=Q5U1R9; Match level="QueryCoverage=89%, HitCoverage=89%, E-value=4e-52, Identity=57%"; Hit description=Class III peroxidase 24 precursor
  Pfam annotation: Domain name=TrwC; Domain location=19-285; Score= -163.8; E_value=0.1; Accession=PF08751.1; Description=TrwC relaxase
  Pfam annotation: Domain name=peroxidase; Domain location=46-247; Score=232.3; E_value=1.1e-66; Accession=PF00141.13; Description =Peroxidase
  Pfam module annotation: Pfam domain module=TrwC::peroxidase; Domain location=19-285::46-247
MAVVPAAPVVLGVAMVLVVLAASAGAAGQLRMGFYAESCPGVERVVGDFVRQHVRRVPTVAAALLRLHFHDCFVRGCDASVLLNSTAGSVAEKDAPPNLTLRGFDLVDRVKALVEDACPGVVSCADVLALAARDAVVAIVRELARHSTFHHATSRSGGAWTMDGSSSTMHEALDDIPKHTMTFPQLASLFASKGLGVRDLVWLSGSHLTFDLGYYRALLKRTGLLRSDAALLTDAAARADVEGVAAGPEEVFFQLFARSMARLAALQVKTGAEGEVRRNCAVVNGG

SEQ ID NO: 64918 - protein, 131 aa, Zea mays
  Coding DNA Sequence Number=SeqID_23139
MSLISSVAKQGSVSTFKAERNRCCDMLSHTIGASCTECTRQIDNFLQVEEYHLRMCNSWLLSARWSIPEIKDCLEEAGFKWVHVWMREMPNTQSGGNAKEYNANRDVKYEESHHFNQGDAWNAYVVGVANI

SEQ ID NO: 64919 - protein, 139 aa, Zea mays
  Coding DNA Sequence Number=SeqID_23140
  Homolog annotation: Hit_ID=Q4QWQ6; Match level="QueryCoverage=48%, HitCoverage=23%, E-value=6e-19, Identity=69%"; Hit description=NAC23
  Subcellular localization annotation: CTP_CleavageSite=19; ConfidenceScore=5.71e-01
MPLPIPCTRHPLPPAPAPRGSRARPVVNQPPRLLRNPPPPANPAPRLRNNRGETPVRRALANPTPAANATDTSARSRCCPRSSWRAAREVQSQPKISKWERTFASDPVNPAGSMLDPVSGHAGGDPLLQDILMYWGKPL

SEQ ID NO: 64920 - protein, 45 aa, Zea mays
  Coding DNA Sequence Number=SeqID_23141
MMRALASLLLVWTELEWISQVSEDSSFVIWLRHTSQSADLKTPTS

SEQ ID NO: 64921 - protein, 87 aa, Zea mays
  Coding DNA Sequence Number=SeqID_23142
MHRSRRPQNLAWASCRCSSGLSRGWLRAWRARPLPETAATVLFHAGALPRDPALERLVCDDVLDGGGGGEGDCDILRFVVGVMRSLG

SEQ ID NO: 64922 - protein, 83 aa, Zea mays
  Coding DNA Sequence Number=SeqID_23143
MRVVRIVTIAQEKVKPWKETSRSSRTTTNSSLGDLFARAVLKPLHGAIGRSRDASTFGSYAPSSPLCEEEGGMRHAALSGRRA

SEQ ID NO: 64923 - protein, 179 aa, Zea mays
  Coding DNA Sequence Number=SeqID_23144
MRARRLTPSDGTPNTTSQADESLGATSLPRLTQAQPSGKFFTSSELGLSHLLCCEPHRQPLHPTVAHVKRWLDWHLWKTSASTQARDLISMSAAENLDVIMRQDDDAPRKRPLAHTSVLLQPLRHGRTLLRELRRTNDPSASVSALYGKSTGADLLHGLSGISPSNTRLSFATDAPLGV

SEQ ID NO: 64924 - protein, 827 aa, Zea mays
  Coding DNA Sequence Number=SeqID_23145
  Gene Ontology: Mol. function=zinc ion binding; Cellular component =COPII vesicle coat; Biological process=ER to Golgi vesicle-mediated transport
  Homolog annotation: Hit_ID=Q6FSK3; Match level="QueryCoverage=78%, HitCoverage=90%, E-value=8e-33, Identity=24%"; Hit description =Similar to sp|P15303 Saccharomyces cerevisiae YPR181c SEC23
  Pfam annotation: Domain name=Gelsolin; Domain location=729-806; Score= 14.7; E_value=0.024; Accession=PF00626.12; Description=Gelsolin repeat
  Pfam annotation: Domain name=Sec23_BS; Domain location=511-605; Score= 55.1; E_value=2.3e-13; Accession=PF08033.2; Description=Sec23Sec24 beta-sandwich domain
  Pfam annotation: Domain name=Sec23_helical; Domain location=617-717; Score=78.4; E_value=2.3e-20; Accession=PF04815.5; Description =Sec23Sec24 helical domain
  Pfam annotation: Domain name=Sec23_trunk; Domain location=264-509; Score=-26.7; E_value=1.8e-09; Accession=PF04811.5; Description =Sec23Sec24 trunk domain
  Pfam annotation: Domain name=zf-Sec23_Sec24; Domain location=186-225; Score=49.9; E_value=8.2e-12; Accession=PF04810.5; Description =Sec23Sec24 zinc finger
  Pfam module annotation: Pfam domain module=Gelsolin::Sec23_BS::Sec23 _helical::Sec23_trunk::zf-Sec23_Sec24; Domain location=729-806::511 -605::617-717::264-509::186-225
  Subcellular localization annotation: CTP_CleavageSite=38; ConfidenceScore=5.50e-01
MEETPPGQRPQPPPAHASPPFASAPFTPPPRVFSPGLAAARGTPSPGSGPGHALPHLSTPPGPPVFSSPLRPAAVPFRATPASPHPVSFAASGGYSSSSSATAATTASLPTSSAPHFLNGAATLHGDHAPAPSSIQGDGLDSPYVQFSANKVLKQKKLLNAPSLGFGALVSPGKEVSPGPEVVERDPRRCLNCGAYVNLYCDVQIGSGQWQCVICKKLNGSEGEFVVSSKQDLLQWPELASTTVDYVQVGNRRPGFVPVSDTRVSGPIFILIDECLDEAHLQHLQGSLHAFVDSLPPTAKIGIITYGRTVSVYDFSEGAAVSADVLPGNKSPTHESLKALIYGTGVYLSPIHASLPVAHTIFSSLRPYQLSVPEVLRDRCVGAAVEVALGIIQGPSVELSRGIIKRSGGNCRILVCAGGPSTFGPGSVPHSAKHPNYAYLEKTAMKWMESLGHEAQRHSTVVDIFCAGQCPVRVPVLQPLAKCSGGVLLAHDDFGEAFGVNLQRASTRAAGSHGLFEIRCSDNMYVTQVIGPGEEASPDSHETFKHGSSFCIQMHSVEETQSFSVSMETKADIKSDFVFFQFAVHYSNIYQTEITRVITMRLQTDDGLSAYLASVQEDVAAVIIGKRTVLRARTASDAIDMRLSIDERVKDIALKFGSQAPKSKLYRFPKELASLPECLFHLKRGPLLGSIIGHEDERSVLRNLFLNASFDLSLRMLAPRCIMHREGGTFEELPAYDLVMQSNAAVVLDHGTDIFIWLGAELAAQEGQSAAALAACRTLAEELSEKRFPAPRILSFKQGSSQARYFVSRLIPAHKDPTYEQVEKSTQ

SEQ ID NO: 64925 - protein, 367 aa, Zea mays
  Coding DNA Sequence Number=SeqID_23146
  Gene Ontology: Mol. function=methionine adenosyltransferase activity; Cellular component=cytosol; Biological process=one-carbon compound metabolic process
  Homolog annotation: Hit_ID=P50299; Match level="QueryCoverage=99%, HitCoverage=100%, E-value=0.0, Identity=84%"; Hit description=S -adenosylmethionine synthetase 1
  Pfam annotation: Domain name=S-AdoMet_synt_C; Domain location=217 -358; Score=288.9; E_value=9.4e-84; Accession=PF02773.6; Description =S-adenosylmethionine synthetase, C-te
  Pfam annotation: Domain name=S-AdoMet_synt_M; Domain location=118 -215; Score=222.1; E_value=1.3e-63; Accession=PF02772.6; Description =S-adenosylmethionine synthetase, cent
  Pfam annotation: Domain name=S-AdoMet_synt_N; Domain location=4-103; Score=218.0; E_value=2.1e-62; Accession=PF00438.10; Description=S -adenosylmethionine synthetase, N-te
  Pfam module annotation: Pfam domain module=S-AdoMet_synt_C::S-AdoMet _synt_M::S-AdoMet_synt_N; Domain location=217-358::118-215::4-103
MAAESFLFTSESVNEGHPDKLCDQVSDAVLDACLAQDPDSKVACETCTKTNMVMVFGEITTKASVDYEKIVRDTCREIGFTSDDVGLDADRCKVLVNIEQQSPDIAQGVHGHFTKRPEEIGAGDQGHMFGYATDETPELMPLSHVLATKLGARLTEVRKDGTCAWLRPDGKTQHDETVTNDEIAADLKEHVIKPVIPERYLDEKTIFHLNPSGRFVIGGPHGDAGLTGRKIIIDTYGGWGAHGGGAFSGKDPTKVDRSGAYVARQAAKSIVASGLARRCLVQVSYAIGVPEPLSVFVDSYGTGTIPDKEILKIVKENFDFRPGMITINLDLKKGGNRFIKTAAYGHFGRDDADFTWEVVKPLKKASA

SEQ ID NO: 64926 - protein, 120 aa, Zea mays
  Coding DNA Sequence Number=SeqID_23147
MGISYPVRSKERPKVRSISRRAKANHARTSGEGRRTNGPTREKKQQGGRRRGERGWMCGTGSRGCWGSPFIAAPALALALGVEPVRGGVGPRGYCCGCGPAVREVNYSGHLASRAGMHVT

SEQ ID NO: 64927 - protein, 145 aa, Zea mays
  Coding DNA Sequence Number=SeqID_23148
MRFSMDEYSSRSSVDQFTLLCNTDIQYIHTQLQFDVFWRTLMYTKFHKHQRTDFSELAVKQFLSIAKINIEDQLIVWMTGFKRYVATFAEFAHANNLDYDVISNGVDLYAEEQFEDYIQYYEFARLGPQEIWRNFRAEAPSCCYQ

SEQ ID NO: 64928 - protein, 302 aa, Zea mays
  Coding DNA Sequence Number=SeqID_23149
MAGKEMTPNSKAAAPPATIRLVNFISEDQARPRTLDSPSFPLALACRARRIGRAKPRKKLDEVKRTRGERVEDGTAQRDKPLFQILQENKEKKDAEFNERFKHSVFFRASTHKDVVMKNLYELHKCDCHIICKFKLQHDLHRLKKYSIIAEVCSYLFYLGPPKALDEDETEFLDKLALSRKEYEQQVANEEAEQLRGFHEAVAARSTVVHELETPTVSRPEESRPKPPTKRSQPALLKNIIISVKPHAKKPKVETEAKPAPEERRPSDRHGSDQKQPDDTKATLGSLVAYDDDDDESGEDVD

SEQ ID NO: 64929 - protein, 58 aa, Zea mays
  Coding DNA Sequence Number=SeqID_23150
MAAACDLQCSMELVPLALAQTHTVSPAKVLLRSSAFGVGLLRLRCPELLPAEAEQERN

SEQ ID NO: 64930 - protein, 129 aa, Zea mays
  Coding DNA Sequence Number=SeqID_23151
MDMEHAESGPGSFCAQGKGSLLERSVGAHVGGRIGSTGQGEAAGDLQGGSAMEKKPSSLLVAVETREEEKGAPAAAARGRRSSGRRAAVAEGENGRTPWEERELAGGCWCREQRERRRQGEKKVVAREK

SEQ ID NO: 64931 - protein, 140 aa, Zea mays
  Coding DNA Sequence Number=SeqID_23152
MKLWKETSRSSKTTTSSRRGLPSKTGCDKGQLQEGGSKVGQCQALQQHLMQAPTTLSRGRLKTKKGENDKDMYINYMVKYQSMIESQAQGELKSSLFTNLAWAAGVGLMKTDVQASYGLHFGRSRYRWKAKEIRFPNQLV

SEQ ID NO: 64932 - protein, 124 aa, Zea mays
  Coding DNA Sequence Number=SeqID_23153
  Homolog annotation: Hit_ID=Q2L3D3; Match level="QueryCoverage=29%, HitCoverage=4%, E-value=4e-10, Identity=75%"; Hit description =Polyubiquitin-like protein
  Subcellular localization annotation: CTP_CleavageSite=31; ConfidenceScore=5.55e-01
MNGSAAGSSSSSSASTSSLSASPRAVHFFVRATDARTISMCVGWDDTVGAVLDHLGACGDALLRVALCARNSAAWPPRVVVGVYDCSLAGSLEDMVAGVTWPSILPPGWTVGWDPTSAEEEHEE

SEQ ID NO: 64933 - protein, 178 aa, Zea mays
  Coding DNA Sequence Number=SeqID_23154
  Gene Ontology: Mol. function=nucleic acid binding; Cellular component= intracellular
  Pfam annotation: Domain name=G-patch; Domain location=82-122; Score =33.4; E_value=7.8e-07; Accession=PF01585.13; Description=G-patch domain
  Subcellular localization annotation: CTP_CleavageSite=44; ConfidenceScore=5.18e-01
MEPDADEDYMGDLSRFLPPSPSSSPPKNLGRRKQPSTQAQAQPRAKRGKGVSWQERRRQERERKQREEDARTMAGLAEAIPESNVGFRMLKQMGYDPDSRADAGAEPVSIEIRRSRAGLGAEEPVLALTPALAPVEKPREVSERERRQQEEMAAELREDSRNGLPEHLNIIHGSDKRI

SEQ ID NO: 64934 - protein, 67 aa, Zea mays
  Coding DNA Sequence Number=SeqID_23155
MRTADEGCNVVDVGADIDVLPPVLLEQQVGLEVERRDETNSYGFSNRWGRNKVGPQGGSGFGGSGRK

SEQ ID NO: 64935 - protein, 587 aa, Zea mays
  Coding DNA Sequence Number=SeqID_23156
  Gene Ontology: Mol. function=transferase activity, transferring glycosyl groups; Cellular component=membrane
  Homolog annotation: Hit_ID=Q5Z9Y2; Match level="QueryCoverage=82%, HitCoverage=90%, E-value=1e-175, Identity=62%"; Hit description =Putative xyloglucan galactosyltransferase
  Pfam annotation: Domain name=Exostosin; Domain location=85-427; Score= 207.0; E_value=4.5e-59; Accession=PF03016.6; Description=Exostosin family
  Subcellular localization annotation: CTP_CleavageSite=28; ConfidenceScore=5.63e-01
MPESPASPAKPPSQPGSPLNAATPSPASALLRGSVLLIAFLVLQLVLLWNILGLPSSRFLPVPGQRDTTWPNGAVNGGACDEGLIYVYDLPSELNHDLVDDCESLWPWYSFCPYLTNGGFGEAAATLPVFFNVTRNVSLPSWYNTDQFQLEVIIHRRLLSHRCRTTDSSLATAFYVPFYVGLDVGSHLWGDNSTAADRDRAGLRLLRWLKNQTSFQRSGGWDHFITLGRITWDFRRYGDDGWGTNFVVLPGIANVTRLGIEADRLDPMGSRRPRHVLSLKRSKLFGFAGAPRSGFRDDFREVLLEECEDAGSEHCRSVDCRGTRCTDNGAAVLELFLDSSFCLQPRGDSFTRRSLFDCMVAGAVPVLFWRRTAYDQYRWYLPPGPRGEEGEWSVFIDRQALRVGNVSVRDVLEGLSERRVRRMRERVVEMIPRLVYASSSDGLGDGMEDALDVALRGVLERFRRRRASTAPVGVSAKHSPGRFVARSVDGKSTPPPPSDGKNGSVATWFPLNSPPITHYNHKISLSNSIHHLLPFFLQLLNTSQHATRDKGMQQLTLNISWLAAPLPRLIVQGASVGCGVKLMRYPM

SEQ ID NO: 64936 - protein, 103 aa, Zea mays
  Coding DNA Sequence Number=SeqID_23157
MGGPPALAPHSLLLLYSPSPSPEETTGESLSPGAPDTVRWGTGQSAAEAAGAGAVPRAVVFPVPGGVLTVHGGSTTQAPCWVTGTRFHVGRRLMTGAFTPAWA

SEQ ID NO: 64937 - protein, 178 aa, Zea mays
  Coding DNA Sequence Number=SeqID_23158
MALPVDVVGPCPRLGEVEAPPRSRSSLSSVAVVESEPLGRARRRPSAEARAESEPWGRAKRSPSSSGVEPMSEPWGRARRSSSSSGAEPESEPWVGRSGVRRLPGLSPSPSPGVGRSGVRRLPGPSPSPSPRVGRCGVSYDARGRPWLLSASLCRVAQQSERRRRRCPLVRPVSRAAK

SEQ ID NO: 64938 - protein, 69 aa, Zea mays
  Coding DNA Sequence Number=SeqID_23159
MADGARVEELESRPWATTGECEPASGRVERNNQTRAGQRQGARLEWFGPPERKDYIHYELYSLGVSEYL

SEQ ID NO: 64939 - protein, 91 aa, Zea mays
  Coding DNA Sequence Number=SeqID_23160
MAREEGGVEGGEEVVVAGEAMERDVEVRHCPLRGAEVVLLRNSHSLLVSNGQPKKYDPDLTVIVVEVALGEKTTFIFRVCITLFNMESLQG

SEQ ID NO: 64940 - protein, 441 aa, Zea mays
  Coding DNA Sequence Number=SeqID_23161
  Gene Ontology: Mol. function=oxidoreductase activity; Cellular component=integral to membrane; Biological process=electron transport
  Homolog annotation: Hit_ID=Q2MJ01; Match level="QueryCoverage=83%, HitCoverage=62%, E-value=5e-70, Identity=40%"; Hit description =Cytochrome P450 monooxygenase CYP704G7
  Pfam annotation: Domain name=p450; Domain location=37-441; Score= -137.6; E_value=0.0001; Accession=PF00067.12; Description=Cytochrome P450
MDSPLLSTPALLALSLLLLALYIARRRRGGGKNRNYPPVAGTVFHQLLHFRRLMEYQTELAHRYRTFRMLTPTCNYVYTVEPANVEYILKTNFGNYGKGAMIHDVMEDLLGDGIFNVDGARWRHQRKVASHEFSTRVLRDYSSGVFRDTAAELAGIVAVAARGAGPGERPLDVADLLMRSTLDSMFKVGFGVDLGSLSGCGDDEGAAAFARAFDDASEQVLYRFFDPSWKVKRLLGVSSEGAMKGSIRTIDQFVYGVIDRKIKQMGRDQEFVSELSAAASPVWMHMHSRALDWRSGHFFFLLTHTDGGVCLWQAKKEDILSRFLMERESDPGCFDNKYLRDIILNFVIAGRDTTAGTLSWFLYVLCRNQHVQDRVAREVRAAATGDRDDVGVQEFVTRGTEDPQPPHSYQAKHSKHCIQYKSKRLHFKTQSKRSIHSKSPN

SEQ ID NO: 64941 - protein, 145 aa, Zea mays
  Coding DNA Sequence Number=SeqID_23162
  Gene Ontology: Mol. function=oxidoreductase activity; Cellular component=integral to membrane; Biological process=electron transport
  Homolog annotation: Hit_ID=Q2MJ01; Match level="QueryCoverage=82%, HitCoverage=23%, E-value=7e-46, Identity=67%"; Hit description =Cytochrome P450 monooxygenase CYP704G7
DVKYCFSDDTLPDGYAVKKGDMVNYQPYQMGRMKFLWGADAEEFRPERWINDDGVFVNESPFKFTAFQAGPRVCLGKEFAYRQMKIFAAVLVYAFRFEMWEANATMGYRPMLTLKMDGPLDRNVYGPSSKEYFGSRIALFPPATI

SEQ ID NO: 64942 - protein, 120 aa, Zea mays
  Coding DNA Sequence Number=SeqID_23163
MAHQSFSGPPEATSPPLSPLCPWIHGLFPAIEFAVAPSSPLPNSGDPGATLARACLNSSDLTAMERSDAARSHLFSLDLISPLSDSDRTAQTTRYCFAPACLTRPGPLVSAICSRPSFLV

SEQ ID NO: 64943 - protein, 64 aa, Zea mays
  Coding DNA Sequence Number=SeqID_23164
MAAGASLPSAAVRSPELRQARARVVPGSPELGRGEEGATGTGRAIRRELGVCEGDVAEKPDDVR

SEQ ID NO: 64944 - protein, 173 aa, Zea mays
  Coding DNA Sequence Number=SeqID_23165
  Gene Ontology: Mol. function=carboxyl- and carbamoyltransferase activity; Cellular component=ornithine carbamoyltransferase complex; Biological process=amino acid metabolic process
  Homolog annotation: Hit_ID=Q8SA97; Match level="QueryCoverage=98%, HitCoverage=24%, E-value=2e-19, Identity=39%"; Hit description =Ornithine carbamoyltransferase
MAPPVDVVGPCPRLGEVEAPPRSRSSLSPKIEVEFEPLGRTRRRPSAEARAEAEPWGRAKRSSSSSGAEPESEPWGRAEQSSSSSGAEPESEPWVRAKRSSSSSGAEPESEPWGRATFALNAPAIWSVGVAIWPRLLLGEDWASGEPKFCADGGYQLRFRSLEGTPNYGPRQC

SEQ ID NO: 64945 - protein, 337 aa, Zea mays
  Coding DNA Sequence Number=SeqID_23166
  Homolog annotation: Hit_ID=Q2QXQ5; Match level="QueryCoverage=28%, HitCoverage=17%, E-value=3e-19, Identity=53%"; Hit description=ATP -dependent RNA helicase, putative, expressed
ARIISIQTKAISMKGERNGQEEEDIKEKPQNSFPFISPFLGRSASLAHAPSPPPPHPARAPGPLRAPTAQLDRAPGSLPQRALPAHPAWPSAQAPTPRSPGQRPLPGPATATHPARSRGRARPSCLAPAWANVAPALAPPGPPATLINYSSSLGTLHDLRSHSAKNRPATRAPVDLPPLHSPTVGGRLAKVAQPVQPRWRRAMGAEEDRGGFDRPCGDIIHGVDNWGMELWRCCSAQASSDVLNAIDTCATVLQTVWLVSKTCDNVSRKEKHEMIVSCPFLLYLVSSQDKAVQTTSSLCFLRKLQRKSLISSLVKASKEEGVEVDLQEFQDFDEFED

SEQ ID NO: 64946 - protein, 326 aa, Zea mays
  Coding DNA Sequence Number=SeqID_23167
  Gene Ontology: Mol. function=carbohydrate binding; Biological process= fructose 2,6-bisphosphate metabolic process
  Homolog annotation: Hit_ID=Q10MV5; Match level="QueryCoverage=90%, HitCoverage=32%, E-value=3e-54, Identity=64%"; Hit description=6 -phosphofructo-2-kinase family protein, expressed
  Pfam annotation: Domain name=CBM_20; Domain location=20-103; Score= -23.1; E_value=0.024; Accession=PF00686.10; Description=Starch binding domain
MASSGGISDQLFVSVKLESPHLAELDLAPHLFGSHPVAGSWDPCKALPLERAATAVWEFSCVVPSQHESLDFKFVLKRKGDNPQYIIEEGPNRPLGCQRNEFEMGNALFKLNEGKEVLECKVQVETEMLSPIDLAASWRAHQEYFQPSRVRGTHDVTINPGLEGRAKNGFASGLELDLDKYVVPTPNMGSGVVYAASLTENPRSLLQTGSSSNNDTTKDILHNSTKGDSSLNHYVNTMKLWQFSCFTIEKSTIGGHASSLEEQRAMFVDRGVGSPNFARPTMETFSMSNFKLDSESKVVHYSLRSLDLVKLDTRGFIVKTMELHGN

SEQ ID NO: 64947 - protein, 423 aa, Zea mays
  Coding DNA Sequence Number=SeqID_23168
  Homolog annotation: Hit_ID=Q84UR3; Match level="QueryCoverage=60%, HitCoverage=32%, E-value=4e-61, Identity=50%"; Hit description =Proline-rich protein family-like
MMREGDARVTLLRSKLHGLVERNRDLEEENKQLRHQVSQLKGQISSLEGQETNKRMLWKKLENSATGISYSKEKQFVQSNDGAKEAVDLNSSLSHSRQQFSSVNQVRSRAPRVPNQPPNPTSTQPKATVRKEGCMAPPPPPPPLPSKLQRSTKAIQRVPEVVELYRSLVRREGKNNAKSGSVGIPAATNSREMIGEIENRSAYVLAIKSDVENQGNFVNFLASEVQNAAYKKIADVEEFVKWLDGELSYLVDERAVLKQFPNWPEKKADALREAAFNYRDLKNIESEASSFHDDRRVATPMALKRMQALQDKIEQGIHNTERVRDSASGRYKDLKIPWEWMLDSGVISQLKMASLKLAKEYMNRIVKTLKSDPFANEEELLLQGVRFAFRIHQNGIVCRTIPAYDVVWFETLAVRHERALVTC

SEQ ID NO: 64948 - protein, 351 aa, Zea mays
  Coding DNA Sequence Number=SeqID_23169
  Gene Ontology: Mol. function=carbohydrate binding; Cellular component= 6-phosphofructo-2-kinase/fructose-2,6-biphosphatase 1 complex; Biological process=fructose 2,6-bisphosphate metabolic process
  Homolog annotation: Hit_ID=Q10MV5; Match level="QueryCoverage=78%, HitCoverage=45%, E-value=1e-142, Identity=84%"; Hit description=6 -phosphofructo-2-kinase family protein, expressed
  Pfam annotation: Domain name=6PF2K; Domain location=5-171; Score =41.2; E_value=9.8e-11; Accession=PF01591.8; Description=6 -phosphofructo-2-kinase
  Pfam annotation: Domain name=PGAM; Domain location=173-324; Score =124.7; E_value=2.6e-34; Accession=PF00300.12; Description =Phosphoglycerate mutase family
  Pfam module annotation: Pfam domain module=6PF2K::PGAM; Domain location=5-171::173-324
MAPGPRMMTLFIPFLLLLCTFLQTFLHQSAKDISSPAGEISPNPMGERMICQNFLAKCMCTGDFGWLNGFLHLIIFLETLCNDQDVLERNIRLKVQQSPDYAEQTDFEAGVQDFKERLTYYEKVYEPVEEGSYIKMIDMVSGKGGQLKINDISGYLPGRIVFFLVNCHLTPRPILLTRHGESMDNVRGRIGGDSSLSEAGELYSRKLASFVEKRLKSERTASIWTSTLQRTILTAHPIIGFPKIQWRALDEINAGVCDGMTYDEIKKSKPEEYESRRKDKLRYRYPRGESYLDVIQRLEPVIIELERQRAPVVVIAHQIPLHTIIEIQMGVAGVQEKRYKLMDAIHPTAGL

SEQ ID NO: 64949 - protein, 370 aa, Zea mays
  Coding DNA Sequence Number=SeqID_23170
  Gene Ontology: Mol. function=protein binding; Cellular component =spliceosome; Biological process=mRNA processing
  Homolog annotation: Hit_ID=Q6QP54; Match level="QueryCoverage=27%, HitCoverage=28%, E-value=4e-16, Identity=76%"; Hit description =Putative kinase
MVSKDSRRALPYASYIMFIIERVTGYIFSHDGLHVSFRVERSRSSTLAAQAHSFTMGGVEGNDGASCDVVGPSPRLGEVEAPPRSRSSLSSEAEVESEPVGRARRRPSAEVRAESEPWGRAKRSSSSSGAEPESEPWGRAKRSSSSSGAEPESEPWGRAKRSLSSSGAEPGSEPWGRAKRSWSSSGAEPESEPWGRAKRSWSSSGAEPESEPWVGRSGVRRLPGLSPSPSPGVERSGVHRLPRLSPSPSPRVGRSGVRRLPGLSPSTSPGVGAKRSSSSSGAEPESEPWGRAKRSSSSSGAEPESEPWGRAKRSFLWRLGRGLAAVSLTLSCGTAVGAAQAALSSCHTGQWSGEVTTVTSALSTGGRASG

SEQ ID NO: 64950 - protein, 602 aa, Zea mays
  Coding DNA Sequence Number=SeqID_23171
  Homolog annotation: Hit_ID=Q2R2S7; Match level="QueryCoverage=28%, HitCoverage=57%, E-value=6e-16, Identity=39%"; Hit description =Expressed protein
  Subcellular localization annotation: CTP_CleavageSite=55; ConfidenceScore=5.11e-01
MSSLACGGVILTVHPCGGTIQGHRRLFLGDWRAAASAVNAHSAAAGRRFNRTLVQCQTRVRTLKHKQRYKEELLKQPASGWCHLPRLHAFLASPDESTPGFPAKAPAFVKQEEEEKVAGGGIGLVGSWTVPRRPRNAAAAGTGFCPGAVVTKLAEVYERVELARIGAEKVKTEMQQEMGGVEGHTRAGRQSATAHRPPVAAAAKPGRGMVTDRLPPAGGQSGDQPAFQWQHSTKPTQADGAAKNLSVIARKPTHPCTAPRRAVDARIIHPPIYTHAYDGTTQKLWVDATRPTGQSIEQQHKHHTLLTAAPNRTRLASLSNQPLSPPARMSSSRRRPPPPPPAWTPEPWSDGETSALLDAWGPRHLRACGGALRPADWRACADAVTSRRAAAGRAPRTVDQCKNRLDYLKKRLRAERSRPKGAPPTPPPVSGWLTRLRALLHLAPSAPPGFAHRLGAKTPKVEEEEEVLDEKPSGGAPLPRYWPPVPKRPRTAVSLSPLTAASGDHPGGGGRNCTEVAAALDRLAGTYERVEAAKQREATRLEERRLEAMRDLEIERMRLLVDVAVTASVVVDGARRDRHNRHRRLLVGERDLDNWLAKVCSN

SEQ ID NO: 64951 - protein, 363 aa, Zea mays
  Coding DNA Sequence Number=SeqID_23172
  Subcellular localization annotation: CTP_CleavageSite=72; ConfidenceScore=5.36e-01
MAPPVTWSVRALGRARRRLLRGRGRVYLSRSRSSPSPWVGRDGDCRLRPRSSPSPGSGEAEFVVFRGRGRVRALGRARRSSSSSGAEPESEPWVGRGRVRRLPGPSPCPSPGSGEAELPMAPEAGLGRCQPHSVEWHSSRSDAGDAVFLSDWSVERRSDYGHFGSVDRRACVRIRCQATFALNAPAIRSVIVAIWPRLLLGEDQASGEPKLCADGGYQLRLGVLGGAAPSSSSMDLAPVPLHGVDQPQLPMDVTLLSLRAAFPMVLPSSMALLCSSIPISPFSHERRQPWCSPWNCPFLCSAPSPSSPPSPSLPSRTPCRLHLGFALAGALPHAMHITHQVFGERSKPKVVVVLEYIESIRIW

SEQ ID NO: 64952 - protein, 867 aa, Zea mays
  Coding DNA Sequence Number=SeqID_23173
  Homolog annotation: Hit_ID=Q7XI09; Match level="QueryCoverage=89%, HitCoverage=94%, E-value=0.0, Identity=61%"; Hit description=COP1 -interacting protein 7 (CIP7)-like protein
MRSDARLDSVVFQLTPTRTRFDLVLIANGRKEKFASGLLKPFVAHLKAAQDQIAKGGYSITLEPSSGFDVPWFTRGTVERFVRFVSTPEVLERVRTLESEILQLEDAIAIQSNDSLGLKSVEDHGRKLTESNGGGRANYDPDSATAIVVYKPGSNPTPQIQNETAAHEENSKVQLLRVLETRKTMLRKEQAMAFARAVAAGFDIDNLGYLIAFAERFGAARLMKACSHFIELWKQKHETGQWIEVEPEAMSTRSEFPPFNASGIVFMGDNMKPNLESGSINGEANGEDGAKADQKSSQQMGSHAAYPPWAMHPPSGAVVYPPYPMQGMPFYPGVNPYYPPYPPVDDPRYHYSGRKSSRKHSSDSKDSETLDVESDHCSSDRGSSHGRKSHRKGKRSGKKKPSVVVIKNVNVTSKKHGSSESESQSSSEVESADSDNSHSKSSERKHKSSSSKKKEGRRTTFASGDEYSKDEMSNGHDAEQGNWSAFQNFLLRAEEKTRSSDADLFAGEKEPPSRRKQNVNTADPILLAERDGGIVHERNIVGFDSANGRTRAIRVMSNDELVMSGEGRNYMHSEIKEIEAGGGRYRRGTGDDYMVYGQGSQIARHSLLDPLAEAQYKNPVQQDKNRNGVADESFMIPLRSSLHDNIGAESRTTIDIDVELPSRIHKASDEKAGHQLFYEPDELVPERGSEDVSFGYDPAMDYDSHMQTTVKVEDEKTEDDLPVADNDVQKVEKEKLRNAKDGSDKRRKDALLRRLSAPRTPLNDAQKRAQNLRAYKADLQKLKKEQEEEQIKRLERLKLERQKRIAARGNGKGPGNGSPKANVYKCQLALGWTRWAPPVGMLQLDWPKEQMNLGSIPGDCYLPSIKG

SEQ ID NO: 64953 - protein, 96 aa, Zea mays
  Coding DNA Sequence Number=SeqID_23174
  Gene Ontology: Mol. function=potassium ion transporter activity; Cellular component=integral to membrane; Biological process =potassium ion transport
  Homolog annotation: Hit_ID=Q942X8; Match level="QueryCoverage=92%, HitCoverage=14%, E-value=3e-32, Identity=64%"; Hit description =Probable potassium transporter 2
MFGVLSLIFCTFTLIPLLKHTKLSLLPNQQAADEELSSYYRNGFAPRNGSSPWLRRFLEKHKKMRVVLLLIVLCGASMVIGDGVLTPAISGGYLPQ

SEQ ID NO: 64954 - protein, 157 aa, Zea mays
  Coding DNA Sequence Number=SeqID_23175
MEKSDGEGVRIWCPGEGVEGAERPIRGRKEGTSELTTMEEQRGPRLVLAGGELRRERIGTRALGKNGSAQGTERRELEIGEGHHGEVLAVDEGGAQVGGISCCEVACPGKASAGEEDREMSGCQGASALWEMEPSRRGIGQENGVQRLAEDGGDAEG

SEQ ID NO: 64955 - protein, 86 aa, Zea mays
  Coding DNA Sequence Number=SeqID_23176
MRKKVALEEKVHLVVLEKRAGLEGSDESEVSPDKENSSDSSEEGSGGDSDNEGDSGDGGDGGDGGDDRSKGGGGDSSGKGSDDGKG

SEQ ID NO: 64956 - protein, 57 aa, Zea mays
  Coding DNA Sequence Number=SeqID_23177
MARRSEGKNTTTAGCYARRLPDGNNEGATNIDGIEARARHGARIWYTLITEESHNQN

SEQ ID NO: 64957 - protein, 87 aa, Zea mays
  Coding DNA Sequence Number=SeqID_23178
MALRDRIDTLSSTYALEISVLSFGVKVSLGAPRCTSLEDFGDSEYSEEEFSAESEGSPVYTSPPASSDDSDDSQGIATEVWMYIRSV

SEQ ID NO: 64958 - protein, 129 aa, Zea mays
  Coding DNA Sequence Number=SeqID_23179
MEKSAGEVVRIRCQGEGVEGTERPIRGRKEGTSELTAMEEQRGPRLVLAGGELERERNGTRSLGKNGSAQGTERRELEIGEGHHGEVLAVDEGGAQVGGIGCCEVACPRKASAGEEDREMSGCQGASAL

SEQ ID NO: 64959 - protein, 989 aa, Zea mays
  Coding DNA Sequence Number=SeqID_23180
  Homolog annotation: Hit_ID=Q653S8; Match level="QueryCoverage=36%, HitCoverage=65%, E-value=1e-99, Identity=53%"; Hit description =Putative ARIADNE-like protein ARI5
  Pfam annotation: Domain name=IBR; Domain location=197-266; Score =63.1; E_value=8.8e-16; Accession=PF01485.11; Description=IBR domain
MASCGGGVCLKRDRREEEENDDDKGETSGRNKRPSSGAYYTGAGVDAQRTDDDDSAAADYMYEYDDGYEEEESAAEQPKGDDASARDTEQRYARADRGRRPARGMRPDTARVAEVLVDPGALRALAAAPLQVVPPPAEDVVVLGRPCDGWCRGYVAAAVRGTARAAWALRCPPTPSCAAARRPGSWSTRWARDDDRARYARFWLRSYVEESGGRIRWCGGAGCTRSVELLGGCDAEAVASAVDVVCGCRHAFCWRCGEEAHRPVSCGTVRAWLAKNASDSETANWVVANTKRCPMCRRPIEKNHGCNHMTCGAPCHHQFCWLCLDPWDHHRGCTRYDSRRRRRHGPVDEVEDEEEQAQRTLAKASLDRYLYHYERWEGNGKSLRKALADADELERSELQRMARLLDLPAMDLGFVTEAYRQIADGRRVLRWAHAYDYFLSLDPERDAAKRGLFDDLQSQANRWLECLHGCAELERKHLFGAADADAEDEPTVAAAAFMAYKERLANLTGVTRRFIGNLVRAFKTNLPEVVVTLTPPASDLQHIVKSGPTTERQTTVGIGGILSTEATVTLPVSNVSSLQGTSALRPSSSSLVVSQETDIANDSVQERHSPTRNLAQAQHPVRPGGHGGFLSNPYPSFFGEATSTAGPLQLYMPNMVVSGGTTSTPSLAFSLSALGQPITSTALGGSFGSNTRTAWGNSDMAAASSSQPDRMGMDQQAGTGSAMNLTIGLHPNAQQPPPKYVKIWEGDLYGQRQGQPVFISKLESWGGTVSRKYSESQYVGNTDFLIFRALNQHGFLGQLQERKLLPSQTLLLSMYDKTSRMVGMLFPKNMLMFRPEALTQPSPVQQEELIHHQQQQLQQQQRNIHRLQRQLIQKQQQQHMQKLLPQRLQYQEQLHLQQQMTQQIQQQQQSLYQQHQQMQHQQQLWQQIQQQKHQLQHMDPQQQQLLSQMVGTELGSDDDTREDWVTGAGPACLGNQGGLMRAYTHSLEG

SEQ ID NO: 64960 - protein, 142 aa, Zea mays
  Coding DNA Sequence Number=SeqID_23181
MAINLHYSIANIFNNPLPAIDDAKSPSHGGVWFPGSGAKGSTQTNTKIKKGSNRKEQRKLKCSLVWRIGLSGAPGTVHSELCSFGFLRRSSAIIHRTVWCTTRLSGVPAEQRLSARNDRLCKVNSAIQMSEQKVRGAPDCPV

SEQ ID NO: 64961 - protein, 89 aa, Zea mays
  Coding DNA Sequence Number=SeqID_23182
MAPEAGLGRCQLHPAEWHSSRSGAGGAVLLSGRARVRIRCQATFALKAPAIRSVGVAAWPRLLLGEVWASDEPKIIFIVNWNMENHPRK

SEQ ID NO: 64962 - protein, 165 aa, Zea mays
  Coding DNA Sequence Number=SeqID_23183
MAGALDPTQWRSNWTKNLSYAMSHPDLRDKVGVKLTAAKSGLRRHRKLRFTPTPGSALEDDELRFARPQGLDSGSAPEDDELRFARPQGSDSALASADSLRLARPRGSDSTSASEDRLDLDLGGASASPNPGLGPTTSQEAPSLPYPKLTQATGNKTGVPSGSPR

SEQ ID NO: 64963 - protein, 233 aa, Zea mays
  Coding DNA Sequence Number=SeqID_23184
  Gene Ontology: Mol. function=oxidoreductase activity; Cellular component=cytoplasm; Biological process=metabolic process
  Homolog annotation: Hit_ID=Q8LIC4; Match level="QueryCoverage=97%, HitCoverage=74%, E-value=1e-28, Identity=35%"; Hit description =Putative sex determination protein tasselseed 2
  Pfam annotation: Domain name=Epimerase; Domain location=9-228; Score=- 42.7; E_value=0.0023; Accession=PF01370.11; Description=NAD dependent epimerasedehydratase family
  Pfam annotation: Domain name=adh_short; Domain location=7-153; Score =27.0; E_value=9.2e-08; Accession=PF00106.15; Description=short chain dehydrogenase
  Pfam module annotation: Pfam domain module=Epimerase::adh_short; Domain location=9-228::7-153
MAKLFGKVAIVTGAASKLGEAIARKFVDNGAKVILADINRHSCENIVAALNKTNHGPAVAHAMRIDVSEPDSILATVEEAKKVYKQDVDIFYNNAGVSNVSSPASSIDMMSFRNTMAVNVDPVGSLGDVVPSAYSISKAAVVGVVRAAAAELGGHGVRVNAISPYGVAARFDKGVLRHIFPHATDQQLDTMISSYGTYTVTEDDVANAAVYLASDAGKNINGQNIVLNGKFGL

SEQ ID NO: 64964 - protein, 608 aa, Zea mays
  Coding DNA Sequence Number=SeqID_23185
  Homolog annotation: Hit_ID=Q2QZQ3; Match level="QueryCoverage=38%, HitCoverage=52%, E-value=4e-36, Identity=39%"; Hit description=Plant invertase/pectin methylesterase inhibitor family protein, expressed
  Pfam annotation: Domain name=PMEI; Domain location=453-602; Score =101.8; E_value=2.1e-27; Accession=PF04043.6; Description=Plant invertasepectin methylesterase inhibitor
MRAPLLSSLLVLAVVATVPLLVPAVCISRHDKSESKADEEAAATTVAADEHGSVKTMSLDAYGPLEMAAKKPKEQVLNAQATPATTAGADTYDQKPVGEKQAETATASAADEQPDKYVEALVPDEKAEEFPDKYVEALVPDDKVEVKKKKVKKEKKDESDDSDVATSYKKKEKSDDSEVSTSYKKKKKSDDSDEDASLDKKEKKAKFAASDKKEKKDKSDNTSSKKEKEERSADSDASAYFDKEEQKSGDSDAATSVEKQKKQKKEKSGDYFDKEKEENPEEDAAPVDVSADGVYVPLKKEKSGEDATPVDVSTTTGKYVSSSSKANGKPTGGQPAESSTTATADAYASPKQKVVSSQPMASAAPDELPLAAKSSTTSDAYASPRQQQVASSQPMSGGAPDELPPVAKTSATPEPYASLNVAGGGQPNEPAAGRPPKLSMETFSGMIKRPFAKFLSPVIKSVCAKTEYPEDCESSIGGLPGAASAAATDSVGVLKLAMEAVRQKAIEAMNAATDRMNAPGTDPTTKEALDSCTSSYSDIKTSLETVDDALKRGDVDTAHTNLDSVETDITTCDDGFQERGTPSVMTDHDQELQKLASNLLSIGAAIHH

SEQ ID NO: 64965 - protein, 94 aa, Zea mays
  Coding DNA Sequence Number=SeqID_23186
  Homolog annotation: Hit_ID=Q0GPG4; Match level="QueryCoverage=83%, HitCoverage=23%, E-value=1e-24, Identity=67%"; Hit description=BZIP transcription factor bZIP109
  Pfam annotation: Domain name=DUF1664; Domain location=21-93; Score =62.5; E_value=1.3e-15; Accession=PF07889.3; Description=Protein of unknown function (DUF1664)
MEVRQLGNSRSITVLNGGSAQSGVSGLIVPAATVGALGYGYMWWKGISFSDLMYVTKRNMANAVSSMTKHLEQVQSSLAELHLQLHNVSTMTSR

SEQ ID NO: 64966 - protein, 127 aa, Zea mays
  Coding DNA Sequence Number=SeqID_23187
MSRARRGYGPTYGVTTSLEVGLGASVGTLNMGYPLLLGQGGTPMATCSHGGTSGLPRLRACALLAGSLASEPALPRALSVGLVDDYTLGLDPRGMVSGPHVCRPDLWPREVQRRHMSWPIRMGPGSP

SEQ ID NO: 64967 - protein, 121 aa, Zea mays
  Coding DNA Sequence Number=SeqID_23188
MGRAGLNYLVADVASSAAARSPETWQTRSPGRLGSPERARTGLEGLANTLVDYRPQERDQRRKNNEGKVLRGHDIGLKQLVTARTRRTGTTITGEAKLANTRGNWEKFSVGADISPWDGTQ

SEQ ID NO: 64968 - protein, 730 aa, Zea mays
  Coding DNA Sequence Number=SeqID_23189
  Homolog annotation: Hit_ID=Q1RVB7; Match level="QueryCoverage=93%, HitCoverage=95%, E-value=1e-149, Identity=53%"; Hit description=Zinc finger, BED-type predicted
MSAEEGASAAASAPPEAEAPAAGAMGAEAAAARKRYESLVQVRAKAIKGKGAWYWAHLEPVLVPPPASGQQPKLARLRCTLCAATFSASNPSRTASEHLKRGACPNFASPLAASAPVSTAPPLAIAAASSVVPISSFPPSSQRRHSTGGGGRKRHVLAAGVRSRRRGLLAPHGGWRAGHLLHASHATGAARAAPGPLGRPRRPGPSPWAAAEHPKLKAFLRQVGLPELSRADLTRGRLDARLADVRADAAARVRDARFLQLAADGWRDQVVTLAVNLPNGTSVFHHAVPMPAPPSSGYAEEVLLDAVSSVAASADVRHCAGIVADRFGSKALRDLESKHPWMVNLSCQAHCLARLAKDLVRELPVVHSAATNCAKMAAYFNATRAVRALLQRHQVQELGHAGLLRVAAPPSTGDNETSAVFAMLDDVLTCARPLQLSVLEEPFKLLCIDDSTAREIVDMVHSAAFWAEVEAAHSLVKMITDMVKEMETERPLVGQCLPLWEDLRGKVRGWCRKFNVDEAIAMSVLERRFRRSYHPAWSAAFILDPLYLIKDVSGRYLPPFKYLTPEHEKDVDRLITRLVSPEEAHLAMMELMKWRSEGLDPLYAQAVQVRQPDPTTGKMKIANKQSSRLVWETCLSEFKSLGKVAVRLIFLHATARGFRCTPTMARWLTAPGTSSRGIARAQRLVFVVANSKLERKDLRNDDDRDAELLMEGDDDMLTDPTTAIVVPSSV

SEQ ID NO: 64969 - protein, 163 aa, Zea mays
  Coding DNA Sequence Number=SeqID_23190
  Gene Ontology: Mol. function=DNA binding
  Homolog annotation: Hit_ID=Q5JL31; Match level="QueryCoverage=67%, HitCoverage=22%, E-value=5e-23, Identity=52%"; Hit description =Putative DNA-binding protein
  Subcellular localization annotation: CTP_CleavageSite=57; ConfidenceScore=5.10e-01
MAPPAPSVGPRLLLRRLLSTATEAAAETPAPTAPSSAAAAKPAKQDPRLLYRRLSALGSAGEGSVSRVLNKWVREGGATRSDDLVKHVKELRKYKRHAHALELLSYIATTWFCQPKTARSKGHDNWAHISNGARYDNVAPTKHCLSPSNGLNATTGAQCMKFQ

SEQ ID NO: 64970 - protein, 37 aa, Zea mays
  Coding DNA Sequence Number=SeqID_23191
MEDAKPIKTPLGANGHLVLGIGGKIVDQKKRGPPSFL

SEQ ID NO: 64971 - protein, 75 aa, Zea mays
  Coding DNA Sequence Number=SeqID_23192
MLPLGVKRGWVIRRRPLKLFLAEDGGRERSYAIATVPRDNCMRAAAPAQWMSQRTSRMRDLSAAGTLVIARALKL

SEQ ID NO: 64972 - protein, 244 aa, Zea mays
  Coding DNA Sequence Number=SeqID_23193
  Gene Ontology: Mol. function=kinase activity; Cellular component =membrane; Biological process=homophilic cell adhesion
  Homolog annotation: Hit_ID=Q6QP54; Match level="QueryCoverage=57%, HitCoverage=40%, E-value=1e-22, Identity=48%"; Hit description =Putative kinase
  Subcellular localization annotation: CTP_CleavageSite=24; ConfidenceScore=5.36e-01
MGAILVLALSAQGTRSRLARAQPRAGTETPPRPTPRLGPCLGLGRRSPPRPTLGLGLNLDLGRRSPPRPTPGLGLNLDSRRRSPPRPTPGLGLNLDSGRRSPPRPTPGLGLNFNLGQRSPPRPTPGLGLNLDLGRRSPPRPTPRLGLSLNLGRVTASPDLGLGPTTSQGAHHYPTPSQLRLRGTRLASHLARPGQQVMMAPRVLHDDGGPQPLTEARRRQQGSDSPNSCASIGLRRSSDGHDIT

SEQ ID NO: 64973 - protein, 173 aa, Zea mays
  Coding DNA Sequence Number=SeqID_23194
MVGGPSLISIHENLSPIIFLPRFWPLSPPFALPPALLVKIVENYVTTDHQIRSLPSHQQIRREKMWKTRIPPQKHDSETHETHDVGLGLWPLSLLYLMRGCTSSLYRDMRPLMGKAANRLHIVARIISRTSPLLTSRIYEIYRYSLSFWHNGDILPVTPKPYRFLPSGLYRIP

SEQ ID NO: 64974 - protein, 157 aa, Zea mays
  Coding DNA Sequence Number=SeqID_23195
  Gene Ontology: Mol. function=cysteine protease inhibitor activity
  Homolog annotation: Hit_ID=Q4FZ51; Match level="QueryCoverage=81%, HitCoverage=84%, E-value=4e-35, Identity=59%"; Hit description =Putative cystatin
  Pfam annotation: Domain name=Cystatin; Domain location=37-129; Score =27.4; E_value=5.1e-05; Accession=PF00031.11; Description=Cystatin domain
MTMPRRALLFAAVLLAASAAAVSGFHLAGDESGLVRGVLTAVRERAEAEAEDAARFAVAYHNRNQGAALEFTRVLKSKRQVVTGTLHDLILEAADAGKKSLYRAKTLNLNPSLSVASDEGSGQGVAKLSLEADIIHEEAHLHTIENDGLSSDFASSA

SEQ ID NO: 64975 - protein, 318 aa, Zea mays
  Coding DNA Sequence Number=SeqID_23196
  Gene Ontology: Mol. function=RNA-directed DNA polymerase activity; Cellular component=intracellular; Biological process=RNA-dependent DNA replication
  Homolog annotation: Hit_ID=UPI00004C1733; Match level="QueryCoverage =99%, HitCoverage=23%, E-value=1e-172, Identity=94%"; Hit description= UPI00004C1733 related cluster
  Pfam annotation: Domain name=RVT_1; Domain location=56-225; Score =138.3; E_value=2e-38; Accession=PF00078.17; Description=Reverse transcriptase (RNA-dependent
MPGIPRDVAEHSLDIRAGARPVKQPLRRFDEEKRRAIGEELHKLMAAGFIKEVFHPEWLANPVLVRKKGGKWRMCVDYTGLNKACPKVPYPLPRIDQIVDSTAGCETLSFLDAYSGYHQIRMKESDQLATSFITPFGMHCYVTKPFGLRNAGATYQRCMNHVFGEHIGRTVEAYVDDIVVKTRRASDLLSDLEVTFRCLKAKGVKLNPEKCVFGVPRGMLLGFIVFERGIEANPEKIAAITSMGPIKDLKGVQRVMGCLTALSRLISRLGERGLPLYRLLRKAECFTWTAKAEEALGNLKALLMNAPILVPLTAGEPS

SEQ ID NO: 64976 - protein, 94 aa, Zea mays
  Coding DNA Sequence Number=SeqID_23197
MAPKRGTLNFFATATGALCLAKPDELVNADSAPQRSLGNKMEKQGFGQPTTTIKRQAGEAPPLTPKTVSVKHHHRPSNEEVDAAEPSRPHATPG

SEQ ID NO: 64977 - protein, 137 aa, Zea mays
  Coding DNA Sequence Number=SeqID_23198
MELKASSGGSLGLALLCKALFPMRPLNVEMHCRSGILRKMVLLAASVPGAEVVLGRGGSLPEVVTEPASRFTLVHNTVEGVTSCGIREEQVAEPGLGRGGICSEAEAGFGRGVVSSRRPAHALSFACPAWGTVVVVA

SEQ ID NO: 64978 - protein, 67 aa, Zea mays
  Coding DNA Sequence Number=SeqID_23199
MARSGRRDRGEAETPRRRGTTALDFGDGIYILFIQQQQQQQQQQSLFCPKHVGVFVGYVQTISSDVA

SEQ ID NO: 64979 - protein, 78 aa, Zea mays
  Coding DNA Sequence Number=SeqID_23200
MANARDEMFGGGSQRIRSKMVCGCAAVHQPRQRHPALQSIASHEKGHGRVTRGMAKLPGPDPRPEWIPRRGPRRRHVR

SEQ ID NO: 64980 - protein, 152 aa, Zea mays
  Coding DNA Sequence Number=SeqID_23201
  Gene Ontology: Mol. function=sodium:hydrogen antiporter activity; Cellular component=integral to membrane; Biological process=sodium ion transport
  Homolog annotation: Hit_ID=Q850J9; Match level="QueryCoverage=52%, HitCoverage=39%, E-value=1e-31, Identity=85%"; Hit description=NHX1
MRGRHLLFASSLNYRRTGSVGSEKGEDARRRVNMQLADHDSADRPCNWCYFLGNRFCLHLTGVNQDETPLLYSLVFGEGVVNDATSVVLFNAIENLDINNFDAIVLLNFIGKFLYLCFTSTIHGVATGLLSAYIIKKLCFARSAHNSLSLWG

SEQ ID NO: 64981 - protein, 92 aa, Zea mays
  Coding DNA Sequence Number=SeqID_23202
  Homolog annotation: Hit_ID=Q5SMJ0; Match level="QueryCoverage=33%, HitCoverage=2%, E-value=2e-07, Identity=80%"; Hit description =Putative salt-inducible protein kinase
MGPLIGARRKIFPKYPQWGIRMLHYDSQRTCYTFMKLREIYFDDDGKLAGVDGILAEIIKNIDLSELRELGSGTFSIVYHGKWRGSEPLMLL

SEQ ID NO: 64982 - protein, 54 aa, Zea mays
  Coding DNA Sequence Number=SeqID_23203
MKRLCVHVSYRRIAVYIFGFVKGAILGPLIMTVVIALKNLYTEFVLADGEETSS

SEQ ID NO: 64983 - protein, 72 aa, Zea mays
  Coding DNA Sequence Number=SeqID_23204
  Subcellular localization annotation: CTP_CleavageSite=50; ConfidenceScore=5.13e-01
MAATHVAQRVNGLASVTREPLCGPCTLVVAPTARVGRLRSGFPRGPCYVSSDMRQCWASPSEGRSGQHHSSL

SEQ ID NO: 64984 - protein, 124 aa, Zea mays
  Coding DNA Sequence Number=SeqID_23205
MPQLKLGEASRLHGEAVQGLVRDWGSTGGAGHYGRARAEMACGGARFPRRTPVIFGSSGALAARVQTAKASGGIYRRGRGADAWGARCRGQSALGWPDTASSMWLLASARVQTLIGWRSSRIWA

SEQ ID NO: 64985 - protein, 38 aa, Zea mays
  Coding DNA Sequence Number=SeqID_23206
MQLHIPRGLKAEVVFAFIVICTHEPNVKKRVVESVGGT

SEQ ID NO: 64986 - protein, 135 aa, Zea mays
  Coding DNA Sequence Number=SeqID_23207
  Gene Ontology: Mol. function=nucleic acid binding
  Homolog annotation: Hit_ID=Q69XQ3; Match level="QueryCoverage=63%, HitCoverage=26%, E-value=6e-14, Identity=52%"; Hit description=KH domain-containing protein / zinc finger protein-like
  Subcellular localization annotation: CTP_CleavageSite=17; ConfidenceScore=5.26e-01
MGLLPPGSATKVRSTITCSYLRNLPLLSKNISTKVGSTLSRVTGVKLSIRDHESNPNQKNIELEGNFDQIKQASDLVRDLIATISASMPAKNPSSAMAPAGGGRGSGPGGTSSNYKKKLCENFLKLCENFQHDYV

SEQ ID NO: 64987 - protein, 77 aa, Zea mays
  Coding DNA Sequence Number=SeqID_23208
MDRLPIVVYCDVGSGVMGHNILPPVVPALGGASRGEGDTTEEDDTKVLRRLSETKCEPSKRYIYTFALSENNSSVMR

SEQ ID NO: 64988 - protein, 72 aa, Zea mays
  Coding DNA Sequence Number=SeqID_23209
MALIMLIGDSGTTCHAMWHITHAPPLSLLSPSRSHECDTNSEDKPVKMPVELVSQKIRCTYVRTLEDVGESE

SEQ ID NO: 64989 - protein, 131 aa, Zea mays
  Coding DNA Sequence Number=SeqID_23210
  Homolog annotation: Hit_ID=Q6H7U1; Match level="QueryCoverage=56%, HitCoverage=3%, E-value=8e-10, Identity=48%"; Hit description =Putative SNF2 domain-containing protein
  Pfam annotation: Domain name=HEAT; Domain location=33-69; Score=23.7; E_value=0.00065; Accession=PF02985.12; Description=HEAT repeat
MGTIRCVNAVPGDPFGHLQGTVQLGAGLGVDQEILCSGAIPHVSQYIRSKNWDTRVAAAHAIGAIAENVKHTSLKDLYASVQAEKHASGFSDGSDDAGSALPRTDSAATSDLAYMLFQNLRLYLHVVLKIG

SEQ ID NO: 64990 - protein, 62 aa, Zea mays
  Coding DNA Sequence Number=SeqID_23211
MSGVMPAETAALMLSDAYGCGGRGGFGEARTSPDSSLNSHRQDLLTMAKVLNRLPMPDSNGQ

SEQ ID NO: 64991 - protein, 184 aa, Zea mays
  Coding DNA Sequence Number=SeqID_23212
MALRNNGPGAFREAFLPSSGPEGYPSPTVVIVTSDWRVLKRVHEVLPEWLSALRYHFKTSSSSSLSPPRDLLILLEMSPPGSLRLMSLVGYNNIVSAALSAFPPSVVSTALPFDLPTSVVSAVLRPPPLPLHRIHDPPPLPPRRLCSSDRLVTVVAPVSARLMPQSSKLFERCSRKSPEKMRLL

SEQ ID NO: 64992 - protein, 584 aa, Zea mays
  Coding DNA Sequence Number=SeqID_23213
  Gene Ontology: Cellular component=mitochondrion
  Homolog annotation: Hit_ID=Q10G00; Match level="QueryCoverage=71%, HitCoverage=65%, E-value=1e-129, Identity=55%"; Hit description =Expressed protein
MVLPVDVAGLRPRLGDVEAPPKPRSSLSSMAEAESEPLGRAWRRSFGRGQGVVRALGSGEAEAWLPVSLTLSSGTAVGVAQAALSFCQAGQWSGEVTADEAAAAGPLPPAPDGTSAPAASDPAPAPGPDRRAHLAVRLALPPPHRFSQPQANTQPRSAVATEVRWKERRASALGSLQRAAVRRNCTREDAGVAWEEEFESVVTLAAMSEREGAAFHPWELAFCVISMSFEDDINKGPKNKPSILGTVSLNLADYALTAGETIEIILPLSIPGGAPERASSLHLTLSMVELRAFQETSDASQRSAATLPLSPSPSDSLPGGKYEVLVIKAGLRKVKILTDLVSTRRPKKTCQGGGEDKFCVNSDSVEYPCDTESLDDDLDDRVEEDEFGDSTIRKSFSYGYLQSVNYVGGLVYAHAKIDGEHEDWIYYSNRKTDVGFHVEKGSRGYGLANTMVSEFGDDNFVIENWELKEIISCDGRMKLSSQMFFASIDQRSERAAGETACTSLVAIIADWFQANQNIMPIQSQFDSLIREGSLEWRNLCENETYRKRFPDKHFDLETVLHTKIHPLTVSPSNLLFDLSYYDYG

SEQ ID NO: 64993 - protein, 662 aa, Zea mays
  Coding DNA Sequence Number=SeqID_23214
  Gene Ontology: Mol. function=nucleic acid binding; Cellular component= intracellular; Biological process=chromatin modification
  Homolog annotation: Hit_ID=Q7XI88; Match level="QueryCoverage=99%, HitCoverage=76%, E-value=2e-67, Identity=60%"; Hit description=Zinc finger protein-like protein
ADLKTHAKTCGTREYRCDCGTLFTRRDSFVTHRAFCGALGEETGRALAPPAPPSPRPPDLEAEENVDNDKEEEENEDSALAEVEVPQRVEVAVPEEPEPEPQRIPSPPPLPQEPPCRPSPPPLPQEQPRRVSPPPLPKEPPCHHPTPPPLPKEPQRLPFPPEQQAVVALVPNVDEPEVAAVGTVAAKLEDETDQDETTCFQEADQYKDAELEVSNLLDKDTPMLPCFLPSPSEAIGTDGSSTTCGAGGSVSNSIVPSTTTNTFAGLFASATTSTTSQSRSLRDLIGVDPTFLCLAIGAPSLFPQTSASNSGTFAPPPAPHMSATALLQKATEAGATQSSSSFLKEFGLASSSSSPRPKQQQPHGRVAETSTDPWQYRNSNQQMEMERHQSHQRREMESSSQPWQHPRITQQMEMERHHQRSHQQREMESSSQPWQHPRSTQQMEMERHHQRSHQQREMESSSQPWQHPRSTQQMEMERHHQRNHRQRETESSSQQWHHHHHHPNDQMMGLESYRSNQQMEMDPSSQQRWAQHQRSNQQQQMEMMERHHLSNQQIRSTQQMERRAMVSGGGLGLGLAYESGNPGLPLPDLMTGPSPLLGPKPATLDFLGLGIGGTMGGSTASRGLPALMVGRELDMGPSAQVPPAAAAAPWEDAKRKTNGRTI

SEQ ID NO: 64994 - protein, 200 aa, Zea mays
  Coding DNA Sequence Number=SeqID_23215
  Subcellular localization annotation: CTP_CleavageSite=97; ConfidenceScore=5.40e-01
MAAALASSRNSHLPAMRSSPAVSPLPNNYRMRVNPSIAYVARPETAAACKRGHRHHRASHDDKTRRTTSRSPLVMRRRWRRSASRDSRRRRKGSDARADYYRRPDDDDAHRHGYYDDAPPRGPIRASRRPAESIARPLVAAAEDRKRSSPGKEADQEDDAEARRRRHEIQRMREEARRELDKVVTTVWFNDPYISPTCAC

SEQ ID NO: 64995 - protein, 364 aa, Zea mays
  Coding DNA Sequence Number=SeqID_23216
  Gene Ontology: Mol. function=dimethylallyltranstransferase activity; Cellular component=chloroplast; Biological process=isoprenoid biosynthetic process
  Homolog annotation: Hit_ID=Q7XI92; Match level="QueryCoverage=98%, HitCoverage=99%, E-value=1e-118, Identity=72%"; Hit description =Putative geranylgeranyl diphosphate synthase
  Pfam annotation: Domain name=polyprenyl_synt; Domain location=91-360; Score=213.9; E_value=3.6e-61; Accession=PF00348.8; Description =Polyprenyl synthetase
  Subcellular localization annotation: CTP_CleavageSite=53; ConfidenceScore=5.41e-01
MAMAFHFHPLVASRVHFSPLPFAAATGAPSPSSSVAIAAHYHHHGRRRFSAIVATATTTEFNFKAYMEERAVAVNRALDAAIPAGGLPAALHDAMRYALLAGGKRVRPALCLAACAVVGGAGVLGDAGRGGRRDGAHHVARSRRPTPAWTTTTSAAASPPATSSTGEPIAVLAGDALLSLSFHHMASVGSYPPAVDPEKHPARVVRAIGELARCIGSEGLVAGQVVDLEMTGTSQTVPLELLEYIHLHKTAALLEASVVIGAIIGGGTDEQIEALRKYARSIGLLFQVVDDILDVTKSSEELGKTAGKDLASDKTTYPKLLGLAKSREFAEKLVSDATEQLACFDEEKAAPLLHLANYIAHRQN

SEQ ID NO: 64996 - protein, 279 aa, Zea mays
  Coding DNA Sequence Number=SeqID_23217
  Gene Ontology: Mol. function=transcription regulator activity; Cellular component=nucleus; Biological process=regulation of transcription, DNA-dependent
  Homolog annotation: Hit_ID=Q7XI96; Match level="QueryCoverage=99%, HitCoverage=100%, E-value=1e-54, Identity=45%"; Hit description =Putative mature anther-specific protein LAT61
  Pfam annotation: Domain name=DUF822; Domain location=9-151; Score =271.4; E_value=1.7e-78; Accession=PF05687.4; Description=Plant protein of unknown function (DUF822)
MTSGAAAAGGLGRTPTWKERENNKRRERRRRAIAAKIFTGLRALGNYKLPKHCDNNEVLKALCREAGWVVEDDGTTYRKGCRPPPGMLSPCSSSQLLSAPSSSFPSPVPSYHASPASSSFPSPTRLDHSSGGSSTHNPAAAAAAAAASLLPFLRGLPNLPPLRVSSSAPVTPPLSSPTAAAASRPHNIVRRPNWDAAAAVVAADPFRHPCSRFQATTAPASPTYNLVHPASDSMELDGTTAAVEEFEFDKGRVVTPWEGERIHEVAAEELELTLGVGAK

SEQ ID NO: 64997 - protein, 272 aa, Zea mays
  Coding DNA Sequence Number=SeqID_23218
MARPRRSATIRCQVKTTTHCPVGDPTILDLLLGAIGYGAEVTQLGAIAYDAEVKEAERPSRRGDEHAPRRASHERISDSINADTTLRRERSNWACALRLPLACASAPGRWTLVAGVHERAWEMAARRWACASAPGSAWEVRKNGDGRWWRGLVAAGGEDEWMVTVFETLKCDQAGLSTAHYSVPGYLGRWATNQSTAQPAKCAVLARVIFVRAGSGSVPLISCRTLAGSAGTAQTCRTSYAHRPWLVRPAVVTGRRRTVQYRAGTGDHLAPP

SEQ ID NO: 64998 - protein, 290 aa, Zea mays
  Coding DNA Sequence Number=SeqID_23219
  Gene Ontology: Mol. function=catalytic activity; Cellular component =integral to membrane; Biological process=response to nematode
  Homolog annotation: Hit_ID=Q69V70; Match level="QueryCoverage=99%, HitCoverage=100%, E-value=1e-136, Identity=75%"; Hit description =Transporter-related-like
  Pfam annotation: Domain name=DUF6; Domain location=131-244; Score =23.1; E_value=0.001; Accession=PF00892.11; Description=Integral membrane protein DUF6
  Pfam annotation: Domain name=TPT; Domain location=130-244; Score =35.1; E_value=2.5e-07; Accession=PF03151.7; Description=Triose -phosphate Transporter family
  Pfam annotation: Domain name=UAA; Domain location=20-250; Score= -159.0; E_value=0.018; Accession=PF08449.2; Description=UAA transporter family
  Pfam module annotation: Pfam domain module=DUF6::TPT::UAA; Domain location=131-244::130-244::20-250
  Subcellular localization annotation: CTP_CleavageSite=62; ConfidenceScore=5.28e-01
MEAEKKAPAVSDVGAWAMNVVSSVSLIMANKQLMSSSGYAFAFATTLTGFHFTVTALVGWISNATGYSVSKHVPLWELVWFSLVANTSITGMNLSLMLNSVGFYQISKLSMIPVVCLMEWVLNSKHYTTKVISAVVVVAAGVGICTVTDVEVNAKGFICACVAVFCTSLQQIFFILLSCSLAVFCNMSQYLCIGRFSATSFQVLGHMKTVCVLILGWILFDSALTVKNILGMLLAVMGMVVYSWAMEAEKKVAAPVPRIKSEMLDGEDVPLKARVSGVPAVDLEDGEMKS

SEQ ID NO: 64999 - protein, 115 aa, Zea mays
  Coding DNA Sequence Number=SeqID_23220
QSRGKYTDRWEATNLVRRLEDDLWGVDACSEHYDITPAIRPDSTGSVIVSPVGEGNPMLSSTVNLVAMLNTELDHAPDKLSRAHAEIAEVRAERAEHCHQEGGSLALAGVIETPK

SEQ ID NO: 65000 - protein, 158 aa, Zea mays
  Coding DNA Sequence Number=SeqID_23221
MEGFGRGETRHGRTALGADGPVGVLRGRVDDGRRGVNSGAGRGPWLSAAGSRRRASVGVASRRSVRGWAGAQARLERVSWRLARSTAGAPGSGRLGGVRASRHGQGKQGSSMGAAWTGLRLLVGQGVAAKNGSTRRGLQRNGWNWEMKKHLTCGALAS

SEQ ID NO: 65001 - protein, 157 aa, Zea mays
  Coding DNA Sequence Number=SeqID_23222
  Subcellular localization annotation: CTP_CleavageSite=82; ConfidenceScore=5.38e-01
MRFRGGRSDYGEKFPPSRRRAHPVTALCVSRATTRMPRTRQSERMGADDAVQRRRRRRSPTFTASRSLPPLVNAMDSQLGVSAGWVTEGPIYPRATGSNSAGFGQPAPISPAAGSVTNAPRRMEKTALSSRSHGSAPIPFLSARAKVRLVKRARAAV

SEQ ID NO: 65002 - protein, 922 aa, Zea mays
  Coding DNA Sequence Number=SeqID_23223
  Gene Ontology: Mol. function=DNA binding; Cellular component=nucleus; Biological process=regulation of transcription, DNA-dependent
  Homolog annotation: Hit_ID=Q8S4P6; Match level="QueryCoverage=93%, HitCoverage=96%, E-value=0.0, Identity=87%"; Hit description =Polycomb protein EZ1
  Pfam annotation: Domain name=SET; Domain location=775-891; Score =92.3; E_value=1.5e-24; Accession=PF00856.18; Description=SET domain
MDGGPPHMTPGNVASQATSLLRIDLLLNSEELDYILWTYSIFPWKGFLGVQPLYTVTSNSAVRAGEENAASLYVLSVIDSLKKRITADRLTYIKNRIGENKTNISSYTQRTYNLSKNRQISTSKGTDSASNLLTKRQDDALCTLHSLDIIPVDKDGGTFQDESPFSSSNVMFGGNLGPKNAIIRPIKLPEVPKLPPYTTWIFLDRNQRMTEDQSVLGRRRIYYDTSCGEALICSDSEDEAIEDEEEKKEFKHSEDHIIRLCMVFMARYEILHGEKTKDSCKKGTEHNVKVEDLYCDKDLDAALDSFDNLFCRRCLVFDCKLHGCSQDLVFPTEKQPAWSGVDDSVPCGIHCHKLASEPDAAAGADHMLFDVEEPTHSSDNVMNQPGSNRKKNGSSGRKTKSQQSESSSTARVISESSDSEVHPISNKSPQHSPSPSKVKIGPKGGIRKITNRRIAERILMSVKKGQREMASSDSNFVSGYLLARDMKLRSDTRNGNKELIVSSQQSSPSTRSSKKKSTPQIGNSSAFAEAHNDSTEEANNRHSATDGYDSSRKEEFVNENLCKQEVYLRSWKAIEQGLLVKGLEIFGRNSCLIARNLLGGMKTCKDVFQYMNYIENNSASGALSGVDSLVKGYIKVTISKGLPKGRISLVDNIILVVVNLHAESSVHVFQMGHVVRNTVGVQKFARIVFEDVTVQRASVAAANVHVLQLTGNAIRMFAETVGLVFNSAETCLVSHLTAMNSGVKYYTILGNMCGDGTLGVPNQRGDNYECRNMKLLLKQQQRVLLGRSDVSGWGAFLKNSVSKHEYLGEYTGELISHKEADKRGKIYDRENSSFLFNLNNEYVLDAYRMGDKLKFANHAPDPNCYAKVIMKESSLVKSLFYDYRYEPDRAPAWARKPEASGAKDDGQPFNGRAKKLAQNNRG

SEQ ID NO: 65003 - protein, 54 aa, Zea mays
  Coding DNA Sequence Number=SeqID_23224
MVSKCIVGAVHLATGRPRKRAWFEWDLVLVGKNGIFASRAANAPATAPTSVRGK

SEQ ID NO: 65004 - protein, 93 aa, Zea mays
  Coding DNA Sequence Number=SeqID_23225
  Subcellular localization annotation: CTP_CleavageSite=28; ConfidenceScore=5.43e-01
MAMTLAGMPRKRPMTSIQLPTTTHRNLRASRMPHQAPGDTVVCPSPAYLPSSRLDIQATVSNVGLRGGYASAKRNFQPHNTKNYCGYRSWNYH

SEQ ID NO: 65005 - protein, 212 aa, Zea mays
  Coding DNA Sequence Number=SeqID_23226
  Homolog annotation: Hit_ID=Q5W7B9; Match level="QueryCoverage=80%, HitCoverage=69%, E-value=3e-37, Identity=51%"; Hit description =Putatvie LOB domain protein
  Pfam annotation: Domain name=DUF260; Domain location=36-136; Score =219.6; E_value=7.1e-63; Accession=PF03195.5; Description=Protein of unknown function DUF260
  Subcellular localization annotation: CTP_CleavageSite=10; ConfidenceScore=5.43e-01
MDCSSDTAVCAVAVAAAAAPSPPSSSPRPPAPALSPCAACKILRRRCVDRCVLAPYFPPTEPHKFATAHRVFGASNIIKLLQELPEAHRGDAVSSMVYEAAARVRDPVYGCAGAIWQLQRQVNDLKAQLARAHAELAGARAQHAHLLALLCVEVAASSPPSYDCAAGYSASPSRHQLAAVVAANPVMADAVDGALHQTQAGPVSWAEEALWT

SEQ ID NO: 65006 - protein, 402 aa, Zea mays
  Coding DNA Sequence Number=SeqID_23227
MGYGLTGATLSDFPSRKCGGLEPVPPLASDLSLDGSESGALSPLGALSGLGPVPGRSRANSTKIVLSLEGLWGWISRVIKTRTRFMGCLNVTDKSSKGHIVGLDRRLECTLKSGSVLFLEIPIPPSQSPAISKLSKVEERRIATPTLTVDYPTKPKTAGLEHLPIRLPRPATRHDCVAGCCGAQLPPHAAGDAFCLPASARPSSLIPPPLCFRTKIWACLLPTKLYVGRVPVSMGKKGKWFGAVKKVFSPESKEKKEERLRRKSAASNPTPVDLTPSTSLEVNLSVPPPPAPPPVLHQAEEVGVPEAEQEQSKHVAVEEAPAAAPAQASVLPPAVPTQELAAVKIQTAFRGYLMAALPSTWKCRQLANLASVSCLVAVTECLSALLLSLSALLLNYPYEIRY

SEQ ID NO: 65007 - protein, 779 aa, Zea mays
  Coding DNA Sequence Number=SeqID_23228
  Gene Ontology: Mol. function=identical protein binding; Cellular component=cytoplasm; Biological process=negative regulation of enzyme activity
  Homolog annotation: Hit_ID=Q10RX3; Match level="QueryCoverage=88%, HitCoverage=98%, E-value=0.0, Identity=61%"; Hit description =Subtilase family protein, putative
  Pfam annotation: Domain name=PA; Domain location=407-504; Score=93.0; E_value=9.3e-25; Accession=PF02225.12; Description=PA domain
  Pfam annotation: Domain name=Peptidase_S8; Domain location=205-612; Score=-28.2; E_value=2.9e-05; Accession=PF00082.12; Description =Subtilase family
  Pfam annotation: Domain name=Subtilisin_N; Domain location=108-198; Score=60.6; E_value=5.2e-15; Accession=PF05922.7; Description =Subtilisin N-terminal Region
  Pfam module annotation: Pfam domain module=PA::Peptidase _S8::Subtilisin_N; Domain location=407-504::205-612::108-198
MTGGRGALEQREGGVALQSRSNARSLSPRSAMGWERCRRSPPARAMGAVGRDRKNETEKDSVALLVLAHAQPSAEKRIQWRVVLVCHSLFWLLLPAVVLGATAEETMQTYIVQLHPHHDGGSGEATLPASNSKVDWHLSFLERSVAWEQEKRPASRLLYSYHTVFDGFAAQLSDGEAAALRALPGVASVRADRRVELHTTYSYRFLGLGFCPTGAWARSGYGRGTIIGVLDTGVWPESPSFDDRGMPPAPVRWSGACQGGEHFNASNCNRKLIGARFYSKGHRANYPTNPSEAAALLDSDILAGMDDAVRDGVDVLSLSLGGFPIPLFEDSIAIGSFRATARGVSVVCAAGNNGPARSSVANEAPWVLTVGAATMDRRFPAYVRLGDGRVLYGESMSMYPGETGLKKGGKDLELELVYAVGGTRESEYCLKGSLDKAAVAGKMVVCDRGITGRADKGEAVKEAGGAAMVLTNSEINRQEDSVDVHVLPATLIGYREAVELKKYISSTPRPVARIVFGGTRIGRARAPAVAVFSARGPSLTNPSVLKPDVVAPGVNIIAAWPGKPGPRRGWRATPAAMVRSAIMTTADIIDRQGKAIMDGGGGGGRASVFAMGAGHVSPARAVDPGLVYDIQPADYVTHLCTLGYSHMEIFKITHTGVNCSAALHEDRNRGFFSLNYPSIAVALRNGARSAVLRRTVTNVGAPNSTYAVQVSAPPGVKVTVAPMTLSFVEFGEQRSFQVTVDAPSPPAAKDSAEGYLVWKQSGGQGRHVVRSPIAVTWVE

SEQ ID NO: 65008 - protein, 279 aa, Zea mays
  Coding DNA Sequence Number=SeqID_23229
  Homolog annotation: Hit_ID=Q6ZLF9; Match level="QueryCoverage=99%, HitCoverage=89%, E-value=1e-69, Identity=45%"; Hit description =Putative seed specific protein
  Pfam annotation: Domain name=TPX2; Domain location=112-168; Score =80.2; E_value=6.4e-21; Accession=PF06886.2; Description=Targeting protein for Xklp2 (TPX2)
MGKIDMSTDEESDCVAICPPNRNAGHEEVVSGSHDEDSSGKQENPYAVNSHMDSNGQEDVSVNLDLLKLIHQQESSVSNSPTKPAVARQQGTVTSARAGKTKKTTVAVAPTFVCANRAEKRGEFYTKLEEKRKALEEEKLQAEARKREEEEEALRQLRKNLVVRAKPMPSFYQEGPPPKVELKKVPPTRAKSPKLTRRKSCSETPHTPEGGNGSAVCCRLHRHSIGNARDVSSKAQCSPKSASKAGSATRSRVTKSREDLKASVKKVGLPSAANFAVQT

SEQ ID NO: 65009 - protein, 413 aa, Zea mays
  Coding DNA Sequence Number=SeqID_23230
  Gene Ontology: Cellular component=nucleus
MKNVNVTTSNTFPHKVEVNLDVLGDPVNSHHFVVELSRINSIFAKSKRQYIEAQVEYAKEEAILSVLRTQLASQQSYIHQDSHSLRRKNSELAEELKDLSHQVQEYLSENMSTLRSLSIPESISGAFIIHVDVLLCFTWTVTGLCADLARLSGANILEGDHNLKLLRQDCYISHQKKFINHLVNQLAAHLFLKIACQLEEQIKISSAYSFLKAVELELQGYFSAFDGRLGRYNLIDQAASEMFEEGSVDDSDSYLHAVRDILSSHSSSQATSPEYVSSYGLIGQITELQDELQYLQHETENVLPRERGRCTDELCRMIQTLEQILAVSLSDEQPKLTPWPLAHSLEDLEMVSQQVSASVSEVTLARDEKAEKLKQPSRNAQQERQVFSDFFCHPERLENRVEELLSRFRALPE

SEQ ID NO: 65010 - protein, 129 aa, Zea mays
  Coding DNA Sequence Number=SeqID_23231
  Gene Ontology: Mol. function=transcription coactivator activity; Cellular component=mitochondrion; Biological process=regulation of transcription, DNA-dependent
  Homolog annotation: Hit_ID=Q8GW13; Match level="QueryCoverage=65%, HitCoverage=69%, E-value=2e-24, Identity=64%"; Hit description =Putative c-myc binding protein
MDREAKKEAFRKYLESSGVLDTLTKALVALYEENDKPSSAVEFVQQKLGGPSISDYEKLKAEKLDLQLKYDKLLETHKETCRQPSGSLLDYEDTQLTVGPRNYNKLQMYLRLEGKQEYKSDAKANAKSA

SEQ ID NO: 65011 - protein, 114 aa, Zea mays
  Coding DNA Sequence Number=SeqID_23232
  Homolog annotation: Hit_ID=Q69HW1; Match level="QueryCoverage=45%, HitCoverage=16%, E-value=4e-07, Identity=57%"; Hit description =Syntaxin-like protein 2
MEEMQMGAVKEQEIRQSRDCLRSKADLVHAEKVEDLPLPLTDSPCKRTNMACLDSVSITSVVLAEGVCQAQRFALRIGDMQAVECVMDDRHLHLHRFRLLEELALALICDVADV

SEQ ID NO: 65012 - protein, 182 aa, Zea mays
  Coding DNA Sequence Number=SeqID_23233
  Gene Ontology: Cellular component=nucleus
MSAKQLCDALAAVGFDAGDDPLDADSLEWAFLQGEDSRRMLAWVCARLRPGNVLSATDLELYEQLEMEGKLLKGEDLDFAFDRISAFSDNMENQEYIFLTEESLEDICESKLALRAEVSDLERQLASLEWRLDILTAQATTINQGKKSRSSANTRANGQLTGLDKMFAKRSLEGYAGSMSGR

SEQ ID NO: 65013 - protein, 154 aa, Zea mays
  Coding DNA Sequence Number=SeqID_23234
MDNYTAEMMKVLHIAFRPGGGPATAQSGRTAMKLLRRAIQVALVVVLGRHDHDLPSPGSRKTQAQAPKGWMMTAPSTHVAAQLFPPSDLPGQRSGARVIPRCRKAKEKRDLQQGLMPPNGWFGEARAGACSGARIGRRWLRRGRTTGHIGPTWR

SEQ ID NO: 65014 - protein, 180 aa, Zea mays
  Coding DNA Sequence Number=SeqID_23235
  Gene Ontology: Mol. function=protein serine/threonine kinase activity; Cellular component=integral to membrane; Biological process=multicellular organismal development
  Homolog annotation: Hit_ID=Q9SYQ8; Match level="QueryCoverage=59%, HitCoverage=10%, E-value=2e-15, Identity=43%"; Hit description =Receptor protein kinase CLAVATA1 precursor
  Pfam annotation: Domain name=LRR_1; Domain location=22-44; Score=7.0; E_value=14; Accession=PF00560.23; Description=Leucine Rich Repeat
  Pfam annotation: Domain name=LRR_1; Domain location=72-94; Score =17.3; E_value=0.054; Accession=PF00560.23; Description=Leucine Rich Repeat
  Pfam annotation: Domain name=LRR_1; Domain location=96-119; Score =0.1; E_value=2.7e+02; Accession=PF00560.23; Description=Leucine Rich Repeat
  Pfam module annotation: Pfam domain module=LRR_1::LRR_1::LRR_1; Domain location=22-44::72-94::96-119
  Subcellular localization annotation: CTP_CleavageSite=49; ConfidenceScore=5.00e-01
MHVSYYNQYSSRIPPKFGTLQSLIRLDMNSCTLTGPIPWSSHDSPTSTCSSLAPQYRQLTRKIPPELDALASLQSLDLSINNLNGEIPTSFAGLNNLTLLNLFRSQLQARYRTWSLPVPRGAADSRTAWGRHISCGGASLVAACDRRQALAEGTLASGSPFLVMFSHRWEHKGKNESVFS

SEQ ID NO: 65015 - protein, 126 aa, Zea mays
  Coding DNA Sequence Number=SeqID_23236
MVLANSLKFVDSKAVEMDAILDEDEGFLEIVEAEKKVEAKKTTSTFPPGTVSANVPVYHVDLAPITLETGQDCWNYLDASSSEYKATSMVILLLHIDVLSCSLEVRTDSLRAPFANICTYRLLYNT

SEQ ID NO: 65016 - protein, 100 aa, Zea mays
  Coding DNA Sequence Number=SeqID_23237
MDPFPGNEGQREDARKAVEVDVRGWTGVAESACDGGGGGDRQIQVHIASPPGTTTCAMEESLPQQMRSRWKRRNTTDGVVGWWLLGKRRLDLTGVGICPW

SEQ ID NO: 65017 - protein, 250 aa, Zea mays
  Coding DNA Sequence Number=SeqID_23238
  Gene Ontology: Mol. function=electron carrier activity; Cellular component=extracellular region; Biological process=response to biotic stimulus
  Homolog annotation: Hit_ID=Q41495; Match level="QueryCoverage=54%, HitCoverage=64%, E-value=2e-29, Identity=45%"; Hit description=STS14 protein precursor
  Pfam annotation: Domain name=SCP; Domain location=118-238; Score =71.8; E_value=2.1e-18; Accession=PF00188.16; Description=SCP-like extracellular protein
MEIGTDTRQQPLDLARSRVPVQVARSMDGSEPTGQPEPAPNHQLQISMAHSRSHHHLLLLPAPMATACLLLATLLALCAAPAPTHGARVLMPGGAGAVTKAQQGGTGSGSNATADEYLAPHNQARAAVGVAPLRWNAGLASAAAGTVAQQRRQGGCAFADVGASPYGANQGWASYRARPAEVVALWVAEGRYYTHANNTCAAGRQCGTYTQVVWRNTAEVGCAQASCATGATLTLCLYNPHGNVQGQSPY

SEQ ID NO: 65018 - protein, 131 aa, Zea mays
  Coding DNA Sequence Number=SeqID_23239
  Homolog annotation: Hit_ID=Q8SA97; Match level="QueryCoverage=55%, HitCoverage=10%, E-value=2e-08, Identity=66%"; Hit description =Ornithine carbamoyltransferase
  Subcellular localization annotation: CTP_CleavageSite=48; ConfidenceScore=5.16e-01
MALTNFIVTVAVVGAGVLLFTTDIRRSGALFRRNARQLQQWLQEDTTSAASKARTRAQPRKTANSAPPDPGLGLGLRPGRRRTPLRPTQGSDSGSAPEDGDSAPPDPGLGLVLIPGRRRTPLRPTKGSDSG

SEQ ID NO: 65019 - protein, 133 aa, Zea mays
  Coding DNA Sequence Number=SeqID_23240
MAMGLTRAVRLPVDQVVASPRVEQAGAWEAGTAGSPRAVSSSRLLTLSNYPSRQTYFVSAELRSTTWYEYGLKTSNDTNVLCMDRDTLLPADYLMTGLCRRTYSGRRNYCIDNKSVAKSLYGDRLFVVVLCVR

SEQ ID NO: 65020 - protein, 211 aa, Zea mays
  Coding DNA Sequence Number=SeqID_23241
  Homolog annotation: Hit_ID=Q6AVI1; Match level="QueryCoverage=93%, HitCoverage=87%, E-value=1e-52, Identity=62%"; Hit description =Expressed protein
  Pfam annotation: Domain name=SSXT; Domain location=6-70; Score=28.8; E_value=1.1e-06; Accession=PF05030.3; Description=SSXT protein (N -terminal region)
MSWPCRMPMFACSRYLDENKQLILAILDNQNNGKAEECERHQAKLQHNLMYLAAIADSQPPQTAPLSQYPSNLMMQPGPRYMPPQSGQMMNPQSLMAARSSMMYAHPSLSPLLQQQAAHGQLGMAPGGGGGGTTSGFSILHGEASMGGGGAGAGAGNNMMNAGMFSGFGRSGSGAKEGSTSLSVDVRGGTSSGAQSGDGEYLKVGTEEEGS

SEQ ID NO: 65021 - protein, 59 aa, Zea mays
  Coding DNA Sequence Number=SeqID_23242
MVALELRMARWRLEKGGELNPGKSGFHRGSDSGDRRACNRVKSFNQGSICKNIKTIQLV

SEQ ID NO: 65022 - protein, 137 aa, Zea mays
  Coding DNA Sequence Number=SeqID_23243
  Homolog annotation: Hit_ID=Q7XBD3; Match level="QueryCoverage=99%, HitCoverage=27%, E-value=5e-55, Identity=75%"; Hit description=Zeon1 gag protein
MEIIHQQVQRKKEKMARLADLQRKIHEATEEVRHLVQDEQDRRPQHRELHQEGLFNEDGWYDDFNHDTFTFDDASPLAAELQATAWPPSYKPPQLPMYDGHSDPKQFLMSYEVTISSYGGNTAVMAKSFVMAVRNVA

SEQ ID NO: 65023 - protein, 59 aa, Zea mays
  Coding DNA Sequence Number=SeqID_23244
MVALELMMARWRLEKGGELNPGKSGFHRGSDSGDRRACNRHRAQPVRDYKYAPYESLQH

SEQ ID NO: 65024 - protein, 69 aa, Zea mays
  Coding DNA Sequence Number=SeqID_23245
MVLVLNWINHKLKDIIQLKSLRNRDEAVHNMKSMVGTKVEPVPKLCARKLRLSSRKGTDLKRKRLFSPG

SEQ ID NO: 65025 - protein, 882 aa, Zea mays
  Coding DNA Sequence Number=SeqID_23246
  Gene Ontology: Mol. function=magnesium ion binding; Cellular component=chloroplast; Biological process=metabolic process
  Homolog annotation: Hit_ID=Q672R4; Match level="QueryCoverage=87%, HitCoverage=92%, E-value=0.0, Identity=89%"; Hit description=Ent -copalyl diphosphate synthase
  Pfam annotation: Domain name=Terpene_synth; Domain location=237-490; Score=333.9; E_value=2.7e-97; Accession=PF01397.11; Description =Terpene synthase, N-terminal domain
  Pfam annotation: Domain name=Terpene_synth_C; Domain location=507 -762; Score=67.4; E_value=4.5e-17; Accession=PF03936.6; Description =Terpene synthase family, metal binding domain
  Pfam module annotation: Pfam domain module=Terpene_synth::Terpene _synth_C; Domain location=237-490::507-762
  Subcellular localization annotation: CTP_CleavageSite=38; ConfidenceScore=5.28e-01
MGLQSSPMLLPAPTATAAGGGSQWRTAVAGSSLTPIVRTDAESRRTRWPTDDDDAEPLVDEIRAMLTSMSDGDISVSAYDTAWVGLVPRLDGGEGPQFPAAVRWIRNNQLPDGSWGDAALFSAYDRLINTLACVVTLTRWSLEPEMRGRGLSFLGRNMWKLATEDEESMPIGFELAFPSLIELAKSLGVHDFPYDHQALQAIYSSREIKVKRIPKEVMHTVPTSILHSLEGMPGLDWARLLKLQSSDGSFLFSPAATAYALMNTGDDRCFSYIDRTVKKFNGGALPTACAFLLVSSTVRLLSPFLAVPNVYPVDLFEHIWAVDRLERLGISRYFQKEIEQCMDYVNRHWTEDGICWARNSDVKEVDDTAMAFRLLRLHGYSVSPDVFKNFEKDGEFFAFVGQSNQAVTGMYNLNRASQISFPGEDVLHRAGPFSYEFLRRKQAEGALRDKWIISKDLPGEVVYTLDFPWYGNLPRVEARDYLEQYGGGDDVWIGKTLYRMPLVNNDVYLELARMDFNHCQALHQLEWQGLKKWYTENRLMDFGVAQEDALRAYFLAAASVYEPCRAAERLAWARAAILANAVSTHLRNSPSFRERLEHSLRCRPSEETDGSWFNSSSGSDAVLVKAVLRLTDSLAREAQPIHGGDPEDIHKLLRSAWAEWVREKADAADSVCNGSSAVEQEGSRMVHDKQTCLLLARMIEISAGRAAGEAASEDGDRRIIQLTGSICDSLKQKMLVSQDPEKNEEMMSHVDDELKLRIREFVQYLLRLGEKKTGSSETRQTFLSIVKSCYYAAHCPPHVDQARPGLSLFWRLKTVRPDFLLQKQPSSDREDQENRGNSEVSESTTHKDLRLLNDNGSKSYVWRCGYKPSSFAYLPEALQYSG

SEQ ID NO: 65026 - protein, 68 aa, Zea mays
  Coding DNA Sequence Number=SeqID_23247
MKDEVWSPSVNWIRACWKPGTRDWICTCRIGSLEWSSGLWKPGFQNKIKNSRTAAEQSKEAETRNILT

SEQ ID NO: 65027 - protein, 267 aa, Zea mays
  Coding DNA Sequence Number=SeqID_23248
  Gene Ontology: Mol. function=DNA binding; Cellular component =mitochondrion; Biological process=DNA integration
  Homolog annotation: Hit_ID=Q2R3U8; Match level="QueryCoverage=99%, HitCoverage=27%, E-value=4e-79, Identity=55%"; Hit description =Retrotransposon protein, putative, unclassified
MKNTHIPNGDTLADKVEVKLDMLRALVPYELGGELTKPCCLGYAVSHNMVLSLGVGAGDDWLLLQGPRDKIVAEEHDETGGGPTCVRIAGPVGVDVDGEVVGRRSSKEPEVGSATEVPQDPLHSSEMWLPRGVHMVGHMLDDVCDVGLGEDEPPGAIVGGLALSVHRSRARLTVSHASALEDVDDVLVLVEKQALGPTLHGDPQEVAQLTQVLHRELLLEGGDDVPQEFVRGGRGDDVIDIEEEVRRVQATIEVEQGGVCLGLEEAS

SEQ ID NO: 65028 - protein, 1256 aa, Zea mays
  Coding DNA Sequence Number=SeqID_23249
  Gene Ontology: Mol. function=hydrolase activity; Cellular component =cytosol; Biological process=electron transport
  Homolog annotation: Hit_ID=Q8LHD1; Match level="QueryCoverage=99%, HitCoverage=99%, E-value=0.0, Identity=88%"; Hit description =Putative 5-oxoprolinase
  Pfam annotation: Domain name=Hydant_A_N; Domain location=10-214; Score=321.6; E_value=1.4e-93; Accession=PF05378.3; Description =Hydantoinaseoxoprolinase N-terminal region
  Pfam annotation: Domain name=Hydantoinase_A; Domain location=233-533; Score=469.4; E_value=4.5e-138; Accession=PF01968.8; Description =Hydantoinaseoxoprolinase
  Pfam annotation: Domain name=Hydantoinase_B; Domain location=731 -1254; Score=837.8; E_value=5.5e-249; Accession=PF02538.5; Description=Hydantoinase Boxoprolinase
  Pfam module annotation: Pfam domain module=Hydant_A_N::Hydantoinase _A::Hydantoinase_B; Domain location=10-214::233-533::731-1254
MGSSTAEKFRFCIDRGGTFTDIYAEVPGRREGYVMKLLSVDPSNYDDAPIEGIRRILEEFSGERIPRSAKIPTGRIEWIRMGTTVATNALLERKGERIALCVTRGFRDLLQIGNQARPNIFDLKVSKPSNLYEEVIEVDERVELVRDGDRDESSVEGISGELVRVSKPVDVQALKPLLKGLLDKGIRCLAVVLMHSYTYPHHELLVEKLALGMGFKHVSLSSSLTPMVRAVPRGLTASVDAYLTPVIKEYLSGFMSRYEGGSEQVNVLFMQSDGGLAPERRFSGHKAVLSGPAGGVVGYSQTLFGLETSKPLIGFDMGGTSTDVSRYDGSYEQVLETQIAGAIIQAPQLDINTVAAGGGSKLKFQFGAFKVGPESVGAHPGPVCYRKGGELAITDANLILGTVIPEYFPSIFGPNEDMPLDYEATRKAFENLALEINSHRKSQDPSAKDMTIEEVALGFVNVANETMCRPIRQLTEMKGHDTKNHALACFGGAGPQHACAMARSLGMSEVLVHRYCGILSAYGMGLADVIEDLQEPYSAVYNTDSSAEASRREALLVKHVKEKLREQGFGEESIRTDSYLNLRYEGTDTAIMVRQPEQGSGNDYADEFEKLFQQEYGFKLLNRKILICDVRVQGVGTTNILQPRELTQISTKPVQESSCRIYFSSGWQDTPLYKLENLGYGHLLEGPAVIMNGNSTVIIEKDCKAIITKYGNIKIDINAAPSTVSISEKVADVVQLSIFNHRFMGIAEQMGRTLQRTSISTNIKERLDFSCALFGPDGGLVANAPHVPVHLGAMSSTVCWQLNFWGENLNEGDVLVTNHPCSGGSHLPDITVVTPVFDHGKLVFFVASRGHHAEIGGITPGSMPPFSKCIWEEGAAIRAFKLVERGVFQEKGIIQLLQSPCSDELAGYKIPGTRRIQDNLSDLRAQVAANQRGIALIKELINQYGLITVQSYMNHVQKNAEVAVREMLKTVASRVAKENGSCVVEDEDYMDDGSVIHLKLTLDAIKGEATIDFEGTSPEVYGNWNAPEAVTTAAVIYCLRCLVDVDIPLNQGCLAPVKILIPKGSFLSPSDKAAVVGGNVLTSQRVTDVILMAFQACACSQGCMNNLTFGDDTFGYYETIGGGCGAGPTWDGTSGVQCHMTNTRMTDPEIFEQRYPALLHTFSIRENSGGSGLHRGGDGLVREIEFRRPIVVSVLSERRVHAPRGLKGGRDGDRGANYLVREDGRKIYLGGKNTVTVSAGDILQIFTPGGGGFGCP

SEQ ID NO: 65029 - protein, 83 aa, Zea mays
  Coding DNA Sequence Number=SeqID_23250
MASKMNRVCTEGFALGAVVVAAEDRSSDTTCDARGRRHVAVDVRITGDSQRYRRRKNYLSSRLHGPHTLTHHPAHTAQHLTEC

SEQ ID NO: 65030 - protein, 101 aa, Zea mays
  Coding DNA Sequence Number=SeqID_23251
  Homolog annotation: Hit_ID=Q337A7; Match level="QueryCoverage=24%, HitCoverage=5%, E-value=2e-08, Identity=100%"; Hit description=HIT zinc finger family protein, expressed
  Pfam annotation: Domain name=zf-HIT; Domain location=30-60; Score =54.6; E_value=3.3e-13; Accession=PF04438.6; Description=HIT zinc finger
  Subcellular localization annotation: CTP_CleavageSite=48; ConfidenceScore=5.18e-01
MERDVVLSAPEAAGSSSSPASSSYSSFAETRVICRVCQKQFAQYTCPRCNARYCSLSCYKLLDKKSSDSCSKCVTIHDINYDLPLNHANHMRIVHFGLYIW

SEQ ID NO: 65031 - protein, 412 aa, Zea mays
  Coding DNA Sequence Number=SeqID_23252
  Homolog annotation: Hit_ID=Q5DJU1; Match level="QueryCoverage=98%, HitCoverage=98%, E-value=2e-53, Identity=50%"; Hit description=Fas -associated factor 1-like protein
  Pfam annotation: Domain name=UBX; Domain location=329-410; Score =86.5; E_value=8.3e-23; Accession=PF00789.11; Description=UBX domain
MAETVDDKVSYFQAVTGISNTDLCTEILAAHNWDLQLAVSTITANPSSPSASASTSSRDPAPSAPLAVDAEYVAPPPPLPLPLPPQQQPGIAWKLVTLPFHVVSGGVGLVAGTFRLGAWVAGGVLSRSLSLLGLAGQAGSGDRLLELPPSAAEAADFVAEFEREFGAGRGPRFVAEGFADALKRAQREFKLLFVYLHSPDHPDTPAFCGGCLCAEPVAAFIDENFVAWGGSIRRTEGFKMSNSLNASRFPFCAVVMASTNQRIVLLQQARERERLEELKRREREAAEAEKKRKEEEEAVARASQEAAEKEAALARRRQEKAMALGAEPEKGPGVTRVLIRFPTGERRERRFYSSATVASLYDYVDSLDCMKAEKYTLVSNFPRVTYGPEKQSLTLEEAGLHLQASLFIEIEQ

SEQ ID NO: 65032 - protein, 952 aa, Zea mays
  Coding DNA Sequence Number=SeqID_23253
  Gene Ontology: Cellular component=intracellular
  Homolog annotation: Hit_ID=Q1RWU7; Match level="QueryCoverage=30%, HitCoverage=52%, E-value=1e-50, Identity=41%"; Hit description=BRCT
  Pfam annotation: Domain name=BRCT; Domain location=793-869; Score =18.1; E_value=0.032; Accession=PF00533.16; Description=BRCA1 C Terminus (BRCT) domain
MRGEAGNDGGGGDTQLLDGATPRLGSPSSDDDGTQSEAYDWALYDETQPLDGAETQFVDQVEEEGVAGDWTETQLESGDEDGGSGNEDGGDDSDQVKTQQQVEDGERGNDGGGGDDNAGNWTKTQLDEVCEVYGANNFVGDMVEAQLVEESEEEDDDKDGLTDDGEHDLGEWGKTQLVEDSDEDIGDDELSDGTVVLSDNESLSEDERGTKSGTDKRDAKLGMEGSIEGLNGGIKKHDDNNNSVDSDASTDEEGDTSSGHLQMKLPSVHVASVRTCGISEPRNSLSVNCMKQWKQKAWVNTIHPLPKIVDESTSCSTSVGWVDNDSHGYVQNHDQDGAKSRDKCSTAKKLFADTTVEDGENNSRCIAGLSYVGSQEPGDLSQANAFDVVDRLISINGGLSSQETTPNKLEIAKPCVSSKRGTLMLAEKVDLGRSSNGKAEIFKFVDSLEDEGGESKRPSENRTKKNLLKVLDDLSNDKSLEEQEKADVVLNDVGPDTQMAVEAMDALVQCSPAKSLSSEHQSVLNRDMIAEKSRIAKSHSKNGSPQRASNIQEGVTTRSKKGKVTDFSAKPQKERLRGSKMQQSSESIVKVKHKQTKSVPEKSKVSKKFISENKYHETPVAHRTRHCGRNDPSAFIELSNKHLRRELARPCKKRRIFIRSVSDLLKYAKREPSHGKSASMLSSIIEKSLAAYPVLNSSIRDDRKTSDVISSAQRLKESSHIENTSKSPKTNPQVLDSAMKTPSKVVNELSPTFSPVNPSKGSSRSLLKASVARELLKLDPENVLSNQQKKDSRRGKDKANASILFSQHLDDDVIKRQKKILARLGVCEAFSMADATHFVADRFCRTKNMLQAITMGKPVVTSMWLENCAQAGCFIDERKYIMRDEKKEKEIGFSMLISLASACKHPLLLGKRVFVTSNVKPSQVVMTSLVKSSSGQETVRGSLLVNMSRTMI

SEQ ID NO: 65033 - protein, 288 aa, Zea mays
  Coding DNA Sequence Number=SeqID_23254
MADWPGESIGRGRRRRESMREGVDAHHADVLCSTTARSDCEGEFAETSASGCRARASSLVGRSATAPRCHASPPALAGRAGAGVAQPRELAGAAIEQTRWCGGGSFLGRGDCCLRAVLREAKRMGAKEHASWGSRERRQEREMAGGSHGSGGIGKPPTRTAGTTERSHGARNRAGRAAHACMGRPGHSDARHGGGGSWRARTHERGERAGARRAGPRNGLRAGGTRAGLGRWARMRGRGGGPGGPRMPGGPWGGGWAWGEQARSGRWAAREAGRGRWLLWRTDIPRVH

SEQ ID NO: 65034 - protein, 164 aa, Zea mays
  Coding DNA Sequence Number=SeqID_23255
MRPRLRRGEGAQEQAKASARRGGAGSERGGRDGAVEATEAGGRGTPNVAAWESSAAVAAQAATCTIAARSSSNLASEQARSGHGTERTSSGARSSYLYRVPPQEGERTADEGRSAAVQGWGGGRLAGLGWLGADGWRGAAPGGKDEPLGAAVRKPGLGQRWGGG

SEQ ID NO: 65035 - protein, 120 aa, Zea mays
  Coding DNA Sequence Number=SeqID_23256
MAHRTVRCARDTVRCTRAVQLQTSHSWEFEHVLRYNSPDCPVSQRSNDSLAPTVDCADGNSGEQCHAKVRAAMSEGTGLSGVAPDYPVQLKDKSSNGRPAPNPNGYADVARTRQCTVAVR

SEQ ID NO: 65036 - protein, 59 aa, Zea mays
  Coding DNA Sequence Number=SeqID_23257
MRRDDEGTDTGTYGDIMKLGNEIRCSSYPEMKPQRWEKLPMSECTEKGNRELMFDPFFA

SEQ ID NO: 65037 - protein, 424 aa, Zea mays
  Coding DNA Sequence Number=SeqID_23258
  Gene Ontology: Mol. function=DNA binding; Cellular component=nucleus
  Homolog annotation: Hit_ID=UPI00000529F6; Match level="QueryCoverage =33%, HitCoverage=11%, E-value=3e-43, Identity=62%"; Hit description =transcription factor
  Pfam annotation: Domain name=FYRC; Domain location=298-390; Score =43.0; E_value=1e-09; Accession=PF05965.4; Description=FY rich C -terminus
  Pfam annotation: Domain name=FYRN; Domain location=243-295; Score =60.9; E_value=4.2e-15; Accession=PF05964.4; Description=FY-rich N -terminus
  Pfam module annotation: Pfam domain module=FYRC::FYRN; Domain location=298-390::243-295
  Subcellular localization annotation: CTP_CleavageSite=61; ConfidenceScore=5.45e-01
MKTEVSCTLNNSVSPEGHKSSLSLPVPSGQSLSSNLATRSLSTAGESVKNAYDLVVFKGSRESSRAGDCISSLGVHHNIPPIMIDQGSNMNPSMESSNNSHRLMASNTNATKFYSYKDQMHVTPESQASAASSQPFAGTVLRAQSVSQEASPSVFTSKPLIDSSLLKNTYVGLSSGGAHIGHPNFGNQQPSDECLQRKSESLSGSEAKGHSAALVQPALGNHHNGSGGAHKGLRMANVVHRFKSLVESLEIGVVLSGRLWSSSQAIFPKGFRSRVKYFSIVDPTQMAYYISEILDAGPQGPLFMVTLENCPGELFINVSPAKCWSMVRERLNMEIRRQLSTGRANLPALQPPGSVDGFEMFRLLSPAIVQAQGPLHALRGLFQRANRNELLALRSLLVSNISPDDFSRRQATQILDEEIAKQWR

SEQ ID NO: 65038 - protein, 905 aa, Zea mays
  Coding DNA Sequence Number=SeqID_23259
  Gene Ontology: Mol. function=DNA binding; Cellular component=nucleus; Biological process=regulation of transcription
  Homolog annotation: Hit_ID=UPI00000529F6; Match level="QueryCoverage =97%, HitCoverage=70%, E-value=1e-154, Identity=62%"; Hit description= transcription factor
  Pfam annotation: Domain name=FYRC; Domain location=747-842; Score =82.3; E_value=1.5e-21; Accession=PF05965.4; Description=FY rich C -terminus
  Pfam annotation: Domain name=FYRN; Domain location=692-744; Score =60.9; E_value=4.2e-15; Accession=PF05964.4; Description=FY-rich N -terminus
  Pfam annotation: Domain name=JmjC; Domain location=63-179; Score =230.9; E_value=2.9e-66; Accession=PF02373.13; Description=JmjC domain
  Pfam annotation: Domain name=zf-C5HC2; Domain location=285-338; Score= 73.4; E_value=7.2e-19; Accession=PF02928.6; Description=C5HC2 zinc finger
  Pfam module annotation: Pfam domain module=FYRC::FYRN::JmjC::zf -C5HC2; Domain location=747-842::692-744::63-179::285-338
VVYGADLETGTFGSGFPKSSPEVKSDVEHKYLESGWNLNNLPRLQGSVLSFEGGDISGVLVPWLYVGMCFSSFCWHVEDHHLYSLNYMHWGAPKMWYGVPGKDAVNLEAAMRKHLPDLFEEQPDLLHNLVTQFSTSLLKSEGVPVYRCVQHEGEFVLTFPRAYHAGFNCGFNCAEAVNVAPIDWLPIGQDAVELYRKQARKITVSHDKLLLGAAREAIRAHWDILFLKRNTADNLRWKSMCGLDSTICKSLKARIDLELAQRQNICSPSQSRKMDAEFDSTDRECALCYYDLHLSASGCPCCPGKYTCLVHAKQLCSCDWDKRFFLFRYDINELNMLADALGGKLSAIHRWGVSHLGLSLRSCVKREKDQDSKTPRRVTDGPRRSYMSQASTVSLAPSLVCNEQNNNGNKMLDKVSLETDTCPFTEQIKSGTISLQEAHMKTEVSCTLNSSVIPEGHKSSLSLPVPSGHSLSSNFATRSLSTAGESVKNTYDLVVFKGSRESSRAGDCISSPGVHHNIPPIMIDQGSNMNPSMESSNNSHRLTASNTNATQFYSYKDQMHVTPETRASVMTEKDSSQASAASSQPFAGTVLRAQSVSQEASPSVFTSKPLIDSSLVKNTYVGLSSGGAHIGHPNFGNQQPSDECLKRKSESLSGSEARGHSAALVQPALGNHNGSGGAHNGLRMANVVHRFKSLVESLEIGVVLSGRLWSSSQAIFPKGFRSRVKYFSIVDPTQMAYYISEILDAGPQGPLFMVTLENCPGELFINVSPAKCWSMVRERLNMEIRRQLSTGRANLPALQPPGSVDGFEMFGLLSPAIVQAIEARDRDRICTEYWRSRPHVVTEDRATAPPQAQGPLHALRGLFQRANRNELLALRSLLVSNISPDDFSRRQATQILDEEIAKQWR

SEQ ID NO: 65039 - protein, 664 aa, Zea mays
  Coding DNA Sequence Number=SeqID_23260
  Gene Ontology: Mol. function=DNA binding; Cellular component=nucleus
  Homolog annotation: Hit_ID=UPI00000529F6; Match level="QueryCoverage =64%, HitCoverage=38%, E-value=2e-78, Identity=40%"; Hit description =transcription factor
  Pfam annotation: Domain name=JmjN; Domain location=291-335; Score =96.4; E_value=8.6e-26; Accession=PF02375.7; Description=jmjN domain
MRCALCAVPRQMRATVRGRLSTPLTWRHVALPLGLFASRADWAGYCEERKGLVWAGYSRPSGPSIYVTDTSRFPSSRGRFCSVPPLLYSSTLPSRGGVDGMELGEPGARGCRGPVRLLGSLGLLIKASSSDAAMMGTECIMATLGGDPEPSIPPGFGPFVALALQGIQNNAKSADAHSSSAQAAHCMEKDVEVLEHGSAHGWSDTPASTSGTHSCRRSLRNRPPIDYSQFDLISDEESDVESAEKGVGLVRRRRQLPKGVLRGCAQCADCQKVVARWNPSGARRPVLEEAPVFYPSEEEFKDTLKYIESIRSTAEPYGICRIVPPPSWKPPCLLKEKNIWECSKFCTRVQKVDKLQNRKSSKKGRRGGMMKKRRKLLELEDNNNINHNQTGVQQNQERFGFEPGPEFTLQTFKKYADDFREQYFKKEVPADSPPSVEDIEGEYWRIVEKPTEEIEVVYGADLETGTFGSGFPKSSPEVKSDVEHKYLESGWNLNNLPRLQGSVLSFEGGDISGKDAVNLEAAMRKHLPDLFEEQPDLLHNLPAATGRTITSPIRISRSHQPPHSRAHSSLQAAAAAAPTLLRRPSDAARPASACRCSRPPPLQAAALQAVLQPRLRASVCRRSRPSSLLRRPSGAASPASAVPLRQDYRVQRLTVPLSAGVCST

SEQ ID NO: 65040 - protein, 771 aa, Zea mays
  Coding DNA Sequence Number=SeqID_23261
  Gene Ontology: Mol. function=DNA binding; Cellular component=nucleus; Biological process=regulation of transcription
  Homolog annotation: Hit_ID=UPI00000529F6; Match level="QueryCoverage =90%, HitCoverage=58%, E-value=0.0, Identity=52%"; Hit description =transcription factor
  Pfam annotation: Domain name=JmjC; Domain location=385-501; Score =230.9; E_value=2.9e-66; Accession=PF02373.13; Description=JmjC domain
  Pfam annotation: Domain name=JmjN; Domain location=158-202; Score =96.4; E_value=8.6e-26; Accession=PF02375.7; Description=jmjN domain
  Pfam annotation: Domain name=zf-C5HC2; Domain location=607-660; Score= 73.4; E_value=7.2e-19; Accession=PF02928.6; Description=C5HC2 zinc finger
  Pfam module annotation: Pfam domain module=JmjC::JmjN::zf-C5HC2; Domain location=385-501::158-202::607-660
MMGTECIMATLGGDPEPSIPPGFGPFVALALQGIQNNAKSADAHSSSAQAAHCMEKDVEVLEHGSAHGWSDTPASTSGTHSCRRSLRNRPPIDYSQFDLISDEESDVESAEKGVGLVRRRRQLPKGVLRGCAQCADCQKVVARWNPSGARRPVLEEAPVFYPSEEEFKDTLKYIESIRSTAEPYGICRIVPPPSWKPPCLLKEKNIWECSKFCTRVQKVDKLQNRKSSKKGRRGGMMKKRRKLLELEDNNNINHNQTGVQQNQERFGFEPGPEFTLQTFKKYADDFREQYFKKEVSADSPPSVEDIEGEYWRIVEKPTEEIEVVYGADLETGTFGSGFPKSSPEVKSDVEHKYLESGWNLNNLPRLQGSVLSFEGGDISGVLVPWLYVGMCFSSFCWHVEDHHLYSLNYMHWGAPKMWYGVPGKDAVNLEAAMRKHLPDLFEEQPDLLHNLVTQFSTSLLKSEGVPVYRCVQHEGEFVLTFPRAYHAGFNCGFNCAEAVNVAPIDWLPIGQDAVELYRKQARKITVSHDKLLLGAAREAIRAHWDILFLKKNTADNLRWKSMCGLDSTICKSLKARIDLELAQRQNICSPSQSRKMDAEFDSTDRECALCYYDLHLSASGCPCCPGKYTCLVHAKQLCSCDWDKRFFLFRYDINELNMLADALGGKLSAIHRWGVSHLGLSLRSCVKREKDQDSKTPRRVTDGPRRSYMSQASTVSLAPSLVCNEQNNNGNKMLEKASLETDTCPFAEQIKSGTISLQEAPWLLKRRLNDD

SEQ ID NO: 65041 - protein, 113 aa, Zea mays
  Coding DNA Sequence Number=SeqID_23262
MKVSQVVIEMTLGLKVDDARIEEHEDKVMIGLYGHACTVEVIRVFIPLVYATIVITSNAAIAFRVAIVIINSCKVVVTVGVGPFTIMHLRETSCDDQVAVSKRRHVLDILHSM

SEQ ID NO: 65042 - protein, 90 aa, Zea mays
  Coding DNA Sequence Number=SeqID_23263
  Subcellular localization annotation: CTP_CleavageSite=52; ConfidenceScore=5.31e-01
MCRETLLLLPLAAPPAHFFLSQFLQPPNPSPPSIPSSQGANPCRSDHRLVVRISNRFGGGKKGGRKGGEPKVVDFRIVLRDFCPNFGEGK

SEQ ID NO: 65043 - protein, 408 aa, Zea mays
  Coding DNA Sequence Number=SeqID_23264
  Gene Ontology: Mol. function=protein kinase activity; Cellular component=integral to membrane; Biological process=protein amino acid phosphorylation
  Homolog annotation: Hit_ID=Q7F8Q8; Match level="QueryCoverage=77%, HitCoverage=51%, E-value=4e-68, Identity=63%"; Hit description =Putative leucine-rich repeat transmembrane protein kinase 2
  Pfam annotation: Domain name=LRR_1; Domain location=106-125; Score =12.8; E_value=1.1; Accession=PF00560.23; Description=Leucine Rich Repeat
  Pfam annotation: Domain name=LRR_1; Domain location=128-150; Score =13.2; E_value=0.95; Accession=PF00560.23; Description=Leucine Rich Repeat
  Pfam annotation: Domain name=LRR_1; Domain location=152-174; Score =11.1; E_value=2.4; Accession=PF00560.23; Description=Leucine Rich Repeat
  Pfam annotation: Domain name=LRR_1; Domain location=176-197; Score =12.8; E_value=1.1; Accession=PF00560.23; Description=Leucine Rich Repeat
  Pfam annotation: Domain name=LRR_1; Domain location=198-220; Score =7.4; E_value=12; Accession=PF00560.23; Description=Leucine Rich Repeat
  Pfam module annotation: Pfam domain module=LRR_1::LRR_1::LRR_1::LRR _1::LRR_1; Domain location=106-125::128-150::152-174::176-197::198-220
MAETTQTLSLSRMASSKGRCGRDIGANERRRGQATKSGRAQQEVGDDGVECSYLVLITTGGDPCGEGGGSKHWRGVFCKGPSIVAINISGLGVGGWLGPDLLKFQSLKKLDMSFNNIAGEIPSTLPPNVEYLNFSYNKLSGVIGDVFVNMDSLETMDLSFNAFNSDLPRSFSSLTSLRYLYLQHNEFTGSVILLAGLPLSSLNIENNHFSGYVPGTFQSIPELRIDGNQFQPGFKLASSSFTRKTPAAPPQSLPPPPLQSPSPSPSPLAAQQKPKRRPKSPKPSFGPKSTSNHAKTLPANMETVPTANEVLYSWSSLLIGSDTSSSNGIPSERVPKIKSWFKASKKLLTAKQFPAADILAATKDFNEECFIGEGLTGRVYRGEFSDGQEDFYNMHFRPLIAEVCHQLC

SEQ ID NO: 65044 - protein, 214 aa, Zea mays
  Coding DNA Sequence Number=SeqID_23265
  Homolog annotation: Hit_ID=Q2QP91; Match level="QueryCoverage=46%, HitCoverage=17%, E-value=3e-33, Identity=74%"; Hit description=Dor1 -like family protein, expressed
MDLLDARHRHTPDSSSSPHAASDMGLPLAGAAYQPYVSELLSFSIERLHKEPELLRVDAERVRRQMQEVAVENYGAFIAASEALSFVRAQLENFDGHLEAMGLNLHLTLACLRRPPWPPSPQPPPHSSRKPPHPEATSGIDGLRSHARLDHVLARDDNRIAVARASGRTPPCTCSSASRRTRASEDATPTQYHHPGMQPTGTQWRHRSRAQPQH

SEQ ID NO: 65045 - protein, 103 aa, Zea mays
  Coding DNA Sequence Number=SeqID_23266
MASMLDAVIETTRALSPVPTKKIAEDAKAQAEAETGQAEAEAGPLATIVAKPAAPKEKRHCRMHLKLLHPKLQLKLLTTSFDMLRGRNCPKKKFWKPDTMRES

SEQ ID NO: 65046 - protein, 89 aa, Zea mays
  Coding DNA Sequence Number=SeqID_23267
MIVQKCLIRSTIERKVEFLGELDNVPPKSFMDLMKHKNIIKEYCNLTDGEYILVPEQGVAQKVAQDRAPEPTLEDLPAPALEGKPRFYA

SEQ ID NO: 65047 - protein, 61 aa, Zea mays
  Coding DNA Sequence Number=SeqID_23268
MGRGAAWRKLDRLLFRRDESLAIVVGRGGASREATGRVHVAPNGHRRVGLVGEGRRGCGHG

SEQ ID NO: 65048 - protein, 212 aa, Zea mays
  Coding DNA Sequence Number=SeqID_23269
MTASKKVRHVIRFRILFHFLILSLASGIGKGDTPKGILPREGSGPRAPPTDQRLAPEGFDSRLRRRARDDPGYVRYITKALATLPRKLRLARPQGSAPVSASAPEDNELRLARPQGSDSASAPEDDELRLARPQGSDSASAPEDDELRLARPQGSNSALASVDGLRLARPGARTRPQPRNTDSTSTSEEPPPRPTQGSDRPRHKGGASLPYP

SEQ ID NO: 65049 - protein, 100 aa, Zea mays
  Coding DNA Sequence Number=SeqID_23270
  Gene Ontology: Mol. function=hydrolase activity; Biological process =metabolic process
  Homolog annotation: Hit_ID=Q69Y17; Match level="QueryCoverage=78%, HitCoverage=25%, E-value=1e-24, Identity=77%"; Hit description =Putative PrMC3
MATPAAEARTAVSCAMLAPAAARQEHAGQVGVLQQPRVLAERHRPPQRRPRVVVRGGQLVLRREAVVDGHADGARAGDKVVEGKKGFVHFVVAMSADLMH

SEQ ID NO: 65050 - protein, 164 aa, Zea mays
  Coding DNA Sequence Number=SeqID_23271
MALAPGESGRYRLALARAGAPARARGGREGGEREARRWRGESAGESDVSRSDWSTCRDLIGPPSAGIEFGKPGAQYGLADHGAATTGSRGRSIAPGGAGRSVHYISKNERSGFANHIPLRLDQSEPLDGKRVALIGLGRRSYADHGSLIQWLRAYWCRKADLAC

SEQ ID NO: 65051 - protein, 57 aa, Zea mays
  Coding DNA Sequence Number=SeqID_23272
MALLDPPERLPPEVALNLVLGLMGATLFHRCLASRMFISLAVVESELGCGSVFHVSQ

SEQ ID NO: 65052 - protein, 167 aa, Zea mays
  Coding DNA Sequence Number=SeqID_23273
  Homolog annotation: Hit_ID=Q6QP54; Match level="QueryCoverage=32%, HitCoverage=19%, E-value=5e-18, Identity=87%"; Hit description =Putative kinase
  Subcellular localization annotation: CTP_CleavageSite=95; ConfidenceScore=5.46e-01
MESVGAGAGVASSSCISLTVKSGALAVGGYKRPRGRVSERPQASAYLVLVPARPTSSKRALVLPFIGVRRRSSRRDLGTQLVSGTIIRGTLKTPNSQMGSDSALASADDLRLARPRSSDLASATEDRLDLGYGGASASPNLGRRPATSTGGAIITLPRADSGHREPD

SEQ ID NO: 65053 - protein, 103 aa, Zea mays
  Coding DNA Sequence Number=SeqID_23274
MCKGKQMMKGKSTNLDDCSLQASNCKRGCALGGQPDAEVQRLPRPRERRGRGLAQVGLRSGHQGVGRRAQIGGSAPRGVGRRAQARLLEAGLGAQVTASRSAA

SEQ ID NO: 65054 - protein, 95 aa, Zea mays
  Coding DNA Sequence Number=SeqID_23275
  Subcellular localization annotation: CTP_CleavageSite=44; ConfidenceScore=5.32e-01
MAPPVNWPLSGKAQGAMAKNHQTVRSHRTVWCAIGLSGVPRGTVAATVGFAKQGRESHTVHCPVVHRTVRCAHRQKATRWNSNGSKLPWGYKRDP

SEQ ID NO: 65055 - protein, 47 aa, Zea mays
  Coding DNA Sequence Number=SeqID_23276
MQRTELSAAVADSWQFSSAQSIFQDKPTYDHVLVLTRVVVDKSCSRS

SEQ ID NO: 65056 - protein, 187 aa, Zea mays
  Coding DNA Sequence Number=SeqID_23277
MAHWRTIERTRGRKQGTPARMHIHVCPTHTLFRHTNATAGTHGHRAHTSLCFPCNPTNSANSPHVWSNYYATEKVGQGKEMAIEGTWGPPHGHERKEAWCDQGTWEAQSTGEHHEAKKTYQAQEARCMTKARRLGEQLQTEGKNCLHMLEGCSLRQGKVVYFKNYNIAADSKIVKCPYHVCRHRTAT

SEQ ID NO: 65057 - protein, 66 aa, Zea mays
  Coding DNA Sequence Number=SeqID_23278
MAFGVIMMMGSDLRRCVGGREGEMGCRHNRTGGGFTRKSEERRKRGHQILYSHYRGHVFLHVGLAS

SEQ ID NO: 65058 - protein, 49 aa, Zea mays
  Coding DNA Sequence Number=SeqID_23279
MLTHFLKNKVKVREVKLLSELKNELRISHIEHNEVLMKTILNEHVKSLR

SEQ ID NO: 65059 - protein, 150 aa, Zea mays
  Coding DNA Sequence Number=SeqID_23280
  Homolog annotation: Hit_ID=Q9LI95; Match level="QueryCoverage=74%, HitCoverage=22%, E-value=1e-41, Identity=69%"; Hit description =Arabidopsis thaliana genomic DNA, chromosome 3, P1 clone:MUO22
  Pfam annotation: Domain name=DUF1336; Domain location=6-150; Score =69.6; E_value=1e-17; Accession=PF07059.3; Description=Protein of unknown function (DUF1336)
  Subcellular localization annotation: CTP_CleavageSite=47; ConfidenceScore=5.01e-01
MDTLITKFLQSYLNKHSLEPRPVLQGVRMLRQGGFRTFQESMMRFFEDETEKVKGFTSESTVSYRDRLKIMVGLVNPDDLQLGSTERKLVQAYNEKPVLSRPQHSFYEGEDYLEVDLDIHRFSYIARKGLDSFRARLKNGILDLGLTIQA

SEQ ID NO: 65060 - protein, 74 aa, Zea mays
  Coding DNA Sequence Number=SeqID_23281
MRAPAVAFAALLMVLLMATRAHGIRLDRQLHDAINSSKEGDKLTTSEPAPSQDRSSESGDGRGVCDMGGKQCSL

SEQ ID NO: 65061 - protein, 323 aa, Zea mays
  Coding DNA Sequence Number=SeqID_23282
  Gene Ontology: Mol. function=monooxygenase activity; Cellular component=integral to membrane; Biological process=electron transport
  Homolog annotation: Hit_ID=Q0Z7U8; Match level="QueryCoverage=93%, HitCoverage=57%, E-value=5e-97, Identity=79%"; Hit description =Flavonoid 3'-hydroxylase
MDVPLPLLLGSLAVSVMVWCLVLRRGGDGKGKRPLPPGPRGWPVLGQPAAGRRQAAPHHVRAGAGVRPAVPAPVGSAEVVVAASARVAAHSCAPTTPTSATARPTPEPSTWRTTTGTWCSRPTAPRWRALRKLCALHLFSAKALDDLRGVREGEVALMVRELARPRRGEGGRAAAVALGQVANVCATNTLARATVGRRVFAVDGGEGAREFKEMVVELMQLAGVFNVGDFVPALAWLDPQGVVGRMKRLHRRYDHMMNGIIRERKAAEEGKDLLSVLLARMRDQQQQPLAEGEDNRINETDVKALLLVSLLALTTSQRANGMD

SEQ ID NO: 65062 - protein, 61 aa, Zea mays
  Coding DNA Sequence Number=SeqID_23283
MDLGGNGADSCDWCASAEPMRADMEERRPDARDPRVIHSRATTQRVLSGIRGADGARKTEI

SEQ ID NO: 65063 - protein, 63 aa, Zea mays
  Coding DNA Sequence Number=SeqID_23284
MDDEDIAEDIRFDVMTKTKYDEDRKRTKIIQSLMIRVMLVPSSFYIPIHILNDEDNASEDEGP

SEQ ID NO: 65064 - protein, 213 aa, Zea mays
  Coding DNA Sequence Number=SeqID_23285
  Subcellular localization annotation: CTP_CleavageSite=66; ConfidenceScore=5.24e-01
MTASARILLLLPRQLTTPLRLAHALAPQSRAAVRGYFSPVVLQQATHRCWSTSSSSCEQYPQAPITAAAPGAPCPRDGKGEGYGEAATATACGGEKAVSGAHQDGSDGAGAPAPPAHPQDKEAAVPLRAAPAGRKGRSGVQTPRQRGRPAKPQGNKNKKPARPGAPKQGRGGGGGIIHVVAPRRSSSSSPAASSTPPSTTRLRAATKKRESED

SEQ ID NO: 65065 - protein, 321 aa, Zea mays
  Coding DNA Sequence Number=SeqID_23286
  Gene Ontology: Mol. function=nucleoside diphosphate kinase activity; Biological process=CTP biosynthetic process
  Homolog annotation: Hit_ID=Q8LAH8; Match level="QueryCoverage=44%, HitCoverage=57%, E-value=6e-61, Identity=77%"; Hit description =Nucleoside diphosphate kinase IV, chloroplast/mitochondrial precursor
  Pfam annotation: Domain name=NDK; Domain location=185-306; Score =196.0; E_value=8.7e-56; Accession=PF00334.9; Description=Nucleoside diphosphate kinase
MEQLVGVHHHNHSLSPRAPRTPTRPLPQPQPHPLLHHLPSNRFQDLHSQIHNHIHLVVPAASRVLRATPPFFLILLASVYLLASVTIFSAPTPLLRLRLSSPRPLILPKLVSHPLAPELFDLDDGSIRVRLANVGAAITSFLIPDKNGVGSLWYLPSVCLCSTTALTLSFHDARLVFLPGVLADVVLRFDSLDPYLIKGYKLVAIKLIVPSKGFAEKHYHDLKERPFFNGLCDFLSFGPVLAMVWEGEGVIKYGRKLIGATDPQKYEPGTIRGDLGIVVGRNIIHGSDGLETAKDEIALWFEPKELVSYTSNAEKWVYGVN

SEQ ID NO: 65066 - protein, 213 aa, Zea mays
  Coding DNA Sequence Number=SeqID_23287
  Homolog annotation: Hit_ID=Q6QP54; Match level="QueryCoverage=40%, HitCoverage=44%, E-value=2e-10, Identity=63%"; Hit description =Putative kinase
MGMGRGDSEPVSGELVRLSRVQTLPLKLSAVNLNFVRILPLQSGYRERSLSIDPLKRVAGAGRGEGMGGDVEREVGDEDGLDRKAALEDDELRIARPQGSDSGSAPEDDELRFARPQGSDSGSAPEDDELRIARPQGSDSALASADGLRLARPRGSDSTSASEDRLDLDLGGASTSPNPGLGPTTSQEAPSLPYPKLTRATGNNSGVPSGSPR

SEQ ID NO: 65067 - protein, 537 aa, Zea mays
  Coding DNA Sequence Number=SeqID_23288
  Homolog annotation: Hit_ID=Q69NI4; Match level="QueryCoverage=51%, HitCoverage=41%, E-value=5e-49, Identity=71%"; Hit description =Putative nodule inception protein
MEALKIARKTTSKLPAHTLGFLPPAFPRGHSHFAHCLCAKHDTGKGVPWPDAGSKGDLNLTDECAQGHHRKAGSLSSTLSLDNGDGAGETNDAEKPVRRGGLLPRRAGQGLALRPKSGGRADTNGNQQDLLAAWVPSYGDGLRAVKRSSSAPEFQDSDSVSLASAWLKSKWNLKRDYTFTLALFDAISKPLLDSIPKPLLDNIPNTIVAWRNKASVAARSRLRLLLASCWGAGGALGACREREEERVLKGELPASAWKREETHSFRASPHAPRPKARGVDLDLLEQLLSDDNGWLEVVSRSPNSVAFPPLSAFFSADATATTVTTAATAANASWWIQTGGASPSSVEEQFSQAMSYIRDMQSDGDVLVQLWVPVNHDDGKLVLTTSEQPFTLDHRSDSLLRFREVSTKYQFSADVKSGDSPGLPGRVFISRLPECTASYKDALPEILEVLRAACLTHKLPLAQTWVTCAQQGKRGSRHSDENYRYCISTIDEACFVNEAETRGFHETCSEHHLLRGEGVAGKAFTTNQPCFLPDIGS

SEQ ID NO: 65068 - protein, 132 aa, Zea mays
  Coding DNA Sequence Number=SeqID_23289
  Gene Ontology: Mol. function=kinase activity; Cellular component =ornithine carbamoyltransferase complex; Biological process=amino acid metabolic process
  Homolog annotation: Hit_ID=Q6QP54; Match level="QueryCoverage=85%, HitCoverage=40%, E-value=3e-26, Identity=56%"; Hit description =Putative kinase
MSRAFDDYYIKDCGFILPPEVTQRRIDNSDQFVILATVGRKERIQAPPRSRSSLSCVAEVESDPLGRAKRRPSAEARAKSEPWGRAKRSSSSFGAEPKSEPWVGRSGVRRLPGLSPSPSPRSGGAEFAFFRG

SEQ ID NO: 65069 - protein, 224 aa, Zea mays
  Coding DNA Sequence Number=SeqID_23290
  Subcellular localization annotation: CTP_CleavageSite=79; ConfidenceScore=5.01e-01
ASSPGIFWPPSSSLIFLAPHALELSCGVEIFFLSTLSLSLVFFADSAHLPAEQLLCAAVFRRSLFPVILSAAVGLIPCTAQARGRESRRPVDFFSHRGIKIASSSSPSSRAPGSYSSSAPTFPARSPAFLKFVARPLYFSVADAQLLAPARVPLLSSGREQLPGAWTRLSALPAPITAAWTVIVADACTNSCCCSPNAYTDTITIPCTSTSTDDNTCSGTIPKP

SEQ ID NO: 65070 - protein, 51 aa, Zea mays
  Coding DNA Sequence Number=SeqID_23291
MAEQASRSASYHAPVKINRFDRLNQPSRSVLYGFMRQNGRYITNPDQVRRM

SEQ ID NO: 65071 - protein, 125 aa, Zea mays
  Coding DNA Sequence Number=SeqID_23292
  Gene Ontology: Mol. function=transferase activity; Cellular component= membrane
  Homolog annotation: Hit_ID=Q10SX7; Match level="QueryCoverage=78%, HitCoverage=29%, E-value=4e-39, Identity=66%"; Hit description =Exostosin family protein, putative, expressed
MARSLICLCPLGWAPWSPRLVESVLLGCIPVIIADNIRLSFPPVLQWQEISLQKNLWDPVKQRALVFNRPMEAGAATWQVLRELEVLLDQSRRRSVGSYSWRSSQHAALADNINIESRPEPEIHL

SEQ ID NO: 65072 - protein, 122 aa, Zea mays
  Coding DNA Sequence Number=SeqID_23293
  Gene Ontology: Mol. function=DNA binding; Cellular component =chromosome; Biological process=chromosome organization and biogenesis (sensu Eukaryota)
  Homolog annotation: Hit_ID=O23628; Match level="QueryCoverage=97%, HitCoverage=97%, E-value=1e-31, Identity=60%"; Hit description =Histone H2A variant 1
  Pfam annotation: Domain name=Histone; Domain location=20-93; Score =73.2; E_value=8.1e-19; Accession=PF00125.14; Description=Core histone H2AH2BH3H4
MAGKGGGKSLVAAKIAAGMDKDKKSPFPVERIHRHLKDSAQAGERVGATAAVYAAAVLKYLTAEIMELAGNACRDLKVKRITPRHLQLAVRGDEELDTLIKATIAGGGVIPHIHRELIDKAA

SEQ ID NO: 65073 - protein, 122 aa, Zea mays
  Coding DNA Sequence Number=SeqID_23294
  Gene Ontology: Mol. function=DNA binding; Cellular component =chromosome; Biological process=chromosome organization and biogenesis (sensu Eukaryota)
  Homolog annotation: Hit_ID=O23628; Match level="QueryCoverage=97%, HitCoverage=97%, E-value=5e-31, Identity=58%"; Hit description =Histone H2A variant 1
  Pfam annotation: Domain name=Histone; Domain location=20-93; Score =72.7; E_value=1.1e-18; Accession=PF00125.14; Description=Core histone H2AH2BH3H4
MAGKGGGKSLVAAKIAAGMDKDKKSPFPVGRIHRHLKDSAQVDERVGATAAVYAAAVLEYLTAEIMELAGNTCRDLKVKRITPRHLQLAVRGDEELDTLIKATIAGGGVIPHIHRELIDKAA

SEQ ID NO: 65074 - protein, 88 aa, Zea mays
  Coding DNA Sequence Number=SeqID_23295
  Subcellular localization annotation: CTP_CleavageSite=50; ConfidenceScore=5.39e-01
MEVAAATCTLLAAVALPASSSSAAARSATKQSYARRKTTPHQVPPPATATATTYRDNWFDKLAIGYLSRNLQEASGTNVDEQEAWSVE

SEQ ID NO: 65075 - protein, 269 aa, Zea mays
  Coding DNA Sequence Number=SeqID_23296
  Homolog annotation: Hit_ID=P02457; Match level="QueryCoverage=88%, HitCoverage=18%, E-value=4e-07, Identity=32%"; Hit description =Collagen alpha-1(I) chain precursor
  Subcellular localization annotation: CTP_CleavageSite=45; ConfidenceScore=5.27e-01
MALSSGSAAPARHWRGPDGQRRGAGAAFEQRRAGAAPQRARPPLRASGRPGTTRQLGRDGPTARAGGLRWRERAFRGARERGSPSGAVASGPDGSGAVPAPDLPDACVNGDTGSGGEALPPQRIGRAAHLARSGAGGPRPARARVGPCTGSGATAPGADLLARHRLRGIAHLTRGCVARRHLGAALARWLARPRGRRVGARLARSRRLPVVQRPRLGPGGSGGQAPVRAHGADVQARERASRQRIALISDGPEGGAEGRSPWAPEFIGS

SEQ ID NO: 65076 - protein, 490 aa, Zea mays
  Coding DNA Sequence Number=SeqID_23297
  Gene Ontology: Mol. function=transferase activity, transferring hexosyl groups; Cellular component=cytoplasm; Biological process =metabolic process
  Homolog annotation: Hit_ID=Q8LM13; Match level="QueryCoverage=96%, HitCoverage=97%, E-value=0.0, Identity=69%"; Hit description =Putative glucosyltransferase
  Pfam annotation: Domain name=UDPGT; Domain location=6-483; Score= -59.4; E_value=1.2e-07; Accession=PF00201.9; Description=UDP -glucoronosyl and UDP-glucosyl transferase
MAHPSPHALVIPYPAQGHVIPLLELAHALVDRGFTVTFANSEFNHRRVVAAAMPESESPTLLGRRGIRQVAVPDGMGPGEDRNDIVRLTLLTAEHMAPRVEDLIRRSRDGDGGAEGGPITCVVADYNVGAWALDVARRTGVRSAAIWPASAAVLASLLSIDKLIQDKIIDPQDGSALSQGTFQLSPDMPVMQTSHLAWNCIGNHDGQEALFRYLRAGVRAVEECDFILCNSFHDAEPATFARFPRIVPVGPLLTGERRRRGSGGKQAAAVVGHFWRPEDGACMAWLNAQAARSVVYVAFGSHTMFDARQFRELALGLELSGRPFLWVVRPDIVLGGGGIHGYPDGFLDRVSATGRGMVVAWSPQQRVLAHPAVACFVSHCGWNSTMEGVRNGVPFLAWPYFTDQFVNQAYICDVWKVGLPAEADESGVVTKEHIASRVEELMGDAGMRERVEDMKRAARGSVTRGGSSHRNFDMFVQAMKRRESIDSQNN

SEQ ID NO: 65077 - protein, 200 aa, Zea mays
  Coding DNA Sequence Number=SeqID_23298
  Subcellular localization annotation: CTP_CleavageSite=52; ConfidenceScore=5.08e-01
MPSQPISLLIPKCTSAIILRRAPPWARLTQLLARRVGRLVVAIAALAFLWCSASLSAHNTAPSTPTWQIPVRLFSKLIGHALSSPWRSGGPHHLALCHLSLSPSSLCHQRLLGASACPLHRPCPYSATALRDRAARPKTCIALVRTVVFVLNHFGTKSSLQPRHMLLFLAVRLVITLLLHPVWSDLCVSIKQAKSRNVRQ

SEQ ID NO: 65078 - protein, 177 aa, Zea mays
  Coding DNA Sequence Number=SeqID_23299
MGFPSVCYCVILPQPLILVLQLLDFLRHAVLLCLSSLGLAAPPAADDHPAYAYAAPPPPPSDLWALQPSSLQQQQQQAAAAALAPPPTPAAIKARLPAVRPAADWEAEQVTTHPKGISDRTRNHDSLEANFRHGHEANLRRETQLWLARGEPQTSGDPSECISSDALEVAQLRRLIL

SEQ ID NO: 65079 - protein, 367 aa, Zea mays
  Coding DNA Sequence Number=SeqID_23300
  Homolog annotation: Hit_ID=Q6QP51; Match level="QueryCoverage=21%, HitCoverage=27%, E-value=3e-14, Identity=56%"; Hit description =Putative growth-regulating factor 1
  Pfam annotation: Domain name=Extensin_2; Domain location=12-311; Score=-121.3; E_value=0.014; Accession=PF04554.4; Description =Extensin-like region
MTASKKVCHVIPFRILFLFLSLSLTTGTGKGGYSERDPSPPRKRARSPPTDQRFEGWPLGRVRQPPQSTRALRPLLVRGSKANPSEGFDSRLRPLGLHAHYWLAPEGFDSRLRARRARDDSGYVRYMAEVRATLPRARAHPRRRTTDSASPDPRARTQPRPRMTDSTSPDPRARTQPRPQTTDSASPDPRARTQPRPRTTDSASPDPRARTQPRPRTTDSASPDPRARTQPRPRTADSASPDPRPPGHPWPRPWPPPAQPPAAPWPQPRLASLGRALAGPGRAQPHPRPALAAPSAAPGPWPPASRPCPLRIRGVVRFAVVPSMGLGVCGSLCQGDNEIDGSDYDYGIGEDEAVEGDFQEFQDYDEF

SEQ ID NO: 65080 - protein, 272 aa, Zea mays
  Coding DNA Sequence Number=SeqID_23301
MEKIKVEAANCGFIGLLHPDVDPEFHMELLIRSFNLCSGPYQHIALRVGFDLHPPAVENVADGRAERMEKPSDPPIAPPVDDGKSVVPDENLKKRKNTETNGYLQNNLDMQPTKLPRPALPSNCVENAYDEALEVRRLQDKAADFSGESVALFMGQGKLESICTRSEMGHLILPRKRTKRVIGMRKRKGNRKINTKRRNRRKRQRRHPAKIYNIPEAPQMMELPGQEGEDCLFDKGGTQPRKPASSALESDGVSQVWAQALKIDHADGGGGG

SEQ ID NO: 65081 - protein, 81 aa, Zea mays
  Coding DNA Sequence Number=SeqID_23302
MATQPRPTQRTESQLRRASLVAEQEEPTAARWCLWNSGKSTIGSSNTSDEQLRLPQTDPTWTKELDDAYIQTPEEKEEALQ

SEQ ID NO: 65082 - protein, 136 aa, Zea mays
  Coding DNA Sequence Number=SeqID_23303
MGQVPIYGTRHEVVRTAKDLHVASKSPNHEHTDCPSEYKKKHHASAWGLHMLALDTSTQPALGVPSLHTTNSSTSSTGAEDVLAPSGCFILYMAPLRTVVTHPYATVSVRSHVTITLTMTGSNYTKWTFFFKSLCG

SEQ ID NO: 65083 - protein, 189 aa, Zea mays
  Coding DNA Sequence Number=SeqID_23304
  Subcellular localization annotation: CTP_CleavageSite=43; ConfidenceScore=5.60e-01
MKTRSPPALLTAGSSSSSIICRRAFACFSVAQERVTTLPAPVQAAAVPTPTTTRKVVEWFSSSSSKGGHALPSCGSVGPLPGQQQQPQWRGQGLLGTSPQAHLAFALAEFSILAVVQQPQFAPLPGPQAGGWNQAGLKATLNQMALQAASPWGLGFWTLPEIRSHGESNSGPEGCYSDHPTNSARGPFA

SEQ ID NO: 65084 - protein, 105 aa, Zea mays
  Coding DNA Sequence Number=SeqID_23305
MEMVMVEPWLPLLALPMEKVMAASTTVPWAQRLPMWIGLGSKEANPSLSLEDATLRTQDEGLDEISSGVDRNPSYSILDCYGLRWDWGIGEGVVVAGTPAEGLCP

SEQ ID NO: 65085 - protein, 293 aa, Zea mays
  Coding DNA Sequence Number=SeqID_23306
  Gene Ontology: Mol. function=protein kinase activity; Cellular component=cytoplasm; Biological process=protein amino acid phosphorylation
  Homolog annotation: Hit_ID=Q5QLZ5; Match level="QueryCoverage=100%, HitCoverage=39%, E-value=1e-139, Identity=77%"; Hit description =Putative kinase-like protein splice variant 1
VRHPNILSFLHSTEAEVAGWTCHQTHDLYCNRALLCPLSEKLKELNLGGTQRDEYFAWGLHQISKAVSFLNNDCKLVHGNVCLASVVVTQTLDWKLHAFDVLSEFDANNEASGSPMLQFEWLVGMQYKPMELSKSDWASIRKSPPWAIDSWGLGCLIYELFSGAKLARTEDLRNTASIPKSLLPDYQRLLNSTPTRRLNPSKLIDNSEFFQNKLVETIQFMEILNLKDTFEKDSFFRKLPNIAEQLPREIVLKKVLPTIVKLFASNDRAIRACLLHHIDQFGESMSAQTVDEQ

SEQ ID NO: 65086 - protein, 627 aa, Zea mays
  Coding DNA Sequence Number=SeqID_23307
  Gene Ontology: Mol. function=binding; Cellular component =intracellular; Biological process=metabolic process
  Homolog annotation: Hit_ID=Q8LQE8; Match level="QueryCoverage=99%, HitCoverage=100%, E-value=0.0, Identity=64%"; Hit description =Pentatricopeptide (PPR) repeat-containing protein-like
  Pfam annotation: Domain name=PPR; Domain location=126-160; Score =26.4; E_value=0.0001; Accession=PF01535.11; Description=PPR repeat
  Pfam annotation: Domain name=PPR; Domain location=227-261; Score =18.9; E_value=0.018; Accession=PF01535.11; Description=PPR repeat
  Pfam annotation: Domain name=PPR; Domain location=333-367; Score =43.0; E_value=1e-09; Accession=PF01535.11; Description=PPR repeat
  Pfam annotation: Domain name=PPR; Domain location=368-402; Score=2.1; E_value=4.2; Accession=PF01535.11; Description=PPR repeat
  Pfam annotation: Domain name=PPR; Domain location=404-438; Score=5.4; E_value=1.7; Accession=PF01535.11; Description=PPR repeat
  Pfam annotation: Domain name=PPR; Domain location=89-123; Score=1.5; E_value=4.9; Accession=PF01535.11; Description=PPR repeat
  Pfam module annotation: Pfam domain module=PPR::PPR::PPR::PPR::PPR::PP R; Domain location=126-160::227-261::333-367::368-402::404-438::89-123
MATESSAVAFAGDANSTESWSARVRTLTRLGRHKESIALLRHGGPSPPPHALALPASVISCAALSLPTGVAQIHALAAKRGLLPAADAYLLSALLTAYSRLGCLRLAHQLLDETPIESTSHTTLRTAFNSLISGCARHSLPVACFALFRRMRAIAVRFDAVTLLALVPAAPLSVVPQVHALAAQVGLATETSVANCLMSTYARGGAFGAALARRVFDEMPLASRDLVSWNAVLSAHAQNGLAVDALDLYRRMRSPEGSGVEPDAVTIVGVLSSAAHLGARGVGFDAEHYVVQRLPGFRTNVQLCNALINFHARCGSLPRAQQLFDEMPAKSIVSWTALITGHGMHGNGGVAVSLFERMVSEGIHPDNVAMVGVLSACSHAGLYDEGRMYFSTMESVYKLRPTLEHYTCIVDLLGRAGRLEEARELISSMPMPADGAVWGALLGACKIHKNVEIGEEAFARVVELEPRNVGYYVLMSNIYTDTGQLDCVARVRAVMRKRGLKKEPRMQLRRAQREARRIYELVTRLELMVKEKSGVRESVVAVPKGRMEKEAAQPLVGFHSEKLAVAFGLLNTEAGSEIVVIKNLRVCGDCHSFLKAVSATTNRSFLVRDASRFHRFDGGVCSCKDYW

SEQ ID NO: 65087 - protein, 345 aa, Zea mays
  Coding DNA Sequence Number=SeqID_23308
  Homolog annotation: Hit_ID=Q10LU7; Match level="QueryCoverage=13%, HitCoverage=7%, E-value=7e-07, Identity=54%"; Hit description =Expressed protein
IYQDLSAIIFYCSRCRTPIRGKNPQPTDETEYALAQLEILSADTASVFSDDAEPPNPRSAWAVDDDGDRAAAVTRDRGTESDSDAPAPATSYTSRSSPLSSQELEVATVLSGIQPSDLTRTPLSDPAFQKDLLQALDNLRKLIAAVDHPRSIDGHWQGVTMPRLSASCNDESSGKRTITRRSSRLMRRLESQLTRALPAERPRRNASTSSSSSASSSRRDGTRPRAHQCRPVLGGAPFVVCGECSEILQLPPALPAGRATTLQCGGCGEAFQVTLPTIGSVDLPKKIFSAPQPAVFVGQDAEEYPLARSSNLSGEQPRPAGPLHRVLGYSSVSSVLRSRRYGDNS

SEQ ID NO: 65088 - protein, 92 aa, Zea mays
  Coding DNA Sequence Number=SeqID_23309
MGLGGPPTFMVLVRAIPWMRRRGTNPHLRRDCNIVWSYRDVNFVAGISIWPFPAMATTVYAGGAVAAVAGGKRGGIRRGAVWTSIGDRANKI

SEQ ID NO: 65089 - protein, 58 aa, Zea mays
  Coding DNA Sequence Number=SeqID_23310
MAREILRRRGTVTDIAESAVAPGPTGAVRGRRRYPVVPGPPTSESTVCAQVKASWAAQ

SEQ ID NO: 65090 - protein, 150 aa, Zea mays
  Coding DNA Sequence Number=SeqID_23311
MTESACSFPSKELSTRKIRSQLPNLPQKISPQPQHLKASTGSMHNRYGGYKCGHCTAAAGVRFRIWLMGRDEALDRQWQGFGCTVEVRCIKIEVRVQIKRSKETECALVWRTGQCPAHSAIIHRTVRCATGLSGAPAKQQLLRATITCKS

SEQ ID NO: 65091 - protein, 54 aa, Zea mays
  Coding DNA Sequence Number=SeqID_23312
MDDNDIPRSWNADELQRYYAPMQYKGQIPPYVKCNIRIRTIECKKDREKLKSRS

SEQ ID NO: 65092 - protein, 264 aa, Zea mays
  Coding DNA Sequence Number=SeqID_23313
  Gene Ontology: Cellular component=integral to membrane
  Homolog annotation: Hit_ID=Q6ZA97; Match level="QueryCoverage=97%, HitCoverage=91%, E-value=1e-29, Identity=76%"; Hit description =Putative transmembrane protein
  Pfam annotation: Domain name=UPF0016; Domain location=18-76; Score =24.8; E_value=7.2e-06; Accession=PF01169.9; Description =Uncharacterized protein family UPF0016
  Pfam annotation: Domain name=UPF0016; Domain location=218-264; Score =0.2; E_value=0.0014; Accession=PF01169.9; Description=Uncharacterized protein family UPF0016
  Pfam module annotation: Pfam domain module=UPF0016::UPF0016; Domain location=18-76::218-264
  Subcellular localization annotation: CTP_CleavageSite=48; ConfidenceScore=5.42e-01
MAPSLLGVTFPLPLSPSSSFRCILAMRHPRKLVLAGCLTALIVMTALSASLGWVAPNLISRKWTHHVTTLLFFVFGIWSLWEGFKEDGYCSSVALQLTFCAMCFGLFVIDLAKRCNCHFRDSEELAEVEAELVGKLHHYIMLFYALHFRLLIGKFHPIYRMLSLRVIKANLKLKLRVHTQAPDLVLVRPVWVLYQEKANDDTKKQQRPFLMQFFSPIFIKAFSITFFGEWGDKSQIATIGLAADENPFGVVLGGIMYELLLLLT

SEQ ID NO: 65093 - protein, 171 aa, Zea mays
  Coding DNA Sequence Number=SeqID_23314
MAPHKLCDDGGSQLSYGSRGTTLLHPHCTPGSSPYAYKRKDQGLLREGWPRGDEDGTGALLGPLASLTRVDACNPLLQAHPTWARDEHEGRGISTSLTPVSGHLASPPFALAHALDPSGLGHAAHSLVGSGTPRSRNADSSLEDMVAGVLDVHPTPGSANVSSLPQQGMSQ

SEQ ID NO: 65094 - protein, 142 aa, Zea mays
  Coding DNA Sequence Number=SeqID_23315
MEEDFQEFQKYDEFYTWGLGSASHSRRPQSLSGGSRPSVPQPVFPVFNDMWDPLVGFSIYLANGLAEGNKIHRNRARSLAWGSLAERIELEPYPFPSYTNSKPSPSHAPEEQRRAKPRRKETEPPPLDHAFIVVEPARIGRR

SEQ ID NO: 65095 - protein, 169 aa, Zea mays
  Coding DNA Sequence Number=SeqID_23316
  Subcellular localization annotation: CTP_CleavageSite=22; ConfidenceScore=5.17e-01
MAAGRVSPVSACPLRAWFLRARSSAPMACSCARLDFPAELGLMAGIRLRVRRSFLVLAHGRRCSPSCVAPDPAVCSPDRTLALLGHAACCACVCSVPAPKLQVCQSTARRQFAANVRSPVKASSTKGRNLASLEPGLGAGTVVPDEFTPRPRATSGDGRTLDSPEAQLG

SEQ ID NO: 65096 - protein, 137 aa, Zea mays
  Coding DNA Sequence Number=SeqID_23317
MGAELSDGGDLGEPRKREAGAGASAKNKQRLWTSGSHLGTSKQKTRRKERSVENDIGIREKKSVRAEIKIERGGGELGWKKIREGGAVGAAKARAHKPRKAEFIWELEKPQAVCFRLKPNIQTIEVAIHRDKTLYKQ

SEQ ID NO: 65097 - protein, 66 aa, Zea mays
  Coding DNA Sequence Number=SeqID_23318
MAERAQGRGGADRRPGRHGAMLLQRLLAPQAVGGVENEQGAAGSARLLLIHVGRATAGEGARPRLG

SEQ ID NO: 65098 - protein, 41 aa, Zea mays
  Coding DNA Sequence Number=SeqID_23319
MADVGDAVVHVPSLSLAAGEPLAGYFALPVEIHGALLLQID

SEQ ID NO: 65099 - protein, 84 aa, Zea mays
  Coding DNA Sequence Number=SeqID_23320
MAQKEGELAMGAAGGGHGKHQGAVPSMGRCPTATMAGGRGELTAGEDAAGELQGRNSSSSRRPWEARQTKHKYLRVLELDLHED

SEQ ID NO: 65100 - protein, 183 aa, Zea mays
  Coding DNA Sequence Number=SeqID_23321
MGRSLPSLVGHRVHPVKPIRKGKGVLGHVHTPHKTIGRFGSEHRTMKREREGRRRLPPSDSRYAGVQKLWIPREAHRGLSDEYAVLPGSRIERPNDDFSSHFNVHRHTTLDRGRSLWFRNPWIAIYRKALSVVVLHRGRPAAQPRQEDDGAIVDGVINGRDPTTHKPRARSVLSIVIWMNGVD

SEQ ID NO: 65101 - protein, 265 aa, Zea mays
  Coding DNA Sequence Number=SeqID_23322
MLKRAAGALYDRMWCPHGLGVVYERADRALAQAMRDEEVEDLAGVESLVARKDVEVEAGAEEQTSLKKGGAEDSAAVPALGLAQANFGDNGNDKLLMCQTLIVLSIDDSDVDSWSTKGEELMSPFARMNDDSLEDDLDYFLALDLSVAESSPRVAPAAVESLSRVAPTTPRGKRRIGVWKQSVGMIGDPSQGIEVPRRRRHIGMERSRPRERMRSEEGTCRIIPAPTTEQCFEEGDLWALFDGEEIKLMLFNFWEAGLILKAEPM

SEQ ID NO: 65102 - protein, 174 aa, Zea mays
  Coding DNA Sequence Number=SeqID_23323
MAEVSGVLARFPGSRQDVGRRGAVLRERWAKGHVVRRLWAGHAAHANSIQGSSFPGFFGSWALLMLHVRLGDRASVDGSGEWATRAHGSGARRQRLGRAGLRGRHTLGRGGARGGLGKGGLRARGGPRGRVALVRLPGLRWATRALLGSGCAWAGAGQRSGAGPREGSWHWVGW

SEQ ID NO: 65103 - protein, 183 aa, Zea mays
  Coding DNA Sequence Number=SeqID_23324
  Subcellular localization annotation: CTP_CleavageSite=72; ConfidenceScore=5.09e-01
MAMMITIASLSWRSTAASSAILSYELATSRRDSNAGHQQQQQQQQQQQQSQQQTTTVAVAPLLGSLEGLGPQQESAGSGAGGPPPTAAETTPAASQAPAEGPAAAAPASGGVAATEEVLAGGSVPASDIAPILDAGGDTGGASSSNPPPALEEMEVVFGRQLQSGAEEEATPIPLPCMLSRAH

SEQ ID NO: 65104 - protein, 75 aa, Zea mays
  Coding DNA Sequence Number=SeqID_23325
MTHCGMVKAPRHMAQGCEVANSGEPIQSGRDSGGATELQSQSCLLIFRLSHLGGVEWLFANKPKSRGLICKSSNR

SEQ ID NO: 65105 - protein, 143 aa, Zea mays
  Coding DNA Sequence Number=SeqID_23326
MGRNLGPGRVFGPRGLPSPPLDLSHRIRFDGPASCAQAIKGGDFGEAVNPNFISILLPSRQEAPAPGQRRASLFTSLSSVFVLSPAQNFSRQGTLVPGRPSPSIGLSNLGFVVPELYYFSANEISVPLTDNEYMDYIDNALYT

SEQ ID NO: 65106 - protein, 67 aa, Zea mays
  Coding DNA Sequence Number=SeqID_23327
MALLLESCIRRLCCARHSGLLCPLPCCAAALELTLALAGAPAARRRPGAPSLASLFGSRPSLVLQIG

SEQ ID NO: 65107 - protein, 67 aa, Zea mays
  Coding DNA Sequence Number=SeqID_23328
MALLLGSCIRRLCCARHSGLLCPLPCCAAALELTLALAGAPAARRRPGAPSLASLFGSRPSLVLQIG

SEQ ID NO: 65108 - protein, 351 aa, Zea mays
  Coding DNA Sequence Number=SeqID_23329
  Homolog annotation: Hit_ID=Q10R20; Match level="QueryCoverage=97%, HitCoverage=87%, E-value=1e-108, Identity=62%"; Hit description =Expressed protein
MEFMEPKDIDWSRVVSRYVRDETYEDIEAPHWADLTDPNAGRAAVDDEAWFCRPDCQHPKTADDFLKLSPSPKGKLLRSVSAMLPFVERDANASSLRDGSGNLNWQGGGAVTASTPPKLKAAPKKRFQEDSENQDPSLATPPPRQGPSRPPFGAPRWNKHAKETIKSSAEKRPDNAEKEALLNKHAPPRQLKSTLSARNLFSGKDILGQISEFYDELKRMVGGSRPVTDTQEVYSLNPMNPSDLMEKVVPDAPDSFISNPVPAEIVKEVATQERVKKSPSPMKGKKVGLKVEAGKPRSPSVLKEVKATPPTPQRFPSPSPNRIKNVKLGGAAIAGSPLKNPLKDFEFFKGM

SEQ ID NO: 65109 - protein, 63 aa, Zea mays
  Coding DNA Sequence Number=SeqID_23330
MACRMLPTWVHIYMPSALQLEGPHLSLTIAILAKGRYLRIRVKTVHNMKSMVVSHPSFKGQSQ

SEQ ID NO: 65110 - protein, 128 aa, Zea mays
  Coding DNA Sequence Number=SeqID_23331
MTDHTAHHSATAVPHSLILRAHGPRRAELVVAAPQIYSPEAGFVVESPGDADWCPGLALTLIINMYVVYMFGVMLILSIPYLFVLLRLAVHENLRIILRCMGFMTPWQMGNTTCGYRVQPLQSVKLVY

SEQ ID NO: 65111 - protein, 167 aa, Zea mays
  Coding DNA Sequence Number=SeqID_23332
MSLVHGHRIRGSHASMKSEKYDEHAMSSGKLSTSLENENVHIMLLIEGVIATTGVGLLDCSRTAAEQAEAPVEQASRGRRDNGDRIAEQGQHARSTSSAPPTMPASTSFDSAEMDNGDGIAEQGSMLAVPPRRRLRCQRQLLLTPQRYYPISLPLQGLHIYLGFAAF

SEQ ID NO: 65112 - protein, 162 aa, Zea mays
  Coding DNA Sequence Number=SeqID_23333
MGAQRGGSELGLRGNSTAGVVTLGAEQERIPREIAKGKQGLNQDRHGGARGHARAALGSEQDAAAWTREELADKSRALAWAKSKGEVRAGPEPGARREHRDAQEDGEKRLGPSAMEGEASGRSSVGGVGGHGAQELAYADWANSMPGLGTRAEAPGKKTRGR

SEQ ID NO: 65113 - protein, 126 aa, Zea mays
  Coding DNA Sequence Number=SeqID_23334
MERLAVATRAFFASASGGGTGGVALDVKCDDLNGEEKMQQHEMPNTKNDDGVTILLPTIVACSLPCLEVLIEMKVVAAKMKVVVAASKEKVQQDEPKAAISDVKCDNPKEEGNVQQTKSCCLRCEM

SEQ ID NO: 65114 - protein, 199 aa, Zea mays
  Coding DNA Sequence Number=SeqID_23335
  Homolog annotation: Hit_ID=Q5JN76; Match level="QueryCoverage=24%, HitCoverage=34%, E-value=6e-20, Identity=81%"; Hit description =Allergen-like protein
  Subcellular localization annotation: CTP_CleavageSite=94; ConfidenceScore=5.20e-01
MGRQSTRWWSGGSGSARTLGVGVAVVVALVVSLCFAFIGGRRLAGTLVGGGTPASGDGLHRTAAPAVGRPGLASAAVRVQMRQLQPMLPGARVRAAGGPGHHGVLPGGVAVQVPEPALHAVTVVTCSEWTTLVQLETKTTKGGPCPLPKPNGCESRRRERAALAFPRRASIAELSARQSAAGLPRGLARARRQAGRRGD

SEQ ID NO: 65115 - protein, 209 aa, Zea mays
  Coding DNA Sequence Number=SeqID_23336
MATTDPSLPALVVQESLAFVQVGGCCRLMVDNTGRGREDNGIDVTSSVSAAAYINVPSIILFFSSVSSQTPSGQFFCSCDDSDNSREATSMLWRSGHHVSRARRIPFHATPRLRPRPSSALPVIAGPALLPEFSCSWRASQSPSAFGSVRCSNNSMEIIAWFSFSGTTCEGTKVIGERGDVDVKLADRLSIHDCRDSHGCEISCEKLLS

SEQ ID NO: 65116 - protein, 145 aa, Zea mays
  Coding DNA Sequence Number=SeqID_23337
MVSLLQAGIRNGKLQFFTKKEMEIFQGCAAVCRTNSCSRTGEDSFLQVLCQQPRPVPSHGAGSCSFPPCHMWKSNITLWITVTPYTQDPTGSTLLEGEADALLLDATSARGSPLFNLSQREAEGEESARDTPRDGQLKDNGLACS

SEQ ID NO: 65117 - protein, 49 aa, Zea mays
  Coding DNA Sequence Number=SeqID_23338
MAGFNMRLQFIADVCSFHRCIFGMLDGLLAAEQLPEEYRDRCQAYTDLF

SEQ ID NO: 65118 - protein, 57 aa, Zea mays
  Coding DNA Sequence Number=SeqID_23339
MEARSRARARAGERRMEVGRSKTALPRAEHGAACFEKRVGGSGAYWDPRGILRGPYL

SEQ ID NO: 65119 - protein, 134 aa, Zea mays
  Coding DNA Sequence Number=SeqID_23340
  Homolog annotation: Hit_ID=Q6ZG86; Match level="QueryCoverage=36%, HitCoverage=9%, E-value=5e-18, Identity=87%"; Hit description =Putative Ras-GTPase activating protein SH3 domain-binding protein 2
MASAAAATQVGTYFLRNYYNLLQQTPDVVHQFYSEASTMVRVDDLTGNNTATRSCRSAIAKPRAEFSDCFSETNSNLLTYMAALSPNNCFGDFKAESLMELDKLYPDDFSSDELNDLAYDLPISTSISMIYLKE

SEQ ID NO: 65120 - protein, 205 aa, Zea mays
  Coding DNA Sequence Number=SeqID_23341
  Homolog annotation: Hit_ID=Q6QP51; Match level="QueryCoverage=24%, HitCoverage=23%, E-value=8e-10, Identity=60%"; Hit description =Putative growth-regulating factor 1
  Subcellular localization annotation: CTP_CleavageSite=28; ConfidenceScore=5.09e-01
MQAACNRAKWVRSSDFQRTQHGAHAHASCNRRVGRYVQATAPPLAPLPRLLDCGTSTATRGNPAYDQAVPARRDGQYGQKWAGSNGDGRRAGAAVTSGSERRFAFAIMTASKKGPGKGDTPKRILLREGNRLRASLLIRGSKAGPSGGFNSRLRARGFCTHYWSEVRKSAPRKGSTAASGHSGSAPTTDHGFVGWPSKGSQPPQT

SEQ ID NO: 65121 - protein, 79 aa, Zea mays
  Coding DNA Sequence Number=SeqID_23342
MTGSTRKKNREGIAVLGASLHVRRLLGRHADGPESDAVSLTRWDIELEVEHFRSTTAGEHRTTFFVTELWLWLMTLGNG

SEQ ID NO: 65122 - protein, 130 aa, Zea mays
  Coding DNA Sequence Number=SeqID_23343
MAVGTGDAEDWGDSEVSGLRVAVEAWATFQGQRGLRKGARGREAEPRDTSVPPDISYLNVTVDHDRYFISFSGFMASTSLIKDTFFSTTYEEGDGHTNASSDGFYRPNPLAMAYEKKTKIVNGYLGNSSM

SEQ ID NO: 65123 - protein, 58 aa, Zea mays
  Coding DNA Sequence Number=SeqID_23344
MTNAGSAVEDAAEGVPPASRVLTAVLVAPIWEAMTVEGGGAEDPPMGDEASPILWDSN

SEQ ID NO: 65124 - protein, 773 aa, Zea mays
  Coding DNA Sequence Number=SeqID_23345
  Gene Ontology: Mol. function=uridine kinase activity; Cellular component=nucleus; Biological process=biosynthetic process
  Homolog annotation: Hit_ID=Q6CBN0; Match level="QueryCoverage=39%, HitCoverage=46%, E-value=5e-48, Identity=38%"; Hit description =Similar to tr|Q06344 Saccharomyces cerevisiae YDR365c
  Pfam annotation: Domain name=NUC153; Domain location=670-699; Score =24.8; E_value=0.0003; Accession=PF08159.2; Description=NUC153 domain
MAPPASTDETARHKKARKSKIDIEEKKHKKTNKARAAAEDAPIPDAAERKKRKHKDGREEKRDGQKSKKERKSEGKGEEAEAAVGRDEKMRRAMEDERFAAARTDPRFRPMRRKESKVALDSRFSSMMTDPRFASSAAPVDKRGRRRKKRENPMLHYYLNQEDLEDDGKGKEKGKKEKPVLVQEEEEDEEELEEQEEEESSSSDDDEDEDLDDDDEECSVGSDIAHYLMGRHDDTPMIDKETHRLAVVNMDWDHIKAVDLYMVMTSCLPKGGRVLSVSIYPSEFGLKCMEIESTQGPAALVNANVDKKDSDEDEDDTDDDEESTDDDVDEEEEEVDSDKENNKLRAYELNRLRYYYAVVVCDSSATANHLYMTLDGTEFLKTANVFDLQFIPDSREFKHPARDAATEAPPSYKEPDFETRALQHSRVKLTWDDDEPERKKVLRRKFNDDQLDELNMYLASDDSASDNEGVDDSEDESLPNGGSKRKLTKEERLALLLQGDKSDEEQTDDQDMEITFNTELEDLSKRILERKNNEEKTIWEKHQEKMKEKRKGRKRGLKDEDDDNHYISDDEPENDDDFFADEQSDEEPKPSKSKKHKAKAKGEAKRKGNDGTTDEHLEQEATKDELELLVAGDQDTANGAKGYNLKRKKGKKGKEESADDKLPDIDLSKDERFSAMFTSHLFALDPTDPQYKRSAAFMRKQAGKPGVHGGKSSREPPLEGSSLGGTVPPDDAVTNNDGQKPDGSATEKLQILSAVKSLKRNLGAFKNSKTGDR

SEQ ID NO: 65125 - protein, 218 aa, Zea mays
  Coding DNA Sequence Number=SeqID_23346
  Gene Ontology: Mol. function=helicase activity; Cellular component =mitochondrion
  Homolog annotation: Hit_ID=Q1SQX3; Match level="QueryCoverage=39%, HitCoverage=13%, E-value=2e-13, Identity=35%"; Hit description=IMP dehydrogenase/GMP reductase
  Pfam annotation: Domain name=PPR; Domain location=150-184; Score =33.9; E_value=5.8e-07; Accession=PF01535.11; Description=PPR repeat
  Pfam annotation: Domain name=PPR; Domain location=185-218; Score=8.5; E_value=0.73; Accession=PF01535.11; Description=PPR repeat
  Pfam module annotation: Pfam domain module=PPR::PPR; Domain location =150-184::185-218
MAMNRRAHDVVPVPTAEGSGGLDEEAKRQQPRVMLVCRAITGRVKRPKEEEQAAVVADIEGKEEYDSVTRLTRVNCRSDFIIWRSLFDACCRLCKLFNCQELKLIDSQSTLTLIDAQVVFEEMQQRKGQVQKSDRLFKVAEKNGIGTGVVMYNALINSRCTDGNMERAYEIMVEMEKKRIAPDNVRYNTLMREFCLLGQLDEAHTLIDEMTEGYCCQP

SEQ ID NO: 65126 - protein, 1053 aa, Zea mays
  Coding DNA Sequence Number=SeqID_23347
  Gene Ontology: Mol. function=protein serine/threonine kinase activity; Cellular component=integral to membrane; Biological process=protein amino acid phosphorylation
  Homolog annotation: Hit_ID=Q53MD2; Match level="QueryCoverage=89%, HitCoverage=96%, E-value=0.0, Identity=75%"; Hit description=Leucine Rich Repeat, putative
  Pfam annotation: Domain name=APH; Domain location=678-867; Score= -14.0; E_value=0.057; Accession=PF01636.13; Description =Phosphotransferase enzyme family
  Pfam annotation: Domain name=LRRNT_2; Domain location=28-67; Score =51.5; E_value=2.9e-12; Accession=PF08263.3; Description=Leucine rich repeat N-terminal domain
  Pfam annotation: Domain name=LRR_1; Domain location=121-142; Score =16.8; E_value=0.08; Accession=PF00560.23; Description=Leucine Rich Repeat
  Pfam annotation: Domain name=LRR_1; Domain location=144-166; Score =10.1; E_value=3.7; Accession=PF00560.23; Description=Leucine Rich Repeat
  Pfam annotation: Domain name=LRR_1; Domain location=193-215; Score =13.5; E_value=0.75; Accession=PF00560.23; Description=Leucine Rich Repeat
  Pfam annotation: Domain name=LRR_1; Domain location=217-239; Score =12.6; E_value=1.2; Accession=PF00560.23; Description=Leucine Rich Repeat
  Pfam annotation: Domain name=LRR_1; Domain location=241-263; Score =8.9; E_value=6.1; Accession=PF00560.23; Description=Leucine Rich Repeat
  Pfam annotation: Domain name=LRR_1; Domain location=265-287; Score =16.0; E_value=0.14; Accession=PF00560.23; Description=Leucine Rich Repeat
  Pfam annotation: Domain name=LRR_1; Domain location=289-311; Score =10.2; E_value=3.6; Accession=PF00560.23; Description=Leucine Rich Repeat
  Pfam annotation: Domain name=LRR_1; Domain location=313-335; Score =6.2; E_value=20; Accession=PF00560.23; Description=Leucine Rich Repeat
  Pfam annotation: Domain name=LRR_1; Domain location=361-383; Score =1.2; E_value=1.7e+02; Accession=PF00560.23; Description=Leucine Rich Repeat
  Pfam annotation: Domain name=LRR_1; Domain location=385-407; Score =11.6; E_value=1.9; Accession=PF00560.23; Description=Leucine Rich Repeat
  Pfam annotation: Domain name=LRR_1; Domain location=409-430; Score =1.8; E_value=1.3e+02; Accession=PF00560.23; Description=Leucine Rich Repeat
  Pfam annotation: Domain name=LRR_1; Domain location=433-455; Score =13.4; E_value=0.82; Accession=PF00560.23; Description=Leucine Rich Repeat
  Pfam annotation: Domain name=LRR_1; Domain location=457-479; Score =15.7; E_value=0.17; Accession=PF00560.23; Description=Leucine Rich Repeat
  Pfam annotation: Domain name=LRR_1; Domain location=481-503; Score =10.9; E_value=2.6; Accession=PF00560.23; Description=Leucine Rich Repeat
  Pfam annotation: Domain name=LRR_1; Domain location=505-527; Score =13.3; E_value=0.86; Accession=PF00560.23; Description=Leucine Rich Repeat
  Pfam annotation: Domain name=LRR_1; Domain location=529-551; Score =16.8; E_value=0.081; Accession=PF00560.23; Description=Leucine Rich Repeat
  Pfam annotation: Domain name=LRR_1; Domain location=552-574; Score =14.1; E_value=0.51; Accession=PF00560.23; Description=Leucine Rich Repeat
  Pfam annotation: Domain name=LRR_1; Domain location=73-95; Score=8.9; E_value=6.2; Accession=PF00560.23; Description=Leucine Rich Repeat
  Pfam annotation: Domain name=LRR_1; Domain location=97-119; Score =10.4; E_value=3.3; Accession=PF00560.23; Description=Leucine Rich Repeat
  Pfam annotation: Domain name=Pkinase; Domain location=676-952; Score =134.1; E_value=3.8e-37; Accession=PF00069.15; Description=Protein kinase domain
  Pfam annotation: Domain name=Pkinase_Tyr; Domain location=676-952; Score=118.2; E_value=2.3e-32; Accession=PF07714.7; Description =Protein tyrosine kinase
  Pfam module annotation: Pfam domain module=APH::LRRNT_2::LRR_1::LRR _1::LRR_1::LRR_1::LRR_1::LRR_1::LRR_1::LRR_1::LRR_1::LRR_1::LRR _1::LRR_1::LRR_1::LRR_1::LRR_1::LRR_1::LRR_1::LRR_1::LRR
  Pfam module annotation: Pfam domain module=location=678-867::28 -67::121-142::144-166::193-215::217-239::241-263::265-287::289 -311::313-335::361-383::385-407::409-430::433-455::457-479::481 -503::505-527::529-551::552-574:...
  Pfam module annotation: =:73-95::97-119::676-952::676-952
MGGGQMLACLPLGLITLLSLSLSSSCQIDPQTHALLQFKDGLNDPLNHLASWTNATSGCRFFGVRCDDDGSGTVTEISLSNMNLTGGISPSVGALHGLARLQLDSNSLSGPVPPELAKCTQLRFLNLSYNSLAGELPDLSALTALQALDVENNAFTGRFPEWVSNLSGLTTLSVGMNSYGPGETPRGIGNLRNLTYLFLAGSSLTGVIPDSIFGLTELETLDMSMNNLVGTIPPAIGNLRNLWKVELYKNNLAGELPPELGELTKLREIDVSQNQISGGIPAAFAALTGFTVIQLYHNNLSGPIPEEWGDLRYLTSFSIYENRFSGGFPRNFGRFSPLNSVDISENAFDGPFPRYLCHGNNLQFLLALQNGFSGEFPEEYAACNSLQRFRINKNRFTGDLPEGLWGLPAATIIDVSDNGFTGAMSPLIGQAQSLNQLWLQNNHLSGAIPPEIGRLGQVQKLYLSNNTFSGSIPSEIGSLSQLTALHLEDNAFSGALPDDIGGCLRLVEIDVSQNALSGPIPASLSLLSSLNSLNLSCNELSGPIPTSLQALKLSSIDFSSNQLTGNVPPGLLVLSGGTQAFARNPGLCIDGRSNLGVCNVDGGHKDSLARKSQLVLVPALVSAMLLLVAGILFISYRSFKLEELKKRDLEHGDGCGQWKLESFHPLDLDADEICAVGEENLIGSGGTGRVYRLELKGRGGGSGGVVAVKRLWKGNAARVMAAEMAILGKVRHRNILKLHACLSRGELNFIVYEYMPRGNLHQALRREAKGSGRPELDWRRRSKIALGAAKGIMYLHHDCTPAIIHRDIKSTNILLDEDYEAKIADFGIAKVAEDSSDSEFSCFAGTHGYLAPELAYSLKVTEKTDVYSFGVVLLELVTGRSPIDPRFGEGRDIVFWLSSKLASESLHDVLDPRVAVLPRERDDMLKVLKIAVLCTAKLPAGRPTMRDVVKMLTDAGTGPCSPRGQPPSRALRLLPPNRHICLCFFVGFLVPPALCAPSRRPARARSSVHVDRQLHRRPSDTGAAPTSSAAAGASAPVPDATGARPDPASIRFT

SEQ ID NO: 65127 - protein, 132 aa, Zea mays
  Coding DNA Sequence Number=SeqID_23348
MGKSNKRKREPTPPSEDFGDSEYSEEEFSSESEGSPAPVSPPASSDDSDDSQGLAAEVLTYIRAVERSGLEGSNESEYSLDEEDSSKEGGGGDGGDDDDDDDGGDGDDDDDDGDGGSRGVNGDSKGSNKASG

SEQ ID NO: 65128 - protein, 547 aa, Zea mays
  Coding DNA Sequence Number=SeqID_23349
  Gene Ontology: Mol. function=transporter activity; Cellular component= membrane; Biological process=transport
  Homolog annotation: Hit_ID=Q9FGR5; Match level="QueryCoverage=89%, HitCoverage=89%, E-value=1e-158, Identity=57%"; Hit description =Transmembrane transport protein-like
  Pfam annotation: Domain name=Sulfate_transp; Domain location=182-508; Score=-151.0; E_value=0.044; Accession=PF00916.10; Description =Sulfate transporter family
  Pfam annotation: Domain name=Xan_ur_permease; Domain location=99-495; Score=8.9; E_value=1.9e-08; Accession=PF00860.11; Description =Permease family
  Pfam module annotation: Pfam domain module=Sulfate_transp::Xan_ur _permease; Domain location=182-508::99-495
MAATSSKATGPWSRLSEAEAAVNRAVAGSHVGRYFKLDARKSSFTKELRAGAATFLTMAYIISVNAAILTDSGGPCTARDCTPVATATNSTTADCAVVGAKANPGYQQCLARTKSDLIVATAVAAMAGSFAMGLFANLPLALAPGIGANAYFAYNMVGFHGSGPIGYRTALAVVMLEGLVFFALSAVGLRSRLARMIPRNIRLASAVGIGLFLAFTGLQAHQGVGLVGASPSTLVTLAACSDVDPATGACLGGTMRSPTFWLGAVGFLITATCLGRDVKGSMIYGILFVTVVSWIRGTSVTVFPDTAAGNAGFDYFRKVVDFHVIRSTAGQLSFGGFRHGNVWLALLTLLYVDVLDTTGTMYSMAEYGGFVKEGGGFEGEYRAFLVDAGSTVLSAGLGSSTVTTYIESTAGIREGGRTGLTAITVAACFLASLFFGPLLMSVPPWAVGPSLVLVGAMMMRVAREIEWGDMKEGVPAFVTMALMPLSFSIANGIIAGLGVYVALHWYDWARHGYGKLRNALDERRNQVAAAAATATAGEVGPAAQGIV

SEQ ID NO: 65129 - protein, 307 aa, Zea mays
  Coding DNA Sequence Number=SeqID_23350
MYGQERFFLPGAKRRGTKCLAAASTPAVADLVRHGTMAGHMCRKHGNRRHARQGSTPGRRRRPATIHHGHTSGSSRQPCVATWHGPRWGPWCYRGTAEFLLGARVPTGLPATVVISTNAGRSTGMSSPLVQPKRCMHRRLELGFPGSFDDEACSPTMRDILSLPTSHIDLLELRKERNVGGLRIKSDTKQPRKDRMWAYMKAWDLRENRSALSQDNCPEMFSGHGMNLGDITRDVISGEMNKQSEKINTHSGALGPLGTPDTVRCTPDSSVWPTSSAIPESSEFNAEPAWAPDTVRCIEGWCKSGCT

SEQ ID NO: 65130 - protein, 124 aa, Zea mays
  Coding DNA Sequence Number=SeqID_23351
  Homolog annotation: Hit_ID=Q6QP51; Match level="QueryCoverage=48%, HitCoverage=40%, E-value=3e-12, Identity=82%"; Hit description =Putative growth-regulating factor 1
MARLGLARCCNEPNSALLGYMASDHPLADAGRPDTRHGWSDEHIRAWRGVANCNGVEPSAVGLGSLGRNRELRLARPQASASASASGGVTSSPDLSLGLRRSLRLARPRPRTDYATGDTSLPYP

SEQ ID NO: 65131 - protein, 70 aa, Zea mays
  Coding DNA Sequence Number=SeqID_23352
MVISCTPLLIPGERVWALCESRERARGLLGRRLHWSSTNYSTEVSSIAGIPRRGQTGQRIKPRFNFDGTQ

SEQ ID NO: 65132 - protein, 141 aa, Zea mays
  Coding DNA Sequence Number=SeqID_23353
  Gene Ontology: Mol. function=DNA binding; Biological process=DNA integration
  Homolog annotation: Hit_ID=UPI00004C1733; Match level="QueryCoverage =53%, HitCoverage=8%, E-value=2e-32, Identity=63%"; Hit description =UPI00004C1733 related cluster
MKNSNCRDQKMEAYCDEKAPGGFSHLLVAIDKFSKWIEFTGKKFLDFCEDHHIRVDWATVAHPMTNGQVERANGMILQGLKPRIYNDLNKFGSSLCDATTPEGFGPETSKWETWCFGCGKTPEGAISLLLPGRGHSSSPRF

SEQ ID NO: 65133 - protein, 104 aa, Zea mays
  Coding DNA Sequence Number=SeqID_23354
MAMEAPAAGSAERGRRANGGGGRCAGRADRGEWAPQLQHGGSSAMGRCRGNSPRGRGRKQWRSQGASMGREEIPAAGAHGRRGWRGDEAEGAMKYELVLLLPTP

SEQ ID NO: 65134 - protein, 182 aa, Zea mays
  Coding DNA Sequence Number=SeqID_23355
  Gene Ontology: Mol. function=kinase activity
  Homolog annotation: Hit_ID=Q6QP54; Match level="QueryCoverage=52%, HitCoverage=33%, E-value=2e-13, Identity=49%"; Hit description =Putative kinase
MQLVDDLKKDGLNQRMLTKRGRSDRSHFAPPLTDLTGKQRRLPRSNCCAACQDETYSSLVQPQAPQEAPPRPALGLNLRRSLCLARPQGSAPASASEDGLRLAGPQGSASTSEDGLRLARPQGSTSALTSQGIASSPNPDLGLMRSFLLARPWARTDHAIGGIIFTLPLPSSGYGEQERRAI

SEQ ID NO: 65135 - protein, 138 aa, Zea mays
  Coding DNA Sequence Number=SeqID_23356
MTHERIQASVNSTGPFVSRHVAMPKLPERYLRHVPSHYICFYADLPKVFLLEGPSATKQTPNTYDLENDPELKDVLAELKVKTAARAKVVWKVVAHMMKMLPGLSPSARAPLLGCPPMALLPASSAPPSSCSLSMAAA

SEQ ID NO: 65136 - protein, 148 aa, Zea mays
  Coding DNA Sequence Number=SeqID_23357
MGKSKKGGSSSHHSGDKRKREPSPPSEDFGDSEYSKEEFSSESEGSPVPASPPASSDDSDDSEEIAAEMWTYIRAIERAGLEGSDGSEVSSDEGDSSDSSEEASDGDDDGEGDGGDGDGGGDGSRGNDKGDGSNGRGNDKGGRGKASG

SEQ ID NO: 65137 - protein, 489 aa, Zea mays
  Coding DNA Sequence Number=SeqID_23358
  Gene Ontology: Mol. function=ATPase activity, coupled to transmembrane movement of substances; Cellular component=integral to membrane; Biological process=transport
  Homolog annotation: Hit_ID=Q84ZW6; Match level="QueryCoverage=83%, HitCoverage=80%, E-value=1e-178, Identity=59%"; Hit description =Putative ABC transporter
  Pfam annotation: Domain name=ABC_membrane_2; Domain location=1-179; Score=49.8; E_value=9.3e-12; Accession=PF06472.5; Description=ABC transporter transmembrane region 2
  Pfam annotation: Domain name=ABC_tran; Domain location=244-402; Score= 66.8; E_value=7.1e-17; Accession=PF00005.17; Description=ABC transporter
  Pfam module annotation: Pfam domain module=ABC_membrane_2::ABC_tran; Domain location=1-179::244-402
MLSYGAVSSWLVVKGIHMSGKSIDADQRLTLDVDKLTTDLAGLVTGMVKPLVDILWFTWRMKLLSGRRGVAILYAYMLLGLGFLRAISPDFGHLSGQEQELEGTFRFMHSRLRTHAESIAFFGGGSREKAMVEAKFVKLINHSKILLRKQWLYGIVDDFVTKQLPHNPFGDILELHKKFLELSGGINRIFELEEFTRFAQRNTVVSPNAISAASKETISFHEVDIVTPSQKLLARKLSCDVVQGKSLLLTGPNGSGKSSIFRVLRDLWPTFSGRVTKPSEGMFHVPQRPYTSLGNNSSASMLLDDHLKTILENVRLVYLLEREGWDSTPNWEDVLSLGEQQRLGMARLFFHHPKFGILDECTNATSVDVEEHLYRLATSMGITVITSSQRPALIPFHALELKLIDGEGNWELCAIQQHQKIESGVDGKLCKVEATFAMQLVPAFFAPFHARTHMGCFAKTETASVPFIYKQDANTTQHLFHSFRRNKKW

SEQ ID NO: 65138 - protein, 119 aa, Zea mays
  Coding DNA Sequence Number=SeqID_23359
  Gene Ontology: Mol. function=RNA polymerase II transcription factor activity; Cellular component=transcription factor TFIIA complex; Biological process=transcription initiation from RNA polymerase II promoter
  Homolog annotation: Hit_ID=Q94HL5; Match level="QueryCoverage=99%, HitCoverage=100%, E-value=2e-48, Identity=83%"; Hit description =Transcription initiation factor IIA gamma chain
  Pfam annotation: Domain name=TFIIA_gamma_C; Domain location=52-114; Score=93.8; E_value=5.1e-25; Accession=PF02751.5; Description =Transcription initiation factor IIA, gamma subunit, beta-barrel domain
  Pfam annotation: Domain name=TFIIA_gamma_N; Domain location=2-50; Score=125.2; E_value=1.8e-34; Accession=PF02268.7; Description =Transcription initiation factor IIA, ga
  Pfam module annotation: Pfam domain module=TFIIA_gamma_C::TFIIA_gamma_ N; Domain location=52-114::2-50
MATFELYRRSTIGMCLTETLDEMVSNGTLSPELAIQVLVQFDKSMTDALENQVKSKVTVKVKPCITTSLFWFYGHLHTYRFCDNVWTFILTDASFKNEEATEQVGKVKIVACDSKLLGQ

SEQ ID NO: 65139 - protein, 114 aa, Zea mays
  Coding DNA Sequence Number=SeqID_23360
  Pfam annotation: Domain name=DnaJ_CXXCXGXG; Domain location=45-108; Score=-36.2; E_value=0.037; Accession=PF00684.9; Description=DnaJ central domain (4 repeats)
MVTRRQRTRMVTKQEEELPTYLLMQVAMATTTSSSLVTGLRCRTGAAVALIRPTSAAGDRRGWRTTASGRGARRGKVTVAAACKTCKGKGAVECPGCKGTGKNKKNGNIFERWK

SEQ ID NO: 65140 - protein, 807 aa, Zea mays
  Coding DNA Sequence Number=SeqID_23361
  Homolog annotation: Hit_ID=Q84ZW7; Match level="QueryCoverage=30%, HitCoverage=53%, E-value=3e-73, Identity=64%"; Hit description =Putative drought-induced protein
  Pfam annotation: Domain name=WW; Domain location=736-766; Score=11.9; E_value=0.093; Accession=PF00397.16; Description=WW domain
MRDKCGKMVEGRGSVPTRQGPLVSNEKNSPVEKEKNSTRISAIVSGLSDEKLRGLSTGSEGWEKKMKRRRSVGTMLSRGSDADRDVKSMGQHRPANEARPRSSDGLGYRHGVSAGALAGNKLDGTSQQNNIVSCILPKSDVDYVAQPNERRERHAGVEKERTTVKGNKVNTSDDMQNGSLSPLPKAKACRAPRTSSLAINSCSNFQRSTGGNDEWEEAPYPNKVSPLAGMTNRKRSTHSNASSPPIAWVGQRPQKMSRTRRANVVSPVSNFDEVLSEGSPLDTATRSAPIESGSVLLTKNTSTTKMDSIPSPAGLSESEGSAVAESKSKEKTMHSGEVGNEGANTAHNAMGLIFLSNKNRIPLKEELEDGGVRRQGRSGRGAMHVKGCSLMPKEKLVTAETRKPIKGGRPGSEKNESKLGRPPMKKGSDRKASSWHSQALNSDLTDITGEPEDDQEELLAAVNAARSAIVCGQINLVEELEMSMSCMYDSEHDIIASVDHRIMSKMEEHSSQGLALSNFPPSSQQSKTNGVGAKGLIGCFSHGDKIHTGPQKLEADKWFNEMAPMAHRLLSALIMEDDLPDTNGVQSDILVEFPNSHNPYTVNGYMENELQASTITSNFGLSVDFVHSNSTSVVHQSMCNGFTSNFNNSNSENSVHSEDLSDGLNFTVYTESGPLHDLIPPIPQQCQNPGKNFPLSPYEYQYGQMSVEDKILIELQSIGICPETVPPWYAPEDSSLPKPWHGLVNDITDYLYYWNLDIDITPYERPAAAPLPLMGPWVPGQACFDNLFARLNAISMVLSSSTPAPAA

SEQ ID NO: 65141 - protein, 220 aa, Zea mays
  Coding DNA Sequence Number=SeqID_23362
  Gene Ontology: Mol. function=1-acylglycerol-3-phosphate O -acyltransferase activity; Cellular component=integral to membrane; Biological process=phospholipid biosynthetic process
  Homolog annotation: Hit_ID=Q41745; Match level="QueryCoverage=81%, HitCoverage=48%, E-value=1e-100, Identity=100%"; Hit description=1 -acyl-sn-glycerol-3-phosphate acyltransferase PLS1
VIGWSMWFAEYLFLERSWAKDEKTLKWGLQRLKDFPRPFWLALFVEGTRFTPAKLLAAQEYAASQGLPAPRNVLIPRTKGFVSAVSIMRDFVPAIYDTTVIVPKDSPQPTMLRILKGQSSVIHVRMKRHAMSEMPKSDEDVSKWCKDIFVAKDALLDKHLATGTFDEEIRPIGRPVKSLLKPGTSALLQKANSTRNLFIPHLRWPFAEIENAKYKARHLF

SEQ ID NO: 65142 - protein, 669 aa, Zea mays
  Coding DNA Sequence Number=SeqID_23363
  Gene Ontology: Mol. function=zinc ion binding
  Homolog annotation: Hit_ID=Q2QPX3; Match level="QueryCoverage=90%, HitCoverage=98%, E-value=0.0, Identity=68%"; Hit description =Potyvirus VPg interacting protein, putative, expressed
  Pfam annotation: Domain name=DUF1423; Domain location=163-658; Score =747.2; E_value=1.1e-221; Accession=PF07227.2; Description=Protein of unknown function (DUF1423)
  Pfam annotation: Domain name=PHD; Domain location=319-381; Score =15.3; E_value=0.0017; Accession=PF00628.19; Description=PHD-finger
  Pfam module annotation: Pfam domain module=DUF1423::PHD; Domain location=163-658::319-381
MESLEVAPVGTKRERGKRPADEIWGFGGGELRCAAGLMVGGKRGREFSIEFEMGISSGADFHQQPTPQAVLPPRPHGRAPTLQTSLSLAGSASPEQVGSPPDTQEPLSNSDAGHDSATESASSRETWPGEPGKSGGGDAPPVASAPITALRIADNKEKEVVGNGVAELQAFRSRIPSAGRMTLREVAWDRVDLVAEKMKGMSDELLDETKAELQSILEGTGGQHQIQEFMYLQKLLQGRVDLTLPILLMAHHVQLEILVAIKTGIQAFLHPSVDIPQIRLAEIFLYKRCRNIACQSAVPAEECKCNICSNRNGFCNLCMCVICNKFDFEVNTCRWVGCDICSHWTHTDCAIRDGKIGTGQTIKNGVGHAEMLFRCQACQRTSELFGWVRDVFQQCAPNWDRDALLRELDYVCKIFRLSEDSKGRKLFRKCAELVERLRGGSAESMTPRILLQALQELDIDSSKNFEHQEPGRLITPQEACNRIAEVVQEAVRKMEMVAEEKLRTYKRARLAVEACDRELEEKAREAQELKVERLRKLQQAEELESIIRLKQAESEMFQLKASEAQEEAERLRSVALAKRKSEAAGQDYASMYLKRRLEEAEAEKQYIFEKIKLQENQHATSSSGGGARLGGGAPSAGEPSQAMMLSKIQDLLKNVRSVPSGKPDGQRSK

SEQ ID NO: 65143 - protein, 53 aa, Zea mays
  Coding DNA Sequence Number=SeqID_23364
MVSLSAFAFLFSELVQYNQTQVDSITELERRRVALSSEAQKSNMELPQFNMTF

SEQ ID NO: 65144 - protein, 595 aa, Zea mays
  Coding DNA Sequence Number=SeqID_23365
  Gene Ontology: Mol. function=GTP binding; Cellular component =intracellular; Biological process=small GTPase mediated signal transduction
  Homolog annotation: Hit_ID=Q9C7C0; Match level="QueryCoverage=80%, HitCoverage=70%, E-value=0.0, Identity=71%"; Hit description=GTPase, putative; 34281-30152
  Pfam annotation: Domain name=Dynamin_N; Domain location=378-500; Score=-19.1; E_value=0.00058; Accession=PF00350.13; Description =Dynamin family
  Pfam annotation: Domain name=GTP_EFTU; Domain location=373-580; Score= -62.1; E_value=0.0095; Accession=PF00009.17; Description=Elongation factor Tu GTP binding domain
  Pfam annotation: Domain name=MMR_HSR1; Domain location=153-318; Score= 124.6; E_value=2.8e-34; Accession=PF01926.13; Description=GTPase of unknown function
  Pfam annotation: Domain name=MMR_HSR1; Domain location=376-501; Score= 155.4; E_value=1.5e-43; Accession=PF01926.13; Description=GTPase of unknown function
  Pfam annotation: Domain name=Miro; Domain location=377-501; Score =23.1; E_value=3.1e-05; Accession=PF08477.3; Description=Miro-like protein
  Pfam module annotation: Pfam domain module=Dynamin_N::GTP_EFTU::MMR _HSR1::MMR_HSR1::Miro; Domain location=378-500::373-580::153-318::376- 501::377-501
  Subcellular localization annotation: CTP_CleavageSite=34; ConfidenceScore=5.34e-01
MAATSPFSSYPPRLHSKTLKPRHSRPLHHKAAPAASAPRPLLLSFPAPARHCGAGLRASAAQKNSADYKFDEDDDDDEEEEYEYDGEEEEWEEEDDEDAMNVEAMEEEARGAAADLAKRLARELHIDDDVREKRRNIRDKTSVSKHIPDNLLPKVAIIGRPNVGKSALFNRLVGGNRAIVVDEPGVTRDRLYGRSYWGDHEFMVIDTGGVITLSKSQAGVMEELAVTTTVGMDGIPLATREAAIARMPSMIEKQAVAAVDEASVILFVVDGQAGLGNYLSFLLMEVLAGLVAADIEISDWLRRNYSDKCILLAVNKCESPRKGQMQALDFWSLGFSPLPISAITGTGTGDLLDLVCSELRKFEVLDAVEEEKNKVPAIAIVGRPNVGKSSILNALVGEDRTIVSPVSGTTRDAIDTEFTTADGEKYKLIDTAGIRRRTAVISAGSTTESLSVKRAFRAIRRSDVVALVIEAMACVTEQDYKIAERIEKEGKACVIVVNKWDTIPNKNHESTTHYEQDVREKLRILDWAPIVYCSATNGTSVEKIISAAALVEKERSRRLSTSILNQVIREAIAFKSPPRTRGGKRGRVYYTTQLL

SEQ ID NO: 65145 - protein, 112 aa, Zea mays
  Coding DNA Sequence Number=SeqID_23366
  Gene Ontology: Mol. function=1-acylglycerol-3-phosphate O -acyltransferase activity; Cellular component=integral to membrane; Biological process=phospholipid biosynthetic process
  Homolog annotation: Hit_ID=Q41745; Match level="QueryCoverage=58%, HitCoverage=27%, E-value=2e-14, Identity=50%"; Hit description=1 -acyl-sn-glycerol-3-phosphate acyltransferase PLS1
MAIPLVLVVLPLGLLFLLSGLIVNAIQAVLFVTIRPFSKSFYRRINRFLAELLWLQLVWVVDWWAGVKRSGCLGSTLAVMKKSSKFLPLYNLYAHQSSVDFNVGFNKNYIVA

SEQ ID NO: 65146 - protein, 449 aa, Zea mays
  Coding DNA Sequence Number=SeqID_23367
  Gene Ontology: Mol. function=protein binding; Cellular component =cytoplasm; Biological process=ubiquitin cycle
  Homolog annotation: Hit_ID=Q2R0L6; Match level="QueryCoverage=96%, HitCoverage=74%, E-value=0.0, Identity=50%"; Hit description=Leucine Rich Repeat family protein, expressed
  Pfam annotation: Domain name=LRR_1; Domain location=11-37; Score=6.5; E_value=17; Accession=PF00560.23; Description=Leucine Rich Repeat
  Pfam annotation: Domain name=LRR_1; Domain location=165-189; Score =2.7; E_value=90; Accession=PF00560.23; Description=Leucine Rich Repeat
  Pfam annotation: Domain name=LRR_1; Domain location=191-214; Score =1.2; E_value=1.7e+02; Accession=PF00560.23; Description=Leucine Rich Repeat
  Pfam annotation: Domain name=LRR_1; Domain location=243-270; Score =4.0; E_value=51; Accession=PF00560.23; Description=Leucine Rich Repeat
  Pfam annotation: Domain name=LRR_1; Domain location=295-318; Score =4.2; E_value=47; Accession=PF00560.23; Description=Leucine Rich Repeat
  Pfam annotation: Domain name=LRR_1; Domain location=320-347; Score =3.0; E_value=78; Accession=PF00560.23; Description=Leucine Rich Repeat
  Pfam annotation: Domain name=LRR_1; Domain location=372-392; Score =5.0; E_value=33; Accession=PF00560.23; Description=Leucine Rich Repeat
  Pfam annotation: Domain name=LRR_1; Domain location=89-115; Score =0.2; E_value=2.6e+02; Accession=PF00560.23; Description=Leucine Rich Repeat
  Pfam annotation: Domain name=LRR_2; Domain location=114-138; Score =14.7; E_value=0.15; Accession=PF07723.3; Description=Leucine Rich Repeat
  Pfam annotation: Domain name=LRR_2; Domain location=243-268; Score =3.1; E_value=6.1; Accession=PF07723.3; Description=Leucine Rich Repeat
  Pfam annotation: Domain name=LRR_2; Domain location=295-320; Score =1.9; E_value=8.8; Accession=PF07723.3; Description=Leucine Rich Repeat
  Pfam annotation: Domain name=LRR_2; Domain location=36-61; Score=0.0; E_value=16; Accession=PF07723.3; Description=Leucine Rich Repeat
  Pfam annotation: Domain name=LRR_2; Domain location=63-88; Score=1.6; E_value=9.7; Accession=PF07723.3; Description=Leucine Rich Repeat
  Pfam module annotation: Pfam domain module=LRR_1::LRR_1::LRR_1::LRR _1::LRR_1::LRR_1::LRR_1::LRR_1::LRR_2::LRR_2::LRR_2::LRR_2::LRR_2 Domain location=11-37::165-189::191-214::243-270::295-318::320
  Pfam module annotation: Domain location=114-138::243-268::295-320::36- 61::63-88
GLVRIAENCKNLTSLDLQACFIGDPGLVAIGEGCKLLRKLNLRFVEGTTDEGLIGLVKNCGQSLVSLSVATCLWLTDASLHAVGSHCPNLEILSVESDRVQSVGIISIAKGCRQLKTLKLQCIGTGDDALDAIGSFCPLLEILSLNNFERFTDRSLTSIAKGCKNLTDLVLTDCQLLTDRSLEFVARNCKKLARLKINGCQSMESVALEHIGRWCPRLLELSLIFCPRIENSAFLEIGSGCSLLRTLHLIDCSRITDDALCHIAQGCKNLTELSIRRGYEVGDRALVSIAENCKSLRELTLQFCERVSDAGLSAIAENCPLHRLNLCGCHLITDTGLTAVARGCPDLVFLDMSVLRIVGDIALAEIGDGCPKLREIALSHCPEVTNVGLGHLVRGCLQLESCQMVYCRRITSSGVATVVSGCGRLKKVLVEEWKIENVVPDVVSEVMTK

SEQ ID NO: 65147 - protein, 61 aa, Zea mays
  Coding DNA Sequence Number=SeqID_23368
  Gene Ontology: Mol. function=nucleotide binding; Cellular component =intracellular
  Homolog annotation: Hit_ID=Q2R0P2; Match level="QueryCoverage=59%, HitCoverage=10%, E-value=2e-09, Identity=78%"; Hit description=Small GTP-binding protein domain containing protein, expressed
MEKKLRSDAGFPGTPIRLLWRSRRRPDKREMLATDQLDHWEWNSIEAAAVACSKNLDRLRS

SEQ ID NO: 65148 - protein, 133 aa, Zea mays
  Coding DNA Sequence Number=SeqID_23369
  Gene Ontology: Mol. function=polynucleotide adenylyltransferase activity; Cellular component=nucleus; Biological process=RNA polyadenylation
  Homolog annotation: Hit_ID=Q5Z7G3; Match level="QueryCoverage=66%, HitCoverage=17%, E-value=8e-16, Identity=36%"; Hit description =Putative poly(A) polymerase
MWHQPSSGTIALGTQNATRGCPDHLAASQWRWPILVMLCDIEHDDEQIQAGDVACQKIAAGGRDWGALFQPSPFFSTHKSYLQVDAAGDGGAEELREWKGWVESRLRQLVAKVETEALLRTGSGPARPVASPP

SEQ ID NO: 65149 - protein, 84 aa, Zea mays
  Coding DNA Sequence Number=SeqID_23370
MATRARGHARARASHHGRGRKATRPCQQGGAVDGDQPLDPTSQPADPAFPAVDQVAGHLQKEGGVEWVEEGKREEWSGWKKGEK

SEQ ID NO: 65150 - protein, 645 aa, Zea mays
  Coding DNA Sequence Number=SeqID_23371
  Homolog annotation: Hit_ID=Q9FG25; Match level="QueryCoverage=79%, HitCoverage=92%, E-value=7e-90, Identity=36%"; Hit description =Arabidopsis thaliana genomic DNA, chromosome 5, P1 clone:MPH15
  Pfam annotation: Domain name=mTERF; Domain location=329-606; Score= -22.8; E_value=1.2e-06; Accession=PF02536.5; Description=mTERF
MTLGAEGAEAGVVIDGDRGVAPQSWRAFLAVLPALLAWFPHDPPQRTKGWSQPPAGSPGSAHCGTRYQLRAYSPAPAHVRDEKPLDHDDGAVMADKEVNRMKKMRVFWTAQQTFMEYLHVTRGLSFPDAEHISKHSPVFVSNLLHQVKDAIKDPVEGDEAAFRSKVKTKEIRDERATKALERLFRYYPINEFEPFFESMGLKPSEYQPFLRRDLMFLSDDETVLENYRVLCNYGVMRNKIGQIYIGAAEAFSFGDGVLASKLRALEDLGFSKSTVIKLMACCPAVLTCGPHAELKIIEWLDDIGIQRDWIGQFLSVKKSYNWRKMVEVPQFLAELGFDNEGIGKLIRQHPDFLLDGSGNALFRAVVIMLKAGSGKGDLFNLFLDFPDVQARSFARNIQSVTLFLTDIDVSEEDIKKFVVANASMLGSARVKKANSILTYLSVGRMRLRMIIRERGTPTNEIHTRLKISLLPPLRRNRREVTEGEGEVPEERRALKAFRGKGDELQDRFDFLVNAGFEPKDVSHMIKVAPQVLNQKTHVLQSKISFLVNETAYPLSVLVGYPAFLSFTIERTKARFLMYDWLRERGLVPPNFALSTLLACSEKRFFKYLVLKHQKGPEVWEKLKKEVAADKNAHCASEDDQHAIVS

SEQ ID NO: 65151 - protein, 837 aa, Zea mays
  Coding DNA Sequence Number=SeqID_23372
  Gene Ontology: Mol. function=Rab GTPase activator activity; Cellular component=intracellular; Biological process=regulation of Rab GTPase activity
  Homolog annotation: Hit_ID=Q84Z87; Match level="QueryCoverage=98%, HitCoverage=98%, E-value=0.0, Identity=71%"; Hit description =Putative microtubule-associated protein
MAEEDRQRRWRRRRFANLRSVRWRIDLGILPASPGASVDELRRAAADSRRRYVSLRRRLMVDPHLPKEEDRSSNLVVDNPLSQNPDSSWGRFFRGAELEKTVDQDLSRLYPEDGSYFQTPSCQAMLRRILLMWCLQHPECGYRQGMHELLAPLVYVLQVDIDKLSQVRKLHEDCFNDDFDGVAFPDTDMLFSYKPRKDSNWHSRADNGDDSESASRVNTLDELDLDTKEIISLSDAYGAEGELGIVLSERFMEHDAYSMFDGLMDGGSGVVCMAEFFSTSKVGSSSSLAPVIEASASLFHLLSIVEPSLHSHFIELDVEPQYFALRWLRVLFGREFCLDDLLVVWDEVFACSNDMLLRENEECNFKILCSSRGAFIAAMAVSMILHLRSSLLATEINTLCLQRLLNFPNNVDVHKLIEKAKSLQSTAIDANTLSPSLLSKKDSCDYDRVYSNLATSTPPRTPLHPLAESYWEEQWRNLHNDGTALKESDNKGLSYKRSLKQSLSQRLGLSRTESDPSPVKVVSVNNDARNSVRRCLLNSYSDKVVQSNEVIGKFEQDKFPIVSIHKETILSSERSSQLKLKAASENLTVSPPPSVAKFNPLIDSPVKPADESSAKRTEDCSSGENSPVFYTARAGNEHENCHDNDSEKSSITSNSCAGDDYRDEVLPDESSSCNCEDKTVSEAIESGANVGQTRPLEKTMVPNERKPFINKLQWLLRFGRPSAEGNVVEKGSGQASSDGKHDAVPPCPSPADASSDNSCSGINLAYGDNKKVMGTLKNIGQNMLENIQVIETAFQQDRAQPSAMENLSNNILGGKGQVTAMAALTELRKISNLLREM

SEQ ID NO: 65152 - protein, 127 aa, Zea mays
  Coding DNA Sequence Number=SeqID_23373
MAKATPPRRRKRSSEGSSMWGVRRWYCGSIFIPLRARSCPGIPTGTHRPREELGVLGALSGGCCEEGDKSDERAPCGSDSAKNASARGHQLKLLTCGPRRQSQEGKRVCEQRGPVSGEPDGPRGGKN

SEQ ID NO: 65153 - protein, 175 aa, Zea mays
  Coding DNA Sequence Number=SeqID_23374
  Gene Ontology: Mol. function=RNA binding; Cellular component=nucleus; Biological process=mRNA processing
  Homolog annotation: Hit_ID=P49030; Match level="QueryCoverage=69%, HitCoverage=76%, E-value=3e-65, Identity=96%"; Hit description =Protein mago nashi homolog
  Pfam annotation: Domain name=Mago_nashi; Domain location=21-163; Score=300.1; E_value=4e-87; Accession=PF02792.5; Description=Mago nashi protein
MAAAAAGGENSGAGAGAGEGEFYLRYYVGHKGKFGHEFLEFEFRPDGKLRYANNSNYKNDTMIRKEVFVSPSVLREARRIIQESDIMKEDDSNWPEPDRIGRQELEIVMGNEHISFTTSKIGSLVDVQSSKDPEGLRIFYYLVQVRPHPQIPTLFVHRQITSTYDALITSTRAIG

SEQ ID NO: 65154 - protein, 58 aa, Zea mays
  Coding DNA Sequence Number=SeqID_23375
MERRGGGDRMREMGMRPMADRLGKMASWDQTHGGEMAMGKYPPGITTPYPYPRQNGYI

SEQ ID NO: 65155 - protein, 41 aa, Zea mays
  Coding DNA Sequence Number=SeqID_23376
  Homolog annotation: Hit_ID=O24587; Match level="QueryCoverage=96%, HitCoverage=6%, E-value=4e-12, Identity=55%"; Hit description=Pol
MKVDPVDGVASSVNSFRPKALGGSGELVLDPFIFKELLHFE

SEQ ID NO: 65156 - protein, 356 aa, Zea mays
  Coding DNA Sequence Number=SeqID_23377
  Homolog annotation: Hit_ID=Q27K34; Match level="QueryCoverage=37%, HitCoverage=19%, E-value=4e-20, Identity=43%"; Hit description =Protein terminal ear1 homolog
  Pfam annotation: Domain name=RRM_2; Domain location=209-302; Score =41.2; E_value=3.6e-09; Accession=PF04059.3; Description=RNA recognition motif 2
  Subcellular localization annotation: CTP_CleavageSite=9; ConfidenceScore=5.09e-01
MTATKLNPAAAPFPCPYPYYAPPPPFPLPGACPPTLPLVTYSYVLSPQGRLGFYLPVRQYSSPPVPRKGVSAAPHHGRLPPPKVMAAFSGPCGAGKRQAAAPPVAAAARAQVPAAPRKPRQEAGSRSHAVAPRQKAESRRSQAVAPWPRKAAGPRARLAAQREAPPPPSLYTKAAAALGEAEAFGGSASALTSCSGISPISSAVYHVRRSGDLISLLDEQCAHANRAAGSVVAAYDVMYLPMDFRKEANFGYAFINLTTPAAAKVLYCALQNCGWKVQGSKKVIRIDQAAQQGKATLVRHLERMRLECDKDEFLPVQFSPPRDGVNVPAAPCRIRVQPLALGEGRGPRPRPRPKAA

SEQ ID NO: 65157 - protein, 615 aa, Zea mays
  Coding DNA Sequence Number=SeqID_23378
  Gene Ontology: Mol. function=calcium ion binding; Cellular component =endocytic vesicle; Biological process=endosome transport
  Homolog annotation: Hit_ID=Q6ET46; Match level="QueryCoverage=64%, HitCoverage=82%, E-value=0.0, Identity=80%"; Hit description =Putative receptor Mediated Endocytosis RME-1
  Pfam annotation: Domain name=AP2; Domain location=440-504; Score =124.9; E_value=2.3e-34; Accession=PF00847.10; Description=AP2 domain
  Pfam annotation: Domain name=Dynamin_N; Domain location=57-212; Score= 18.2; E_value=5.1e-07; Accession=PF00350.13; Description=Dynamin family
  Pfam annotation: Domain name=MMR_HSR1; Domain location=112-213; Score= -16.5; E_value=0.032; Accession=PF01926.13; Description=GTPase of unknown function
  Pfam module annotation: Pfam domain module=AP2::Dynamin_N::MMR_HSR1; Domain location=440-504::57-212::112-213
LSTLDPPVMEGVDELLARSKAVVKRVHPDDNGTTQAQAPSIYHWFGSKSAQKVQMPLTAVTSVIDGLKRLYVEKLKPLEVAYRYNDFSHPLLSGSDGRTIPGNTIAVQADMPFTGLTTFGGAFLSKFECSQMPHPLLEHITFVDTPGVLSGEKQRTQRSYDFTGVTSWFAAKCDLILLLFDPHKLDISDEFKRVISSLRGHDDKIRVVLNKADQVDTQQLMRVYGALMWSLGKVLNTPEVVRVYIGSFNDKPVNDSAVGPIGKDLFEREQDDLLCDLKDIPKKACDRRVNEFVKRARAAKIHAYIIGHLKKEMPAMMGKAKAQQRLIDNLDEEFAKVQREYHLPAGDFPDVEHFKQVLGGYSIDKFEKLKPKMVQAVDDMLAHDIPELLKNLRNPYEAGQGRAEGKKEEEEKKRVDERDAAGEACRPVPVPTAPGDAGPEVKYRGVRRRPSGRYAAEIRDPARKTPIWLGTFDSAEAAARAYDAAARTIRGAAARTNFPSAPTSAAVAPPPPLPASTAAAAGAATSSLSSTVESWSGGGGGGAPAGILRAAAAPAAEEDCRSYCGSSSSVLCEDGASGPGCGDEAAAPPPLPFDLNVPDPAADDMDWRCDTLLRL

SEQ ID NO: 65158 - protein, 107 aa, Zea mays
  Coding DNA Sequence Number=SeqID_23379
  Gene Ontology: Mol. function=thiosulfate sulfurtransferase activity; Cellular component=chloroplast
  Homolog annotation: Hit_ID=Q6ET53; Match level="QueryCoverage=99%, HitCoverage=75%, E-value=1e-29, Identity=55%"; Hit description =Senescence-associated protein-like
  Pfam annotation: Domain name=Rhodanese; Domain location=18-103; Score= 3.1; E_value=0.066; Accession=PF00581.10; Description=Rhodanese-like domain
MASAVTSSDKEQAVPTIDADEAHALLSSGHGYVDVRMRGDFHKAHAPGARNVPYYLSVTPQGKEKNPHFVEEVAAFCGKDDVFIVGFKNVRNLQGGYRSFQQRAQQQ

SEQ ID NO: 65159 - protein, 149 aa, Zea mays
  Coding DNA Sequence Number=SeqID_23380
  Subcellular localization annotation: CTP_CleavageSite=49; ConfidenceScore=5.38e-01
MSSGKHLRTSPQQRPVPADPSRARRYGQCPARLDPSAAVCPGQNRLTAPASALRQGPLFVGIVQPFRAMHSALALPSDVVSLRSPLAVCPRLTIAAVEHRPWLCPGLLCASRRGARLVRLACSAWPTACPAFPKHRRRRIDDTPSVSTR

SEQ ID NO: 65160 - protein, 245 aa, Zea mays
  Coding DNA Sequence Number=SeqID_23381
DSSAMAAATVPRPPCSTVDGMLLRWPHHARRPAPADPSRARRYGQCPAWLDPSAAVCPSQNRLTAPASALRQGPPFVGVAQPFRAMRNALALPSDAVSLRSPLAVCPRLTIAVVEHRPWPCPGLLCASRRGTRLVQLACGAWPTACPAVPKHRRRRTDDTPSMSARASPMAAVEHRPWPCPGLLCASRRGARLARLACSAWPTACPAVPKHRRRRTDDTPSMSARKEEGDEVDLQEFQDFDEFVV

SEQ ID NO: 65161 - protein, 158 aa, Zea mays
  Coding DNA Sequence Number=SeqID_23382
MGKDKKVRGSPCRSGDKRKREPSPPSEDFGDSEYSEEEFSSGSEGSSVYASPLASSDDSDDSQGKAAEVWTYIWSVERAGLEGSDESEVSSDEENFFDSSEEGSGGGDDDEGDDMGDDSSGGDGDDDGNDGGEGGGGGRGDDGGKGSGSKASGKAPLA

SEQ ID NO: 65162 - protein, 460 aa, Zea mays
  Coding DNA Sequence Number=SeqID_23383
  Gene Ontology: Mol. function=RNA-directed DNA polymerase activity; Cellular component=mitochondrion; Biological process=RNA-dependent DNA replication
  Homolog annotation: Hit_ID=Q8S463; Match level="QueryCoverage=99%, HitCoverage=23%, E-value=0.0, Identity=86%"; Hit description =Putative prpol
  Pfam annotation: Domain name=RnaseH; Domain location=1-116; Score= -20.8; E_value=0.005; Accession=PF00075.14; Description=RNase H
  Pfam annotation: Domain name=rve; Domain location=321-453; Score =81.4; E_value=2.8e-21; Accession=PF00665.16; Description=Integrase core domain
  Pfam module annotation: Pfam domain module=RnaseH::rve; Domain location=1-116::321-453
MKTGAGAGLLFISPLGKHLRYALRLHFPASNNVAEYEALVNGLRIAIELGLRRLDAHGDSQLVIDQVMKNSHCRDPKMEAYCDEVRRLEDKFYGLELNHIARRYNETVDELAKIASGQTTVPPDVFSRDLHQPSVKLDDTPEPEVPSAQSEVPSARPEAPSARPEATSVQPEVPSAPKGEALLIEEERSGATPDRNWQTPYLQYLHQGELPLDRAEARRVARRAKSFVLLGDEKELYHRSPSGILQRCISVTEGQELLREIHSGACAHHAAPRALVGNAFRQGFYWPTAVADATRIVRTYEGCQFYAKQTHLPAQALQTIPITWPFAVWGLDLVGPLQKAPGGYTHLLVAIDKFSKWIEVRPLNSIRSEQAVAFFTNIIHRFGVPNSIITDNGTQFTGRKFVDLCEDHHIRVDWAALAHPMSNGQVERANGMILQGLKPRIYNDLNKFGKRWMKELPSVV

SEQ ID NO: 65163 - protein, 181 aa, Zea mays
  Coding DNA Sequence Number=SeqID_23384
  Gene Ontology: Mol. function=carboxyl- and carbamoyltransferase activity; Cellular component=ornithine carbamoyltransferase complex; Biological process=amino acid metabolic process
  Homolog annotation: Hit_ID=Q8SA97; Match level="QueryCoverage=89%, HitCoverage=18%, E-value=4e-12, Identity=48%"; Hit description =Ornithine carbamoyltransferase
MWKLLRSRGRVCLPWSRYESEPLGRARREPSTDARAESEPWGRAKRSSSSSGAEPESEPWVGRSGVRRLPGLSPSPSLGSGGAEFAVFRDLARVRALGRAERSGTVLLSGRSVERRSDDGHFGSAGWGACVRIKGLRRAGNTFAVGGEPRARRKSSGLYADGGYQLRIRSLEGTPNYGPRQ

SEQ ID NO: 65164 - protein, 64 aa, Zea mays
  Coding DNA Sequence Number=SeqID_23385
  Subcellular localization annotation: CTP_CleavageSite=11; ConfidenceScore=5.24e-01
MSGVHPDSPVNYSGVASGNFRSIAFHMYGKKNSDFNAKKSFFRVYVINMRESPSRMRQSYGGFH

SEQ ID NO: 65165 - protein, 283 aa, Zea mays
  Coding DNA Sequence Number=SeqID_23386
  Homolog annotation: Hit_ID=Q2R3L0; Match level="QueryCoverage=99%, HitCoverage=61%, E-value=1e-108, Identity=76%"; Hit description =Expressed protein
RKEGCRRFIAQGVGMLRLLRASHTCSDTCASQVRTHHPMHASQEKSSLLNVPSSRKGFPSYLQEGMLEAISIQALAQCVEIQLGLASECEKATLSVKRRLACEQVSYFSQAHYCLSGCDTSDSYGKKLLLFLKWKWMEAKAVAYYYHGLVLDKGGEPANHISAVCCLSAADDLLSDSKRACLSFCLANPVTRVPPPWGVMKNMHKKIPDVAYKKFQAHGHLFEQNKNSALQSVPDLPEFALSLRPDGYELPSTDSIWDNVDGQPQIQSLKEHMIDDEDEVGTK

SEQ ID NO: 65166 - protein, 46 aa, Zea mays
  Coding DNA Sequence Number=SeqID_23387
MAPSPSLPNSGDPGATLARASLNSGDPTAVERSGATCSHLFSPWSQ

SEQ ID NO: 65167 - protein, 181 aa, Zea mays
  Coding DNA Sequence Number=SeqID_23388
  Subcellular localization annotation: CTP_CleavageSite=58; ConfidenceScore=5.26e-01
MARKTSTAGELRDHDASSMKPAEKRTRKTRQTTLERVAQNMMLTRTRCRRTETTEQVLASRERNERPRWNRGATTMARELGAAWGAQRGREERQGAARAASREGGMPMSREAHALGASSAGLLMKLPAAMARGEAEGDNTWGVTIRSPPSKIAKLSDRSTSLCRARSRSGVTDQVPIEQDR

SEQ ID NO: 65168 - protein, 52 aa, Zea mays
  Coding DNA Sequence Number=SeqID_23389
MPQSGGGYRAAADSQRTSVRHGKKKDGGQSGPTYFGPYSFSPNNLHFDLDIT

SEQ ID NO: 65169 - protein, 281 aa, Zea mays
  Coding DNA Sequence Number=SeqID_23390
  Gene Ontology: Mol. function=oxidoreductase activity; Cellular component=integral to membrane; Biological process=metabolic process
  Homolog annotation: Hit_ID=Q0VH86; Match level="QueryCoverage=97%, HitCoverage=94%, E-value=1e-97, Identity=61%"; Hit description=3 -ketoacyl-CoA reductase 3
  Pfam annotation: Domain name=KR; Domain location=33-197; Score=-96.4; E_value=0.09; Accession=PF08659.1; Description=KR domain
  Pfam annotation: Domain name=adh_short; Domain location=32-180; Score= -23.8; E_value=0.0002; Accession=PF00106.15; Description=short chain dehydrogenase
  Pfam module annotation: Pfam domain module=KR::adh_short; Domain location=33-197::32-180
  Subcellular localization annotation: CTP_CleavageSite=67; ConfidenceScore=5.20e-01
MTSWLLGRRGPSGFSWSSTADQVTQGISAAGLTAIVTGASSGIGAETARTLALRGAHVIMAVRSLPAAQAVKDAVLAQAPGAKLDVMELDLSSMASVRAFASQFIDRGHFLLTHLLLDTMKRTSHESNLEGRIVNVSSEGHRLAYREGIRFDKINDESVYSSIGAYGQSKLANILHANELARRFEEDNVNITANSLHPGSIITNLLRYHSILDVLHRTLGKLVLKNAEQGAATTCYLALHPHVKGVSGKYFCDCNLYEPSANAKDMELAKRLWDFGVELIT

SEQ ID NO: 65170 - protein, 128 aa, Zea mays
  Coding DNA Sequence Number=SeqID_23391
  Gene Ontology: Mol. function=calcium ion binding; Cellular component =oxygen evolving complex; Biological process=photosynthesis
MDQHDHEMEQKGCLCRIKNCAIELLSMEEDLETDDEESWDLVGRDLRLKATFLCIDLSRLIAFCQGEEHKKALTVVANKFFYSMDETRLHEWQLGDAVESRSLPLTQVRYGDTADALREVVAVLGPSL

SEQ ID NO: 65171 - protein, 886 aa, Zea mays
  Coding DNA Sequence Number=SeqID_23392
  Gene Ontology: Mol. function=structural constituent of ribosome; Cellular component=intracellular; Biological process=translation
  Homolog annotation: Hit_ID=Q2QT41; Match level="QueryCoverage=76%, HitCoverage=87%, E-value=1e-53, Identity=28%"; Hit description =Expressed protein
  Pfam annotation: Domain name=DUF594; Domain location=745-799; Score =39.3; E_value=1.4e-08; Accession=PF04578.4; Description=Protein of unknown function, DUF594
MRVETIEARSTLRCFHQRRRLGAIDLYVIRVSGDAHATCYPAAVIWRGLRIRVWLYSKAAAAWMFVDVLAQLWSDWGLRFSVISSLVTIVVLSLLSWTRRRSTSGRWRSILLWFVTRVVWLAYQGAEIAATGALGSLSLSGSDGSAEEQQVIAFWAPFLLLHLGGPDTMAAYALEDSALSVRKFLEMVFQVGGAFYAQYKYIYRARTWTPLATASAIMLPIGIVRYVEKWYALWKSKSMMEEEEGEEEEEEKKKVAGAGPGPGRFTSATSSNDALCLAQDLFHVCRRALSDSSVLPGTEKQRASEEIFLLGWERMCKVVEMELSLMYEALYTKAIVLHTCPVAGYLNRLVSPLATAAAVLLFNQYIGSRSRRAIIIRRSFVDITYLLLVVAFAMDLMWLLRALGSTWTYAALREARPWAWWLRHHLLCSGRWRRIHRAVDALHPLSWLFGSDPVSYYRTWSGTIGRYNLLQACSVAAAHRGARRPWWTRFGSWLEKKLELEETEYLRELPQDVKESLIQRVQRILVSTKNNNADKKTDENGIGCRYTLVDIRTLWGQQALEDAKTNLFGRGRKNGRKTSNKKPKLPSFGREFEEDVLMWHMATCILFSSSSGKESIVSIPGGSSADAADAHVTAIKVMSEYLMFFVAVRRHMLPGLVLHSLLEKIRQTLHEIWDDGKKKTTGGSSSSSSTAAKDTPPPQDKLAEMLLERLKAGRRWFDRNEGRLVVGNAAALANTLIEAGISVQKRQQVPQLLEFIFNVWVDKLLYAAARCSVESHAKQLSRGGDLTTILWLIVQHAALFRIGELKPKEEPQEEEEKKKEEEEEKKKKEEEELKPFWPQYPMPAPPSKPAYAYPVHYIADEEESDDAEESDDAEEDDDMTRHAILY

SEQ ID NO: 65172 - protein, 85 aa, Zea mays
  Coding DNA Sequence Number=SeqID_23393
MVASHYEIDLERVCDGSVLPNEPEVAATEVRRLNDAVEGPGTVLPRHFEVEVEPPPPSPTAITVSLIVARWFVPDVRERESSDFL

SEQ ID NO: 65173 - protein, 656 aa, Zea mays
  Coding DNA Sequence Number=SeqID_23394
  Pfam annotation: Domain name=DUF827; Domain location=275-578; Score= -84.6; E_value=0.00038; Accession=PF05701.2; Description=Plant protein of unknown function (DUF827)
MVMIHFPQLVLCTQAPTARWLSVRGAPLNFAMHSQAWELQRQRLSFMLLPSYYITKLLRDLSRTWRVKWSRTRERSGRERPMSIFGQSIDVRRPGRSRRRAANKKFSPATASESQSPTLERLLDQRRAVVTERERGRAESELSRATGMAQELERQVEQANAATARASHRPELQRTRASGSRRKKTGLVVDAADHPRDQSSTLLVEVMQELDRVKRELRQLQREVKSAREAEAEAEGVAETPTPRATSPGPPPLDGAEGEAGEGNEERGPGIMELAVAGGFRKQGVQDTRARALVLRRDRSLGASDPDERFATASSSDVGLESADTAAAVPATAHAVVDAETAPTAARQAAEAELEEPMKEEGARAFAGSVERTRGETAEEIDRLAEQEVRASAQVSQLNARLVTARSRLDAATAVDERAEAVLAELSAALRRLGEETEAAEKERALTELDSQSVTEDADAVGAEIAAVEQRVRESIKELEAARASEAAATARLRAAVEDAALAGTAPQASGGNVTVARFEYEYLAARPEVVRALAEKKAAAAEAWAEALRAGEKEIAMRVEMVEREVAETKAGEADATDSPSEEEREPRRVGVQQRAQTRRRPAPREGVEPETSRTTGTPSSSSVVVRKQRSPLVSRKTRTVASKYLKLVTGKCGG

SEQ ID NO: 65174 - protein, 158 aa, Zea mays
  Coding DNA Sequence Number=SeqID_23395
MVTGEKPKPLGKKNDERTPSKEAGDKHKVESTGSIKSHRKGDKKKNKMKKRAGLGGLDDSEEVSSEEVDSSDSFEEWSGSEADSEEDDSSGGDDDGKDDGDGDDDGGDGEGDGDGVGEGDDDGKGNSDDEDGGKGNGDGDDGKGDDGDGKASGIMLLV

SEQ ID NO: 65175 - protein, 136 aa, Zea mays
  Coding DNA Sequence Number=SeqID_23396
  Gene Ontology: Mol. function=threonine endopeptidase activity; Cellular component=proteasome core complex (sensu Eukaryota); Biological process=ubiquitin-dependent protein catabolic process
  Homolog annotation: Hit_ID=O64464; Match level="QueryCoverage=99%, HitCoverage=58%, E-value=7e-62, Identity=88%"; Hit description =Proteasome subunit beta type 1
MAQLLSNTLYYKRFFPYYAFNVLGGLDSEGKVCCFTFSHLLFEHSIGSYERTGYSAQGTGSTLIMPVLDNQLKSPSPLLLPARDAVTPLSESEAIDLVKDVFASATERDIYTGDKLEIVVINKVGTKREYIDLRKD

SEQ ID NO: 65176 - protein, 235 aa, Zea mays
  Coding DNA Sequence Number=SeqID_23397
  Homolog annotation: Hit_ID=Q8LK06; Match level="QueryCoverage=30%, HitCoverage=21%, E-value=1e-14, Identity=55%"; Hit description =Methyl binding domain protein MBD109
MDAVSPNPSAHAAENTEGGEDKKEEPPAVENTEESTKGQAQLNNVAVPESENKGEVKPGESELASPAFVDEAASHVIVDEEKEENTENENIGDARGHHPTHLAEGVPVPAGAPCAASHRSRFQRHLPPPRQAWLPVHRKAAPKPAASCAAGFQSATHATPKFTRASQSTNPKAQMDRSKHEIGFRDSQVADLRVVAREDAVSDREAGVRRDDTVIGAGDGHAGPAGPNRPSLENT

SEQ ID NO: 65177 - protein, 258 aa, Zea mays
  Coding DNA Sequence Number=SeqID_23398
  Gene Ontology: Mol. function=DNA binding; Biological process=DNA integration
  Homolog annotation: Hit_ID=Q9XEJ4; Match level="QueryCoverage=99%, HitCoverage=32%, E-value=1e-73, Identity=51%"; Hit description=Copia- type pol polyprotein
  Pfam annotation: Domain name=rve; Domain location=1-129; Score=60.4; E_value=6e-15; Accession=PF00665.16; Description=Integrase core domain
MTTDRPELLHMDEKSQNQETLKRFLRRAQNEFGLSIKKIRSDNGTKFKNSQIEGFLEEEGIKHEFSCPYTPQQNGVVERKNRTLLDMARTMLNEYKTPDRGRSSKFAPKAVEGFLLGYDSNTRAYRVFNKSTGLVEVSYDIVFDETNGSQLEQVDLDELDDEEALCVALRNMSIGDVCPNESEELPQVQDQPSSSMQASPPTQDEDQAQDDEDEEQEDEPPQEGDMDQGGDEDNQDKEDDQEIREQRLPHPRVHQAIQ

SEQ ID NO: 65178 - protein, 140 aa, Zea mays
  Coding DNA Sequence Number=SeqID_23399
MTSRYAVEHHNKAMCRDTFFVGYQARRRTGVVTRKSGANRCSPHQAKPGAVASPATHYVDHWGNPISTSRVQCASALTANKMIGSALKLRKLLSSPHGLLRGSRKGISQEKPLHNSKELHKGSGCQVPENRVPKEGLKPS

SEQ ID NO: 65179 - protein, 195 aa, Zea mays
  Coding DNA Sequence Number=SeqID_23400
MTTAHAEGPGYRPAQWTVLAPVPGPWGPTNRYRGGMRSHFLQAGEVTPPTMEHSGRKLPVALLVLGCRMAMATLNTTVLYQGRRLKGRRYNENLYSTGVEFSLMLLGLVAPMVLSAGSCAVVPLAMGAPDSPVRATSAQPLGFGEVDCWRRLSCSCTGQFCATPDSPVPTGFCALTSAFALFTIERLSQSTVGAS

SEQ ID NO: 65180 - protein, 91 aa, Zea mays
  Coding DNA Sequence Number=SeqID_23401
MKKGHIEVMKDKYFCDISIVRLGEEDIVLHLEKDEVDGNFYLGSEEPKLGANADCFCNIHEFHYQTKKDVMCTALAYLANFLDEGMILCEE

SEQ ID NO: 65181 - protein, 49 aa, Zea mays
  Coding DNA Sequence Number=SeqID_23402
MALRARFVLVNPKNYFLLVQHGQLRPMIRRLGGSRGRSNLFPPRYAVPA

SEQ ID NO: 65182 - protein, 835 aa, Zea mays
  Coding DNA Sequence Number=SeqID_23403
  Gene Ontology: Mol. function=RNA-directed DNA polymerase activity; Cellular component=intracellular; Biological process=RNA-dependent DNA replication
  Homolog annotation: Hit_ID=UPI00005A975E; Match level="QueryCoverage =99%, HitCoverage=47%, E-value=0.0, Identity=86%"; Hit description =PREDICTED: similar to Retrovirus-related Pol polyprotein from transposon 297
  Pfam annotation: Domain name=RVT_1; Domain location=56-225; Score =144.2; E_value=3.4e-40; Accession=PF00078.17; Description=Reverse transcriptase (RNA-dependent
  Pfam annotation: Domain name=RnaseH; Domain location=455-582; Score =10.1; E_value=6.7e-06; Accession=PF00075.14; Description=RNase H
  Pfam module annotation: Pfam domain module=RVT_1::RnaseH; Domain location=56-225::455-582
MPGIPRDVPEHSLDIRAGARPVKQPLRRFDEEKRRAKGEEINKLMAAGFIKEVFHPEWLANPVLVRKKGGKWRMCVDYTGLNKARPKVPYPLPRIDQIVDSTAGCKTLSFLDAYSGYHQIRMKESDQLATSFITPFGMYCYVTMPFGLRNAGATYQRCMNHVFGEHIGRTVEAYVDDIVVKTRKASDLLYDLEVTFRCLKAKGVKLNPEKCVFGVPRGMLLGFIVSERGIEANPEKIAAITSMGPIKDLKGVQRVMGCLAALSRFISRLGERGLPLYRLLRKTECFAWTPEAEEALGNLKALLTKAPILLPPADGEALLVYIAATTQVVSAAIVVERQEEGHALPVQRPVYFVSEVLPETKIRYPQVQKLLYAVILTRRKLRHYFESHPVTVVSSFPLGEIIQCREASGRIAKWAVEIMGETISFAPRKAIKSQVLADFVAEWVDTQLPTAPIQPELWTMFFDGSLMKTGAGAGLLFISPLGKHLRYVLCLHFPASNNVAEYEALVNGLRIAIELGVRRLDARGDSQLVIDQVMKNSHCRDPKMEAYCDEVRRLEDKFYGLELNHIARRYNETADELAKIASGRTTVPPDVFSRDLHQPSVKIDDSPEPEAPSVQPEVPSAQPEAPSARPEAPSVQPEVPSASEGEALRIEEERSGATPDQNWQTPYLQYLRQGELPLDRAEARRVVRRAKSFVLLGDEKELYHRSPSGILQRCISIAEGQELLQEIHSGACGHHAAPRALVGNAFRQGFYWPTAVADATRIVRTCEGCQFYAKQTHLSAQALQTIPITWPFAVWGLDLVDPLQKAPGGYTHLLVAIDKFSKWIEVRPLNSIRSE

SEQ ID NO: 65183 - protein, 113 aa, Zea mays
  Coding DNA Sequence Number=SeqID_23404
MLPPASSDDSDDSHGIAAEVWTYIRSVERSGLEGSDESEVSSDEEDSSGSSVGGGGGDGDNEDEGDDSSGSGGGDDNNDSGNDGGGGSGGGRGDDDGKGDSSSSKASGKAPLA

SEQ ID NO: 65184 - protein, 114 aa, Zea mays
  Coding DNA Sequence Number=SeqID_23405
MERVDGGFPGLLLLGEARTAFPRSGTPGWRRDGTRQWRGGVFAEANHHGNDVQQRRYSFTSRFSGRARAYVTHDGADRLQALSRGMDGGRGGVGELAGSEEVAADVAHKARVQA

SEQ ID NO: 65185 - protein, 120 aa, Zea mays
  Coding DNA Sequence Number=SeqID_23406
MQREPQRRTQRVMESAFPPGPWLLSGGAHGLPGGFCGATVQAQMPRNGASEEGWRGESSGSAAGDAPAKSTEELDGYVAGSLRQSSPESTRTLGRQRQRGKGEKLLPADVTAEGHDTPDF

SEQ ID NO: 65186 - protein, 255 aa, Zea mays
  Coding DNA Sequence Number=SeqID_23407
  Gene Ontology: Mol. function=DNA-directed DNA polymerase activity; Cellular component=nucleus; Biological process=nucleobase, nucleoside, nucleotide and nucleic acid metabolic process
  Homolog annotation: Hit_ID=Q9LRE6; Match level="QueryCoverage=67%, HitCoverage=15%, E-value=5e-86, Identity=88%"; Hit description=DNA polymerase delta catalytic subunit
  Subcellular localization annotation: CTP_CleavageSite=67; ConfidenceScore=5.84e-01
MAGTPQFQSPHFPPPSPPLGPTFVPPAMNSGGRGGKRRGPPPLAPSGAAAKRVNPSPGTPHVPPPASAAAAVEEDMMDEDVFLDESILAEDEAALLMLQRDEALASRLARWKRPAIPTDLAAGCSRTVAFQQLEIDYVIGESHKELLPSSSGSAAILRIFGVTREGHSLCCQVHGFEPYFYIGCPSGMGPDDISRFHQTLEGRMKESNRSSNVPRFVKRVELVQKQTIMHYQTQQSQPFLKIVVALPTMVASCRG

SEQ ID NO: 65187 - protein, 103 aa, Zea mays
  Coding DNA Sequence Number=SeqID_23408
  Homolog annotation: Hit_ID=Q8H051; Match level="QueryCoverage=44%, HitCoverage=9%, E-value=2e-16, Identity=91%"; Hit description =Putative hydroxymethylglutaryl coenzyme A synthase
MVVSKLEKLAKKSGNGPDRCKATARSSWEAMVTATFGLWLANTCCRYWLSLTVVKFLLKNYNIDPKCIGRLEVGSETVIDKSKSIKTWLMQIFEMVEAFRHDK

SEQ ID NO: 65188 - protein, 286 aa, Zea mays
  Coding DNA Sequence Number=SeqID_23409
MELVAVSQDSYQASEEIDAVGEALSTESVDGVRGPEAVPSVEKMNNPPVLSSLGHLGLTGLATVGPEHVSVVGPLERAGANSPQPGDPLVVFLPSTVEAPMRVYSRSRFKSKQALIQVEQVIHVEEANSAEKPCLPPSESLGNSVPGTTVDAPDPRDAAEVQPDEAASFEARKNEFFKGITKHSSRILHVPRAGMQADLSPSPPAALMPRSRRVTSVGVEFDIQDLGERTTRKVMRSLHIIAENEGISQEALDEYARLFKRPLTHSEVEALSALFGWRAPESVPLQ

SEQ ID NO: 65189 - protein, 185 aa, Zea mays
  Coding DNA Sequence Number=SeqID_23410
  Homolog annotation: Hit_ID=Q6Z1K3; Match level="QueryCoverage=86%, HitCoverage=36%, E-value=3e-07, Identity=27%"; Hit description=Zinc knuckle domain containing protein-like
MSVLVDIEVHDIPAHAWDLSTVSQLLHDSCYVLELFPATVNKTNYSSFLLRAWCFGPVKLHRSMELHIVEHGPEAQAKRCLTYNVVLTTFPMDPVDSSAVSQSPQEDGHGADDDPGFQDPPRRSGGVQDRQRSALLRLGLLHSAGVGRAGGVRSSQASSSPGALGRHEHSLRQSSLRGWGRRSNC

SEQ ID NO: 65190 - protein, 134 aa, Zea mays
  Coding DNA Sequence Number=SeqID_23411
MKTGDDRIRCKKGVVGFNVVHGVRVITRDTSKQVSGVDKLALKGADGRVILLLGTSSSLCALTSSGENIVGNATLRSSERQWMDVDQRKVDRTCRIRERAKRLCKCVQPPGAAHRAQVGEVRGKEGATEGGSVE

SEQ ID NO: 65191 - protein, 188 aa, Zea mays
  Coding DNA Sequence Number=SeqID_23412
  Gene Ontology: Mol. function=RNA-directed DNA polymerase activity; Cellular component=chromatin; Biological process=RNA-dependent DNA replication
  Homolog annotation: Hit_ID=Q8S472; Match level="QueryCoverage=99%, HitCoverage=17%, E-value=2e-65, Identity=68%"; Hit description =Putative gypsy-type retrotransposon RIRE2
MDGGSSLNIIYAETLGLCGIDLSSVRAGRGAFSRDHPRETRPAPRTNSIYPSALGTPSNFRRETLTFEVVGFRGTYHAVLGRPCYAKFMVVPNYTYLKLKMPGPNGVITVGPTYRHAYECDVECVEYAEALAESEALIADLESLSKEAPDVKRHADNFEPAETVKSVPLDPSNDASKEIRIGSKLDPK

SEQ ID NO: 65192 - protein, 156 aa, Zea mays
  Coding DNA Sequence Number=SeqID_23413
  Gene Ontology: Mol. function=binding
  Homolog annotation: Hit_ID=Q10SR2; Match level="QueryCoverage=84%, HitCoverage=27%, E-value=2e-67, Identity=93%"; Hit description =Expressed protein
MDLINSVTGVDEEGRSRQRILSFAAKRYVNAIESNPDDPDAYYNWALVLQESADNVDPNSSSSKDALLEEACKKYAEATRLSPTLYDAYYNWAIAIADRAKMRGRTKEAEELWKQAILNYEKAVQLNWNSPQEALKKGNANEIGRAPPDEQEMFAT

SEQ ID NO: 65193 - protein, 127 aa, Zea mays
  Coding DNA Sequence Number=SeqID_23414
  Gene Ontology: Mol. function=transition metal ion binding; Cellular component=endoplasmic reticulum; Biological process=electron transport
  Homolog annotation: Hit_ID=Q94HX5; Match level="QueryCoverage=81%, HitCoverage=77%, E-value=7e-44, Identity=83%"; Hit description =Putative cytochrome
  Pfam annotation: Domain name=Cyt-b5; Domain location=8-74; Score =52.3; E_value=1.6e-12; Accession=PF00173.18; Description=Cytochrome b5-like HemeSteroid binding doma
MPLVAFVGYGFVKLFGVLVGGMVYDVTPFMDEHPGGDEVLLAVTGKDATADFEDIGHSDSARDMMEKYHIGQIDASTIPAKRTYVHPQQAPSHSDKNNDLLIKILQFLVPIMILGLAFGIRQYTKSE

SEQ ID NO: 65194 - protein, 257 aa, Zea mays
  Coding DNA Sequence Number=SeqID_23415
  Homolog annotation: Hit_ID=Q9FWD9; Match level="QueryCoverage=26%, HitCoverage=10%, E-value=1e-21, Identity=80%"; Hit description =Putative Ste20-related protein kinase
MEEMASAARAKEGPGKLGATGKAGEARPTNDRSDCPLDAKETTEDSQKRLLSSRCSRLIPSRRRRAADDGTVPGAACGGDLRKGEGSRRRAMQGWSGRRWAVQGYVDSSGDKSKRSVVEIKGRFSVTSENVDLAKVQEGPLSSLSRKSPEGSLLRKSASTGDYFVNPKLMAVAGSREAHISPFSWLGRRKLGVINGDWGMLKLKEAERHDLNIKRKKDLLEDQIQDVMKAAHKSQATTSGPTHNPEIHQQTPKKPKA

SEQ ID NO: 65195 - protein, 247 aa, Zea mays
  Coding DNA Sequence Number=SeqID_23416
  Gene Ontology: Mol. function=RNA-directed DNA polymerase activity; Cellular component=mitochondrion; Biological process=RNA-dependent DNA replication
  Homolog annotation: Hit_ID=UPI00004C1731; Match level="QueryCoverage =73%, HitCoverage=13%, E-value=2e-93, Identity=87%"; Hit description =UPI00004C1731 related cluster
  Pfam annotation: Domain name=rve; Domain location=48-196; Score=80.2; E_value=6.5e-21; Accession=PF00665.16; Description=Integrase core domain
MGSRLIETGRPRTCNTSTEESYPSTEPKLGDWRGAPGRSFCWVKKRSPTTAAPQASSSDAYPLRKKAPRGFTHLLVAIDKFSKWIEVVVFFTNIIHRFGVPNSIITDNGTQFTGRKFLDFCEDHHIWVDWAAVAHPMTNGQVERANGMILQGLKPRIYNDLNKFGRRWMKELPSVVWSLRTMPSQATGFTPFFLVYGAEAILPTDLEYGSPRTRAYDNRSNQASREDSLDQLEEAWDMALLHSARYQ

SEQ ID NO: 65196 - protein, 254 aa, Zea mays
  Coding DNA Sequence Number=SeqID_23417
  Gene Ontology: Mol. function=binding
  Homolog annotation: Hit_ID=Q10SR2; Match level="QueryCoverage=99%, HitCoverage=49%, E-value=1e-110, Identity=79%"; Hit description =Expressed protein
ALNNWGLGLQELSAIVPARDKQTIIKTAISKFRAAIQLQFDFHRAIYNLGTVLFKFHDNDTRAFSFIMLQYGLAEDTMRSGKPDVSPNELYSQSAIYVAAAHALKPNYSVYRSALRLVRSMLPLPYLKVGYLTAPPANNSIAPHGDWEVSQFILNHEGLQQADASDQPPSQSPGHLDRGRKPVRINVADIVSVSACADLTLPSGAGLCIETIHGPTFLVAHSWEALDGWLDAIRLVYTIFARGKSDVLAGIITG

SEQ ID NO: 65197 - protein, 127 aa, Zea mays
  Coding DNA Sequence Number=SeqID_23418
  Homolog annotation: Hit_ID=Q6YZW7; Match level="QueryCoverage=32%, HitCoverage=6%, E-value=4e-07, Identity=70%"; Hit description =Putative leucine zipper-containing protein
  Subcellular localization annotation: CTP_CleavageSite=67; ConfidenceScore=5.57e-01
MASRSWSTRSTNATALSASPGLAGGAASSASADTRRNSARRGIGRRDGAVDARAQRACRHGLGLEVVGGRRRGAGQELIKAVTDGVDFDLSLSRGGKHRDDGGSRSMKLRKNNSGVGAGIGIFGRRR

SEQ ID NO: 65198 - protein, 193 aa, Zea mays
  Coding DNA Sequence Number=SeqID_23419
MAERHKAQKRTIEDAKLLFLQHHPSAATAISLGPLEAATPPPAALALESEIQAWRGALETWLFAQRAYARALAAWARRCLGIGSAARPSHPLPPAFLVCMECGRAADTATEARVIDGLDFFVAGVGSVCSGAATGMEGMAGRVLCAGMAAVTDAMAEFAAASADSYDAAVTAVIAAARAPERGKENGMGQLQR

SEQ ID NO: 65199 - protein, 106 aa, Zea mays
  Coding DNA Sequence Number=SeqID_23420
  Gene Ontology: Mol. function=methyltransferase activity; Cellular component=cellulose and pectin-containing cell wall
  Homolog annotation: Hit_ID=Q6EP94; Match level="QueryCoverage=69%, HitCoverage=10%, E-value=7e-25, Identity=74%"; Hit description =Dehydration-responsive family protein-like
MCGGDGGEAASLCRSACGDLGRQGFCATFATHGLYLIEVDRILHPRGYWILSGPLINWKKHLINWKKHWKGWHRTKEDLDAEQKAIEAVVRSLFWKKIKEEGDIAI

SEQ ID NO: 65200 - protein, 895 aa, Zea mays
  Coding DNA Sequence Number=SeqID_23421
  Gene Ontology: Mol. function=RNA binding
  Homolog annotation: Hit_ID=Q9M6S0; Match level="QueryCoverage=79%, HitCoverage=93%, E-value=1e-104, Identity=36%"; Hit description =Pumilio domain-containing protein PPD1
  Pfam annotation: Domain name=PUF; Domain location=655-689; Score =32.0; E_value=2.1e-06; Accession=PF00806.9; Description=Pumilio -family RNA binding repeat
  Pfam annotation: Domain name=PUF; Domain location=691-725; Score =41.9; E_value=2.3e-09; Accession=PF00806.9; Description=Pumilio -family RNA binding repeat
  Pfam annotation: Domain name=PUF; Domain location=727-758; Score=7.2; E_value=0.79; Accession=PF00806.9; Description=Pumilio-family RNA binding repeat
  Pfam module annotation: Pfam domain module=PUF::PUF::PUF; Domain location=655-689::691-725::727-758
MADKAKVVGAHGERDDVFLWGELQHDDCRWSLMATESAFRLIGGTGARDWSKGFGAFGSSAGALSGEDLGFVDNDTGVYGGWNKSVPNRSGSAPPSMEGSLAALGHLIDQQSGSFEASLTTLDNITDSSKSEEQLRADPAYFEYYGSKVNLNPRLPPPLISRESRRLMNRVGKAKEWRMVSQDNSSKGSIYVPRSMLSTHKEEPEDDKSPRLDSSSVEDAQIVSSASNFQSQDFMLERFQQSVASSPDSSSSNPSNSNTGDSMPVYSDINLLKSLSFDALKQSDLNSWTPKGPLKSNVNNDLSSPPLSSSSYPGSKTGTQTFEQEKAAADTKHGNVVLGSGAAVTEVDNVDSIMKNLKLSLDVHTSSPAKQRWQDNVLQQYGSFLPAQGDPIQLTTQGPHPPHVPFVDNLSHAQLKLPDIHQNLPQPSMTTPFYTPNSFGNPYYQNLHPANAFPTSIGTGGYAVSGSILPPFMAGYAPQGPLATPLDSSMTPSFSGRPSGFLPAGNLTGGTDFMQSCKVYGQFEPAESFDSQNTIPQAASAYPSDQRLPLPITGFPNSPTARRGGTVPNYQGISSYIGVPMTYPTSPVFQGQTLPGVLPPVRRNDSAGFLPPSRNITGSPGIQGQRARQKFDESKTCSFLEELKSNRARMVELSDITGRVVEYSADQHGSRFIQQKLENCTAEEKTSVFAEILPHASALMTDVFGNYVIQKFFEHGTREQRRDLATKLVGHVLPLSLQMYGCRVIQKAALPRRPSPICVTPATKSQTNTQPPTRRDQPRKPYRLSLSRSCLGLWRRHRRFTLLLLRQPVAVASVSGVRLSGSGLPTSTSGSAPPDRYVGALKKVQKDLGASVFEPLVQAYAAVGKFPGMWQRLKIENVEVGEGTAQLLDSICADQ

SEQ ID NO: 65201 - protein, 433 aa, Zea mays
  Coding DNA Sequence Number=SeqID_23422
  Gene Ontology: Mol. function=transmembrane receptor activity; Cellular component=exocyst; Biological process=exocytosis
  Homolog annotation: Hit_ID=Q6YZW7; Match level="QueryCoverage=99%, HitCoverage=62%, E-value=1e-148, Identity=65%"; Hit description =Putative leucine zipper-containing protein
  Pfam annotation: Domain name=Exo70; Domain location=1-402; Score= -159.4; E_value=4.1e-05; Accession=PF03081.6; Description=Exo70 exocyst complex subunit
TRYRRAAKAMMRLNPAYLKSYTPEEIDAMEWESLESAMALWSPHFHVAIASVLAAESRLCERVLEPLPPAVWPECFAKIAARIVAAFFRFADGVAAAAREPQRLFKLLDMLDAVVRERERLDELFSSGSATLVAIRERTREVERALGRTAAGVFFEFGLRIETLYVTGAGADAGHVPKVVRYAVNYLKCLASDDYRALMDTALRADLERGDEEDAGEGGDRAPLAEAAASVLEALHRHVEAARRVCPDTVASHVMAMNAYWYIYMRARGTELAKLVGEDTMRRRYKAAAEEAAWEYQDAVWTPLVRLISGSSSGAPKTWPPDDAQEKAAAFAGKLEERVRRHGAEYKIPDGDLRGQIKIAAAKAVRGAYAGFLKANDKALAGCRKQLLPLDIIEGMVGRVFDEMSDGTAGSVGRARSRRESRSSGNLEGFFGV

SEQ ID NO: 65202 - protein, 191 aa, Zea mays
  Coding DNA Sequence Number=SeqID_23423
  Gene Ontology: Mol. function=nucleic acid binding; Cellular component= lysosome; Biological process=regulation of transcription from RNA polymerase II promoter
  Homolog annotation: Hit_ID=Q6YZW2; Match level="QueryCoverage=75%, HitCoverage=38%, E-value=1e-64, Identity=89%"; Hit description =Putative oligouridylate binding protein
  Pfam annotation: Domain name=RRM_1; Domain location=73-140; Score =58.1; E_value=2.9e-14; Accession=PF00076.12; Description=RNA recognition motif. (a.k.a. RRM, RBD, or
MNGAGGSHHQQQQRLRQQQQQALLMQQALQQQQQQQYQSGVLAAAAAAAMTQMEPVSNGNLPPGFDPSTCRSVYVGNVNPNVTESLLIEVFQSAGLVERCKLIRKEKSSFGFVDYYDRRSAALAIMTLHGRHVYGQAIKVNWAYASTQREDTSVMLESCGTTKLDAPGVMVLSPSVINRHGQLGLSSLNFA

SEQ ID NO: 65203 - protein, 329 aa, Zea mays
  Coding DNA Sequence Number=SeqID_23424
  Homolog annotation: Hit_ID=Q6YZW3; Match level="QueryCoverage=99%, HitCoverage=83%, E-value=1e-139, Identity=76%"; Hit description =Pentatricopeptide (PPR) repeat-containing protein-like
MVARAEAGDFAEARSLWAQLLHSSAAPCLPAAAPRLLPAYARLGRFDEILHAVRELSARDRGAARALYPLAVSCLGAAGELARMEDAVLEMGRLGLRVDSATGDAFVRAYAAAGTIPQMEAAYRRHRKSGLLITRGAIRAVASAYISRQKYYRLGAFAADAGLRRRDVGNLLWNLYLLSFAANFKMKSLQRAFLEMVAAGFRPDLTTFNIRTAAFSKMCMFWDLHLSADHMRRDGVAPDLVTHGCFVDAYLERRLARNLTFAFDRLDGDGEPVVATDPIVFEAFGKGGFHASSEVLLETAGGKRRWTYYKLLGVYLRKQHRRNQVFWNY

SEQ ID NO: 65204 - protein, 97 aa, Zea mays
  Coding DNA Sequence Number=SeqID_23425
MGVDEAGRAAGRNLTLASIGFADVRVGAAVPGGAGYKDGLLVVGLPVPKDDGLDAAARVVRDLATRLPDVGAAARVDISSEIDLVLTADRLKAIDAL

SEQ ID NO: 65205 - protein, 64 aa, Zea mays
  Coding DNA Sequence Number=SeqID_23426
MESALDPSLGATKILESFMLGDVHVFMIRNLGEGRQGLGKSHGVKEEKLGRPQQEGDQVQLDYD

SEQ ID NO: 65206 - protein, 137 aa, Zea mays
  Coding DNA Sequence Number=SeqID_23427
  Gene Ontology: Mol. function=electron carrier activity; Cellular component=anchored to membrane; Biological process=electron transport
  Homolog annotation: Hit_ID=Q5Z6N2; Match level="QueryCoverage=65%, HitCoverage=62%, E-value=5e-20, Identity=53%"; Hit description =Putative chemocyanin
  Pfam annotation: Domain name=Cu_bind_like; Domain location=53-130; Score=60.0; E_value=7.9e-15; Accession=PF02298.8; Description =Plastocyanin-like domain
  Subcellular localization annotation: CTP_CleavageSite=33; ConfidenceScore=5.05e-01
MAARGRGSAGSSSRAPSVAGTALLCVAVAVLLLAATPAAVAGTTYLVGDAAGWTLKVDYGRWVAGKTFHAGDILADPDDRSMQSYGGYRNCIVSPKGRAPVYHTGYDAVTLPRGTHYFICAMPGHCSAGMKLAVTVY

SEQ ID NO: 65207 - protein, 78 aa, Zea mays
  Coding DNA Sequence Number=SeqID_23428
MTWPIMLKAVSIAHSLRACSKLLTDHQPREAEGGEAFAEEGHDQQPEGHLRHQQQRDLREQSEARTVNCTVPESRHIY

SEQ ID NO: 65208 - protein, 63 aa, Zea mays
  Coding DNA Sequence Number=SeqID_23429
MDRRHRGIEQRRVRQQQWRVRHGNGGALSDVWCDNGPSSGDAIGSRGFGDVSAVLEVNFNELC

SEQ ID NO: 65209 - protein, 175 aa, Zea mays
  Coding DNA Sequence Number=SeqID_23430
  Gene Ontology: Mol. function=structural constituent of ribosome; Cellular component=ribonucleoprotein complex; Biological process =translation
  Homolog annotation: Hit_ID=Q9AR08; Match level="QueryCoverage=73%, HitCoverage=57%, E-value=1e-27, Identity=59%"; Hit description=9S ribosomal protein
  Pfam annotation: Domain name=Ribosomal_S9; Domain location=103-175; Score=-56.9; E_value=0.083; Accession=PF00380.9; Description =Ribosomal protein S9S16
  Subcellular localization annotation: CTP_CleavageSite=46; ConfidenceScore=5.64e-01
MALSVSSLAAALSHLSLPSTSTPKPHPAPLLRLRSTYRRAVSLALRASAAEAAESFEADLPAEEVMAVEEEAEEDALSGIALRKYVKQRLPGGFAAQRITATGRRKTAIARVVLQEGTGKVFINFRDAKVPINPRIARTYYTNVAPLCCLGRIAIGSTIPVTLQLVNTLEFQETN

SEQ ID NO: 65210 - protein, 361 aa, Zea mays
  Coding DNA Sequence Number=SeqID_23431
  Gene Ontology: Mol. function=protein binding
  Homolog annotation: Hit_ID=Q75KA7; Match level="QueryCoverage=84%, HitCoverage=58%, E-value=1e-136, Identity=78%"; Hit description =Expressed protein
VAELLGFPACVMSCLDYLEAVPWVGEEEENVVSSVRNLQSESYGVSPVLKRVAPSDRTTPPNDTFSHIIELVLRSSEDRGRREMKSLVQKLLKESSTGCMSGSSDLCSAVLYRSCRNCLDSLLILFQQATDSDFAEQALNTKEPVFRQVALEADNLLWLAEILADRNAADEFAVIWASQRELAGLHSRLPVKSRHLVSCVTARLFVGIGKGEMLPSKDTRRLLLDVWLQPLMDDYNWLQHGCRSFDRKVVEEGVGRTILTLPLEDQQTILLSWLGSFLKVGDSCPNLQKAFEVWWRRTFVRPYAEQQACLVIVDVDDKLLGGGVPKKPIVECASEVWEDPLDSRQVQLLGIIHVKTYLLTA

SEQ ID NO: 65211 - protein, 79 aa, Zea mays
  Coding DNA Sequence Number=SeqID_23432
MLFLLELSVQLAELLEVGYVTPPGGGLSLTLLSWFPDVWGRPEKSKPGSRPSSSSESRHPEGKGRSTYMLVKALMPKLG

SEQ ID NO: 65212 - protein, 457 aa, Zea mays
  Coding DNA Sequence Number=SeqID_23433
  Homolog annotation: Hit_ID=Q1RSI8; Match level="QueryCoverage=68%, HitCoverage=79%, E-value=3e-44, Identity=34%"; Hit description=IMP dehydrogenase/GMP reductase
MWCTRHNDDDFIDGSKRYCFNLDDDYISASPNSVSAPHPIGCDKARVQRKGKGLATSNNESPVIEKRKRMLNKLYKASQMMAQSKLFEQFNRLLDHFIIDMGEDMKRVYKLSFKMHLMADPNHLISHLNAFGTDSHPDSVQLSLGIAEQCARQEKLLKFLVSGSDVKELDESLLAEFTGQQTLAINMGTHPYMPDDKLSIPEFMLNEPQHYLPEKELVIPDPLLHFIQSHGAALTIDQSGRVLLAGNGDEMRDLLSIFLAFNMSRRETGGCKAAFLVPYFESTDFNSKSLSKKKHKVKNIKERDSYQRNYIHASEVILSILLDKDRSSSTILSLKKAGPEITELLTQCSIGIAGTGLAILLSVMCKMSNGMRTPFASARLLSTSVGFGLFWLSWAVNGLRDTIASIFRSRSGMNIEDDEVAVKIEKSVNEILFRALTLLAITALKRARHHDFIGCRC

SEQ ID NO: 65213 - protein, 145 aa, Zea mays
  Coding DNA Sequence Number=SeqID_23434
MSSWDDDDDSAAAAAATDVELLKRAWRDEKAAPEILRFDLPLVSRVREQIQLLPELDTFVFCKTKSDVGAFQLDDIGGGAASRQGLQDTACKHGRCDGKGLILFESWKVRDQWKKNTKHRRRGKPQLKADVYVPFAYGLGFPCIS

SEQ ID NO: 65214 - protein, 68 aa, Zea mays
  Coding DNA Sequence Number=SeqID_23435
MANAAAQNSTEQLLHLKLAFLAGEPPSCVLTLARYAPPLPVKFATILRMCVIEYFFRLLLILLCSKAL

SEQ ID NO: 65215 - protein, 100 aa, Zea mays
  Coding DNA Sequence Number=SeqID_23436
  Subcellular localization annotation: CTP_CleavageSite=93; ConfidenceScore=5.33e-01
MELALARLLQRAWPPRRSCSSTPASLVPAPSHLPHVLCPAAMGALAPALSISATSRALVSRILDSSTTLPQARGLVELPQLAPDHSRTPTSPLVMEQQQL

SEQ ID NO: 65216 - protein, 307 aa, Zea mays
  Coding DNA Sequence Number=SeqID_23437
MARPGARGKAGTVLCHVFFHLRHGEGVREAELSRHGGLAWPALTSATTGLSVPSAPGLGSPSADFLVTFVHRHYRDVVVATRGFLHGNLDFRIRQWQLIALGDCHGLKFHVTLCLEGIPPQAWNECIAKRVVAHACVLDYVEEGCLSPASKMPAVSSVDWESIRHLQDRLAGSPSWVGAMIIHNNAPPPTGLCGLTFKLLIYIDLVEGPAGPRWDVSTCRFAWRHDVVDGEREPHDRQDPASSVSSSPPAGSPRSHAAGHALLQPRWAGGFDGPDSASHPSPHPLLRVRPCLVIPNTHGLDGIGKNS

SEQ ID NO: 65217 - protein, 369 aa, Zea mays
  Coding DNA Sequence Number=SeqID_23438
MPTGCTSDAGDDTRNRRQEPEVDAMAAPAHPPPPLVNSKRECDINEKEVCAYKKRRSSIAAAAAAAGATPSPIVQEPTEEKLAASVFSLDSLHRDWEVSIPNNASSSSSCRHDHDHQRYGCPSTMAVCAGSNGSAEPTQNQERTSRARSNPVQEANKAGGQHGQETANTAAGGQHGRETDVPMRPFMGLSYGPRFLGVTDVTLVLAKNLTASDCCSGQSRLQFSPKEIMDSPLFSILTAAERASVEQRDGQDGLPLEAIDRHGHSYNMRFKYIHSAKRYRLMQAWVPFLRRNGVRNGDLVEVWAFRVDGRPMLWLLNYAGQGWVPEEIEAAEATRVSPTGSGFRAWDWRMVWPSYVSAVVEGSAPPRPA

SEQ ID NO: 65218 - protein, 325 aa, Zea mays
  Coding DNA Sequence Number=SeqID_23439
MGSVLPRQRSSDQHAAGHQNLAPDDFRDVYASAARRLTTTPRRATATQYTSYGGAEAFCRRPYANGRAAAVPTEQGFFDDIFGARRHMRSRSSSKSKSSSAVSSDEFPSAGFCRPVATAGGGSRADATLSSFTSRLRPVTIPSRRYDSSPPSTSTRGEYYQSSSTCSTAPYPAARYYYGDDAKAAGSRSNHSRAGGDGSAATRHHRNHRGGSSFCCFTSNPETSSNATSFRQAARGAQSPAAETTITDYSGADYGYYYSPPSATSSSLFTNPLARAPRRLEEVVMEVRERAPLLMDDGDDIDSVGAAAVDEAIAWAKERLWSQAR

SEQ ID NO: 65219 - protein, 169 aa, Zea mays
  Coding DNA Sequence Number=SeqID_23440
  Gene Ontology: Mol. function=transferase activity; Cellular component= mitochondrion; Biological process=isoprenoid biosynthetic process
  Homolog annotation: Hit_ID=Q653T6; Match level="QueryCoverage=54%, HitCoverage=21%, E-value=1e-42, Identity=94%"; Hit description =Putative geranyl diphosphat synthase
MAARASPAAAAVAEVRESIGRGSRLGNCPTVGGEGTAAGWGAAGDNRQGREAGSGQGQGLPDGGCEGGREKLELEPSGIITAPMLYAMEEFPQLQEVVDRGFDNPANVEIALDYLQKSRGIEKTKELAREHADRAVKAIESLPDSDDEDVLTSRRALIDITERVITRTK

SEQ ID NO: 65220 - protein, 263 aa, Zea mays
  Coding DNA Sequence Number=SeqID_23441
  Gene Ontology: Mol. function=trans-hexaprenyltranstransferase activity; Cellular component=mitochondrion; Biological process =isoprenoid biosynthetic process
  Homolog annotation: Hit_ID=Q653T6; Match level="QueryCoverage=86%, HitCoverage=49%, E-value=1e-76, Identity=70%"; Hit description =Putative geranyl diphosphat synthase
  Subcellular localization annotation: CTP_CleavageSite=79; ConfidenceScore=5.01e-01
MSWRWTLARRVATLAAIGGGGAQAQRLLSTSSAGGGTGLLGRHYIPPRLPDSEQRSTAPFPSHNNMKLNTKTKEVVGCRGAALVSSRWLHEAQYQVRQDGASRAQEQQDPFELVADELSLLANRLRSMVAAEVPKLASAAEYFFKVGAEGKRFRPTVLLLMASALKFPLSESTEGRVLSILADKLRTRQQNIAEITEMIHVASLLHDDVLDDADTRRGVSSLNLIMGNKGAGTTFKDELHAGAGGRWRALEAGAAAAGRGQKV

SEQ ID NO: 65221 - protein, 210 aa, Zea mays
  Coding DNA Sequence Number=SeqID_23442
MDDELFDIHPLPKDGDNSGHLSKGSGSGRGSGGICNYYKDGAMCHPKINISNYNGKLDPRPSLIKCERYFCGMHTLMDEWVWVTSIHLDNVANECFWSISTRALVLPYAPIGGDINAECIDVSGGTPGAVLDGRGVGMSSKFIACHEFGVGLQAVTCHGARWSGRNSINTMVHATSGNSNTSKQGSFTTSMANAREASGQASEWEVLPLH

SEQ ID NO: 65222 - protein, 151 aa, Zea mays
  Coding DNA Sequence Number=SeqID_23443
  Homolog annotation: Hit_ID=Q6QP51; Match level="QueryCoverage=34%, HitCoverage=30%, E-value=5e-15, Identity=78%"; Hit description =Putative growth-regulating factor 1
  Subcellular localization annotation: CTP_CleavageSite=19; ConfidenceScore=5.05e-01
MQVACNRTTGTHPFNFVASSMEAQAHTSCNRRAGYYVRETAPPLAPMSRLLDCGTSAVTRGNHAHGPTVPIERIDHGDRARGYFERDPSPRRKRAPSPSTDQGFEGRPLGRVRRSPQSTRASSSLLIRGSKAGPSKGFDSRPKALGLRAHY

SEQ ID NO: 65223 - protein, 118 aa, Zea mays
  Coding DNA Sequence Number=SeqID_23444
  Gene Ontology: Mol. function=sequence-specific DNA binding; Cellular component=nucleus; Biological process=regulation of transcription, DNA-dependent
  Homolog annotation: Hit_ID=Q43353; Match level="QueryCoverage=94%, HitCoverage=29%, E-value=2e-26, Identity=63%"; Hit description=ZAG2 protein
  Pfam annotation: Domain name=K-box; Domain location=3-118; Score =13.7; E_value=3.1e-05; Accession=PF01486.8; Description=K-box region
MPSNSTSKESAKLRNQIQMLQNTNRHLVSDSVGNLSLKELKQLESRLKKGISKIRLTLLSSNINCILSNINERREYLIIYTTLIAEFLFQSELLAAEINYMAKRETELQNDHMNLRSK

SEQ ID NO: 65224 - protein, 169 aa, Zea mays
  Coding DNA Sequence Number=SeqID_23445
MAQGGPTVEIHQWREIHSAPWALSTNRCHGNTPTRPRNPQLPPIDGRISAGRRELRSGSMAVARIGCPVSLIEGGEAMVKGEVAATDLYPGGAQSPSWCEQRDPRVKIPAEDSAFVTATAVELLRWISRTMEAHATVTYSAFPVEGTGREQLAVFCLGDLGPREVESPR

SEQ ID NO: 65225 - protein, 65 aa, Zea mays
  Coding DNA Sequence Number=SeqID_23446
MAPPLDGVCAAAGWPCGRAIGRLQEERESGYGENRVSRTVDRGYLIQRLKCNDGPLETLSNPGCR

SEQ ID NO: 65226 - protein, 97 aa, Zea mays
  Coding DNA Sequence Number=SeqID_23447
MSGVHRTVRCDCGATATSRQRSPAGAFNARQKRAEVRHAHTGAPDIEQYMSDHAKKEMETGEKPTTSHGSTSSEESRTKRKEKKDSSKGKEKKKDSS

SEQ ID NO: 65227 - protein, 250 aa, Zea mays
  Coding DNA Sequence Number=SeqID_23448
  Gene Ontology: Biological process=response to stress
  Homolog annotation: Hit_ID=Q2QQA6; Match level="QueryCoverage=98%, HitCoverage=97%, E-value=5e-67, Identity=60%"; Hit description =Universal stress protein family protein, expressed
  Pfam annotation: Domain name=Usp; Domain location=69-227; Score=42.0; E_value=2e-09; Accession=PF00582.16; Description=Universal stress protein family
MSRPLSSFCLHRIRSGGTASTAAPPSICANKDDGGGGGGGESRSLKDGKQKDEWEEANEKGSAEAVVVGRKVMVAAADGGGEEARTALQWALSHAVRPCDTVVLLDVASGKNRRDPRGSPHLEALRSICQAKRPEIKIGIDVGVPKLQLVCVELSLAEGGKDRGPAIVEAARKQGVSLLVVGQKKRSVTWRLLSMWIAGVKGGGGGGYTSAADYCVQHAACMALAVRRKSRRGGGYLITTRRQRDFWLLA

SEQ ID NO: 65228 - protein, 368 aa, Zea mays
  Coding DNA Sequence Number=SeqID_23449
  Gene Ontology: Mol. function=protein binding; Cellular component =nucleus; Biological process=ubiquitin cycle
  Homolog annotation: Hit_ID=Q653N6; Match level="QueryCoverage=97%, HitCoverage=99%, E-value=6e-63, Identity=41%"; Hit description =Putative speckle-type POZ protein
  Pfam annotation: Domain name=BTB; Domain location=178-295; Score =95.9; E_value=1.2e-25; Accession=PF00651.21; Description=BTBPOZ domain
MTHTCTHLIANVCSVHRLKVDDFCVTKSTIRNKKDCCIRSRCSVDGYDWEIQFRFSPYEGSPEDYWLALVLVYLGAPCDGGVAVALSCHLVDQSCDLRVPLLTTTQGLNTTFRRPLDRSPPIYFGKGKVRDDVQAAAAAGRPLIFKGGSFTVECQIDVHSSRDSDSVSLPSSDLHQHLGELLRNQSGADVTFIVSGESIAAHKSILAARSPIFMAQFFGNMLERGSQCVEIQDMHPAVFKAMLHYIYTDTVPDLGTDTTTVEETAVMAQHLLVAADMYALDRLKEICEERLTRGIGIGTVASTLALADQHNLAQLKAKCIDFITGGSSKNLLAVLETEGYRHLEASNPSVLTELVMAAHGKKRKRLYG

SEQ ID NO: 65229 - protein, 251 aa, Zea mays
  Coding DNA Sequence Number=SeqID_23450
MVSEASWSQGIMVTVVALHRRDGGILLRGREVGVGEGGSMETPPPHSDSERRAWAACASVPWAHTPVAPMASAWCGWGRSEGTISPFLNFGYYTTDAEEGTPKVEGHRSEVWLAEPADARQGNTLSRTRPHGDGLGPKVAEGRTHSTAAPEGTTSTTIILAGSATASGGRTRIFGRRGGASGHEGLPPWRRRTRGLASARHAIESEADSASRVSSFVVAVLEGGEGHRAFDEAFRWSWHRLRPHRRFRTSM

SEQ ID NO: 65230 - protein, 139 aa, Zea mays
  Coding DNA Sequence Number=SeqID_23451
  Gene Ontology: Mol. function=oxidoreductase activity; Biological process=electron transport
  Homolog annotation: Hit_ID=Q012U1; Match level="QueryCoverage=92%, HitCoverage=20%, E-value=2e-36, Identity=56%"; Hit description =Homology to unknown gene
MGTRLNQRQFERRAAMMGGGNFVVPAQCVTDFISNRLSVTTLPPSSYRLGVRPSNLHELFPPYITEALQESLIMIDREMPGFVSSKALLHGVETRTSSPLQISRHGETYESTSLRGLYPTGEGAGYAGGILSAAVDEQL

SEQ ID NO: 65231 - protein, 285 aa, Zea mays
  Coding DNA Sequence Number=SeqID_23452
  Gene Ontology: Mol. function=transporter activity; Cellular component= membrane; Biological process=oligopeptide transport
  Homolog annotation: Hit_ID=Q6AU92; Match level="QueryCoverage=80%, HitCoverage=47%, E-value=5e-61, Identity=50%"; Hit description =Putative proton-dependent oligopeptide transporter
  Pfam annotation: Domain name=PTR2; Domain location=1-265; Score= -43.4; E_value=0.00026; Accession=PF00854.12; Description=POT family
MAAFGADQFELHGPCHGEKKRRWSFFNLYFFAVELAKLAAITLVVYVQENVGWEWGLGVPIVAMLVAVTAFMWGNPLCSTLPSLLPDGCSTRTNSAFFDRAATVTDGDLTSSGVPRPWRLSTVHRVEELKSIVRMLPIWGAGILLVTSARTIDMRIIAHLEIPPASMLIFSNIAMLVTLARTLLVPWLRRVTVQPTGITHLQLQRTGIGLTISMLSNVVVSAVVEGETKRTAWENHSIRCCLDGFKIPNKEIIESNYCRTCTPEAPCLEDLPWLRQGQGASSSRA

SEQ ID NO: 65232 - protein, 111 aa, Zea mays
  Coding DNA Sequence Number=SeqID_23453
  Homolog annotation: Hit_ID=Q6AU92; Match level="QueryCoverage=36%, HitCoverage=6%, E-value=9e-08, Identity=75%"; Hit description =Putative proton-dependent oligopeptide transporter
MTEPATIVQKRPAKESATRPPIIGVRLGEAMEVVERVGGVDERQLQLLRQIPFAMPSPAGVFLQHACKVCSSTGTRDPSLGVGLGLVRLRRIAPGIVPANQSLYKLEKQSG

SEQ ID NO: 65233 - protein, 400 aa, Zea mays
  Coding DNA Sequence Number=SeqID_23454
  Gene Ontology: Mol. function=oxidoreductase activity; Biological process=electron transport
  Homolog annotation: Hit_ID=Q012U1; Match level="QueryCoverage=72%, HitCoverage=44%, E-value=6e-46, Identity=40%"; Hit description =Homology to unknown gene
  Pfam annotation: Domain name=DAO; Domain location=188-397; Score= -32.4; E_value=0.00076; Accession=PF01266.14; Description=FAD dependent oxidoreductase
  Pfam annotation: Domain name=Pyr_redox; Domain location=188-361; Score=-2.0; E_value=0.022; Accession=PF00070.17; Description =Pyridine nucleotide-disulphide oxidor
  Pfam module annotation: Pfam domain module=DAO::Pyr_redox; Domain location=188-397::188-361
MAPSKPHKCSSSLCEQKSCSQVRRCPIKHTTIVVQPQGPGSEYDKRIDTHLESIVNTAREIVSTLPTSNLLAVAQRNGDQPSAVPSMLPDEAFTVIRKSFDARKVLKEPQFTYIVDMDVKKILNIEPRAWDFIARLEPKLGVVEYMTEEKLAVDLVSMLNVSSKGSNNVLGIRDTHSGMIYRQQKKPRVAVIGSGPSGLFASLVLGELGAEVTLLERGQPVEQRGRDIGALAVRRILQPESNFCFGEGGAGTWSDGKLMTRIGKNTDGVQAVMKTFVHFGAPPNILVDGKPHLGTDKLVPLLRKFRHHLRELGVTIRFNARVDDLIVEDGQVKGIVVSDVELQPGPASQKLAFDAVVMAVGHSARDTYSMLWQHNVDMSPKKFCYRATSLEMPDVNSFVG

SEQ ID NO: 65234 - protein, 613 aa, Zea mays
  Coding DNA Sequence Number=SeqID_23455
  Gene Ontology: Mol. function=transporter activity; Cellular component= membrane; Biological process=oligopeptide transport
  Homolog annotation: Hit_ID=Q6AU92; Match level="QueryCoverage=92%, HitCoverage=95%, E-value=0.0, Identity=80%"; Hit description =Putative proton-dependent oligopeptide transporter
  Pfam annotation: Domain name=MFS_1; Domain location=51-538; Score =8.6; E_value=0.00013; Accession=PF07690.6; Description=Major Facilitator Superfamily
  Pfam annotation: Domain name=PTR2; Domain location=113-522; Score =402.1; E_value=8.3e-118; Accession=PF00854.12; Description=POT family
  Pfam module annotation: Pfam domain module=MFS_1::PTR2; Domain location=51-538::113-522
MWAYSKGAESHYSLEIHRYLGIEDFSVIKDTSGWYAACFKGCGHATTVITITANDFCDRLASVGFTTNLISYLTLQLHLPLVEASNIITNYNGTANLTPLIGGLIADSFAGRFWTITFGSIIYQLGMVCLTLSAALPSLHPPSCAKHAADCQRASSYQISVLYLSLLCTSIGTGGTRPCTMAFGADQLELNAHRHRGAKPKWSFFNLYFFAVELAKLAAVTAVVYIQDNVGWSWGIGVPTVAMVAAVIAFVSGYSLYIRMPPGGSPLVRLAQVATAAYKKRKAVVPDPSLLYEDKELDAGISTTGRLLHTDQLKCLDKAAIVTDGDVLPSGQPKLWRLSTVHRIEELKSIIRMLPICAAGIILVTSASHNHSFAIQQARTMDRDITPHFKIPPASMLIFTNFGMLLTLAFYDRVLVRVLRRFTGRPNGITHLQRTGVGLTIAMLSNVVAAVVERRRKSVAAASGLLDAPKATLPMSVFWLVPQYAIHGIANAFMDVGRMEFLYDQAPESMRSSATALYWLTFSIGSYLGTLLVTIVHDKTKRTGQWLPDNLNRGKLDNYYWLVVALEVVNLVYFFICVKYYTFKPLEMVSGEEVELYHHGNGTDDAKKQGVEA

SEQ ID NO: 65235 - protein, 546 aa, Zea mays
  Coding DNA Sequence Number=SeqID_23456
  Gene Ontology: Mol. function=transporter activity; Cellular component= membrane; Biological process=oligopeptide transport
  Homolog annotation: Hit_ID=Q6AU92; Match level="QueryCoverage=92%, HitCoverage=95%, E-value=1e-144, Identity=49%"; Hit description =Putative proton-dependent oligopeptide transporter
  Pfam annotation: Domain name=MFS_1; Domain location=27-464; Score =32.2; E_value=1.9e-06; Accession=PF07690.6; Description=Major Facilitator Superfamily
  Pfam annotation: Domain name=PTR2; Domain location=89-448; Score =316.3; E_value=5.4e-92; Accession=PF00854.12; Description=POT family
  Pfam module annotation: Pfam domain module=MFS_1::PTR2; Domain location=27-464::89-448
METAALADEDASPKKTKQGGFRTMPFILANEICDRFATAGFNANMITYLTQQLHLPLVEASNLLTNFNGTAAFTPVLGAIIADSRAGRFWTIAGGGVLYQLGMLGLVRANGGQLAMLYGSLLLTALGGGGIRPCVVAFGADQFGQRGKRPGGEQQWSYFNLYFFSMGLAVLLALTVVVYIQENVGWGWGFGIPAIAMFVSVLSFVVGYPLYVKVKPQGSPFKRLLQVVVAAFKKGKDSVPEDVGLLYQNKQLDAPVAADGRLLHTDQLRQELKSIVRMLPLWAASITAIAAASHNFTFAIQQARTMDRHLTPRFQIPPATMIIFTTLTMLVSLALYDRVFVPVARRYTGRRSGGITYFQRMGAGFAVSVLGVLAGALVEARRRRVAAEHGLLDSPSAVVPVSVFWLVPQYALHGVSDALSTVGHMEFLYDQSPESMRSSAAALFWVAGSLGNYLGTVLVTVVQSATRGVWLQDNINKGRLDYYYWLVTFLLVLNLFYYIACFHFYTLKTFEVDAGRTNGGERQPEAAEPCHSPEGIQMKIINKMVN

SEQ ID NO: 65236 - protein, 92 aa, Zea mays
  Coding DNA Sequence Number=SeqID_23457
  Gene Ontology: Mol. function=transporter activity; Cellular component= membrane; Biological process=oligopeptide transport
  Homolog annotation: Hit_ID=Q6AU92; Match level="QueryCoverage=83%, HitCoverage=13%, E-value=4e-15, Identity=74%"; Hit description =Putative proton-dependent oligopeptide transporter
  Subcellular localization annotation: CTP_CleavageSite=58; ConfidenceScore=5.28e-01
MVQKRPARESAMMAPRTGVNAAVPLKLVSRLEASTSGRCSCCVRLLESRSGERKISVEARAITQYEWHSPEAALLRLLRRCILVGQSCSLHA

SEQ ID NO: 65237 - protein, 117 aa, Zea mays
  Coding DNA Sequence Number=SeqID_23458
MEYRKRVDALVFFSLLLLGYFAAHAHGKAAAVQTATAPVVIGQPNKSLVRGRSGGNLMLKEQGAPSQETSQKGKEVAPNEGGSSDDRKRSPDWGDSSQIVTIRSLGPFGGTWHDHDI

SEQ ID NO: 65238 - protein, 230 aa, Zea mays
  Coding DNA Sequence Number=SeqID_23459
  Homolog annotation: Hit_ID=Q69JZ7; Match level="QueryCoverage=31%, HitCoverage=24%, E-value=1e-10, Identity=59%"; Hit description =Putative XAP-5 protein
AKEAGRVAPVCRCQQIMQRPNGAELQYYQKLNRLLLELEQRSGGVSKESYQTEVIAAAAAGVAAEGLSPEEAKIQAKNAAHLSVALAENAIVILMLVEDHLRSQAQHFCTSLTGDSITSSTSMTSLAASRSNSLNTADEPPPEFQLLTLTGMGLDTNGEFLMAMQQQLVHEIREVWTNSVENLLYMKEDLIIPHGCVHSLVIYEVLLKLVEPFSDSMFSLLFDNNTYFMN

SEQ ID NO: 65239 - protein, 112 aa, Zea mays
  Coding DNA Sequence Number=SeqID_23460
  Subcellular localization annotation: CTP_CleavageSite=51; ConfidenceScore=5.19e-01
MAAEISLSLVPCVLALAYAAPLRSSRCSSSPLRAPLPKIPPCMPDVVRSLVAEHSPCARTFSVQFLEHLGLSMVTPFVVGVRLPVSVVSVCRAAPSSLLSRARSSLSSLRHV

SEQ ID NO: 65240 - protein, 63 aa, Zea mays
  Coding DNA Sequence Number=SeqID_23461
MAMMGSTSEKMYLYQVRKQQIFVAFVQRWCLKKKTRTEDPGGSVLLLKLLLLIRRGFASPAIK

SEQ ID NO: 65241 - protein, 100 aa, Zea mays
  Coding DNA Sequence Number=SeqID_23462
MHPQLPFELLPHAHSLPYLISRKLTLSHALLSSLGLAEVLRPPCWSSNPPEAAPSDPELRPEITKYRFAHAHPEPGPHLSAAGVSGTRPNQSVRFPAPSG

SEQ ID NO: 65242 - protein, 54 aa, Zea mays
  Coding DNA Sequence Number=SeqID_23463
MVPGRTLPLEGSRSRPLTEYENQILKPKSRRYLRTQVGITVNKNNTKVDAAPKV

SEQ ID NO: 65243 - protein, 607 aa, Zea mays
  Coding DNA Sequence Number=SeqID_23464
  Pfam annotation: Domain name=HLH; Domain location=375-425; Score =45.9; E_value=1.3e-10; Accession=PF00010.16; Description=Helix-loop -helix DNA-binding domain
  Subcellular localization annotation: CTP_CleavageSite=59; ConfidenceScore=5.22e-01
MSQEGANLPQEVVGSHDQATAPHGSIPAPADSNPSSVSNLASAVNNGGSSECASPAVLSAGEDNNAASSKTASPAVLSAGEDNNAASSKTASPAVLHAADDNNAASKIAGPAVLLAGEENKAKLKLASPASLLAGEEKGNNADEFKLASPRMLHDCDDNNAGSHAGVRNCNAAQSKLANPAVLHAGDDKKGGSKIAGPEVPHASVTSTTGSKLNGPAALHAGNDNDSGGSRLPNPAVLHASKDMDNNAGRPKFASPVLLHAGEDNKARTKLAIQAGGGGNAGAGSSRLTRSAALHAGKDNGAGSKPAIQVVPRLHAGGKDNNAGSFKAARPSAADSGESNAKEGKSNVAGEQRAREAGVGCGGGKGNAAAVEDVDHDLHIFTERERRKKMKNMFSTLHALLPQLPDKADKATIVGEAVTYIKTLEGTVQKLEKLKLERKRALAAQQQLMAGAGSNRASSARHPAPAPSSPSSSSREANVADMVHGWHAQQAAANKALAAEAGAGGSSSAAASLPRGAVPFPAPAAGFQTWSGQNVVVSVASNEAYINLHSPRQPAGTLTKALFVLERHRIDVVTTTISTQDGFHMYGIHARVQAGGVGDAAADQHLS

SEQ ID NO: 65244 - protein, 838 aa, Zea mays
  Coding DNA Sequence Number=SeqID_23465
  Gene Ontology: Mol. function=cellulose synthase (UDP-forming) activity; Cellular component=membrane; Biological process=cellulose biosynthetic process
  Homolog annotation: Hit_ID=Q7PC72; Match level="QueryCoverage=94%, HitCoverage=99%, E-value=0.0, Identity=56%"; Hit description =Cellulose synthase-like H1
  Pfam annotation: Domain name=Cellulose_synt; Domain location=10-805; Score=387.2; E_value=2.4e-113; Accession=PF03552.5; Description =Cellulose synthase
MTSANKAKLQLQERVPLPRTAWKLADLAVLSLLLALLARRASSLVSSGGTAAACTWCWVAALICEAWFTVVWLLNMNAKWNPVRFVTHPERLAGYWAGDDELLPAVDMFVTTADPKLEPAVVTVNTVLSLLALDYPAGKLSCYVSDDGCSAVTCYALREAAEFAKLWVPFTRKHGAKVRAPFAYFSSSSGGGAAERGGGGGAADADAEFLRAWTSMKNEYEELVRRIESAEEKSLVRRGDGAFAEFVGADRGNHPTIIKVLWDNDSSKSESDEQAAGDGVPSLIYVSREKSRTQPHHFKAGAMNVLTRVSAVLTNAPIMLNVDCDMFANNPQAALHAMCLLLGFDDEVHSGFVQAPQRFYGGLADDPFGNQMQVIFEKVGHGIAGLQGIFYCGTGCFHRRKVMYGVPPGSGTGATKGESMNLTGCAIQALAAADSPSYKELQKKFGSSKELIESARSIITSKEAPAAVADLTSRVEVAKQVSACSYETGTSWGQEVGWVYGSMTEDVLTGQRIHAAGWRSALLSPDPPAFLGGAPTGGPASLTQYKRWATGLLEIVLSRHNPFLLSASKRLRFRQCLAYLVIDVWPVRAPFELCYALLGPYCLIANRSFLPKASEPGFVVPLALFLAYNAYNLGEYVDCRLSARAWWNNQRMQRITSSSAWLLAFLTVVLKTVGLSETVFEVTRKEQQQQQGSPDGDGADADPGRFTFDSSPVFVPPAALAMLSVVAVAVGAWRAVTGGGGGPGVGEFVCCAWLLLCFWPFVRGLVGGRGSYGIPWSVRIKAALLVAAFVHLSTRKILAQDYKSRPVVGDRNSEYYFILLPPVPERRFWAASEAVSQG

SEQ ID NO: 65245 - protein, 180 aa, Zea mays
  Coding DNA Sequence Number=SeqID_23466
  Subcellular localization annotation: CTP_CleavageSite=67; ConfidenceScore=5.43e-01
MAARTPSGRAPPVPRPNDQVHGGTVPTLGHGFHTTTSSHFFGSLARHPLVLPNTRIARRERNDGKVELRNGWSPISLITLHTGASARLWPRGGCRGMLMCTEGLRNDWGCKGVRFPVSVGSTGFSSVADRDQFSPWSADGRKPLGEEEDPTTGPHGSAQLIGDWAERRGPSVENGLEWGS

SEQ ID NO: 65246 - protein, 64 aa, Zea mays
  Coding DNA Sequence Number=SeqID_23467
MAAAPSASEAKEAAAAAVAPQCASTVFGWDDWAFRISPFAKPSTRLSQKAGLEVNFWTYCSILY

SEQ ID NO: 65247 - protein, 277 aa, Zea mays
  Coding DNA Sequence Number=SeqID_23468
  Homolog annotation: Hit_ID=Q6H885; Match level="QueryCoverage=46%, HitCoverage=22%, E-value=2e-45, Identity=67%"; Hit description =Putative ankyrin repeat-containing protein
  Subcellular localization annotation: CTP_CleavageSite=30; ConfidenceScore=5.13e-01
MTQYATSACPIPSATWGHGWPAGTDISSPSSMLVLRNVMVHVPPYRVHVSLHDGQLLWGTFVAFDLAMNPVIRDRIELFYPPASVHHQEGHHNQAICVPQCRDCLYDDRGLAVSTTHARCQHGTDIQPFKGSFSHCGRRGAAGVSSAISRNITTNEMANTIRYSYLRGPSGRFRNPYDHGLRENCSDFLLKGYNEDIESTVQTLQSDEEMGPIQMSSPVSQNGESIPPHVNGTDHGSTISHANSKSHRQSPSNCLGLGLGTGHNNPSSRYARSLLPL

SEQ ID NO: 65248 - protein, 524 aa, Zea mays
  Coding DNA Sequence Number=SeqID_23469
  Gene Ontology: Mol. function=serine-type endopeptidase activity
  Homolog annotation: Hit_ID=Q1RW49; Match level="QueryCoverage=54%, HitCoverage=58%, E-value=2e-41, Identity=35%"; Hit description=IMP dehydrogenase/GMP reductase
MAAAARRAIPLVLIFLVSAPLYAADASAAAAGAGANSSSFLLAAEQTQRKDPLDGLRYYTGGWNISDEHYWAREFSFPDPILIDRFFGYPIVMNPRFRCWFRRRLARDRRSSSPSGFTAAPVFAAAAVWFVVFGIGLFIAGCCFCCCPGAGDAYSRACLCVSLVLLLVATAAAAVGCAVLYDGQGRFHGSTVATVDYVVRQSGDTVANLQRFTGFLETAKAAGVGPVALPDDVKGRIDDVVRKVGAASDELAARTASNAAKIRAALETVVVDDTCVAMGEWVQHPQARTALDDILPCVDTAAAKEALNRSKEVNYQLVAVLNAALTNVSNRDFPPQVPPPLNYNQSGPPVPLLCSPYAADLRDRACAPGEVPLDATTPRAGVAAIRVPWRLRGRRVGGRGVHVPGARHAVHVRAAHRRGRRQLRAVPLRPPPWWRWRTAPSSGRRSGPSATTTARASAGTAARCSGACSPPAVAVLLAVLLWVVHSRERRRRSEAMEILCLASSPYKYPLEERAFLKSPARPYM

SEQ ID NO: 65249 - protein, 132 aa, Zea mays
  Coding DNA Sequence Number=SeqID_23470
  Gene Ontology: Mol. function=transcription factor activity; Cellular component=nucleus; Biological process=regulation of transcription, DNA-dependent
  Homolog annotation: Hit_ID=Q8S0R0; Match level="QueryCoverage=88%, HitCoverage=53%, E-value=6e-32, Identity=66%"; Hit description=AP2 domain-containing transcription factor-like protein
MDTTSSAGDDVFNLPRRNELRVSGHAGVGRHVLHGPGRQAAPGAVRGRRALGEVERRDVSRAAAAEEVDDCVMRDGDGLGRGVGAESQALPRAEHPDLRHPLAPPPPPHALVPAHPPLRVRLLADWLRAPHR

SEQ ID NO: 65250 - protein, 41 aa, Zea mays
  Coding DNA Sequence Number=SeqID_23471
MSSPRFLSVLLETSLSNHLVKARGDADNMDDFEEFQEYDEF

SEQ ID NO: 65251 - protein, 121 aa, Zea mays
  Coding DNA Sequence Number=SeqID_23472
  Subcellular localization annotation: CTP_CleavageSite=50; ConfidenceScore=5.17e-01
MELNSKLATFGNSGRPLHYNSPDCPVCQAEQRLQAPTVVCNATVSSEQCNCARRSQSRRQKAHWTVNMNYPVAPLSEAPTVGTQRPGDVAAAPDSVRWGTGVSGAPYDRSPHQRPFWWLGL

SEQ ID NO: 65252 - protein, 71 aa, Zea mays
  Coding DNA Sequence Number=SeqID_23473
  Gene Ontology: Mol. function=Rab GTPase activator activity; Cellular component=intracellular; Biological process=regulation of Rab GTPase activity
  Homolog annotation: Hit_ID=Q2R4C2; Match level="QueryCoverage=84%, HitCoverage=13%, E-value=7e-27, Identity=91%"; Hit description =RabGAP/TBC domain-containing protein, putative, expressed
MQASAEADAYFCFVELLSGFRDNYCKHLDNSSVGIRSTLSKLSQLLKRHDEELWRHMEVTTKVKTKMRQIY

SEQ ID NO: 65253 - protein, 133 aa, Zea mays
  Coding DNA Sequence Number=SeqID_23474
  Gene Ontology: Mol. function=nucleic acid binding; Cellular component= intracellular
  Homolog annotation: Hit_ID=Q6ZAQ9; Match level="QueryCoverage=73%, HitCoverage=10%, E-value=1e-47, Identity=85%"; Hit description =Putative S-locus protein 4
MDWHVTKNRNSKNRKQSSRKYFVTVEEWLRAAETVGNDGVPAFVPSDPVPDRKEEREIAVPADEEQTACALCQEPFEDFYSDETDEWMYRGAVYMNAPDVLLNHFADPSYGFSECLILLAYSHGPRKNAILAV

SEQ ID NO: 65254 - protein, 476 aa, Zea mays
  Coding DNA Sequence Number=SeqID_23475
  Gene Ontology: Cellular component=nucleus; Biological process =intracellular protein transport
  Homolog annotation: Hit_ID=Q6ZAQ9; Match level="QueryCoverage=96%, HitCoverage=48%, E-value=1e-170, Identity=66%"; Hit description =Putative S-locus protein 4
MAGAAASPAAGHVVERFRSRLREEAGGGEPGAAAVVHVYAEALRELTFNCKPVITELTIIAGQHATLAAGGIADAICARVAEVPPDQILPSLYLLDSIVKNIGGEYVEHFATRLRSVFVDAYYRVHPNQYTSMRRLFRTWWPVFPSSVLRSIEDDLQFSSSENNRPTTSTNLHQTESLSPRPSHGIHVNPKYLEAQHKFKQANVVHQPAARDTRQMTDVQEDLINGLASNSSCERPSIFQKSSLQYADDPDQQETFRPLAGTRAASPHLLSTHASDMNLDGPLVNSRRNLSISPPLDVFSRNVSPKRALERLPPSHSVLGPDPRKFTDRNGRLRWGLDDGAQRPTISMLDEEYRKQSARELIDAYGNCQGRDADERLPKVQRLDPNGMASRSSARNWLTSEEEEYSWEDMSPTLTDRVSSSMPSFPPGTMRTGFPGANAGLLESDVGRHNFPSQATRLSVDGSPFNLEDRFSTASV

SEQ ID NO: 65255 - protein, 397 aa, Zea mays
  Coding DNA Sequence Number=SeqID_23476
  Gene Ontology: Mol. function=RNA binding; Cellular component =ribonucleoprotein complex; Biological process=mRNA processing
  Homolog annotation: Hit_ID=Q6Z4U2; Match level="QueryCoverage=73%, HitCoverage=68%, E-value=7e-81, Identity=51%"; Hit description =Putative CRS2-associated factor 1
  Pfam annotation: Domain name=CRS1_YhbY; Domain location=141-244; Score=78.3; E_value=2.4e-20; Accession=PF01985.11; Description=CRS1 YhbY domain
  Pfam annotation: Domain name=CRS1_YhbY; Domain location=279-362; Score=56.9; E_value=6.9e-14; Accession=PF01985.11; Description=CRS1 YhbY domain
  Pfam module annotation: Pfam domain module=CRS1_YhbY::CRS1_YhbY; Domain location=141-244::279-362
MLLPRKLLPWRRPAQDAQALAGRLLRSSSSSFDPDDDDPPFTRVPKLPPRAPSTPPPKPKALAGKIRPDEPAHSDLPFDFRYSYSETDPTWRPIGFREPTRFSPFGPGRLDRPWDGTAAARVGDYASGDERIREEVLGEPLSEEEVAALVERYRHSDCSRQINLGKGGVTHNMLDDIHNHWKRAEAVRIKCLGVPTLDMDNICFHLEVIIRYYMLECTRTRALLSDKTGGKVVSRSINIIILYRGRNYDPQKRPGVPLMLWKPLAPIYPKLVQNVAEGLTFEETKELRNRGLNSPPLTKLTRNGVYVNVVDKVREAFKTVEVVRLDCTHVGTTDCKKIGVKLRDLVPCIPILFKDEQIILWRGKELLLRCDIDDGSGGLLSVDRGGGEGRGRSPVIQ

SEQ ID NO: 65256 - protein, 226 aa, Zea mays
  Coding DNA Sequence Number=SeqID_23477
  Gene Ontology: Mol. function=transporter activity; Cellular component= integral to membrane; Biological process=transport
  Homolog annotation: Hit_ID=O64909; Match level="QueryCoverage=47%, HitCoverage=27%, E-value=9e-48, Identity=88%"; Hit description =Glucose-6-phosphate/phosphate-translocator precursor
  Pfam annotation: Domain name=TPT; Domain location=1-107; Score=76.8; E_value=7e-20; Accession=PF03151.7; Description=Triose-phosphate Transporter family
MSLVILTPFAIAMEGPQMWAAGWQKAVAEVGPNVVWWIAAQSVFYHLYNQVSYMSLDQISPLTFSIGNTMKRISVIVSSIIIFHTPVRPVNALGAAIAILGTFLYSQNTGNLVLHGLRCALNSAKIVILMQAKALKCTGRDMNRRQVYLNNTVTKFTDAVSLWKENGRCVEGLQPWDLGVYARFCGSSSHAVPFYRYLAGCCSRVKTSNCRAGQSLVGTHALRLPA

SEQ ID NO: 65257 - protein, 211 aa, Zea mays
  Coding DNA Sequence Number=SeqID_23478
MGTGHPYRGEAVPVTREGGRSGSAAAAAAALGGSRGGGSVGRGRDVRRLAVGEGEGNRKSKLTRIDDGKGKLRPEGRRDKDKPLFNSYDPTFQSRSLIPHNGAAPRSRPETVAPGLPSPGSGWPRTPPPCPYPDYAAVVRSHPHTLLPASRLVGTDAWMSRLQPTVAQGGSATRNPEDARRPEGMGEFLLRSMHQHLLQGTPPPSQSLPPD

SEQ ID NO: 65258 - protein, 166 aa, Zea mays
  Coding DNA Sequence Number=SeqID_23479
  Gene Ontology: Mol. function=heat shock protein binding; Biological process=protein folding
  Homolog annotation: Hit_ID=Q9LJG5; Match level="QueryCoverage=60%, HitCoverage=43%, E-value=2e-16, Identity=47%"; Hit description =Arabidopsis thaliana genomic DNA, chromosome 3, P1 clone: MAG2
  Pfam annotation: Domain name=DnaJ; Domain location=44-105; Score =27.5; E_value=9.5e-06; Accession=PF00226.21; Description=DnaJ domain
MAHFAPWIRPCLVELLWRERKVFSLGDSSLQQQHATSSDAREEGVPNGDYNEDQTTKDMSEKWHPDKCSSSSISVKHMEEAKEKFQEIQGAYSVLSDANKRLLYDVGVYDDEDDEDSMQGMGDFIGEMTQMMSQVRPMRQESFEELQQLFVDMFQSDMIQDSAWDC

SEQ ID NO: 65259 - protein, 72 aa, Zea mays
  Coding DNA Sequence Number=SeqID_23480
MVILDRTPAAAQGAACSPLPKSPRFSWEVASPPSDPILPYLSLRGSTSAIQGLVTHAYQYPCGIELGCTSIC

SEQ ID NO: 65260 - protein, 261 aa, Zea mays
  Coding DNA Sequence Number=SeqID_23481
  Gene Ontology: Mol. function=protein serine/threonine kinase activity; Cellular component=condensed nuclear chromosome, pericentric region; Biological process=protein amino acid phosphorylation
  Homolog annotation: Hit_ID=Q7XIR5; Match level="QueryCoverage=50%, HitCoverage=52%, E-value=6e-42, Identity=54%"; Hit description =Serine/threonine-protein kinase bub1,checkpoint-associated-like protein
MIEKDFFLMQFCRALPQGCRISAYSSWGSKRLTVQHVQHRISIYADDIILFLRPTRGDLIIIKELLDIFGHVIDLRTNMCKSSNIQKNEPSVIDPWSPSTRNTLLEKINGGLRKFSGYYKSNKVYCGKVPLTSSLNVLRNKGIKLGGRKYQIKGSTGTGAFAKVYKATVDSNAEEMVALKDVINSHLVVGRYMDEVLCMYYTIEMLNMLETLHSVGIIHGDFKPDNILVCYPRVVMGIPILIFVFSFQLNVDVLVSRSFEN

SEQ ID NO: 65261 - protein, 262 aa, Zea mays
  Coding DNA Sequence Number=SeqID_23482
MGGSGVGGGGRKARNFATFRLFPRAGAADPNDRVFVRVDNNDYTVPGFADEDSFDPSLSDPSFGDGNFLSASGPLPEHVRREILELGLPDDGYNYLSHLRELRPAAVAASSFVPSSTARPEPVPLDVKAYDASRVRVGPSEGELDEGKTMCKVAAKTAPVRRIEKAVDDCWMRMRMSQSQDGGYGLAAKSTNSLSSGRRQLWTGGKINKFTVKCQQINSLSAELGTGGGYGHWELWAEVKGRREEGGRRPATYLAVLEWRRL

SEQ ID NO: 65262 - protein, 101 aa, Zea mays
  Coding DNA Sequence Number=SeqID_23483
MDIHKPPHFDGTNFSYYSARMACCLEVVEITSLLEMYSRFNLIINELNSIGINKLGDADIMRKNISLIPQQKYGSIITILHNMEGLKPNDSDDCDWKICGI

SEQ ID NO: 65263 - protein, 59 aa, Zea mays
  Coding DNA Sequence Number=SeqID_23484
MDASSRSTLNTLNLPPEQIHVDLCQRKTHEPGSIKKNMVAPEELKIRAATTNRTDEVRI

SEQ ID NO: 65264 - protein, 121 aa, Zea mays
  Coding DNA Sequence Number=SeqID_23485
MADDRDRAEDTLFGIDRVSLDGIGRSRTLLISLKPLPSICDPTVTVPYPFGSNLGRQHLIGRPSAHRTPSPSHNCKRDPGKCLNQPAVHSNNEQATVESEDPGEQQIEVAEQELIEGKLCP

SEQ ID NO: 65265 - protein, 97 aa, Zea mays
  Coding DNA Sequence Number=SeqID_23486
MAAPKEESRLVGQGEEAVMTEAGRVKLPRLQCSQGVVTRKASDKRKTEGAGASTIGHPITVTCPTFVDDPGTKAGQSGTGADSSAMKVGRSADDQKQ

SEQ ID NO: 65266 - protein, 103 aa, Zea mays
  Coding DNA Sequence Number=SeqID_23487
MVLSVTGEDDWFHAALGWRVRGRARHLTSRSHGIGIAANSSGRRGKETAAPAMRGNTVEEGADNTGPLVSVTGRNSKCVRDTNERLPRGALLSARAGWRSGPH

SEQ ID NO: 65267 - protein, 64 aa, Zea mays
  Coding DNA Sequence Number=SeqID_23488
  Homolog annotation: Hit_ID=Q2RBJ6; Match level="QueryCoverage=61%, HitCoverage=9%, E-value=1e-12, Identity=80%"; Hit description =Protein phosphatase 2c, putative, expressed
MGICCGKAKAAAGEPDDDEGLGFPWMHDDLFHSHLWASAGVSVHTKQGWKGANQDAMTVCQVAT

SEQ ID NO: 65268 - protein, 182 aa, Zea mays
  Coding DNA Sequence Number=SeqID_23489
MGRRETKREGGKKPEGDRRKRGNPRPSCLSRAQVGVRRLPGLSPSPSPGSGEAEFVVFQGRARVRALGRARRSFLWRPRPDLAAVSLTLSSGTAVGVAQAALSSCQASQWSGEATFALNAPAIRSVGVATWPRLLLGEDWAWGEPKLCADGGYQLRLGVLGGTCLSRLRFVPVGARQRTRRV

SEQ ID NO: 65269 - protein, 75 aa, Zea mays
  Coding DNA Sequence Number=SeqID_23490
  Subcellular localization annotation: CTP_CleavageSite=43; ConfidenceScore=5.78e-01
MAAASASACACSSSSRVSSFTFASSSEPAESSSAGGHFSFGLRGSTTSRTDRGMGTSQLKVCMLHATRPACVPAR

SEQ ID NO: 65270 - protein, 228 aa, Zea mays
  Coding DNA Sequence Number=SeqID_23491
  Homolog annotation: Hit_ID=Q2QXG2; Match level="QueryCoverage=27%, HitCoverage=24%, E-value=2e-09, Identity=47%"; Hit description =Uncharacterized plant-specific domain TIGR01568 family protein, expressed
  Pfam annotation: Domain name=DUF623; Domain location=161-220; Score =61.7; E_value=2.3e-15; Accession=PF04844.4; Description=Protein of unknown function, DUF623
MSLAGGGDGCSRRGECGGRLELPRQQPPMVVDVGCNCRAPRLLSSLISSLKSHARGVGRPNPNSSRHASSSSWSSSATTAFTSSTSLTTATTTFSSLDHHPSSWVPSTCAADTNAAVYVVDDDAEPARPAQRRRRRRQRRRGRCGRAATWEEAAVAVEVESAAPYEDFRDSIVAMVTEREMYAWEDLNALLHQFLALNSPRHHPLILSAFADLWAPRGGPFGPPSPCL

SEQ ID NO: 65271 - protein, 727 aa, Zea mays
  Coding DNA Sequence Number=SeqID_23492
  Gene Ontology: Mol. function=RNA-directed DNA polymerase activity; Cellular component=intracellular; Biological process=RNA-dependent DNA replication
  Homolog annotation: Hit_ID=UPI00004C1731; Match level="QueryCoverage =94%, HitCoverage=53%, E-value=0.0, Identity=78%"; Hit description =UPI00004C1731 related cluster
  Pfam annotation: Domain name=RnaseH; Domain location=294-421; Score =2.7; E_value=3.2e-05; Accession=PF00075.14; Description=RNase H
  Pfam annotation: Domain name=rve; Domain location=423-598; Score =93.1; E_value=8.3e-25; Accession=PF00665.16; Description=Integrase core domain
  Pfam module annotation: Pfam domain module=RnaseH::rve; Domain location=294-421::423-598
MKESDQLATSFITPFGMYCYVTMPFGLRNAGATYQRCMNHVFGEHIGRTVEAYVDDIVVKTWKASDLLSDLEVTLRCLKAKVVKLNPEKCVFGVPRGMLLGFIVSERGIEANLEKIAAITSMGPIKDLKGVQRVMGCLAALSRFISRLGERGLPLYRLLRKAECFTWTPEAEEALGNLKALLTNAPILVPPAAGEALLIYVAATTQVVSVAIVVERREEGHALPVQRPVYFISEVLSETKIRYPQIQKLMYAVILTRRKLRHYFESHPAIKSQVLADFVAEWVDTQLPTVPIQPELWTMFFDGSLMKTGAGTCLLFISPLEKHLHYVLRLHFPASNNVAEYEALVNGLRIAIELRVRRLDARGDSQLVINQVMKNSHCRDPKMEAYCDEVRCLEDKFYGLELNHIARRYNETADELAKIASGRTMVPPDVFSRDLHQPSVKIDDTPEPEAPSAQPEKAPGGYTHLLVAIDKFSKWIEVRPLNSIMSEQAVAFFTNIIHRFGVPNSIITDNGTQFTGRKFLDFCEDHHIRVDWAAVAHPMMNGQVERANGMILQGLKPRIYNDLNKFGKRWMKEFPSVVWSLRTTLSRATGFTPFFLVYGVEAILPTDLEYGSPRTRAYADQSNQASREDSLDQLEEARDMALLHSAQYQQSLRRYHARGVRSRDLQVGDLVLRLRQDARGRHKLTPPWEGPFVIAKVLKPGTYKLANSQGEVYNNAWNIQQLCRFYP

SEQ ID NO: 65272 - protein, 43 aa, Zea mays
  Coding DNA Sequence Number=SeqID_23493
MGIESRLEEGLETNNNEYGVRKRVLAMSCSINVDNFGSLLKGL

SEQ ID NO: 65273 - protein, 76 aa, Zea mays
  Coding DNA Sequence Number=SeqID_23494
  Subcellular localization annotation: CTP_CleavageSite=42; ConfidenceScore=5.21e-01
MPIASSPYQAQRRQQTGTTLHQDSRHTHHTTTKSSPTPVAPVANETSERTIDDLGKSKMSMRISKGVHNKKDTKYD

SEQ ID NO: 65274 - protein, 237 aa, Zea mays
  Coding DNA Sequence Number=SeqID_23495
  Subcellular localization annotation: CTP_CleavageSite=49; ConfidenceScore=5.43e-01
MAGRREVTTAFAPSPAISHTHVLAPASPRCTPPACIRRNGRFGRIGRARIAARTAPARTARSPTGTAPRILSRDVVHAVPHARESRRDPHARAPSLRVVHAAPHARNGCLPMRLGNARTARHDPCTRLPITAPSHFACPQQRRCPALDRDLRSHVEIPVRHRLRVLCVSTDGMQTHRTGAGEVVVMEDDDGRQMWCPTDECQCLIAFVPKSSVDWNQRSFVGWLCEDCIAILWLVSE

SEQ ID NO: 65275 - protein, 43 aa, Zea mays
  Coding DNA Sequence Number=SeqID_23496
MEAPCACCGSLKVKLDERMKLDLLRFIDILLHNVKDLYLFMIS

SEQ ID NO: 65276 - protein, 178 aa, Zea mays
  Coding DNA Sequence Number=SeqID_23497
  Subcellular localization annotation: CTP_CleavageSite=36; ConfidenceScore=5.14e-01
MGNTVAPRMCRKEASAAAATARAQRTRPKSLVAEVSAAVAPDVEPRRSAAAAAAASVTPRKRRDDVELDETTRAGPGRSRARAGGVRVSWAGGVGSDDDDAVRKAKASVVVTVKVVLKRKDAEALVARLNAQGARERKARMEELKGELRAEDCVGGGASTSPCRDPWKPRLAPIKENY

SEQ ID NO: 65277 - protein, 109 aa, Zea mays
  Coding DNA Sequence Number=SeqID_23498
MYSERSLVGFGVLDDNTIKETIDRTEDEGKKDFKEPSAWENVKKTEVPKAKGEEDGLQEVKVDQAKKSPTALKTMIYEHDLQPLRKCIWLNGASHKAQDPDQAETWSQE

SEQ ID NO: 65278 - protein, 71 aa, Zea mays
  Coding DNA Sequence Number=SeqID_23499
MARLRRWLAGGDLRRRERVIATWGSRRKGEAGNRELHILTPLKAGSNRKQLNSAAICHFGCRMDFSCPAIC

SEQ ID NO: 65279 - protein, 242 aa, Zea mays
  Coding DNA Sequence Number=SeqID_23500
  Gene Ontology: Mol. function=transcription factor activity; Cellular component=nucleus; Biological process=regulation of transcription, DNA-dependent
  Homolog annotation: Hit_ID=Q6ETB0; Match level="QueryCoverage=86%, HitCoverage=88%, E-value=3e-41, Identity=50%"; Hit description =Putative AP2 domain-containing transcription factor TINY
  Pfam annotation: Domain name=AP2; Domain location=47-111; Score =143.9; E_value=4.3e-40; Accession=PF00847.10; Description=AP2 domain
  Subcellular localization annotation: CTP_CleavageSite=38; ConfidenceScore=5.19e-01
MPDRAESSPASSREASSSPPLSATETAARRSASGCGKRARARDGEKHPSYRGVRMRAWGKWVSEIREPRKKSRIWLGTFPTPEMAARAHDAAALVVKGPAAVLNFPEMAAALPRPATAAPRDVQAAAVRAAAMEPSMMLGPTAPLPRSALAPVKGQVHDDELEAIVELPPLDEDFSELLVPLGTASFSFHDATQASWRDPEWIDHDAGYMAAARDADELFGFGPDGDHGWAQPFGSTFLWNM

SEQ ID NO: 65280 - protein, 87 aa, Zea mays
  Coding DNA Sequence Number=SeqID_23501
MHISYSLHSLDYNLADGEYVLIPEHGAVQEEDQEQAPEITIEDLPTAPAIEGKPRYGGYKCSHYTAVARVSGAVYAKAVRFRIWLMV

SEQ ID NO: 65281 - protein, 315 aa, Zea mays
  Coding DNA Sequence Number=SeqID_23502
  Homolog annotation: Hit_ID=Q69K57; Match level="QueryCoverage=68%, HitCoverage=36%, E-value=4e-16, Identity=32%"; Hit description=Smr domain-containing protein-like
  Pfam annotation: Domain name=PAM2; Domain location=12-29; Score=28.9; E_value=1.8e-05; Accession=PF07145.5; Description=Ataxin-2 C-terminal region
  Subcellular localization annotation: CTP_CleavageSite=46; ConfidenceScore=5.00e-01
MSIEERKISMISKSTALNPNAEEFVPSSLRSFSDSSKKSDATMIVSGSSKESSTDKPESILRSNSDEEAHQYWQQQLPDDITPDFKVLGQDESPGPDSLSLTGLSINDGIDTSIFSPNQTLGVQHHASPFIRDKLNTRPKINLSGPTYMDERSQAAILSPTAGSMSPNAAPWVKNLRNGGHYNTSRRDATASHYNGDSSIGMVMAQLKHDYGYHESAGDDIVSPSAGREHISLDVPRGRYKTTSLPVPGLGSSRGSQGVLGVDQTQYAYIASFEASVGTGCGQGRPGLDLQHPEGWGQGKRAVWGYDGNEQCGVL

SEQ ID NO: 65282 - protein, 275 aa, Zea mays
  Coding DNA Sequence Number=SeqID_23503
  Subcellular localization annotation: CTP_CleavageSite=54; ConfidenceScore=5.59e-01
MDQRQPQSPHSQRPPYHARTPDANAGVHSSVSPQQAHTSHSSASATATTAGATSCSAATDIGEKSRERFRRRSTAEGKGIRTSLPRIIRIRQGKGGGEEVLLGGGEGMGEGRWMERRLVHGGGLEEVESRAAELRLVELIALASGCAAFVFEETGGPLPASLLQHQQQSKAPSVKSPVGQLQRMKSCLRVKTEYSTIAGESLLCSPIKEDGDKRAKFNKVRTTVYDSSPETLERSRERLSAMGTSPLVFTDTNVASLTIVVVAQSFTDEHNGHQI

SEQ ID NO: 65283 - protein, 149 aa, Zea mays
  Coding DNA Sequence Number=SeqID_23504
MGVLNWMQTKLHGSHRSRRRPAEFSASTARPADASGGVPQTENNLDDGWTTAMLSIGTFGMGEGNTTKSCGHLDELSRLQEELKSLATANELGRIVWGLLLKKAHPENPAFSDTAARDDQVVRMAPKGKVQADDKGGKWIRTDSQCKFI

SEQ ID NO: 65284 - protein, 939 aa, Zea mays
  Coding DNA Sequence Number=SeqID_23505
  Gene Ontology: Mol. function=oxidoreductase activity, acting on single donors with incorporation of molecular oxygen, incorporation of two atoms of oxygen; Cellular component=chloroplast; Biological process=fatty acid biosynthetic
  Homolog annotation: Hit_ID=Q8H016; Match level="QueryCoverage=93%, HitCoverage=94%, E-value=0.0, Identity=84%"; Hit description =Probable lipoxygenase 6
  Pfam annotation: Domain name=Lipoxygenase; Domain location=235-934; Score=1029.7; E_value=0; Accession=PF00305.9; Description =Lipoxygenase
  Pfam annotation: Domain name=PLAT; Domain location=121-223; Score =66.9; E_value=6.7e-17; Accession=PF01477.13; Description=PLATLH2 domain
  Pfam module annotation: Pfam domain module=Lipoxygenase::PLAT; Domain location=235-934::121-223
MAAPCRDLTGLRRGLAAARLAPGRRGANKLCLAPFHHRAPPPQQQQGRRRQRQGLKVVAAISEDLPRLAAPGTGKGAPEGRRPEKVLVRAALTVRRKHKEDLKEALAGHLDALWDMVGRSVALELISTKIHPRTKKPLHSGQASIKDWCQKRGVKGEHVVYTAEFMVDSDFGEPGAITVANRHHREFFLESIVVEGGLPCGPVHFACNSWVQSTRELPGKRVFFSNKPYLPSETPPGLRELRDKELKDLRGDGTGVRKLSDRIYDYATYNDLGNPDRGKEFIRPILGGDNIPYPRRCRTGRPPTDTNMLAESRVEKPHRIYVPRDEAFEELKQGAFSSGRLRAVLHTLIPSMIATISAETHSFQGFHHVDNLYKEGLRLKLGLQEHLFQKIPLVQKIQESSEGMLRYDTPRILSKDKFAWLRDDEFARQTVAGINPVSITRLTVFPPVSKMDPAIYGPPESSITEAHITGQLNGLTVQQAVDEAKLFILDYHDVYMPFLDRINAIEGRKAYATRTILFLTKAGTLKPIAIELSLPPSKAGEPRPSKVLTPPADATSNWLWMLAKAHVSSNDAGVHQLVNHWLRTHAVMEPFILAAHRRMSAMHPVFKLLHPHMRYTLEINALARQSLISADGVIESCFTPGPVSFEISAAYYRDHWRFDLEGLPSDLVRRHSCRCPIPVCSCLFLPLSTDISSSLVIRRVAVEDASQPHGIRLLIEDYPYANDGLLLWSAIRSWVESYVQLYYPDAGTVQSDDELQGWYHETVHVGHADIRHAPWWPSLSTPGDLASILTTLVWLASAQHAALNFGQYPLGGYVPNRPPLMRRLLPDPERDAAEYATFMADPHRFFLNAMPGVLEATKFMAVVDTLSTHSPDEEYLGEERDEPWTGDAAAVAAHDMFTADVRRAEEAIDSRNADQRRKNRCGAGVLPYELLAPSSPPGV

SEQ ID NO: 65285 - protein, 45 aa, Zea mays
  Coding DNA Sequence Number=SeqID_23506
MAIWPRLLLREAWASGVPKMLDNGQTGIRTGRIDTSLLGSLMANT

SEQ ID NO: 65286 - protein, 67 aa, Zea mays
  Coding DNA Sequence Number=SeqID_23507
  Subcellular localization annotation: CTP_CleavageSite=38; ConfidenceScore=5.65e-01
MGSLPGARSRPPPATSAASAYARTVRPPGRGPSGRQASTMVYTPLPLNLKTTPYSVGGNKLNKEQRV

SEQ ID NO: 65287 - protein, 148 aa, Zea mays
  Coding DNA Sequence Number=SeqID_23508
MALLKKSPKWRPGGEERDSRELYSLSALSVIPTSTRPGGPAVRARRTFYLYSKRETEDPTKSHDPPKSRTELLRDYGGPTLALVCYDAPESFAVSSRRSRTVLGPHRPEAQYGGGGWPEFPPNGARFFCRPERIGAARCEGRGTGASD

SEQ ID NO: 65288 - protein, 101 aa, Zea mays
  Coding DNA Sequence Number=SeqID_23509
MGLAITAAPCSPTAELAIRAPDKRHRTFFAPTPCLGRLLAIFYRLHETARLPAASPAAPPESYGADHGRTRPLRTSSPNTENRIALPEAGIHANNRVDSIP

SEQ ID NO: 65289 - protein, 204 aa, Zea mays
  Coding DNA Sequence Number=SeqID_23510
  Subcellular localization annotation: CTP_CleavageSite=56; ConfidenceScore=5.02e-01
MAPRTLYDDSDSQPPLRKQEDVSKDSTAPTAVLPPGSSTPPTTTTPHEPGAKTSPAATMAWMDSKREVGRAGNCAIVKLCGRNSGWGTRTVSTSSGEAPRTAATALTARRGRERWWRAQVLDAGRRVELGGLGRAGASGAGGAAPGGRVQRAGAPGAGVRSWLWKERQGKREERKGWAGGLRREREWRLGQGAGPNGSFRVRVS

SEQ ID NO: 65290 - protein, 101 aa, Zea mays
  Coding DNA Sequence Number=SeqID_23511
MADGQESRTASRKVRGGLAFWSLLLPESGEGDEVRLESFHRSKWKRPQEPKGPGSENKGEVETNVERKGGHRKRQSNRTSDRVNAYGGLRRDDAGDTIYHG

SEQ ID NO: 65291 - protein, 138 aa, Zea mays
  Coding DNA Sequence Number=SeqID_23512
MGDHISGRVRRAICGQVHSVHYNLQPYQVSNHTGLVGPAQLHGLVTSIPAWPLASVGSVATACGQERGRVARGLLAWRSGAVRPGEAAVRGGNQARGQDAGSPQPLARRLVGRRAAQCSPSSRTASAPGPLGGSGWPP

SEQ ID NO: 65292 - protein, 890 aa, Zea mays
  Coding DNA Sequence Number=SeqID_23513
  Gene Ontology: Mol. function=protein binding; Cellular component =membrane; Biological process=defense response
  Homolog annotation: Hit_ID=Q9LG50; Match level="QueryCoverage=64%, HitCoverage=41%, E-value=1e-70, Identity=34%"; Hit description=NBS -LRR disease resistance protein-like
  Pfam annotation: Domain name=LRR_1; Domain location=352-373; Score =8.4; E_value=7.6; Accession=PF00560.23; Description=Leucine Rich Repeat
  Pfam annotation: Domain name=LRR_1; Domain location=375-396; Score =6.3; E_value=19; Accession=PF00560.23; Description=Leucine Rich Repeat
  Pfam annotation: Domain name=LRR_1; Domain location=398-419; Score =14.1; E_value=0.52; Accession=PF00560.23; Description=Leucine Rich Repeat
  Pfam annotation: Domain name=LRR_1; Domain location=421-442; Score =8.0; E_value=9; Accession=PF00560.23; Description=Leucine Rich Repeat
  Pfam annotation: Domain name=LRR_1; Domain location=444-466; Score =12.8; E_value=1.1; Accession=PF00560.23; Description=Leucine Rich Repeat
  Pfam annotation: Domain name=LRR_1; Domain location=468-491; Score =13.5; E_value=0.78; Accession=PF00560.23; Description=Leucine Rich Repeat
  Pfam annotation: Domain name=LRR_1; Domain location=496-517; Score =0.6; E_value=2.2e+02; Accession=PF00560.23; Description=Leucine Rich Repeat
  Pfam annotation: Domain name=LRR_1; Domain location=519-541; Score =12.4; E_value=1.3; Accession=PF00560.23; Description=Leucine Rich Repeat
  Pfam annotation: Domain name=LRR_1; Domain location=543-564; Score =4.5; E_value=41; Accession=PF00560.23; Description=Leucine Rich Repeat
  Pfam annotation: Domain name=LRR_1; Domain location=566-587; Score =16.3; E_value=0.11; Accession=PF00560.23; Description=Leucine Rich Repeat
  Pfam annotation: Domain name=LRR_1; Domain location=589-611; Score =14.9; E_value=0.29; Accession=PF00560.23; Description=Leucine Rich Repeat
  Pfam annotation: Domain name=NB-ARC; Domain location=1-231; Score= -43.9; E_value=1.7e-07; Accession=PF00931.13; Description=NB-ARC domain
  Pfam module annotation: Pfam domain module=LRR_1::LRR_1::LRR_1::LRR _1::LRR_1::LRR_1::LRR_1::LRR_1::LRR_1::LRR_1::LRR_1::NB-ARC; Domain
  Pfam module annotation: Domain location=543-564::566-587::589-611::1 -231
MGNVSLQKIGRDIVLQTTEKIEGNMQMQSIKNVVQDILNKYSCLIVLDSLWGKDEEVNELKQMLLTGRKTESKVIVTTHSSKVAELISTVPPYKLSLLSEDDCSAIFCQRAIAGQSISDPLFREYGEEIVRRCEGMPLVANFLGSVVNAQRQRREIWKAARDKDMWKIEEDYPENKIVPMFPSFKIVYYSMPHELRLCFVYCSIFPKGYVIDKKKLIQQWIALDMIESKHGTLPLDVTAEKYIDELKDIYLLQVLERHQIDAEISNTSEEKLYMNNLAHDLARSVAGEDILVILDAENVRCNRNYDYRYAQVSTSSLQSIDSKAWPSKARSLVFKSSAELQHVSEVLSVNKYLRVLDISGCSVKEMPAPIFQMKQLRYLDASTLSIADLPPQISGFPKLQTLDLSDTEVTELPAFIANLKRLNYLNLQGCKKLKQLNNLDLLHELHYLNLSRCLEVRSFPASLKNLRKLRFLNLSQCSKLPTLPDELLQSFSSFSSIVDLNLSGFEFQMLPDFFGNICSLQFLSLSKCSKLELLPQSFGQLAYLKGLDLSFCSDLKLPESFKYLSSLQFLNLSHCHNVEYLPSFDKLSNLEYLNLSQCAGLKALPKSLSNQKNLQIEVFGCQDCIVQSCYLSPQSHTCSQEVKEVGSSSDISDTILKESANRDVALGISFPEIDEVGYPHNNLKQKLTLSYHMDGHKSEEPNFITKQNSTTETVQLTPRHQFPSSTCRISSIASSSSALFASGSSSDVSITYNPVSNDKAGDCISLLRRIEKRSQQGPVQNKRPFKAIHKNTHISYNKLLLLDPPLDLCNGGSRRKLWLNRVMDALGFEYSNHEDPSTNTGAGEKRKGATKNEAEVLSSGQVKKKAKTLVQKDAVAKKASAPTKNAVAEE

SEQ ID NO: 65293 - protein, 268 aa, Zea mays
  Coding DNA Sequence Number=SeqID_23514
  Subcellular localization annotation: CTP_CleavageSite=73; ConfidenceScore=5.12e-01
MGVPKGCLDGLNCLLNSCDCSTSGVRSGRSLLAPINSLLAPTVLFTRSLIICFLLLCFPCLSNQPWVEVGGVVAGRADGKRKRAPSPPSEDFGDFEYSEETSSEADRSPASPLVSSKDSDDSMGLSTVARRTGAPSSALGSVARMSRGSPRTRRTPPRSGAEAMVTTRATAAAATTTTGVTAARATAARATAATATKGNDDGSNGDGEGDGDGGSGGSSKGDGVGDRYSLGPLEGEKSSHEASGQLPRKVIPSWAGLELLAEWADLRR

SEQ ID NO: 65294 - protein, 391 aa, Zea mays
  Coding DNA Sequence Number=SeqID_23515
  Gene Ontology: Mol. function=phosphatidylcholine-sterol O -acyltransferase activity; Cellular component=integral to membrane; Biological process=lipid metabolic process
  Homolog annotation: Hit_ID=Q6YY78; Match level="QueryCoverage=90%, HitCoverage=88%, E-value=1e-127, Identity=61%"; Hit description =Putative acyltransferase
  Pfam annotation: Domain name=Abhydrolase_1; Domain location=113-353; Score=-11.2; E_value=0.059; Accession=PF00561.10; Description =alphabeta hydrolase fold
  Pfam annotation: Domain name=LACT; Domain location=79-386; Score= -55.6; E_value=8.3e-09; Accession=PF02450.6; Description =Lecithin:cholesterol acyltransferase
  Pfam module annotation: Pfam domain module=Abhydrolase_1::LACT; Domain location=113-353::79-386
  Subcellular localization annotation: CTP_CleavageSite=38; ConfidenceScore=5.08e-01
MEPKLVASSSSAAVSLLLLLLPSPLRLREHLSGNNAVSANNFHPIFLVAGMSCSDLEARLTEEYRPSVPHCGAMKGKRWFGLWKNSSELLSRDYMQCFEEQMSLVYDPDINEYRNLAGVETRVPNFGSTRAFSYKNPLKSLTSEVYSRYFKELMELVEAASERTRKKAVILGHSFGGMVALEFVRNTPPAWRREHIERLVLVAPTLPGGFLEPVRNFASGTDILYVPATTPLATRAMWRSFESAIVNFPSPAVFGRLQAPLVVTRERNYSASAQDMERFLAAVGSGEAAEPFRRRAVPKMSSFAAPMVPMTYISGVGNRTPLRLVFWGDDIDAAPEAVAYGDGDGKINLISVLAFEKEMRRQPEQKKQFKSIKINKAQHSTIVTDDFALHR

SEQ ID NO: 65295 - protein, 428 aa, Zea mays
  Coding DNA Sequence Number=SeqID_23516
  Gene Ontology: Mol. function=phosphatidylcholine-sterol O -acyltransferase activity; Cellular component=integral to membrane; Biological process=lipid metabolic process
  Homolog annotation: Hit_ID=Q6YY78; Match level="QueryCoverage=90%, HitCoverage=90%, E-value=1e-134, Identity=68%"; Hit description =Putative acyltransferase
MASSLLQQLLSLLLLLLPSPLRLREHLSGNHPVSANNFHPIFLVAGMSCSDLEARLTEEYRPSVPHCGAMKGKGWFGLWKNSSELLSRDYMQCFEEQMSLVYDPDINEYRNLAGVETRVPNFGSTRAFSYKNPLKSDWCLGKLRAALEDMGYRDGDTMFGAPTTSATRRRPPGPDVRGVLPLLQGAVGAGRGREREDPEEGRHPRPQLRRYGRARVHPEHSAGVAARAHRAPRPGRADAPRRVPGAGAQLRVRDGHPLRASDDAAGHASHVEELRERHRELPVAGRVRAPAGAARDHQGAELLRVRARHGALPRRRRLRRGCGALQETGRPQDEQLRGARWTPLRLVFWGDDFDAGPEAVAYGDGDGKINSISGLAFEKEMRRQPEQKKQFKSIKINKAQHSTIVTDDFALHRVIQEIVEANNQKIPS

SEQ ID NO: 65296 - protein, 77 aa, Zea mays
  Coding DNA Sequence Number=SeqID_23517
  Gene Ontology: Mol. function=nucleic acid binding
  Homolog annotation: Hit_ID=Q2QQM2; Match level="QueryCoverage=48%, HitCoverage=22%, E-value=1e-09, Identity=76%"; Hit description =Expressed protein
MEELTEGVNNLAITEPQMKNKIQVSNTKKPLFFYVNLAKRYMQQHEEVELSTLGMSKTLLLFMILLPFYTCYTVMLC

SEQ ID NO: 65297 - protein, 66 aa, Zea mays
  Coding DNA Sequence Number=SeqID_23518
  Subcellular localization annotation: CTP_CleavageSite=53; ConfidenceScore=5.15e-01
MGSEAGRPLEASSSCGIGQSGITPDSPVPPLTVVLTSSTITVLHCSCQSRPLRAGTFGLRIKAYTM

SEQ ID NO: 65298 - protein, 216 aa, Zea mays
  Coding DNA Sequence Number=SeqID_23519
MGDDHEFEAVGKRHVDGGEHRHHNYIGDRNALEAIALGVPPEMQGVIASKATTKIAWDTLKKTHLGVDQEAQGGGRRYDLGGSSGVGALAGLNLTEDKLVARFMSRLKLFDSGSSSGSWTSPDMSYGSGGRRSREPETMAARGHHRTSTTMERGGELLSMISIVEKLDINKAFDFVSWPFLLEVLRYLRFGSVWCNIIEMMLHSSSGKGASKWRAR

SEQ ID NO: 65299 - protein, 111 aa, Zea mays
  Coding DNA Sequence Number=SeqID_23520
MARRRCEEDEETAWAVFFAGAAKRAETETEGLVVHPSPQGRGCPYRSCYNRALVWVKSLLMGCISVPVLGDVGSPSLRISRCALSSLPETGSGETDRDFVERGDFGRSGNG

SEQ ID NO: 65300 - protein, 255 aa, Zea mays
  Coding DNA Sequence Number=SeqID_23521
  Gene Ontology: Mol. function=methionyl aminopeptidase activity; Cellular component=cytoplasm; Biological process=proteolysis
  Homolog annotation: Hit_ID=Q2QLT5; Match level="QueryCoverage=99%, HitCoverage=57%, E-value=1e-96, Identity=70%"; Hit description =Methionine aminopeptidase 2, putative, expressed
  Pfam annotation: Domain name=Peptidase_M24; Domain location=133-255; Score=-25.2; E_value=2.9e-06; Accession=PF00557.14; Description =metallopeptidase family M24
MAAVDATTKEMDALHVGQNDETKETLIKEDKAANSNHSVVAAQSLLPEDDDDDEAQADGPSQDGAAAAVKKKKKKNKSKKKKGPLQQTDPPSIPVDELFPSGEFPEGEIQQYKDETTSEEKRDLERLHKPIYNSVRQAAEVHRQVRKYMRSIIKPGMLMVDLCETLENMVRKLIKENGLQAGIAFPTGCSLNWVAAHWTPNAGDKTVLQYDDVMKLDFGTHIDGYIVDCAFTVAFNPMFDPLLQATRDATNTGIK

SEQ ID NO: 65301 - protein, 232 aa, Zea mays
  Coding DNA Sequence Number=SeqID_23522
MEAIPVSSRDKAEASDTTSGVASPIVSDLLRTVLDTPEATSSSGTGVTEEVDPSEPLKGSFKVYIIQPPLLGGSGDLVRVALDPLLWGGPTLMWMSTEGNSYFVLDDAEERDMWAELRALIQLALRSVKVADLMSRCMGLKEEAATERTKVPLLADEVRRLKTEADLRQEEMRQLKGNLQAVATERDESQRMVAEASLHVDSLSKHLEAARSEGQALRAPMGALEKDMETTA

SEQ ID NO: 65302 - protein, 100 aa, Zea mays
  Coding DNA Sequence Number=SeqID_23523
  Subcellular localization annotation: CTP_CleavageSite=4; ConfidenceScore=5.18e-01
MAARSERTAAHSPVHGEWPNRTPTTPTAGSYARQRRYWARGERRNQVSNRAPRSNAGEEYRGGGQPQIPIPLLTASFAVMVALYVSLSLARPLAGDGVQR

SEQ ID NO: 65303 - protein, 196 aa, Zea mays
  Coding DNA Sequence Number=SeqID_23524
MYLGPHSRLLAGSPWRVSCCCVGGGFTIWVGNRVRMAAAEGAATWLDGSLGCGSMATDKEKPLSWQALGGAEVANGGAAKRPMSKGDRRSTDAPRRASDDGWCGACHPQLLANQGTALLHETGISRIRRGYGPTCGFAASPKVGLGASIDTLNMGILQMELGPPRGPIESLEKGVWRDLMTLEKKTFSGYSTKPSE

SEQ ID NO: 65304 - protein, 133 aa, Zea mays
  Coding DNA Sequence Number=SeqID_23525
RMDGADIPSHSAADGDRPPENADDGGVEDERAAAPPPERCGALASAIAGVLAGALREHEERAAATARSQDEVAAAIDRLNGARISSIRKRISAMNMLLKSIQRRIDSMDRIISTDHSSPVQKAGNEVGTRCTT

SEQ ID NO: 65305 - protein, 474 aa, Zea mays
  Coding DNA Sequence Number=SeqID_23526
  Gene Ontology: Mol. function=nucleotide binding; Biological process =translation
  Pfam annotation: Domain name=CorA; Domain location=103-430; Score= -80.6; E_value=0.027; Accession=PF01544.9; Description=CorA-like Mg2+ transporter protein
  Subcellular localization annotation: CTP_CleavageSite=73; ConfidenceScore=5.26e-01
MAAAAGAGEPGPRSEASGFGSGCNHLRPRRGPPPPSPSPAVGKPLPSGAVPRHAFVFDGEGGFSEAPWGLAVSGSSRTGEFTWHHVELPRSAGAAAAKPLHHAQALIELLCPPLTLQEILAFVATGPHCASSGDGALLLRVSAPGPVGSAYALRLAARVTESSVVTVSVGGVPRLAFGTRQASLLSEVPLGVAASLSDEGHGGGRAVDGGVIIDERLLESLLAMNHADGAHTDNPVPRTVSNLLVHVLGTHVDHVHDIVTRLEMDLDAVELQLDKGGHFLRKLLLDGRRFPKMHLDLQRLLQVVSHCEQVFPRVKEKCASKSWFATGDIAALEDLIGRLRRLKENLGFITNRITTLQASLDSWQSEQINKSLYYLSFLSIIFLPLSIVTGVFGMNVGGVPWTGQNKNPKNRDGFMNVMLICVAILLLLLLCFLFPSLYSHVTSWRTRRELTRSNSQNRRHLKLFKGHKEGYMRL

SEQ ID NO: 65306 - protein, 77 aa, Zea mays
  Coding DNA Sequence Number=SeqID_23527
  Homolog annotation: Hit_ID=Q84UR0; Match level="QueryCoverage=75%, HitCoverage=37%, E-value=6e-16, Identity=72%"; Hit description =Putative zinc-finger protein Lsd1
  Pfam annotation: Domain name=zf-LSD1; Domain location=6-30; Score =33.8; E_value=5.8e-07; Accession=PF06943.3; Description=LSD1 zinc finger
  Subcellular localization annotation: CTP_CleavageSite=18; ConfidenceScore=5.11e-01
MGHLSCGQCRTTLAYPPGATTVGCPTCRNVNPVPTRDARPQQTMVLVENPKTLDEKGKLKAKERTKGKQKQAPFSDA

SEQ ID NO: 65307 - protein, 381 aa, Zea mays
  Coding DNA Sequence Number=SeqID_23528
  Gene Ontology: Mol. function=4 iron, 4 sulfur cluster binding; Biological process=electron transport
  Subcellular localization annotation: CTP_CleavageSite=66; ConfidenceScore=5.40e-01
MPDVKSAAATVAKAVAGDSPSPAATPPAPAVASSNGTPQKPPPIPAATFDMPKPNLRGLNKPKCIQCGNVARSRCPFQCCKSCCYKAQNPCHIHVLKQSNTLPDKPSPATASSTEQPSTNLPATSSASRLAALQKLPQHFLKSLQTKKSLTKKDAVAINKWRFMKLREHMQGDIDDENEAYERYTQNVRLLEETFYPMEYADVEPEAEAPSSDEERMDLLVSEAKVRLKSDNEIADRFKERVAAILDQKLKKLLESQSADEDDKLSDPDQDDHLNPAKFSAKQKAERSASLNELLGKLTRARSEDDLKPCRDLIEQLFGKEKGSSTDRQAGVEMEQRDQESAAAAVAQPYSVPELCARMEVDEDFAAKISDEFSLSQVAQL

SEQ ID NO: 65308 - protein, 142 aa, Zea mays
  Coding DNA Sequence Number=SeqID_23529
  Homolog annotation: Hit_ID=Q6QP51; Match level="QueryCoverage=29%, HitCoverage=19%, E-value=3e-08, Identity=64%"; Hit description =Putative growth-regulating factor 1
  Subcellular localization annotation: CTP_CleavageSite=63; ConfidenceScore=5.39e-01
MEAQAHTSGNRRAGCYVRATAPPLAPLPRLLDCGTSTATRGNPATGGASGRRSKRRFAFAIMTASKKGPGKGDTPKRILLREGNRPRASLLIRGSKAGPSEGFNGRLRALGFCAHYWSEVRWPTPRKGSTVASGHSGSRAHY

SEQ ID NO: 65309 - protein, 211 aa, Zea mays
  Coding DNA Sequence Number=SeqID_23530
  Gene Ontology: Mol. function=phospholipase A1 activity; Biological process=lipid metabolic process
  Homolog annotation: Hit_ID=Q6QP54; Match level="QueryCoverage=34%, HitCoverage=25%, E-value=2e-13, Identity=58%"; Hit description =Putative kinase
MAPPVDVVGPCPRLDEVEAPLRSRSSLSSKVEVESEPPGRTRQRSSAEARAESEPWGRAKWSSSSFGAEPESKPWGWAKRSSSSSGAEPESEPWGRAERSSSSSGAEPESEPWGWAEQSLSSSGAKPESEPWGGAERSSSSSGAEPESEPWGRAERSSSSSGAEPESEPRGRAERSFPWRLGLDLAAVSLTLSSGSAVGAAQVALSSCQTG

SEQ ID NO: 65310 - protein, 144 aa, Zea mays
  Coding DNA Sequence Number=SeqID_23531
MGKNNKRKREPTPPSEDFGDSEYSEEEFSSESEGSLAPVSPPPASSDDSDDSQGIVAEIWTYIRAIGRSGLEGSDESEYSSDEEDSPEKDGEGDDDDDDDGGDDGDDSNGGGSRGGNGGSRGGDGSSRGRGGGGSSKGSNKASG

SEQ ID NO: 65311 - protein, 135 aa, Zea mays
  Coding DNA Sequence Number=SeqID_23532
MNHDSPKTPLDGRSKLRLVQACLLAKAALEKILVLPEVPSSRSGSFRLARACLSRTGGQTQAQPQSKVTGAVETCAFNATIRIPTPRDATVKEGAMGPIHFHQLRSRTPGNNDHCSPTLVTVPEQLQMGHARAWA

SEQ ID NO: 65312 - protein, 450 aa, Zea mays
  Coding DNA Sequence Number=SeqID_23533
  Gene Ontology: Mol. function=translation elongation factor activity; Cellular component=eukaryotic translation elongation factor 1 complex; Biological process=translational elongation
  Homolog annotation: Hit_ID=Q1SL16; Match level="QueryCoverage=92%, HitCoverage=99%, E-value=1e-158, Identity=66%"; Hit description =Elongation factor 1, gamma chain; Glutathione S-transferase, C- terminal; Thioredoxin-like fold
  Pfam annotation: Domain name=EF1G; Domain location=289-397; Score =160.5; E_value=4.3e-45; Accession=PF00647.9; Description=Elongation factor 1 gamma, conserved
  Pfam annotation: Domain name=GST_C; Domain location=133-230; Score =42.1; E_value=1.9e-09; Accession=PF00043.15; Description=Glutathione S-transferase, C-terminal domain
  Pfam annotation: Domain name=GST_N; Domain location=34-109; Score =68.6; E_value=2.1e-17; Accession=PF02798.10; Description=Glutathione S-transferase, N-terminal domain
  Pfam module annotation: Pfam domain module=EF1G::GST_C::GST_N; Domain location=289-397::133-230::34-109
MALVSSFSFLSFLFIALSEVLCCSSFVCRTVCEEVLVLHSGAGNKNAFKALIAAEYSGIKVELTKDFEMGVSNKTPEFLKMNPLGKVPVLETPDGPVFESNAIARYVARLKDDNPLFGSSRIEQAHVEQWMDFAATEVDPGVAWYLYPRLGYLPYVSTTEETAISSLKRSLGALNTHLASNTYLVGHAVTLADIVMTCNLYHGIARILTKTFTSDFPHVERYFWTMVNQPNFKKVIGEVKQAESAPPIPKKAAPSKEPKAKDVKKEAPKEAPKPKVVEAPAEEEAPKPKPKNPLDLLPPSKMVLDDWKRLYSNTKTNFREVAIKGFWDMYDPEGYSLWFCDYKYNDENTVSFVTLNKVGGFLQRMDLCRKYAFGKMLVIGSEPPFKLKGLWLFRGQDVPKFVMDEVYDMELYEWTKVDISDEAQKERVNAMIEDQEPFEGEALLDAKCFK

SEQ ID NO: 65313 - protein, 216 aa, Zea mays
  Coding DNA Sequence Number=SeqID_23534
  Subcellular localization annotation: CTP_CleavageSite=82; ConfidenceScore=5.40e-01
MGGGTCGLRVSPTLRSGALAVGGYKRPRRRERAGLARAPSRPSPRGQPSVGRGGGSSEVEVESVFQGRGRVRAPGRTRRRSSAEARAESEPWGRVKWSSSSFGAEPESEPWGWAKRSSSSSRAEPESEPWGRAERSSSSFWAEPESEPWGRAEQSSSSSGAKPESEPWGRAERSSSSSGTEPESEPWVGQSGVRRLPGLSPSPSPGVGRSGVSHGA

SEQ ID NO: 65314 - protein, 149 aa, Zea mays
  Coding DNA Sequence Number=SeqID_23535
MKEIKLGTQQRLEQRLALVLPGVHHRILAGAPGRAPHQLAALGFSLESFRYNSPDCPVESQLSTSTDLANEQFPQRFEIPTDARQVFFDCLWVVAPTISSLQESKLQDIISFKAKHLLSFGLSNSFRFNNTTDSRGIITAWDALVLSIE

SEQ ID NO: 65315 - protein, 172 aa, Zea mays
  Coding DNA Sequence Number=SeqID_23536
MSTDHIVLATARGSGGAADATRWSTDPAVPASVSSPKDCYDDDNFSDTGDEACYSDTRLMRRVGQDLDEEEGEREAVGPAGGTIGSSASPDPGLGLGLSPGRRRTPLRPTQGSDSGSAPEDDELRSARPRARTRAKSRKTANSAPPDPGLGLGLSPGRRRTLLRPTQGSGSG

SEQ ID NO: 65316 - protein, 55 aa, Zea mays
  Coding DNA Sequence Number=SeqID_23537
MSPDRPIRSASTPIHRQIQIPPPSKGSLRERWETTMVTNDYGGSHGSKWVLVVAP

SEQ ID NO: 65317 - protein, 671 aa, Zea mays
  Coding DNA Sequence Number=SeqID_23538
  Gene Ontology: Mol. function=peptidyl-prolyl cis-trans isomerase activity; Cellular component=spliceosome; Biological process=protein folding
  Homolog annotation: Hit_ID=Q9LXM7; Match level="QueryCoverage=94%, HitCoverage=96%, E-value=0.0, Identity=77%"; Hit description =Peptidyl-prolyl cis-trans isomerase
  Pfam annotation: Domain name=Pro_isomerase; Domain location=517-669; Score=262.1; E_value=1.1e-75; Accession=PF00160.11; Description =Cyclophilin type peptidyl-prolyl cis-tr
  Pfam annotation: Domain name=WD40; Domain location=118-156; Score =24.0; E_value=0.00054; Accession=PF00400.22; Description=WD domain, G-beta repeat
  Pfam annotation: Domain name=WD40; Domain location=208-246; Score =1.5; E_value=24; Accession=PF00400.22; Description=WD domain, G-beta repeat
  Pfam annotation: Domain name=WD40; Domain location=264-302; Score =2.9; E_value=17; Accession=PF00400.22; Description=WD domain, G-beta repeat
  Pfam annotation: Domain name=WD40; Domain location=75-112; Score =24.7; E_value=0.00033; Accession=PF00400.22; Description=WD domain, G-beta repeat
  Pfam module annotation: Pfam domain module=Pro_isomerase::WD40::WD40:: WD40::WD40; Domain location=517-669::118-156::208-246::264-302::75-112
MASDSEAAAHSTLTSTTVEDGGAHESKQEHLNGAVGTPTVGQEEEIIGPGPAPAKQRRKRPLQFEQAFLDALPSAAMYEKSYMHRDVVTHVAVSPADFFITGSADGHLKFWKKKPVGVEFAKHFRSHLSPIEGLAVSVDGLLCCTISNDRSVKIYDVVNYDMMFMIRLSFVPGAIEWVHREGDVKPKLAVSDRNTPFVHIFDTHSGSNDPIMSKEIHGGPVKVMKYNHIHDVVISADAKGLLEYWSPSTLMFPENEVRFRLKSDTNLFEIAKCKTTVSAIEVSNDGTQFAVTSPDRRIRVFWFKTGKLRRVYDESLDVAQDLQRSDVPLYHLDAIDFGRRMAVEKEIEKTENVPQPNAVFDESCNFLIYATLLGVKRFFNALRPCSNFMVLLEDSGIEGIVIVNLHTNKVSRILGKVENNERFLRIALYQGDKGNKKVRKIPSVAANVNDSKEPLSDPTLLCCAFKKHRIYLFSRREPEEPEDATKGRDVFNEKPPPEELLSASDLGKTATTSLPDNLVLHTSMGDIHLRLYPEECPKTVENFTTHCRNGYYDNLIFHRVIKGFMIQTGDPLGDGTGGQSIWGTEFEDEFHKSLRHDRPFTLSMANAGPNTNGSQFFFTTVATPWLDNKHTVFGRVVKGMDVVQQIEKVKTDKNDKPYQDVKILNVTVPKT

SEQ ID NO: 65318 - protein, 125 aa, Zea mays
  Coding DNA Sequence Number=SeqID_23539
MAIIFNIPITSNVGEIFYFGSLSYIADQEGVLHHITDPSDKRTSLMAPNVEVGLSHLTPARTAPKNSKVWTQITRQKEASNLGTGIAVGTRTPIVLAAPLTWETAEHETPLQALSSWMSSLSREE

SEQ ID NO: 65319 - protein, 65 aa, Zea mays
  Coding DNA Sequence Number=SeqID_23540
MAIVGGDCGTVVMHQQVYGRLPKLTGASMGEENHQCPTNLSSSLIHRRKSAVHHGREALCLHLRY

SEQ ID NO: 65320 - protein, 65 aa, Zea mays
  Coding DNA Sequence Number=SeqID_23541
MALVWLGRGAGHAGTRASVLWRGQKASNTWRGCLKWYTTFLVQNPSGFGAIFKVNTAGLWIRAKM

SEQ ID NO: 65321 - protein, 158 aa, Zea mays
  Coding DNA Sequence Number=SeqID_23542
  Gene Ontology: Mol. function=phospholipase C activity; Biological process=intracellular signaling cascade
  Homolog annotation: Hit_ID=Q69U53; Match level="QueryCoverage=36%, HitCoverage=14%, E-value=1e-13, Identity=60%"; Hit description=MAP3K- like protein
MVTILMTSCLVAMVDGIAMAGACAGGRRVLLLQRRWLRPALQPLWRRRGSICTCASPVDPATHGTGLPFNNYPWLTTHNSYALAGAASATGSALITETNQEDTVTAQLKVTQPVPVSSIHLPPGLSTAEASSGRLTASAFRSDAGDAGNGNGIEFSFG

SEQ ID NO: 65322 - protein, 603 aa, Zea mays
  Coding DNA Sequence Number=SeqID_23543
  Gene Ontology: Mol. function=carbohydrate binding; Biological process= DNA integration
  Homolog annotation: Hit_ID=UPI00005DC1AF; Match level="QueryCoverage =75%, HitCoverage=99%, E-value=0.0, Identity=67%"; Hit description =lyase
  Pfam annotation: Domain name=Rhamnogal_lyase; Domain location=1-203; Score=386.5; E_value=4.1e-113; Accession=PF06045.2; Description =Rhamnogalacturonate lyase family
MGDTLIRPSGRKPHAQVEIKNGIFDLTLSNPDGIVTGVRYNGVDNLMEILNKEDNRGYWDLVWNPPGQKTGIFDVIKGTEFRIVYQDENQAEVSFTRNWDPSLEGKAVPLNIDKRFIVLRGSSGFYTYGIYEHKEGWPDFGLGETRVAFKLRKDMFHYMALADDRQRIMPMPDDRLPPRGQPLAYPEAVLLVDPINPELRGEVDDKYQYSCEDQYNNVHGWMSFDPPIGFWQITPSDEFRTGGPLKQNLTSHVGPTMLAMFLSAHYAGDDLSPKFTNGEYWKKVHGPVFMYLNSSWDASDPTMLWEDAKVQMMIEKGNWPYCFALSEDFQKTEQRGCVSGRLLVRDRYIDDQDLYASGAYVGLALPGEAGSWQRECKGYQFWCRADVDGSFYIRNIVTGNYNLYAWVPGFLGDYKLDATVTIASGDDIYLGDLVYEPPRDGPTMWEIGVPDRSAAEFYVPDPNPNYVNRLYVNHPADRFRQYGLWERYAELYPDSDLFDLDSVSPSSTYKFRVALASSALAELQISFNDQDRAVPHFATGLIGRDNAIARHGIHGLYWLFNIDVASAWLVQGVNTIYLKQPRSQSPFQGLMYDYLRLEGPCGC

SEQ ID NO: 65323 - protein, 109 aa, Zea mays
  Coding DNA Sequence Number=SeqID_23544
MKLWKETSRSSKTTTSSRCGLAATPSRLPVKAAFIYVSFPHFDLLWLDLDTLHESPSSPSYPPALLSVRFAVPWPDSPATWRDYTTACVRSRNVDDRSSRALLSRSTRR

SEQ ID NO: 65324 - protein, 167 aa, Zea mays
  Coding DNA Sequence Number=SeqID_23545
  Subcellular localization annotation: CTP_CleavageSite=46; ConfidenceScore=5.41e-01
MATRFGDSPSEGGPDPTQSSMRGIRGRGLCSRVAGCGFTRGRGWRRAQMAWARTAARRAGAREMARRAQMASGMAAGVERSGGCHGWPAWPCANGTYRLEAFGLGSLDRSAPAAGGGGEAFCALHAPLFAQARRPALALRMGDRLDAAGREARGTREPDGRWAFIGR

SEQ ID NO: 65325 - protein, 113 aa, Zea mays
  Coding DNA Sequence Number=SeqID_23546
MGKRALVHGIIARRWCSVAARRAVKLVGAVGKLTAAAVGPRSRLGADLGSCGRARMDVSAQGTRTMEVGPLVIAHGWQFPVVAVGSPSVVARGLHAMIYGEASSPRIDSFSST

SEQ ID NO: 65326 - protein, 411 aa, Zea mays
  Coding DNA Sequence Number=SeqID_23547
  Gene Ontology: Mol. function=isomerase activity; Cellular component =cellulose and pectin-containing cell wall; Biological process=cell redox homeostasis
  Homolog annotation: Hit_ID=Q5EUD5; Match level="QueryCoverage=92%, HitCoverage=93%, E-value=0.0, Identity=79%"; Hit description=Protein disulfide isomerase
  Pfam annotation: Domain name=Thioredoxin; Domain location=152-238; Score=65.6; E_value=1.6e-16; Accession=PF00085.10; Description =Thioredoxin
  Pfam annotation: Domain name=Thioredoxin; Domain location=52-151; Score=128.3; E_value=2.2e-35; Accession=PF00085.10; Description =Thioredoxin
  Pfam module annotation: Pfam domain module=Thioredoxin::Thioredoxin; Domain location=152-238::52-151
  Subcellular localization annotation: CTP_CleavageSite=54; ConfidenceScore=5.35e-01
MRPAVVTVLLLVAAAASPAAALYSAGSPVLQLNPNNFKSKVSPDSHCPFSNQIGASILVQVLNSNGVVLVEFFAPWCGHCKQLAPAWEKAAGVLKGVATVAALDADAHQALAQEYGIKGFPTIKVFSPGKPPVDYQGARDVKPIVEFALSQVKSLLRDRLSGCGHCKKLAPEWKKAAKNLKGQVKLGHVDCDAEKSLMSKYKVEGFPTILVFGADKESPFPYQGARVASAIESFALEQLEANSGPAEVSELTGPDVMEEKCASAAICFVSFLPDILDSKAEGRNKYLELLLSVAEKFKKSPYRQVFVWTAAGKQANLENQVGVGGYGYPAMVALNVKKGAYAPLRSAFQRDEIIEFVKEAGRGGKGNLPLNDAPTVVASEPWDGKDGEVIEEDEFSLDELMGDSSSANDEL

SEQ ID NO: 65327 - protein, 117 aa, Zea mays
  Coding DNA Sequence Number=SeqID_23548
MGKRALVHGIIARRWCSVAARRAVKLVGAVGKLTAAAVGPRSRLGADLGSCGRARMDVSAQGTRTMEVGPLVIAHGWQFPVVAVGSPSAVARGLHAMIYEQYGNGAAMVTVGVYAPP

SEQ ID NO: 65328 - protein, 687 aa, Zea mays
  Coding DNA Sequence Number=SeqID_23549
  Gene Ontology: Mol. function=binding; Cellular component=thylakoid; Biological process=photosynthesis
  Homolog annotation: Hit_ID=Q6K378; Match level="QueryCoverage=95%, HitCoverage=95%, E-value=1e-133, Identity=55%"; Hit description =Tetratricopeptide repeat protein-like
  Pfam annotation: Domain name=PB1; Domain location=233-312; Score =68.2; E_value=2.7e-17; Accession=PF00564.15; Description=PB1 domain
  Pfam annotation: Domain name=TPR_1; Domain location=120-153; Score =19.6; E_value=0.011; Accession=PF00515.18; Description =Tetratricopeptide repeat
  Pfam annotation: Domain name=TPR_1; Domain location=46-79; Score =22.6; E_value=0.0014; Accession=PF00515.18; Description =Tetratricopeptide repeat
  Pfam annotation: Domain name=TPR_1; Domain location=84-119; Score =11.1; E_value=0.25; Accession=PF00515.18; Description=Tetratricopepti de repeat
  Pfam annotation: Domain name=TPR_2; Domain location=120-153; Score =24.4; E_value=0.0004; Accession=PF07719.7; Description =Tetratricopeptide repeat
  Pfam annotation: Domain name=TPR_2; Domain location=46-79; Score =25.4; E_value=0.0002; Accession=PF07719.7; Description =Tetratricopeptide repeat
  Pfam annotation: Domain name=TPR_2; Domain location=84-119; Score =6.3; E_value=6.1; Accession=PF07719.7; Description=Tetratricopeptide repeat
  Pfam module annotation: Pfam domain module=PB1::TPR_1::TPR_1::TPR _1::TPR_2::TPR_2::TPR_2; Domain location=233-312::120-153::46-79::84 -119::120-153::46-79::84-119
MGKPSLKKKRASGGGKSGDHGGKPASLERSGSKVLDGDETLFTDMAQEHKEEGNKLFQRRDYDRALLNYDKAIKLLPRAHPDVAYLHSNIAACYMQMSPPDYYRAINECNIALEASPKYTKALLKRARCFEALGRLDLACRDVNKVLALEPNNLTALDVSDRIKKTMEEKGIVLDDKEIMPTPEEVVAAAPKQKPRKKRGGRKFAAKAAAAAVEEVDEQKIAEAIKEEVEEQPRQVKLVFGEDIRWAQVPASCSMAQLREAVRSKFPGLKAVLVKYKDKEGDLVTITNQDELKWAEELAEAGSSLRLYVTEADPEHEPYVDDTNMERNVNSNSDNGSIRSNRQDEDRSTVTCIDDWIVQFARLFKNHVGISSDEYLDLHEVSMKLYTEAIEDTITTEEAQEVFHLAEGNFQEMAALAFFHWGNVHMSRARKRLLLSGDSPSELVLEQVKEAYEWARDEYNKAGTRYEDAVKAKPDFFEGFLALAHQQFEQAKLSWYYAIGSNADLDSCSSEILELFNKAEDNIEKGIEMWEEMEEQRLKNRSKPSQENIVLEKMGLEEYIKDVSTDDAAEQASNLRSQINILWGMLLYERSVVEFKLGLPMWEDCLMAAIEKFKLGGASATDIAVLVKNHCANETAQDGLGFKIDEIVQAWNEMYDIKRWLRGVPSFRLEPLFRRRVPQLHTALEHI

SEQ ID NO: 65329 - protein, 80 aa, Zea mays
  Coding DNA Sequence Number=SeqID_23550
  Gene Ontology: Mol. function=signal peptidase activity; Cellular component=signal peptidase complex; Biological process=signal peptide processing
  Homolog annotation: Hit_ID=Q84KA8; Match level="QueryCoverage=51%, HitCoverage=25%, E-value=1e-15, Identity=83%"; Hit description =Signal peptidase protein-like protein
MAAAIAAPPWASLGPDTIIQSYDFIERTRALNQCTEYIQGSNLKGKEFNLTMHWHIMPKTGKMFADKIVMTGYRLPELYR

SEQ ID NO: 65330 - protein, 150 aa, Zea mays
  Coding DNA Sequence Number=SeqID_23551
MRPGIPMISEEAGCDAHRRPLPPLWGPSRRASRPSMMPRESSWGVGRTGPLGLTHRSLAVDDKVETPKMEGHFGGPNRASIIVGHRELEQLHREYASPLPGAPTVGVLNLTLTSKFIVRVAGFKRPRTGSANDGFLKKEPSGNGKTKCSI

SEQ ID NO: 65331 - protein, 485 aa, Zea mays
  Coding DNA Sequence Number=SeqID_23552
  Gene Ontology: Mol. function=nucleic acid binding; Cellular component= intracellular; Biological process=chromatin modification
  Homolog annotation: Hit_ID=Q5UDB7; Match level="QueryCoverage=99%, HitCoverage=92%, E-value=0.0, Identity=72%"; Hit description =INDETERMINATE-related protein 7
  Pfam annotation: Domain name=RS4NT; Domain location=84-121; Score =15.7; E_value=0.027; Accession=PF08071.2; Description=RS4NT (NUC023) domain
  Pfam annotation: Domain name=zf-C2H2; Domain location=23-45; Score =26.8; E_value=7.4e-05; Accession=PF00096.16; Description=Zinc finger, C2H2 type
  Pfam annotation: Domain name=zf-C2H2; Domain location=99-121; Score =21.0; E_value=0.0042; Accession=PF00096.16; Description=Zinc finger, C2H2 type
  Pfam module annotation: Pfam domain module=RS4NT::zf-C2H2::zf-C2H2; Domain location=84-121::23-45::99-121
MHADPDAEVIALSPRTLLATNRFVCEVCNKGFQREQNLQLHRRGHNLPWKLKQKNPREARRRVYLCPEPTCVHHDPSRALGDLTGIKKHYCRKHGEKKWKCDKCSKRYAVQSDWKAHSKTCGTREYRCDCGTLFSSSGVLLEEEELLSHCTRDSFITHRAFCDALARESAQMPPLGAGLYVGPGSMSLGLSQIHGFADQAQSSSAAAAPQFDHIMPSSSGSSSMFRSQASASSPSYFLGGSAPPAAAQDFSEDGSQGSQGPLLHGKAHFHGLMMQLPEQQHQPGSSNAAVGANAVARPGSLQDARIAIQDQFNLSGSGSGSAEHGNNVMVASIGSHLGRGFPSLYSSSPSAGMAQNSATALLMKAAQMGSTTSSTTHNNHNGPTTTSTLLRATGFSGATGSGQLGTTGGRAAAGEEGAASHEAHFHELIMNSLAGGGFSGTAGFGGGVDDGKLSTRDFLGVGRGAATMAPPGLHMGALDPAQQMK

SEQ ID NO: 65332 - protein, 120 aa, Zea mays
  Coding DNA Sequence Number=SeqID_23553
  Subcellular localization annotation: CTP_CleavageSite=48; ConfidenceScore=5.03e-01
MDMFYSTSSSSLASYGGGWGYDSLKNFRQIRRVVQTHLKLRKRYEMLMAATLLEDPSSFLPWNMTQGRKSRVARISVGVACFIVFMMILSVIDLFRLTQTCFDKSRTAMLPFRDHDLAKG

SEQ ID NO: 65333 - protein, 62 aa, Zea mays
  Coding DNA Sequence Number=SeqID_23554
  Subcellular localization annotation: CTP_CleavageSite=54; ConfidenceScore=5.34e-01
MTPSPAFRDEAQALALVLPTGSNSSSPSWQASGAQTKVTGIILPSVIFGTTSIRAEFVTEST

SEQ ID NO: 65334 - protein, 109 aa, Zea mays
  Coding DNA Sequence Number=SeqID_23555
  Subcellular localization annotation: CTP_CleavageSite=67; ConfidenceScore=5.78e-01
MPTVLPPLPLYPSHVCFHAFAPVPPPPRSRTRCPGVIAAAPTTASPSFLHRPARTNLVCSDSIAGLRCKETATLAVGASVLSSWHDGGHGSGGLVFWQTGEASGLRLLR

SEQ ID NO: 65335 - protein, 489 aa, Zea mays
  Coding DNA Sequence Number=SeqID_23556
  Gene Ontology: Mol. function=GPI anchor binding; Cellular component =membrane; Biological process=root hair cell differentiation
  Homolog annotation: Hit_ID=A0EJ90; Match level="QueryCoverage=84%, HitCoverage=90%, E-value=0.0, Identity=92%"; Hit description=Brittle stalk-2
  Pfam annotation: Domain name=Phytochel_synth; Domain location=94-258; Score=340.0; E_value=3.9e-99; Accession=PF04833.5; Description =Phytochelatin synthetase-like conserv
MGLRVRDSSALLALAVALACCSVAGSVTIFHSSENVNSVDRSMGDAHILSSPVAMAGGCCTHTGTCAVVAYDPLDPNGNITIKWDVISWTPDGYVAMVTMSNYQMYRHIMAPGWTLGWSWAKKEVIWSIVGAQATEQGDCSKFKGGIPHCCKRTPAVVDLLPGVPYNQQIANCCKAGVVSAYGQDPAGSVSAFQVSVGLAGTTNKTVKLPRNFTLMGPGLGYTCGPAAVVPSTVYWTPDHRRRTQALMTWTVTCTYSQQLASRYPSCCVSFSSFYNSTIVPCARCACGCGGHGGHAGPGGCIEGDSKRALSAGVNTPRKDGQALLQCTPHMCPIRVHWHVKLNYKDYWRAKIAITNYNYRMNYTQWTLVAQHPNLDNVTEVFSFQYKPLQPYGSINDTGMFYGLKFYNDFLMEAGPFGNVQSEVLMRKDARTFTFSMGWAFPRKIYFNGDECKMPPPDSYPYLPNAAPVVASQLVLSAAASAFLLLLLL

SEQ ID NO: 65336 - protein, 110 aa, Zea mays
  Coding DNA Sequence Number=SeqID_23557
MKLMITVLTQGQHPEFKYLTHMHLGSFQKRRSCPMLEGATEDMDLLGRLLDELDLLQCHSPDVDLDMVDMDLLKHIVVHKNYDDFHVTEEDEKILDWERSAPKQWLSLYA

SEQ ID NO: 65337 - protein, 115 aa, Zea mays
  Coding DNA Sequence Number=SeqID_23558
MASGWRGSCRVAAAPAVSAPTHGEEKQGGENRAGRRPLGSKGAASCPIRGRCRVGENREKERQPWMAPAVPGPRTEERKRPHGLWKKERLLLRFGTERRRSVVWGKGRRGVGCHL

SEQ ID NO: 65338 - protein, 59 aa, Zea mays
  Coding DNA Sequence Number=SeqID_23559
MGQSDRSTVVALRWILAGSEALGFRANFDDRVRGVLKVFWRHFVNWVKWFWVKEYGERV

SEQ ID NO: 65339 - protein, 70 aa, Zea mays
  Coding DNA Sequence Number=SeqID_23560
MDHVIGVLAALIGWAQPQLTAATAGSAHVVTGTPTGGDTQDRARPYRLLLRLWLVAALGQARCHCQPSRR

SEQ ID NO: 65340 - protein, 92 aa, Zea mays
  Coding DNA Sequence Number=SeqID_23561
MDVCCACWRAAADLTMYIARETSKVWRKVATEVSVELQLLREKWGLLLAGLIFQKIVWLKFVIKHFIQAFARLEEHFYGFYWVFSSSVSQLA

SEQ ID NO: 65341 - protein, 51 aa, Zea mays
  Coding DNA Sequence Number=SeqID_23562
MRFESVDPVSHQVKVCEFGSARILIFHKRMPPEAMDTLLEKDKVPNPCYRV

SEQ ID NO: 65342 - protein, 251 aa, Zea mays
  Coding DNA Sequence Number=SeqID_23563
MKHAPQDLVFDIPSGQALNEVQREAKQRWLRSDWRGKGVRFPGRPQCRAPWFLPRPSSPPTPPSTLDTAPPPINARRIPTLLPTAAAINAVLPHADPWALLSTAAQQTCGRSSHRRRNGRSSALWIRNLKSSQIRAPHAAACTCRVPVSTSLIAALSPEPCMQISPSDHRPPPNPRLPCPVREEGRLDGTSSPLDPEESNHGEDDPKWRHCIRGDEDDTASKSLPPASIDGARYGFEDMRPLIPTAAASLG

SEQ ID NO: 65343 - protein, 39 aa, Zea mays
  Coding DNA Sequence Number=SeqID_23564
MAMHESLLILVEWRVFNGATRSNDYQWKQVVSRLDKLLG

SEQ ID NO: 65344 - protein, 244 aa, Zea mays
  Coding DNA Sequence Number=SeqID_23565
MGGGVRNGDGLVTAEKVLGFEFDKVRISIASSDDEADGDAPPRSSFSGASHPPELVDEIDTVFVAVDGRDKPVPKPIISWDASPPPSGAASPHSSIDSSGAATNVTITSLASSCTVTSRSAKTSVSSSAASDGSGWSNDNGTGAGGSAGKPHKGGDPTGQSVLRAQRASRSVAGVRASQESIDFCQTRPPARFSVLVVFRLLNEALRPESQRESKRLDDKSCFWSPESAKSRTKRGSLIVWSGF

SEQ ID NO: 65345 - protein, 72 aa, Zea mays
  Coding DNA Sequence Number=SeqID_23566
  Homolog annotation: Hit_ID=UPI00004C1733; Match level="QueryCoverage =47%, HitCoverage=2%, E-value=1e-07, Identity=77%"; Hit description =UPI00004C1733 related cluster
MNDIHEECDRLLGFNIGEGPDLDPLEEFIDGHHQVLPHRPEVGSDVQGVFGDFPRPDLVQLDRIAPSDMSFL

SEQ ID NO: 65346 - protein, 112 aa, Zea mays
  Coding DNA Sequence Number=SeqID_23567
MELGVRYGFTQSIPGLNSWWDYIPCNRTRPNRVIQDFCPGLVAGGGRIGVAYAGRSDRAGGGDAGGGWEGNATRAMKASMVATECVRVAELALMEVRLDTVASMIARNEGSD

SEQ ID NO: 65347 - protein, 62 aa, Zea mays
  Coding DNA Sequence Number=SeqID_23568
MVTSPTPTASSVPNYIEEYADRFNVVLCHARGLSGPQKPELFVGGLPDHICIDVELCEPRDL

SEQ ID NO: 65348 - protein, 210 aa, Zea mays
  Coding DNA Sequence Number=SeqID_23569
  Subcellular localization annotation: CTP_CleavageSite=45; ConfidenceScore=5.18e-01
MTETGGFGCSLGSSGEARPPSGRGRGKRRRCDETRRRLVGRSGVRNGPEAGGRRLVALAPTTRRSGAEPTQTRRGAELLAPLRYPEAGAAALPPFGLGVGSASATRAHVRVPLDASSTGKGPKRAAKKEPRRSRPTAEGFGRDNAPCGYSQPRASLAIPRIMAENDRRRIKHNDMFVQLVRSCEKKHIRKIKTEAVPKLQSRVLRHDNAP

SEQ ID NO: 65349 - protein, 168 aa, Zea mays
  Coding DNA Sequence Number=SeqID_23570
MRNDNYKTVNVEESLHKKCFNEHFQDEEVAAAFCAIVNAKQLSVYWTTKRKQEINVWSEFQNPMSDVVSRATFRSSFNEGRRIIQLQNRADTKHCKYDKHDAYPSLQRGLGQLGLMAPRTNTLIPRVPLLALSYQGECSHGLRDLWTLMAVETSGLFRTGGLMKEKMT

SEQ ID NO: 65350 - protein, 147 aa, Zea mays
  Coding DNA Sequence Number=SeqID_23571
  Homolog annotation: Hit_ID=Q6QP51; Match level="QueryCoverage=50%, HitCoverage=41%, E-value=9e-14, Identity=58%"; Hit description =Putative growth-regulating factor 1
MQAACDRTQGAHPFDFDASSMEAQAHTSWIGKGDTPKGILLREGSGPRAPLLIRGSKAGPSEGFNNCLRAPGLRAHYWSEVRRPAPRKGSTVASGHSGSAPTTDQGFVGWPPKRSTAASDVERGMTLGSGAALANPAPAKPLTASTY

SEQ ID NO: 65351 - protein, 121 aa, Zea mays
  Coding DNA Sequence Number=SeqID_23572
  Homolog annotation: Hit_ID=Q949F8; Match level="QueryCoverage=58%, HitCoverage=30%, E-value=2e-20, Identity=69%"; Hit description=PREG -like protein
MGFGIGIHTWAPDRSRCYNNAYFARVGGISLVEMNYLEVDFLFGIAFDLNVTPAAFASYCAVLQSEMAYLDDAPAPVVEAPPRLHYCYGAAGTSDRHDDPAAVAAAAAACHRHSSQPQLTV

SEQ ID NO: 65352 - protein, 126 aa, Zea mays
  Coding DNA Sequence Number=SeqID_23573
MAQKIEQLGADLETRDKNHFGINGVATRFALDSIGEPRLNTCTGTGLEIKFQPQGSCLGRQVLDLGMGTFGNWDGLEPVGRGTGTRRFCLMFLWDLRVFLVSWQNGDFLLSLSILVLDKACSQRKN

SEQ ID NO: 65353 - protein, 205 aa, Zea mays
  Coding DNA Sequence Number=SeqID_23574
  Homolog annotation: Hit_ID=Q69NC3; Match level="QueryCoverage=40%, HitCoverage=23%, E-value=3e-09, Identity=71%"; Hit description =Putative monosaccharide transporter
MREIYDPHRPELEESVHPMGRKRAADPVIFIPELGAYPRGSTTAGPATVRGPAMAVKVAVIRADFGGRSSGEQFDLVRFVKFFGFTWPSIYPLSMELQKRADVVALHARNGFQDKQQAIQGRGGCDPCPQVWKRLGTEQGREHSAGGGHLPLRGGLQMMSRCATSVAVFVLFTSFIIAMSIFIILLLTETKHVPIEDIWMLFDRH

SEQ ID NO: 65354 - protein, 181 aa, Zea mays
  Coding DNA Sequence Number=SeqID_23575
MEVYLLAAARHRALPTCTIGLRHGDVFRHGEDRPSGSQQPADFSPSGAREFGQERAMRGIYDPHRPELEESVHPMGRKRAADPVIFIPELGAYPRGSTTAGPATVRGPAMAVKAAVIRADFGGRCAIPFRAAGLRTKLSSGPIRHRPAQCTENRPLPDGAQGSAAISPQARGDSQSSDPIC

SEQ ID NO: 65355 - protein, 510 aa, Zea mays
  Coding DNA Sequence Number=SeqID_23576
  Gene Ontology: Mol. function=pyridoxal phosphate binding; Cellular component=cellular_component; Biological process=amino acid and derivative metabolic process
  Homolog annotation: Hit_ID=Q75PZ8; Match level="QueryCoverage=98%, HitCoverage=99%, E-value=0.0, Identity=81%"; Hit description =Tryptophan decarboxylase
  Pfam annotation: Domain name=Pyridoxal_deC; Domain location=49-432; Score=542.2; E_value=5.5e-160; Accession=PF00282.9; Description =Pyridoxal-dependent decarboxylase cons
MSALGDNACSGFQPLNPDDVRSYLHKAVDFISDYYKSVESLPVLPDVKPGYLRNELQSAPPTSSAPFDVTMKELTASVVPGMTHWASPNFFAFFPSTNSAATIAGDLIASAMNTVGFTWQAAPAATEMEVLALDWLAQLLRLPPSFMNRTGGAARGSGGGVILATTSEAMLVTLVAARDAALRRSGSHGVSQLPRLAVYAADQTHSTFFKACRLAGFDPANIRCIPTGPETDYGLDPARLLEVMQADVDAGLVPTYVCATVGTTSSNAVDPVRAIADAAAVFNAWVHIDAAYAGSACICPEFRHHLDGVERVDSISMSPHKWLMTCLDCTCLWVRDTHRLTGSLETNPEYLKNDASESGNVTDLKDMQVGVGRRFRGLKLWMVMRTYGASKLQEHIRSDVAMAKMFEDAVRADDRFEVVVPRNFALVCFRIKPRGGMTEEDADEVNRELMERLNRTGKAYLAHTVVGGRFVLRFAVGSSLQEERHVRSAWELINKTTNEIMLEPEQIVVE

SEQ ID NO: 65356 - protein, 309 aa, Zea mays
  Coding DNA Sequence Number=SeqID_23577
  Gene Ontology: Mol. function=RNA-directed DNA polymerase activity; Cellular component=nucleus; Biological process=RNA-dependent DNA replication
  Homolog annotation: Hit_ID=Q8S472; Match level="QueryCoverage=95%, HitCoverage=27%, E-value=1e-152, Identity=86%"; Hit description =Putative gypsy-type retrotransposon RIRE2
MTKLVRRSRRPPTCVMLRRHFHRARPPAEGGKASDDDKKEDHQAGEFPEVCDCFMIYGGQAANASARHRKQQCREVCSVKVVAPVYLDWSDKPITFDQADHLDHVPSLGKYPLVVDPIIGDVRLTKVLMDGGSSLNIIYAETLGLLHVDLSSIRAGAAPFHGIIPGKRVQPLGQLDLSVCFGTHSNFRRETLTFEVVGFRGTYHAVLGRPCYAKFMAIPNYTYLKLKMPGPNGVITVGPTYKHAFECDVECVEYAEALIADLESLSKEVPDVKRHAGKIEPAETVKSVPLDPSSDASKQVRIGSELGPK

SEQ ID NO: 65357 - protein, 198 aa, Zea mays
  Coding DNA Sequence Number=SeqID_23578
  Gene Ontology: Mol. function=identical protein binding; Cellular component=cellulose and pectin-containing cell wall; Biological process=negative regulation of enzyme activity
  Homolog annotation: Hit_ID=Q8H4X8; Match level="QueryCoverage=98%, HitCoverage=27%, E-value=1e-32, Identity=48%"; Hit description =Putative subtilisin-like serine protease AIR3
  Subcellular localization annotation: CTP_CleavageSite=24; ConfidenceScore=5.12e-01
MYVQGHAAQQPDRGWMPTERATLKAMTSTRSPLPLGSFMLRTSLFGYAIGTAKGGMLRTYVVAYKVCWSAESNIHDSVDIIFVSFGQDAPLVDDAESLFPEPIHDVSIACSVDNFDFYDDTVIYAASWDTTVVATNIDSNFPNVLTLGNSVSLRRMSLESTMLHSSALSQMVNVARCPRYLQPCMMPLATGSAGTIDP

SEQ ID NO: 65358 - protein, 443 aa, Zea mays
  Coding DNA Sequence Number=SeqID_23579
  Gene Ontology: Mol. function=DNA binding; Cellular component =mitochondrion; Biological process=DNA integration
  Homolog annotation: Hit_ID=UPI00004C1731; Match level="QueryCoverage =90%, HitCoverage=30%, E-value=1e-164, Identity=70%"; Hit description= UPI00004C1731 related cluster
  Pfam annotation: Domain name=RnaseH; Domain location=1-124; Score= -22.3; E_value=0.0069; Accession=PF00075.14; Description=RNase H
  Pfam annotation: Domain name=rve; Domain location=125-314; Score =97.8; E_value=3.2e-26; Accession=PF00665.16; Description=Integrase core domain
  Pfam module annotation: Pfam domain module=RnaseH::rve; Domain location=1-124::125-314
MYFDGSLMKTRAGAGLLFISPHVIHLRYVLRLHFPASNNVAEYEALVNGLHIAIELGVWHLDAHGDSQLVIDQVMKNSHCRDRKMEAYCDEVRRLEDKFYGLELNHITRRYNETTDELAKIALGQTTVPPDVFSRDIHQPSVKTDDTPEPEEASAQPEVVSFHPEEASAQPEKALGGFSHLLVAIDKFSKWIKVRPLTSIRSEQAVAFFTNIIHRFGVPNSIITDNGTQFTGKKFLDFCEDHHIRVDWAAVAHPMTNGQVERANGMLLRGLKPRIYNDLNKFGKRWMKELPSVVWSLRTTPSRATGFSPFFLVYGAEAISPIDLEYGSPRTKAYDDQSNQTSREDSLDQLEEARDMALLHSARYQQSLRCYHTQGVRPRDFQVGDLVLRLWQEARGRHKLTPPWEGPFIIAKILKPGTYKLANDQGEVYGNTWNIQQLRHFYP

SEQ ID NO: 65359 - protein, 610 aa, Zea mays
  Coding DNA Sequence Number=SeqID_23580
  Gene Ontology: Mol. function=RNA-directed DNA polymerase activity; Cellular component=mitochondrion; Biological process=RNA-dependent DNA replication
  Homolog annotation: Hit_ID=UPI00004C1731; Match level="QueryCoverage =90%, HitCoverage=54%, E-value=0.0, Identity=81%"; Hit description =UPI00004C1731 related cluster
  Pfam annotation: Domain name=RnaseH; Domain location=248-375; Score =0.2; E_value=5.6e-05; Accession=PF00075.14; Description=RNase H
  Pfam annotation: Domain name=rve; Domain location=413-566; Score =66.6; E_value=7.8e-17; Accession=PF00665.16; Description=Integrase core domain
  Pfam module annotation: Pfam domain module=RnaseH::rve; Domain location=248-375::413-566
MPGIPRDVAEHSLDIRAGARPVKQSLRRFDEEKRRAIGEEIHKLMAAGFIKEAKGVKLNPEKCVFGVPQGMLLGKAECFTWTPEAEEALGNLKALLTNAPILVPPAAGEVLLIYVAATTQVVSAAIVVERREEGHALPIQRPVYFISEVLSETKIRYPQIQKLLYAVILTRRKLRHYFQSHSVTVVSSFPLGEIIQCREASGRIAKWVVEIMGETISFAPRKAIKSQVLADFVAEWVDTQLPTALIQPELWTMFFDGSLMKTGAGAGLLFISPLGKHLRYVLRLHFPASNNVAEYEALVNGLRIAIELGVRRLDARGDSQLVIDQVMKNSHCRDPKMEAYCDEVRRLEDKFYGLELNHIARRYNETPDELAKRCISIAEGQELLQEIHSGACGHHVAPRALVGNAFRQGFYWPTAVADATRVVRTCQGSGTWGYTHLLVAIDKFSKWIEVRPLNSIRSEQAVAFFTNIIHRFGVPNSIITDNGTQFTGRKFLDFCEDHHIRVDWAAVAHPMMNGQVERANDMILQGLKPRIYNDLNKFGKRWMRELPSVVGDLVLRLRQNARGRHKLTPPWEGPFVIAKVVKPRMYKLGNSQGEVYSNAWNIRQLRRFYP

SEQ ID NO: 65360 - protein, 133 aa, Zea mays
  Coding DNA Sequence Number=SeqID_23581
MASCATIENYVTYIDVENMIDEDLMGKRHLCICEPYSQDTRMYDTLFGENKFVPDGRGVEQRQLAVGNAGAWSDGVGILKDATVQCEDARSRRQRDSKVAAVERGAGTRMDARPRRRPQPDGRQRRGLQSRAG

SEQ ID NO: 65361 - protein, 225 aa, Zea mays
  Coding DNA Sequence Number=SeqID_23582
  Subcellular localization annotation: CTP_CleavageSite=28; ConfidenceScore=5.05e-01
MSSPSSSSSPFQQISRSQNYCISPPFFRELYKAAPEHGKSPRSCLSYCGHSFASKWHYIYSFLRPTASTYVGADELGLAAAASLAREAGPAARGRASKIEAGSVRRKLMRLLSFVPCGCRAGPIDDAPPTDHHATARNRRIVGRRATAARSSASAAHWRPSLGDIYEDYSADAASNKAGDGGPARGRKAASWDVARVLPRAHSDEYRHLERASSMPAFAPMAFLF

SEQ ID NO: 65362 - protein, 42 aa, Zea mays
  Coding DNA Sequence Number=SeqID_23583
MTPTTIVIERLCTAIVERLRAGGRRELDNSLSFTCLPVAHVI

SEQ ID NO: 65363 - protein, 63 aa, Zea mays
  Coding DNA Sequence Number=SeqID_23584
MRKKLGTRFPAHLFLEIITPGVALKQGCLRITVFVLCLQARIKKIMQADEDVGKIALAVPVLV

SEQ ID NO: 65364 - protein, 59 aa, Zea mays
  Coding DNA Sequence Number=SeqID_23585
MAPPSRREAPMFLRNQPAVHISVFCVSWGHEDLKNHPGNWNLKCQASCALDHFLPNNVL

SEQ ID NO: 65365 - protein, 155 aa, Zea mays
  Coding DNA Sequence Number=SeqID_23586
  Homolog annotation: Hit_ID=Q6QP51; Match level="QueryCoverage=17%, HitCoverage=12%, E-value=1e-07, Identity=89%"; Hit description =Putative growth-regulating factor 1
  Subcellular localization annotation: CTP_CleavageSite=17; ConfidenceScore=5.05e-01
MTGKQRRLPRSDCCATRQSKVGNNQVQPQAQQEAPPRPTLGLSLGRRSPPRPTLGLGLTLDLGRRTPPRPTPRLDLGLGGRSPPRPTPGLGLNLNLDLGRNRVLARPRPRPQEESPPRPTLGLDRPRHGGYIITLPLASSGYGGTGPMSHPGSPR

SEQ ID NO: 65366 - protein, 172 aa, Zea mays
  Coding DNA Sequence Number=SeqID_23587
MDILVVDSTMNIMYPTVINLFSRRGTPCPPPPPILDRHRIVGDPPTGDPRLSPQIHMNKTIGQHRTYLCSLSAVGLGLLAPSGLPCARLGDHSKVCDGDKFGGGVDGYSHSSGVAGGSTEEAMVPPHESVTSRGHTISLLVGAERTLKGCNLCNVRNVARTSSFGVAVCCHS

SEQ ID NO: 65367 - protein, 117 aa, Zea mays
  Coding DNA Sequence Number=SeqID_23588
  Gene Ontology: Mol. function=structural constituent of ribosome; Cellular component=ribonucleoprotein complex; Biological process =translation
  Homolog annotation: Hit_ID=P49690; Match level="QueryCoverage=34%, HitCoverage=29%, E-value=1e-14, Identity=90%"; Hit description=60S ribosomal protein L23
  Pfam annotation: Domain name=Ribosomal_L14; Domain location=5-117; Score=-23.0; E_value=0.0039; Accession=PF00238.10; Description =Ribosomal protein L14pL23e
MDRLLEKDKVPNPCYRVWTEEGMPMAVKADHRRPHALSWEHILLAPIEGQQEKKNLCASALRLSLNGHQSKGNAESDNVGVIVNPKGDMKGFSITGPIGKECADLWPRIASAANAIV

SEQ ID NO: 65368 - protein, 51 aa, Zea mays
  Coding DNA Sequence Number=SeqID_23589
MAARVWVKLDAVTKDKAYGTIEGHEGAPNKMVVVEEDTFNRCRASSAITGA

SEQ ID NO: 65369 - protein, 363 aa, Zea mays
  Coding DNA Sequence Number=SeqID_23590
MACSISASLSRAATAAGGSVVVVGAHEVPLLGVAAAADAVTPRGRLRLLLMPFSVSAQNKHANRNSCRRRSPLPSPRRHKSRSPSPRRRKSPSPSQKRYRRKRSPSVTSSPVAASQSSHLGLAENKNVIDTQRLEEEKKSCQSCLTESSGHGFEATSPHLCGKARLGLSLHRRYSCGSLQHFPAYLRKKKLVSDPFFSHAMWRQKEVELRLLEKETAKRVEQAIRRKVEESLNCDEIKHEIHRRIEEGRKRIHEEVAIQIEKEKDAALNEAKLKVEQEKKKREELEKKLEEERKKAEEALMKEALEQQQKELERYQELERLQKEREEAMKRKKMEEEQQRQNQMKLLGKNKSRPKLSFAFGMK

SEQ ID NO: 65370 - protein, 138 aa, Zea mays
  Coding DNA Sequence Number=SeqID_23591
  Gene Ontology: Cellular component=nucleus; Biological process =regulation of progression through cell cycle
  Homolog annotation: Hit_ID=Q6H613; Match level="QueryCoverage=79%, HitCoverage=35%, E-value=4e-25, Identity=58%"; Hit description =Putative cyclin D1
  Pfam annotation: Domain name=Cyclin_N; Domain location=44-132; Score=- 6.5; E_value=0.00055; Accession=PF00134.13; Description=Cyclin, N -terminal domain
MPGDAYDLLCAEDDAAGSALLCTTDDDDGCCSAVEDDSAAAAAASIAELIGGEAQYSPRPDYPDRLRSRSIDPAARAESVAWILKVQEYYGFLPLTAYLAVNYMDRFLSLHRLPWEVDSAAVVGAGKRKCLEERVRVD

SEQ ID NO: 65371 - protein, 312 aa, Zea mays
  Coding DNA Sequence Number=SeqID_23592
  Gene Ontology: Mol. function=protein serine/threonine kinase activity; Biological process=protein amino acid phosphorylation
  Homolog annotation: Hit_ID=Q40541; Match level="QueryCoverage=75%, HitCoverage=36%, E-value=3e-26, Identity=35%"; Hit description =Protein kinase
MNSNRSSKIKPLWEGSCDDVDMCEFADKDEYAPVGSSYNPMSEPFDNWENKFDTSPEQSSHEPMEFGELAKHAESSITENDFTCPVEGSCEDDVLTESKIKAFLEEKALDLKKLQTPLYEEFYNTVHGGSCQTSKGKFPISPKLPPRGKSPPSKTRGGACDTLNNTAPESCSKQFPRSSVVESSRILREIASPQLNEFADKLHLDAQDSPRPVHDLIGSIPVNSISFTERQRKWKEELDQELERERVFRKSNAGILRLTAIAAKSTREPPYTHTHLLPLPLSGVDCAHLEQIAQGLLRKKLMTQSALLRTAG

SEQ ID NO: 65372 - protein, 99 aa, Zea mays
  Coding DNA Sequence Number=SeqID_23593
MVVAWVDRGSAVAARRRAGADRPAKGADRQKLGNGYKGRTVRPKARTVKNLAMAIRWLMAINSTQPPPFNTSKHSIHPHSIQQQALHPKTHSNLPSSSK

SEQ ID NO: 65373 - protein, 38 aa, Zea mays
  Coding DNA Sequence Number=SeqID_23594
MYELPSSALGGCATTIYRVAELHTDQSDITRPLATTEA

SEQ ID NO: 65374 - protein, 344 aa, Zea mays
  Coding DNA Sequence Number=SeqID_23595
  Gene Ontology: Mol. function=unfolded protein binding; Cellular component=chloroplast; Biological process=cellular protein metabolic process
  Homolog annotation: Hit_ID=Q43831; Match level="QueryCoverage=72%, HitCoverage=56%, E-value=1e-112, Identity=79%"; Hit description =RuBisCO large subunit-binding protein subunit beta, chloroplast
  Pfam annotation: Domain name=Cpn60_TCP1; Domain location=1-237; Score= -149.7; E_value=0.00018; Accession=PF00118.14; Description=TCP-1cpn60 chaperonin family
RLLLPLVVNKLRGSLKIAAIKAPGFGERKTQYLDDIAILYWRDEVGLSLDKADKSVLGTAAKVVLTKESTTIVGDGSTQDEVTKRVAQIKNLIEAAEQEYEKEKLNERIAKLAGGVAVIQVGAQTETELKEKKLRVEDALNATKAAVEEGIVVGGGCTLLRLAAKVDAIKDTLENDEQKVLSNDNFKYGYNAATGQYEDLMAAGIIDPTKVVRCCLEHAASVAKTFLTSDVVVVDIKEPESAPLANPMDNSESFETAPNKPSAQALHLVAAMEDVEKRLTEKFQQAMEASVSSMHELLKKMDGISAVASKVEEIETRQADHGKATLVQISASSRPAGYDGKLRS

SEQ ID NO: 65375 - protein, 135 aa, Zea mays
  Coding DNA Sequence Number=SeqID_23596
  Gene Ontology: Mol. function=unfolded protein binding; Cellular component=chloroplast; Biological process=cellular protein metabolic process
  Homolog annotation: Hit_ID=Q0WRG9; Match level="QueryCoverage=67%, HitCoverage=18%, E-value=8e-27, Identity=61%"; Hit description =RuBisCO subunit binding-protein beta subunit
  Subcellular localization annotation: CTP_CleavageSite=36; ConfidenceScore=5.23e-01
MGGKASTFGATYTVGIMVAPTGKNVRLQRRVNFRVRAAKELYFNKDGSAIKKLQTGVNKLADLVGVTLGPKGRNVVLESKYGSPKIVNDGVTVAREKVRAGPEGVQGMRPLRAPKKICSNVFRFGFTVHFKVYAV

SEQ ID NO: 65376 - protein, 263 aa, Zea mays
  Coding DNA Sequence Number=SeqID_23597
MTFFNVESIDEEGWNDEMVSLGKRASVEVPGKEGCFFGKGGKNLALKECENYGWATSENHDAIITHSHASMGQGGKNLLNLEMEKSGSKMMKLIVRRRWIWRPMMMTSSVLKSWKLLLKALMSISLKVGKDKKSKAKGKEMVEGFRRRSRLEAYEDVKVADMAISRAEAKDAFIHKDDDVLIDLAKNLDVGLGSNSSEVLESLALIKSLEAARANLIFHNSKILSSHTSIDNQLLIPKGEICLEDHHFLDDNSLDLGAFDPLD

SEQ ID NO: 65377 - protein, 76 aa, Zea mays
  Coding DNA Sequence Number=SeqID_23598
MGLGVYGSLYRGWIAPSGGVRDTLIRDGWFTGGDEDDVFDYIMVIVAFGAIYAQVKKENGVEADLWEFQDFDEFED

SEQ ID NO: 65378 - protein, 76 aa, Zea mays
  Coding DNA Sequence Number=SeqID_23599
MGKEQGQWWFWVLGASVAGAVTDLPCIVANTTVEEVTGKKIKMADAHDKLIQFLRIFGPMGWDPHTLLLRHFDLVG

SEQ ID NO: 65379 - protein, 196 aa, Zea mays
  Coding DNA Sequence Number=SeqID_23600
  Homolog annotation: Hit_ID=Q8LI32; Match level="QueryCoverage=44%, HitCoverage=18%, E-value=3e-18, Identity=64%"; Hit description =Putative oxidoreductase, FAD-binding
  Subcellular localization annotation: CTP_CleavageSite=55; ConfidenceScore=5.70e-01
MAFSLHSLLPCLVYPSSLSPPVRRPPRRMAKGIKMLQCIFVLSDSNAGTSSTSPRSSSDRSTPGVLVFANAVEPFYLLSDLFCFLPCSLLSSRASARLLPRKMSSSPETTKGEHRVQLGFSSSIVDQFLLRPFLVGIFFDPALNKSSHLFELVFKCLILGENIMSEDGIDAIVAQLACPWVLGWGFEEWGQERRRW

SEQ ID NO: 65380 - protein, 231 aa, Zea mays
  Coding DNA Sequence Number=SeqID_23601
TWGFDWLEQATAAAGDAGNDTQCERVANDEVGAAHDQQRHGTMRPRRFGQRTTWSGAVTRSKYQAWLGALHRVNTMAEMREREAGHGLTLGGAGCHDHGSRRSSMASEGLLAGRGGGAGRAWGRGRRPPGTGEERSGGHQERYDVLASLLLAWGDEGEAVSSVGMGKEQGQWWFWVLGARVTGAVTDLPCVVANTTVEEVIGKKIKMAGGPHGAALAQARVHGHMVGHAGC

SEQ ID NO: 65381 - protein, 89 aa, Zea mays
  Coding DNA Sequence Number=SeqID_23602
MKILRRNDVGFTESYSDNRDLLLGVIGRDAELPDALPPTWSYLGTNAELLEKLLSSCMCFVGDGCSIEISSIEINNGRDRAMCLRHSNR

SEQ ID NO: 65382 - protein, 70 aa, Zea mays
  Coding DNA Sequence Number=SeqID_23603
MEEALWMFCVLPQVCWEEEIMLSGTALRIVASMDMVAFSCCVFDDGDNEKKELDADRETVGYGNLLGQDV

SEQ ID NO: 65383 - protein, 48 aa, Zea mays
  Coding DNA Sequence Number=SeqID_23604
MEAESHDSGSRRLLMGKCRNCDVDAKSKERSPGRAAFTRELLDRSGFE

SEQ ID NO: 65384 - protein, 88 aa, Zea mays
  Coding DNA Sequence Number=SeqID_23605
MAKEKVEMGSRAGSTEPRPWQKVATREDNEGRGRGERERKRGRREERGGEWDGGSFPGFGVGGWGRTWASHGEDARCARRARAGGGGG

SEQ ID NO: 65385 - protein, 124 aa, Zea mays
  Coding DNA Sequence Number=SeqID_23606
MAKTLPFAPAFVNLAAPTESVTLLYGNIPRIVQELAAAELPSLGNDLPNGLVPHSGNTHDFLLALVGCSGWLLGQEDGLPGCFDAGIHFLLAGCSDGTAAAAEETTSGTAAAGSDADAGAGDLA

SEQ ID NO: 65386 - protein, 141 aa, Zea mays
  Coding DNA Sequence Number=SeqID_23607
MVAFWAAATARVGALEREIVRSKPSGPYTSRGRGGGVATVHVGTGRRLATWRIHPSEGMSLGVDLEARTGSRMQTDTEGGAQIRWRGGDRRSSRRPVGGRVAGGWRWVEPTAAGKQRGRGSRTADLASGAGHDGGRARVMR

SEQ ID NO: 65387 - protein, 83 aa, Zea mays
  Coding DNA Sequence Number=SeqID_23608
MARVHSTARLATKGETLDTVETTPIAEVMRASEDHSILRPNKLSHIEFGESTMKPEDLDVLTRLGYIGEKEDDMIRFPGSEII

SEQ ID NO: 65388 - protein, 106 aa, Zea mays
  Coding DNA Sequence Number=SeqID_23609
AATVTWLASVVPGHASWAAGHLDQGSRGGGAEHAGRARWCGWVTPMAKEKVEMGSRAGSTEPRPWQKVATREDNEGRGRGEGERKRGRREESGGDIYVVVVVCASA

SEQ ID NO: 65389 - protein, 126 aa, Zea mays
  Coding DNA Sequence Number=SeqID_23610
MATHGVASSRTAGFRQGPAVTLRAAAANHAGGEARCIEPSRLGRLAMERNQWPARGGGFDSVTGWRPQIYIPKTGEAPAAGCSCSCSGAFPSQRDAAVALRGPPGGGDSDSDVRCGCRPPPARQCV

SEQ ID NO: 65390 - protein, 1066 aa, Zea mays
  Coding DNA Sequence Number=SeqID_23611
  Gene Ontology: Mol. function=protein binding; Cellular component =membrane; Biological process=defense response
  Homolog annotation: Hit_ID=Q6AVJ3; Match level="QueryCoverage=98%, HitCoverage=99%, E-value=0.0, Identity=39%"; Hit description =Putative nucleotide-binding leucine-rich-repeat protein
  Pfam annotation: Domain name=LRR_1; Domain location=584-605; Score =11.5; E_value=2; Accession=PF00560.23; Description=Leucine Rich Repeat
  Pfam annotation: Domain name=LRR_1; Domain location=607-628; Score =14.5; E_value=0.38; Accession=PF00560.23; Description=Leucine Rich Repeat
  Pfam annotation: Domain name=LRR_1; Domain location=630-652; Score =2.3; E_value=1.1e+02; Accession=PF00560.23; Description=Leucine Rich Repeat
  Pfam annotation: Domain name=LRR_1; Domain location=654-675; Score =5.0; E_value=33; Accession=PF00560.23; Description=Leucine Rich Repeat
  Pfam annotation: Domain name=LRR_1; Domain location=802-823; Score =5.6; E_value=25; Accession=PF00560.23; Description=Leucine Rich Repeat
  Pfam annotation: Domain name=LRR_1; Domain location=912-933; Score =6.0; E_value=21; Accession=PF00560.23; Description=Leucine Rich Repeat
  Pfam annotation: Domain name=LRR_1; Domain location=952-973; Score =1.7; E_value=1.4e+02; Accession=PF00560.23; Description=Leucine Rich Repeat
  Pfam annotation: Domain name=NACHT; Domain location=202-355; Score= -41.1; E_value=0.093; Accession=PF05729.3; Description=NACHT domain
  Pfam annotation: Domain name=NB-ARC; Domain location=162-472; Score =236.5; E_value=5.9e-68; Accession=PF00931.13; Description=NB-ARC domain
  Pfam module annotation: Pfam domain module=LRR_1::LRR_1::LRR_1::LRR _1::LRR_1::LRR_1::LRR_1::NACHT::NB-ARC; Domain location=584-605::607
MAMILDAFVPMLGRMVAGAVKERLDTLLGVPGEMERLESTLEDLVNVLGDAEMKRITDTAVDAWVRELKDVMYDADDVLDRWQMEAQARSSSDAPKRSFPGAGCCAPLLTCFRDPALAHAMAAQIKELNRRLESVCRRSSMFRFVSASSSVPLRQQLPPASSGNGKTSSVIVHADLIGEKIEEDGNRLVEALIADDLRENVLAVGITGAGGIGKTTLAKRVFADQRVRDEFDLRVWVCVSQDVNEADLLWSVLVGAGGGHQLQQQHDATPDRSSLEPALQRAVSGKKVLLVLDDVWSDVAWKEVLQNAFRAGARGGSRVLVTTRKETVARQMKAVHIHRVEKLQPEDGWRLLKNQVVLGRNPTDIENFKDIGMEIVTRCDCLPLAIKTVGGLLCTKERTFRDWEEVSRSAAWSVAGLPEEVHNAIYLSYADLPPHLKQCFLHCSLFPKDEVIKRVDVVQMWIAEGFVQEDGSSALLEDVGNMYYRELVMRNLLEPDGQYYDQSGCTMHDLLRSFANYLAKDEALLLTQGQSLCDMKTKAKLRRLSVATENVLQSTFRNQKQLRALMILRSTTVQLEEFLHDLPKLRLLHLGGVNLTTLPPSLCDLKHLRYLELSGTMIDAIPDSIGDLRYLQYIGLLNCINLFSLPGSIVRLHRLRALHIKGASVNDIPRGIGRLQNLVELTGFLTQNDAAAGWNSLEELGHLPQLSLLYLSNLEKAHTGSVAKKADLQGKRHLRYLSLECTPRAAGGNQIKDNNTQQEKRQIEDVFDELCPPVCLENLSLIGFFGHKLPKWMSSGEMDLKYLRSIKLEDCTYCEQLPALGHLLSLDFLLIKHAPSIMRIGHEFFCSSNATQIDPRMLFPRLEKLGFDRLDGWEEWIWDKELEQAMPNIFSLKVTKCKLKYFPTGLVHQTRTLRELIISEACNLTSVANFLLLSDLHLHANPNLEMIANLPKLRRLSVIQCPKLNALVGLTELQSITLQDYAAELFPQYLEETSAAKLEVFCNEELFKLITLQEGSEWCKIKNIQNVKAYAPKGGDRKGWYALYTKEPFSLTTNNKGCEIFEVAKS

SEQ ID NO: 65391 - protein, 103 aa, Zea mays
  Coding DNA Sequence Number=SeqID_23612
  Gene Ontology: Mol. function=DNA binding; Biological process=DNA integration
  Homolog annotation: Hit_ID=Q8SAW7; Match level="QueryCoverage=88%, HitCoverage=7%, E-value=2e-25, Identity=60%"; Hit description =Putative pol polyprotein
MASAAAAAQAVWLQKLLEEVVGIPAKPTIILMDNTAAIALAKNPVHHDRSKHIDVKYHFTRECVERGDIELVQVGTDEQLADTFTKALSRLRFQEIRRKIGVV

SEQ ID NO: 65392 - protein, 116 aa, Zea mays
  Coding DNA Sequence Number=SeqID_23613
MVCRLLGWDVPVFGGRIRADAIPRQTRALYLLHVGAADLTFLLAAGSARPRGGGALPPVLSLKDVHQPCGGGERAELRLRLPHGLVTRLFLQHSEEMMFTSLVKVEGDELRLRRTG

SEQ ID NO: 65393 - protein, 87 aa, Zea mays
  Coding DNA Sequence Number=SeqID_23614
  Subcellular localization annotation: CTP_CleavageSite=51; ConfidenceScore=5.10e-01
MRRHGWQLPYHPLQVVAVSVFLALAFAFYVFFAPFVGRNVFQYVARCCLMGLAMVAGGLELRKAPNKADLVTKRSQRGLKRIEGEMN

SEQ ID NO: 65394 - protein, 103 aa, Zea mays
  Coding DNA Sequence Number=SeqID_23615
  Gene Ontology: Mol. function=nucleic acid binding; Cellular component= intracellular; Biological process=translation
  Homolog annotation: Hit_ID=Q94EV5; Match level="QueryCoverage=99%, HitCoverage=21%, E-value=3e-27, Identity=60%"; Hit description=Opie2 gag protein
MDPKGKGMVVNDKENESIFNEPRDDKPTDSGSSHKKKDGKKKRRIKKIVYYDSNKSSSSPRDDDDEKKKPVNSNYSFDSSRIPFNSNAHLRSIPLSKPPHFDG

SEQ ID NO: 65395 - protein, 505 aa, Zea mays
  Coding DNA Sequence Number=SeqID_23616
  Gene Ontology: Mol. function=zinc ion binding
  Homolog annotation: Hit_ID=Q8H055; Match level="QueryCoverage=96%, HitCoverage=90%, E-value=1e-102, Identity=43%"; Hit description =Putative DHHC-type zinc finger protein
  Pfam annotation: Domain name=zf-DHHC; Domain location=121-185; Score =92.5; E_value=1.3e-24; Accession=PF01529.11; Description=DHHC zinc finger domain
MAYTKYHHQVLCVFFLYIWCAAANPADPGVFKSKKYLSLYGSGKHRHLKECRKGSSDVRLQLEGTGEKQEHEVAASSEMSMTQYKDNIPSCMSSTFSAFLLLFYPLSFVLSCCQSHEWSSEQQATEEGMFFCSLCEVQVLKYSKHCRVCDKCVDGFDHHCRWLNNCIGRRNYGRFFILMSTALILGISTYDYIIALREQEQDDLSGQQSPQMSRVSSYTGLSSTSSFGPLRRGSWCTPPRLFLEDQFDVIPSEAASSHNSAMKRKEDEGKRKKGSGAVQISPWALARLNAEEVSRVAAEARKKSKVLLPIRKDDYSRDHETDSSYGGMSNGRIDLGTDSKRRTNRRGRQPSDLSLKPVAKISTDVIDSTSRDMAPEALSNLAPLQLEALSAFHPSRAASCVNAGGSSPDSSLDSPDLHLYRVSAVSSSGAEDLQLTALTAPGSTPQQGIQLSRSTSDGYEASGGEDSDRIPSRIVHRSSNWASIILNSDQSASSSGILVPKNRLS

SEQ ID NO: 65396 - protein, 175 aa, Zea mays
  Coding DNA Sequence Number=SeqID_23617
MEHGNKHLADVITGEDIAGKLILVRSKIFNECGVVYKSIGLRLRTLLKTWEEKSSLEQVCFDSSFEAYLWPFYKVLCCGVYSGVEAHMMLNKFIQVYGSSSDNSVLNTYLSAPLCGLAKAVPCSFVPKYLQQSGRGSIYEQYLLKDHSLTLYKVGRFRRPKMISQLRKTEGYSSD

SEQ ID NO: 65397 - protein, 70 aa, Zea mays
  Coding DNA Sequence Number=SeqID_23618
  Subcellular localization annotation: CTP_CleavageSite=19; ConfidenceScore=5.62e-01
MAASPPSPPSPAPPSLLLRSEPSTPARQRSLPARRPPGRSELAHPLLGFNFGRACRPLPPYLPTTRKVDV

SEQ ID NO: 65398 - protein, 65 aa, Zea mays
  Coding DNA Sequence Number=SeqID_23619
MEGRGKVAGERQRKGRSVGFKAPLVAGGREDYHTIANINESSKSSTCWNRSSGCRPNAGGIIRSI

SEQ ID NO: 65399 - protein, 42 aa, Zea mays
  Coding DNA Sequence Number=SeqID_23620
MRAQQPRMHQRVKRRWLRRFVSHPRPSGEDDPGNTGPLVCDW

SEQ ID NO: 65400 - protein, 79 aa, Zea mays
  Coding DNA Sequence Number=SeqID_23621
MSTIRFRHYRGQLGENDTLVEISIKGCSDSTGDGAQHEEETVVEEDVVSEAENPPAENTFYFDIYGVDPEPPATQGKPR

SEQ ID NO: 65401 - protein, 71 aa, Zea mays
  Coding DNA Sequence Number=SeqID_23622
MAITGDQLRRGNMADGMARPWFTMATMTTAARPHLWASGYGKITGGEVHCTWDLVQLLYHVIFFSVPDKAI

SEQ ID NO: 65402 - protein, 74 aa, Zea mays
  Coding DNA Sequence Number=SeqID_23623
MAMRAMGLDRGASRPTQAGSPEQKRRGQRGLGTTGHPRVLEETFQRFPKNSGNMIKIIRYSSKNICTHKHYAMT

SEQ ID NO: 65403 - protein, 108 aa, Zea mays
  Coding DNA Sequence Number=SeqID_23624
MSGAPGPYMVKPATLGKTELRSAIISPDCPVCHRTVRCASGAMVYSLQRSTAKAVDRGTVRAESEPQSQRHTGQCPVWHRTVQCHKRTKPPTVDRAPDPNGWVTWRRT

SEQ ID NO: 65404 - protein, 69 aa, Zea mays
  Coding DNA Sequence Number=SeqID_23625
MASPSWACLCDLGFILGRAARRLRSSGRNIRRDIIASLESPCLLSCSCRRLPPSAPLCATARRLPALPC

SEQ ID NO: 65405 - protein, 206 aa, Zea mays
  Coding DNA Sequence Number=SeqID_23626
MDPNFKPIFEEAMKMMRVEITKEISKCFADHDAVVNQHFADFVVAAEHNNARDTSLEEAASKFDHTFSNWQPEIEASVADISLEISKLYKFFDHDAREHSGFQPGVLGTESTSARHLLDSASTGLVATAPNLITRMMVLGSTTPRPITRSRVASMYLEGPATRWLQSIEHKLAYIPWNDFCSLFMECSGRDEHEEEAADTDQRKKY

SEQ ID NO: 65406 - protein, 103 aa, Zea mays
  Coding DNA Sequence Number=SeqID_23627
MATRWKGRLTRRKAEKRWFTGVLIGSTAVNTGFPGFQWGFLVSQGVKFPIQGSICKIVGVSTPGGPWTDESGAFAVGGYKRPRGREREACTRHPVLLARPTLS

SEQ ID NO: 65407 - protein, 230 aa, Zea mays
  Coding DNA Sequence Number=SeqID_23628
  Gene Ontology: Mol. function=transferase activity, transferring glycosyl groups; Cellular component=membrane; Biological process =protein amino acid glycosylation
  Homolog annotation: Hit_ID=Q5ZDR9; Match level="QueryCoverage=67%, HitCoverage=27%, E-value=1e-27, Identity=51%"; Hit description =Putative UDP-Gal:betaGlcNAc beta 1,3-galactosyltransferase-I
MCEDDSTIWEEETMSRTMCGSSENCIYYMEYLIRKRWTLLPYLTDAREVEIETTGTRRSLAGGMKKCSGVLFILTLAVVLFLLSPSPSPTPPPNTAPNGPITDLLPTLPGLSDLYPPAPNSTAHLSWGLLRPLLCRSDALPGTSAGVLEAAEAWRNLTLPVTAAASEEEARLQGLPLLIVRVKGSTHGTCHTLLRDLVGRGLTVVGILTEGAAEFWAECWMRPVRLCCTP

SEQ ID NO: 65408 - protein, 198 aa, Zea mays
  Coding DNA Sequence Number=SeqID_23629
  Gene Ontology: Mol. function=transferase activity, transferring glycosyl groups; Cellular component=membrane; Biological process =protein amino acid glycosylation
  Homolog annotation: Hit_ID=Q5ZDR9; Match level="QueryCoverage=89%, HitCoverage=29%, E-value=1e-67, Identity=69%"; Hit description =Putative UDP-Gal:betaGlcNAc beta 1,3-galactosyltransferase-I
  Pfam annotation: Domain name=Gal-bind_lectin; Domain location=16-121; Score=-4.6; E_value=0.0026; Accession=PF00337.12; Description =Galactoside-binding lectin
MLGLIKAFYVLSLTSPVDGLVHCNEKVGARIVQESNNTVVNITGNQPEDWQSQTGHGQLSGRFSIVEGEPFTVTLWAGVEGFHMTVNGRHETSFAYRERSEPWLVAEVMFSGDLELLSFLANELPVSEDIDMENVAVLKAPPLPKKQTFLLVGVFSTGNNFKRRMALRRTWMQYEAVRSGDVVVRFFTGLAFTSWKLL

SEQ ID NO: 65409 - protein, 118 aa, Zea mays
  Coding DNA Sequence Number=SeqID_23630
MTARSPATFEPRALLAHLPSLICALCPAPLPSLLLCPREQGAPPPSADAYRLFRGRRCARALSSAMVSFTLLSAARDTLRCALSIPAASDPRLPERFLAQPESATVVSSNPCASVVAS

SEQ ID NO: 65410 - protein, 146 aa, Zea mays
  Coding DNA Sequence Number=SeqID_23631
MGEVALEGGAWASKREGASSPPRDEAMGGHGACLLVAYMLPSTVAQPHSAHSHRPQCHRLTVTGSQPHRLPRESTPIAELEYQLREQASTSTIGGYRVQAAGRSRRCQRPPERQAVERLSAGGATVHHRVLVRVQVPMRDWMEERL

SEQ ID NO: 65411 - protein, 82 aa, Zea mays
  Coding DNA Sequence Number=SeqID_23632
MGRLLRRGISAHRLRQKAEHAGRRGFGGGVVMMLAWEFGRMYDVGRRIRRPELDEGCCRRDAAAGAAAGVWQRAVMAQSGSP

SEQ ID NO: 65412 - protein, 173 aa, Zea mays
  Coding DNA Sequence Number=SeqID_23633
  Homolog annotation: Hit_ID=Q6QP51; Match level="QueryCoverage=44%, HitCoverage=26%, E-value=1e-07, Identity=45%"; Hit description =Putative growth-regulating factor 1
  Subcellular localization annotation: CTP_CleavageSite=53; ConfidenceScore=5.67e-01
MDSASPDLRARPRPRPRKMDSASPDPRARPRPRPRKVVSASPDPRAQPQPRPRAESRPRPTPASASGGVSASPDLGLRPTTSQGDKTESRSVTSLASASEEDLRLARPQASASASASEEDVRLARPQASASASASGGVTTSPEPSLGLRRSLCLTRPGPQTDYATRDTSLPYS

SEQ ID NO: 65413 - protein, 261 aa, Zea mays
  Coding DNA Sequence Number=SeqID_23634
  Subcellular localization annotation: CTP_CleavageSite=82; ConfidenceScore=5.42e-01
MPSLPIDQAQLAAQLWPTPLPRWRARPTLAAWAPSTQSPPLPTVHLPQTTTPSRLARSRRSRCLLPHQEPHAAWRLGRGGRRCGPASRPHSARPHRGPGASARPWRPRCGLSRSGVAWPSPLRSLDAASYAVRGLARHGLCTRTPASPARPLPRHGPMPAACSSDVAHGLLAWRDPPRRVVPPARPGVRQTSSSRETRPINTSRPKPVCVEPISHCGGDMDDVYDYGNGKWYSFRLERVKKKENGVKADLQEFQDFDEFED

SEQ ID NO: 65414 - protein, 341 aa, Zea mays
  Coding DNA Sequence Number=SeqID_23635
  Gene Ontology: Mol. function=triacylglycerol lipase activity; Biological process=lipid metabolic process
  Homolog annotation: Hit_ID=Q69TX0; Match level="QueryCoverage=92%, HitCoverage=66%, E-value=2e-57, Identity=40%"; Hit description =Lipase class 3-like
  Pfam annotation: Domain name=Lipase_3; Domain location=73-237; Score =143.4; E_value=6.2e-40; Accession=PF01764.16; Description=Lipase (class 3)
MAGFIDRGKNRFDISKDNSFMDDKSSIIIYRRVPDSDAFHFVGFYNCWNKFVGDHTTQAFVFTDKAEDASVVVVSFRGTEPFNMRDWSTDVNLSWLGMGELGHVHVGFLKALGLQEEDGKDATRAFPKAAPNAVPGKPLAYYALREEVQKQLQKHPNANVVVTGHSLGAALAAIFPALLAFHGERGVLDRLLSVVTYGQPRVGDKVFAGYVRANVPVEPLRVVYRYDVVPRVPFDAPPVADFAHGGTCVYFDGWYKGREIAKGGDAPNKNYFDPRYLLSMYGNAWGDLFKGAFLWAKEGKDYREGAVSLLYRATGLLVPGIASHSPRDYVNAVRLGSVASA

SEQ ID NO: 65415 - protein, 187 aa, Zea mays
  Coding DNA Sequence Number=SeqID_23636
  Pfam annotation: Domain name=zf-CCHC; Domain location=46-63; Score =6.8; E_value=0.075; Accession=PF00098.13; Description=Zinc knuckle
MAQLPYDDHKRSLKLLHALDREGLGETQVECLEDEELMLMHVEGKDGCFNFRDSNHFITNCPKMKGKLQASNHSYHIVRRKGKRDYTSSKDKPKGWFDKKVLKQNNDKLERQVKDKLNMLCFFANTERGLYAMAVGKEVVGGDGKDIDNNCMSKVSLSTNELFAEVDELTNALASQDKLLMLAAHER

SEQ ID NO: 65416 - protein, 93 aa, Zea mays
  Coding DNA Sequence Number=SeqID_23637
MTLVVPTTTPGEEMCKRDRTTPSACSTMQDDELAYAAAYTVAFARTLTRQDDGKTRQGIHTMTKRRPWTRGLIAPCSIYYTAKAHKSGLLSTH

SEQ ID NO: 65417 - protein, 437 aa, Zea mays
  Coding DNA Sequence Number=SeqID_23638
MALKGPVFESTGTEAGAEPALSIIDLQSHQDPSQPPETRQNPSQPPETLLLSSVLSGFCRRLCSSLQVLQPAERQRADQPRGRGSSPRKGEGVEPHQGAGEGDFTREGEVAGSRYGAAAVGELRAAVTWTSREALTASFSGITSPLLPCLVKNKIVREIVDFAKQHQSVFNSILRENMTGTNLLTLEQLSMAVSILSKVWAYEENEECSYIQDLFSLMHSLFSVDFGILNFMQSPNMIENQKSELIAFGLCFSLVSYLYVLATRKNMRFQVSYGRNSDQQHPTLQMVSDLLNSATLALERVGEEKYMLLNKIRDLNELSRKEVDEIIKVCMKQDCISPNDNIRKRRYIAMIDLCCMAGNRDQLITLLLQITECAVTILLIHFQDDASAKGLSSFSDELLPVLERLEHLKEDKVGRSLKLFHRSITTLKEMTIRTITI

SEQ ID NO: 65418 - protein, 649 aa, Zea mays
  Coding DNA Sequence Number=SeqID_23639
  Homolog annotation: Hit_ID=Q1T213; Match level="QueryCoverage=94%, HitCoverage=33%, E-value=1e-47, Identity=51%"; Hit description=IMP dehydrogenase/GMP reductase
MDYKSTLYRNSRIGWTDGALKLSDELNLNEIECVRLLVDANRESVALDQGLDADLMSEIEDQIQPLFNDGLRQRIITLVKLYLKLVNSSYLVWLKNHFKNAPSKELNREEPAGIGSPSSERYVLDFRGALVERRAIVSRERLSLSHCLALSALIKLTSPKEVKDVFSILKDCAAEANQNSSVELQITYGLLFFLVATFISDALSTSLEKASLSSSDSSFRREFHELVMRTGNNMTIEGFVGVVRLACALAVKVGFRVMFFLAIIISVKKGGVSRSPRHTSVLGGWVPPCLGGRQYPRQWRRKGHHMEVTGGGGAALGGVGRRHGLREREMERSRRREHGLRGMWERERNRQRWNDDEDIVYMYTGYTHKLMMCFISHPTSRDKIKEIKEKAMTALSPYEPPRGQREDLGRNGEQADQPTKEPFVSLLELVREIYQVVCSNPHNYIFLKGGPGAAVEPTVCNRKKVPELGNGNEELWTFVIYAGEDHTNTQTLVAFLGLLSTLASTEVGAAKVYELLQGKTYRSVGWSTLFDCLSIYEEKFKKSIQSSANILPDFPEGDAQALVAYLAVLQKVVENGNLTERRKWFPDIEPLFKLLSYENVPPYLKGALRNSITAFIKVSPILKDAIWNYLEQYDLPVVTAPLGHHTATQ

SEQ ID NO: 65419 - protein, 154 aa, Zea mays
  Coding DNA Sequence Number=SeqID_23640
  Homolog annotation: Hit_ID=Q6R5L9; Match level="QueryCoverage=21%, HitCoverage=5%, E-value=4e-10, Identity=90%"; Hit description=Iron transport protein 1
MAARRWVALAPHPVAFLLIMIIDYKLTYPSGTATAVLINGFHTTHGDATAKFTPPAPVSVSVPSSASQGSNIFKTRIEGANNVDAGQMLISLYHWAFVFGNASKSKDPLAFTGNGLSCLHRKWTGSPPASILFAPFVMMTLNMSYILVIVGFAV

SEQ ID NO: 65420 - protein, 228 aa, Zea mays
  Coding DNA Sequence Number=SeqID_23641
  Homolog annotation: Hit_ID=Q75GQ8; Match level="QueryCoverage=20%, HitCoverage=11%, E-value=6e-15, Identity=80%"; Hit description =Expressed protein
  Subcellular localization annotation: CTP_CleavageSite=20; ConfidenceScore=5.23e-01
MPSPPKDRPSGRVGRLLAALCPSRAGPLPVQTGFPTSLIVKNHGRLKKQPSPSSKRGRRAAAAAASLSPSPCSPTTSPSPSPSSASPPPPVAASAVSPSDRPRPDLPPAQPPRRNSGLGLGFLAVSDKTCMNMSPRRGQGKEERIEINGGERAKDVHLEKAVLGSVVDEQDDARAGNLDDVGGRGGVVILSPAPSARCETMPGRPQESDDTSAQVATAGVGGGGITVV

SEQ ID NO: 65421 - protein, 59 aa, Zea mays
  Coding DNA Sequence Number=SeqID_23642
MASSVYQSNNEAGLCLEPLFERCTCEGEARKLQLYDKVSKMKEERFEGLFKCALQGKRQ

SEQ ID NO: 65422 - protein, 167 aa, Zea mays
  Coding DNA Sequence Number=SeqID_23643
MKSLMLVVFGTPSEEGNKSPSLEVDAEATVAASIKKIIEALEPEKIVEETLKLLKALEPRETKMKALELRATKMKALDPKETEAISLPVEGPPSLVGESDVLACVPDREEDALVKNLTCDSGFLKFEHELHSLKKQKFTQFLSYTNIKVWSTGMMVDNDGEDHAGSY

SEQ ID NO: 65423 - protein, 78 aa, Zea mays
  Coding DNA Sequence Number=SeqID_23644
MAHRSCSGPLEAFSPSLYPLCLWIHGLFLAIEFAVAPSPSLPNSGDLGATLARVGLNFSDLTTAEKSSAARSRPFPPV

SEQ ID NO: 65424 - protein, 220 aa, Zea mays
  Coding DNA Sequence Number=SeqID_23645
  Gene Ontology: Mol. function=sequence-specific DNA binding; Cellular component=nucleus; Biological process=regulation of transcription, DNA-dependent
  Homolog annotation: Hit_ID=Q94LW4; Match level="QueryCoverage=55%, HitCoverage=38%, E-value=3e-66, Identity=98%"; Hit description=KNOX family class 2 homeodomain protein
  Pfam annotation: Domain name=ELK; Domain location=77-98; Score=34.5; E_value=3.6e-07; Accession=PF03789.4; Description=ELK domain
MEPDTKVLWRGWLSRVGSGGGASPGEGTGATMSDDEDNQVDSESNMFDGNEGSDGMGFGPLMLTEGERSLVERVRQELKHELKQGYRDKLVDIREEILRKRRAGKLPGDTASTLKAWWQAHSKWPYPTEEDKARLVQETGLQLKQINNWFINQRTLQVMGTQNQPGRAWSGNEVYVNNASTVKSSIIFVAPEKTLRPVFPEPIFIQRHQTMNNVASSQIK

SEQ ID NO: 65425 - protein, 70 aa, Zea mays
  Coding DNA Sequence Number=SeqID_23646
MAVGVSEALYAKAVSPSLLTGNRWGRLMCVGTECPGSLEDMVARVTWPSILPPGWTVEWDPTSAEEEHEE

SEQ ID NO: 65426 - protein, 81 aa, Zea mays
  Coding DNA Sequence Number=SeqID_23647
MNVCELTLAVSHPHRSRTAQREQKRLLVTENADMLMVTAKLLDRVFNILHENNPYVAGNWPGTVITTSSQTHKILLRMFHQ

SEQ ID NO: 65427 - protein, 463 aa, Zea mays
  Coding DNA Sequence Number=SeqID_23648
  Gene Ontology: Mol. function=transcription regulator activity; Cellular component=nucleus; Biological process=regulation of transcription
  Homolog annotation: Hit_ID=Q5ZAK6; Match level="QueryCoverage=41%, HitCoverage=46%, E-value=2e-36, Identity=47%"; Hit description=BHLH transcription factor-like protein
  Pfam annotation: Domain name=HLH; Domain location=346-384; Score=5.8; E_value=0.035; Accession=PF00010.16; Description=Helix-loop-helix DNA- binding domain
MGDHAEMLHAAPAMYNGAGAAPHGGWWNTAVPATTCSTTELAGFTTWSSALAASYDLAAEGTKAKSAAASSESPGNNSSVTFQEPACVTDPPGVGTAVVQVQQPLATGYADWTHPYMSSGATTLHGFLQDGHQQDMSSATEQSSMTASSLMNPSSNNLALALQGHHHHHQEHEHQQQMLSSFGSELLLSPTTSPYGFQSSLLRSLMEPAAATKQALPGYQQQQYDQYQQQMGMGQARFAPPAAGAASREALQFSNDALFSWNPSAAGFGFGLGVPPAPDQASSVRSVVKPSPAAARATATLALKTALEGVGESASSIITKKKANGEPALKKPRLETPSPLPTFKVRKEKLGDRITALQQLVAPFGKTDTASVLHETIEYIKFLHDQVGVLSAPYLKNNGHHQVLRHLKSSSPDKSSKDDDSHASEISLKGRGLCLVPISSTFAVASEVPVDFVWSTPFAANFR

SEQ ID NO: 65428 - protein, 94 aa, Zea mays
  Coding DNA Sequence Number=SeqID_23649
MIAGPNMVLNVKAHLHSGIRGLGPRGPSSLMPLEYEVENPRSLGAYKGAQVAKCHSAQRMDYTMHLFLVTLRHEKPRGPILKVSQDTRAPEDLY

SEQ ID NO: 65429 - protein, 143 aa, Zea mays
  Coding DNA Sequence Number=SeqID_23650
  Gene Ontology: Mol. function=protein serine/threonine kinase activity; Cellular component=membrane; Biological process=protein amino acid phosphorylation
  Homolog annotation: Hit_ID=Q6YS27; Match level="QueryCoverage=81%, HitCoverage=28%, E-value=9e-15, Identity=41%"; Hit description =Serine/threonine kinase-like protein
MAPEYVQSDGSETTLKCDVYSFGVTLMETLSGRKNCDTPGLVSEAWRLWVGRCVTALLDPAVAPAPAKPELAQLRRCIQVGLLCVQEKPDERPAMSAVVEMLGSPCSELAEPMVPTVVGNAALATLLEADLSRPTVYETIDFR

SEQ ID NO: 65430 - protein, 623 aa, Zea mays
  Coding DNA Sequence Number=SeqID_23651
  Gene Ontology: Mol. function=protein serine/threonine kinase activity; Cellular component=membrane; Biological process=protein amino acid phosphorylation
  Homolog annotation: Hit_ID=Q2QUP5; Match level="QueryCoverage=67%, HitCoverage=93%, E-value=1e-109, Identity=49%"; Hit description=D -mannose binding lectin family protein, expressed
  Pfam annotation: Domain name=B_lectin; Domain location=65-181; Score =125.6; E_value=1.4e-34; Accession=PF01453.15; Description=D-mannose binding lectin
  Pfam annotation: Domain name=PAN_1; Domain location=334-420; Score =5.3; E_value=0.047; Accession=PF00024.16; Description=PAN domain
  Pfam annotation: Domain name=PAN_2; Domain location=333-406; Score =109.0; E_value=1.4e-29; Accession=PF08276.2; Description=PAN-like domain
  Pfam annotation: Domain name=Pkinase; Domain location=456-621; Score=- 69.1; E_value=0.00019; Accession=PF00069.15; Description=Protein kinase domain
  Pfam annotation: Domain name=Pkinase_Tyr; Domain location=448-621; Score=-95.3; E_value=1.3e-06; Accession=PF07714.7; Description =Protein tyrosine kinase
  Pfam annotation: Domain name=S_locus_glycop; Domain location=197-316; Score=76.2; E_value=1e-19; Accession=PF00954.11; Description=S-locus glycoprotein family
  Pfam module annotation: Pfam domain module=B_lectin::PAN_1::PAN _2::Pkinase::Pkinase_Tyr::S_locus_glycop; Domain location=65-181::334- 420::333-406::456-621::448-621::197-316
  Subcellular localization annotation: CTP_CleavageSite=60; ConfidenceScore=5.42e-01
SSILLFLGTFAAAQAASDILSKGSNLTNGETLVSANGSFTLGFFTRGVPARRYLGIWFTVANSSSDAVCWVANRDLPLGDTSGVLVISDTGSLVLLDGSGRTAWSSNTTAGAASPTVKLLESGNLVLLDGNGGRDDYDVVKLWQSFDHPTNTLLPGAKIGMNLWSGGGWSLTSWRDADDPSTGEFRYAMVRRGGLLPEIVMLDSSDAIKYRTGVWNGRWFSGIPEMNSARSASATPPNAGAPPSLSRVLLNYTAEAVRVVWVPDKRGWANFFTGPREDCDHYNRCGHSGVCNQTAASTAWPCSCVQGFVPVSSSDWDGRDPSGGCRRNVSLDCGDNGTTDGFVRLPGVKLPDTLNSSLDTSITLDECRAKCLANCSCVAYAAADVQGGGDDVSTGCIMWPENLTDLRYVAGGQTLYLRQATPPSGGSDKAYDLYIPIPAPSPSPAPPLHVYKRISVNIEGKLPRGHPLLHVLAGRTIAVKRLKSIGDLPDIIVRYFTREMQLMSGLKQHRNVLRLLAYCDEASERILVYEYMHRRSLDSYIFGTPRERALLNWRRRLQIIQGIADGVKHLHEGEGSSGNVIHRDLKPANVLLDGGWQAKVADFGTAKLLVAGATGTRTRIGTA

SEQ ID NO: 65431 - protein, 700 aa, Zea mays
  Coding DNA Sequence Number=SeqID_23652
  Gene Ontology: Mol. function=protein serine/threonine kinase activity; Cellular component=membrane; Biological process=protein amino acid phosphorylation
  Homolog annotation: Hit_ID=Q2QUP5; Match level="QueryCoverage=62%, HitCoverage=93%, E-value=1e-112, Identity=49%"; Hit description=D -mannose binding lectin family protein, expressed
  Pfam annotation: Domain name=B_lectin; Domain location=89-205; Score =125.7; E_value=1.3e-34; Accession=PF01453.15; Description=D-mannose binding lectin
  Pfam annotation: Domain name=PAN_1; Domain location=371-457; Score =2.3; E_value=0.094; Accession=PF00024.16; Description=PAN domain
  Pfam annotation: Domain name=PAN_2; Domain location=370-443; Score =110.6; E_value=4.7e-30; Accession=PF08276.2; Description=PAN-like domain
  Pfam annotation: Domain name=Pkinase; Domain location=478-697; Score=- 10.1; E_value=5.8e-08; Accession=PF00069.15; Description=Protein kinase domain
  Pfam annotation: Domain name=Pkinase_Tyr; Domain location=471-684; Score=-68.3; E_value=2.8e-08; Accession=PF07714.7; Description =Protein tyrosine kinase
  Pfam annotation: Domain name=S_locus_glycop; Domain location=221-353; Score=106.8; E_value=6.5e-29; Accession=PF00954.11; Description=S -locus glycoprotein family
  Pfam module annotation: Pfam domain module=B_lectin::PAN_1::PAN _2::Pkinase::Pkinase_Tyr::S_locus_glycop; Domain location=89-205::371- 457::370-443::478-697::471-684::221-353
MTKTNTMRSHHHGYSHRHCHLLVQSSILLFLGTFAAAQAASDILSKGSNLTNGETLVSTNGSFTLGFFTRGVPARRYLGIWFTVANSSSDAVCWVANRDLPLGDTSGVLAISDTGSLVLLDGSGRTAWSSNTTAGAASPTVKLLESGNLVLLDGNGGRDDYDVVKLWQSFDHPTNTLLPGAKIGMNLWSGGGWSLTSWRDADDPSTGEFRYAMVRRGGLLPEIVMLDSSDAIKYRTGVWNGRWFSGIPEMNSYSNMFVFHVTVSQSEVSFSYAANAGAPPSLSRVLLNYTAEAVRVVWVPDKRGWANFFTGPREDCDHYNRCGHSGVCNQTAASTAWPCSCVQGFVPVSSSDWDGRDPSGGCRRNVSLDCGDNGTTDGFVRLPGVKLPDTLNSSLDTSITLDECRARCLANCSCVAYAAADVQGGGDDVGTGCIMWPENLTDLRYVAGGQTLYLRQATPPSAGSTLGFIGLVMLAIFVVQAGKLPRGHPLLHGLAGRTIAVKRLKPIGDLPDIIVRYFTREMQLMSGLKQHRNVLRLLAYCDEASERILVYEYMHRRSLDAYIFGTPRERALLNWCRRLQIIQGIADGVKHLHEGEGSAGNVIHRDLKPANVLLDGGWQAKVADFGTAKLLVAGATGTRTRIGTPSKDHTELPRPFEMLGSPCSELAEPMVPTVVGNAALATLLEADLSRPTVYETIDFR

SEQ ID NO: 65432 - protein, 786 aa, Zea mays
  Coding DNA Sequence Number=SeqID_23653
  Gene Ontology: Mol. function=protein serine/threonine kinase activity; Biological process=protein amino acid phosphorylation
  Homolog annotation: Hit_ID=Q5ZB74; Match level="QueryCoverage=99%, HitCoverage=99%, E-value=1e-170, Identity=68%"; Hit description =Serine threonine kinase 1-like
  Pfam annotation: Domain name=Pkinase; Domain location=477-740; Score =109.7; E_value=8.4e-30; Accession=PF00069.15; Description=Protein kinase domain
  Pfam annotation: Domain name=Pkinase_Tyr; Domain location=477-740; Score=77.7; E_value=3.6e-20; Accession=PF07714.7; Description =Protein tyrosine kinase
  Pfam module annotation: Pfam domain module=Pkinase::Pkinase_Tyr; Domain location=477-740::477-740
MQGGPLSPDEYWVISPPALLHQPASTIVVAIDRDRNSQLAVKWVVDHLLSGASHIVLLHVAVHYHTTRTSFISRTHFASAAAAAELWFAWTCADGFAMVETTQGALEAEMKEIFVPYRGFFNRNGVNVITTIMQKTSKTYQDDYIVGEIVSTLLLLAGGSIRDCTVSALASGRKFKNADVPSTLMKCAPDYCNIYVVAKGKSVNVRLAKCGVPPMHTGADIASDTDSLRESVLYMRRGSRGHLPRVTPDAWRSIDGRTPPELSTRPLFRERLLSSSATTKNFVVLPGKDNFETSSRSARHDSLGGDLDFGPSTRFSYIDLGENLDMSTTLPALEPMSPATGAQRDTEAEMRRLRLELKQTMDMYNAACKEAINAKQRAKEMHMMKLEEARRLEEARNAEEAALAVAEMEKAKCRAAMEAAEAAQRLADLEAQRRRNAEVRARREADEKVRALDAISNHDFRYRKYHIDEIEMATERFSDELKIGEGGYGPVYRASLDHTPVAIKVLRPDAHQGRKQFLQEVEVLSCIRHPNMVLLLGACPEYGCLVYEYMDHGSLEDRLFRRGGTPPLAWAQRFRIAAEIATALLFLHQTKPEPLVHRDLKPANILLDRNYVSKISDVGLARLVPPSVADNVTQYRLTATAGTFCYIDPEYQQTGKLGVKSDIYSLGVLLLQVVTARPPMGLTHHVEKAIDAGTFEQMLDITVKDWPVEEALGYAKLALKCTEMRRRDRPDLATVILPELNRLRNLGHAYEARMSAARANGGSGESGAQISGDSTTVGGSWETADS

SEQ ID NO: 65433 - protein, 539 aa, Zea mays
  Coding DNA Sequence Number=SeqID_23654
  Gene Ontology: Mol. function=oxidoreductase activity, acting on paired donors, with incorporation or reduction of molecular oxygen; Cellular component=chloroplast; Biological process=carotenoid biosynthetic process
  Homolog annotation: Hit_ID=Q8LJ81; Match level="QueryCoverage=99%, HitCoverage=99%, E-value=0.0, Identity=82%"; Hit description =Putative lycopene epsilon-cyclase
  Pfam annotation: Domain name=DAO; Domain location=119-404; Score=0.1; E_value=4.6e-06; Accession=PF01266.14; Description=FAD dependent oxidoreductase
  Pfam annotation: Domain name=HI0933_like; Domain location=118-404; Score=-262.8; E_value=0.015; Accession=PF03486.5; Description=HI0933- like protein
  Pfam annotation: Domain name=Lycopene_cycl; Domain location=119-517; Score=771.1; E_value=6.5e-229; Accession=PF05834.3; Description =Lycopene cyclase protein
  Pfam module annotation: Pfam domain module=DAO::HI0933_like::Lycopene_ cycl; Domain location=119-404::118-404::119-517
MGLSGATISAPLGCCVLRCGAVGGGKALKADAERWRRAGWSRRVGGPKVRCVATEKHDETAAVGAAVGVDFADEEDYRKGGGGELLYVQMQSTKPMESQSKIASKGELSPISDENTVLDLVIIGCGPAGLSLASESAKKGLTVGLIGPDLPFTNNYGVWEDEFKDLGLESCIEHVWKDTIVYLDNNKPILIGRSYGRVHRDLLHEELLKRCYEAGVTYLNSKVDKIIESPDGHRVVCCDKGREIICRLAIVASGAASGRLLEYEVGGPRVCVQTAYGVEVEVENNPYDPSLMVFMDYRDCFKEEFSHTEQENPTFLYAMPMSPTRVFFEETCLASKDAMSFDLLKKRLMYRLNAMGIRILKVYEEEWSYIPVGGSLPNTDQKNLAFGAAASMVHPATGYSVVRSLSEAPRYASVISDILGNRVPAEYMLGNSQNYSPSMLAWRTLWPQERKRQRSFFLFGLALIIQLNNEGIQTFFEAFFRVPRWMWRGFLGSTLSSVDLILFSFYMFAIAPNQLRMNLVRHLLSDPTGSSMIKTYLTL

SEQ ID NO: 65434 - protein, 692 aa, Zea mays
  Coding DNA Sequence Number=SeqID_23655
  Gene Ontology: Mol. function=protein-tyrosine kinase activity; Cellular component=integral to membrane; Biological process=protein amino acid phosphorylation
  Homolog annotation: Hit_ID=Q9AWX9; Match level="QueryCoverage=96%, HitCoverage=96%, E-value=0.0, Identity=67%"; Hit description=Extra sporogenous cells-like
  Pfam annotation: Domain name=LRRNT_2; Domain location=29-74; Score =24.3; E_value=0.00042; Accession=PF08263.3; Description=Leucine rich repeat N-terminal domain
  Pfam annotation: Domain name=LRR_1; Domain location=102-124; Score =7.8; E_value=10; Accession=PF00560.23; Description=Leucine Rich Repeat
  Pfam annotation: Domain name=LRR_1; Domain location=126-148; Score =7.6; E_value=11; Accession=PF00560.23; Description=Leucine Rich Repeat
  Pfam annotation: Domain name=LRR_1; Domain location=150-172; Score =14.6; E_value=0.36; Accession=PF00560.23; Description=Leucine Rich Repeat
  Pfam annotation: Domain name=LRR_1; Domain location=174-196; Score =11.4; E_value=2.1; Accession=PF00560.23; Description=Leucine Rich Repeat
  Pfam annotation: Domain name=LRR_1; Domain location=198-220; Score =10.0; E_value=3.8; Accession=PF00560.23; Description=Leucine Rich Repeat
  Pfam annotation: Domain name=LRR_1; Domain location=222-245; Score =12.2; E_value=1.5; Accession=PF00560.23; Description=Leucine Rich Repeat
  Pfam annotation: Domain name=Pkinase; Domain location=414-689; Score =15.9; E_value=1.6e-09; Accession=PF00069.15; Description=Protein kinase domain
  Pfam annotation: Domain name=Pkinase_Tyr; Domain location=414-689; Score=31.4; E_value=2.1e-14; Accession=PF07714.7; Description =Protein tyrosine kinase
  Pfam module annotation: Pfam domain module=LRRNT_2::LRR_1::LRR_1::LRR_ 1::LRR_1::LRR_1::LRR_1::Pkinase::Pkinase_Tyr; Domain location=29 -74::102-124::126-148::150-172::174-196::198-220::222-245::414
MVSARLVALAAFHLLVLLAMGPGEARAADGGEVRALLALGAALDPTGRLLPSWAPGRDPCAPPPSGGFDGVACDDSGAVANVSLQGKGLAGTLPPAVAGLRSLTGLYLHYNALRGGIPRELAALAALTDLYLDVNNFSGPVPPEIGAMASLQVVQLCYNQLTGSIPTQLGNLSRLTVLALQSNRLNGAIPASLGDLPLLARLDLSFNRLFGSIPVRLAQLPSLVALDVRNNSLTGSVPAELAAKLQAGFQYGNNSDLCGAGLPALRPCTPADLIDPDRPQPFSAGIAPQVRPSDGRAPSTRALAAVVVVAVALLAATGVGLLALSWRRWRRQRVAGGSPSTVSGGRCSTEAAPSAAKASSARKSASSALASLEYSNAWDPLADARGGLGLFSQDALAQSLRISTEEVESATRYFSELNLLGRRGKKAGGLAGTYRGTLRDGTSVAVKRLGKTCCRQEEADFLSGLRLLAELRHDNVVALRGFCCSRARGECFLVYDFVPNGSLSQFLDVDADNAGGGSGRVLQWSTRISIIKGIAKGIEYLHSTRTNKPALVHQNISADKVLLDYAYRPLISGCGLHKLLVDDLVFSTLKASAAMGYLAPEYTTVGRFSEKSDVYAFGVIVFQVLTGKSKVTTTHAQLPDNDVDELVDGNLQGDNYSAAEAAQLAKIGSACTSENPDQRPTMAELLQELSTV

SEQ ID NO: 65435 - protein, 419 aa, Zea mays
  Coding DNA Sequence Number=SeqID_23656
  Gene Ontology: Mol. function=transcription regulator activity; Cellular component=nucleus; Biological process=regulation of transcription
  Homolog annotation: Hit_ID=Q8S0C6; Match level="QueryCoverage=95%, HitCoverage=92%, E-value=1e-51, Identity=37%"; Hit description=Basic helix-loop-helix (BHLH) family protein-like
  Pfam annotation: Domain name=HLH; Domain location=244-293; Score =34.8; E_value=3e-07; Accession=PF00010.16; Description=Helix-loop -helix DNA-binding domain
MDEVWRGLDLQLQAGDIDGLHPVSDPFWPALAEYGCSASFLAAVDDTACFGIANMDLTAASADAAAGKSDGVDTSAFFAHNDHRGALPMRQDEQQPVYSSSSLSSTRSLSIDSGGSSSTFFPLDYDAVAALPAATFSPAPLQLQQDPFAGDEEAMMLAMLAVISSAASTSPSSSESSSPLHRAAAAVQPRLHPHGGDDSASHVTVRSTSLAVAPERTTSAADAAGQQDDACKAAAAAAGSNNSSQVYHMLSERKRREKLNGSFHTLRSLLPPCPKKDKTTVLMNAASYVMALEAQVSELEDKNSKLQRYVPCGDGGGGGGATTATAAHRRARVHISRAASDEQQVSLMVMVMVECDIVDLVLHVLERLRWTSGVSVLSVNADTYSPQALLKALANIKLHIMGDPVSSWMPQIFCQRFAV

SEQ ID NO: 65436 - protein, 1068 aa, Zea mays
  Coding DNA Sequence Number=SeqID_23657
  Gene Ontology: Mol. function=RNA-directed DNA polymerase activity; Cellular component=intracellular; Biological process=RNA-dependent DNA replication
  Homolog annotation: Hit_ID=UPI00005A975E; Match level="QueryCoverage =95%, HitCoverage=59%, E-value=0.0, Identity=88%"; Hit description =PREDICTED: similar to Retrovirus-related Pol polyprotein from transposon 297
  Pfam annotation: Domain name=RVT_1; Domain location=56-225; Score =151.8; E_value=1.8e-42; Accession=PF00078.17; Description=Reverse transcriptase (RNA-dependent
  Pfam annotation: Domain name=RnaseH; Domain location=455-582; Score= -3.2; E_value=0.00012; Accession=PF00075.14; Description=RNase H
  Pfam annotation: Domain name=rve; Domain location=780-939; Score =117.6; E_value=3.6e-32; Accession=PF00665.16; Description=Integrase core domain
  Pfam module annotation: Pfam domain module=RVT_1::RnaseH::rve; Domain location=56-225::455-582::780-939
MPGIPRDVAEHSLDIRAGAQPVRQPLRRFDEEKRRVIGEEIHKLMAAGFIKEVFHPEWLANPVLVRKKGGEWRMCVDYTGLNKACPKVPYPLPRIDQIVDSTAGCETLSFLDAYSGYHQIRMKESDQLATSFITPFGMYCYVTMPFGLRNAGATYQRCMNHVFGEHIGRTVVAYVDDIVVKTRKASDLLSDLEVTFRCLKAKGVKLNPEKCVFGVPRGMLLGFIVSERGIEANPEKIAAITSMGPIKDLKGVQRVMGCLAALSRFISRLGERGLPLYRLLRKTECFAWTPEAEEALGNLKALLTKAPILVPPADGEALLVYVAATTQVVSAAIVVERQEEGHALPVQRPVYFVSEVLSETKIRYPQVQKLLYAVILTRRKLRHYFESHLVTVVSSFPLGEIIQCREASGRIAKWAVEVMGETISFAPRKAIKSQVLADFVAEWVDTQLPTAPIQPELWTMFFDGSLMKTGASAGLLFISPLGKHLRYVLRLHFPASNNAAEYEALVNGLRIAIELGVRRLDARGDTQLVIDQVMKNSHCRDPKMEAYCDEVRRLEDKFYGLELNHIARRYNETADELAKIASGRTTVPPDVFSRDLHQPSVKINDTPEPEAPSVQPEVPSAQPEASSVQPEVPSAPESEALHIEEEQSGATPDRNWQTPYLQYLRQGELPLDQAEARRVARRAKSFVLLGDEEELYHRIPSGILQRCISIAEGQEFLQEIHSGACGHHAAPRALVGNAFRQGFYWPTAVANATRIVRTCEGCQFYAKQTHLPAQALQTIPITWPFAVWGLDLVGPLQKAPGGYTHLLVAIDKFYKWIEVRPLNSIRSEQAVAFFTNIIHRFGVPNSIITDNGTQFTSRKFLDFCEDHHIRVDWAAVAHPMSNGQVERANGMILQGLKPRIYNDLNKFGKRWMKELPSVIWSLRTTPSRATGFTPFFLVYGAEAILPTDLEYGSPRTRAYNDQSNQASREESLDQLEEARDRALLHSARYQQSLRRYHARGVRPRDLQVGNLVLRLRQDARGRHKLTPPWEGPFVIAKVLKPGTYKLANSQGEVYGNAWNIKQLRRFYP

SEQ ID NO: 65437 - protein, 538 aa, Zea mays
  Coding DNA Sequence Number=SeqID_23658
  Gene Ontology: Mol. function=nucleotide binding; Cellular component =cytoplasm; Biological process=membrane organization and biogenesis
  Homolog annotation: Hit_ID=P93042; Match level="QueryCoverage=98%, HitCoverage=72%, E-value=0.0, Identity=63%"; Hit description=Root hair defective 3
  Pfam annotation: Domain name=RHD3; Domain location=44-537; Score =528.6; E_value=6.5e-156; Accession=PF05879.3; Description=Root hair defective 3 GTP-binding protein (RHD3)
MGDACFSTQLIDGDGIFNVSGLENFMKDVRLGECGLSYAVVSIMGPQSSGHRLPKDDTAFEKQSALFALAVSDIVLINMWCHDIGREQAANKPLLKTVFQATFEVMMRLFSPRKTTLLFVIRDKSRTPLENLEPILREDIQKIWDAVPKPHAHKETPISEFFDVQVVALSSYEEKEELFKQQVSDLRDRFQHSIAPGGLAGDRRGVVPASGFSFSSQQFWKVIKENKDLDLPAHKVMVATVRCEEIGNEKVTSFIADEEWQQFEEAVQHDFVTGFGKKLSSLLDRCLSEYDMEAIYFDEGVRSSKRQQLESKLLQLVNPAYQSLLGHLHTRTLEAFKEYFGKALEKEGFAVAACNCTETFLEKFDRGSEDAAIQQVNWDTSKVRDKLRRDIEAHVASVRAAKLSELCAKYEAQLTKALVEPVESLLDSASEDTWPAIRKLLQRETKTAVLGLESAVSAFELDEATEKELLAKLEKHGRSVVESKAKEEAGRVLIRMKDRFSTLFSRDADSMPRVWTGKEDIKAITKTARSAVLSNANI

SEQ ID NO: 65438 - protein, 265 aa, Zea mays
  Coding DNA Sequence Number=SeqID_23659
MASSRRRSAFDDYYIKDYGVISAPEVTQRRTDNNDHSPSSGRYTKLWLRRTTEGPNLPDLGTGRSHPRRTADRGRGEDSGEELLAPRLPIPHGDVPNPFGKPKGSATTKPGAQGARIRCHGCGASTTISVGGELDVEALVYDCEVRGAAAWKEARATGVLSPFVVKRFTRSRHAEKLGGSCANRARVKVEEIADSKAPPISENERQVWYRLTGRSHVTETICAQNGGVHQSVKEQGARRGGVTDLLGPLVGARRVEEWAGAAEEN

SEQ ID NO: 65439 - protein, 172 aa, Zea mays
  Coding DNA Sequence Number=SeqID_23660
  Subcellular localization annotation: CTP_CleavageSite=35; ConfidenceScore=5.31e-01
HDPDSEGSVDKSRAHALFLPYPLFSPISPRHQNATASRVRGFSPPSSTGRFLSDWTEVWGAGAPPGPVGHGWNLAWAHRAADDLEFLVVAASSPCAADRAERHSIPGKNLTNAFAMLSYSFSSVLSEGRELGALMAECRRWRRRVESPRRPELGDAAELMRGAVDLLSDGRD

SEQ ID NO: 65440 - protein, 76 aa, Zea mays
  Coding DNA Sequence Number=SeqID_23661
MEGEMHGVGEVRGDRGVLGMAPMEERDRRAVAREAAEDSGMALFIAVNGGHWEMAGHGRMRSEDYPVNTRIFGSDT

SEQ ID NO: 65441 - protein, 184 aa, Zea mays
  Coding DNA Sequence Number=SeqID_23662
MAFMELEWRESEEETEALTCWRAVAERRGRCSCAARMAPGAAVLGLLGSVAAARMRGCAGLGADKGWVHELGRRVPESGRRGGRVGEGSEGRSGWRLHGRGAARWLGVVQASGHRGFGCGHERVAAGCLALLAVSRLLGGARLPAQCARGEADRHGGGEREWLAAAGLGGARSGGYREGAGHAV

SEQ ID NO: 65442 - protein, 118 aa, Zea mays
  Coding DNA Sequence Number=SeqID_23663
MGFWAWAGLGLCFGSVAAARMRGCAGLGAGRGWGAGALPAGFLSTVVEVVELEKGARGPGQAGGSTGAARRGGSWSCRRAGIGGFGCGLERVMGRLPGAARGVAPPGRSSASCSVCAR

SEQ ID NO: 65443 - protein, 70 aa, Zea mays
  Coding DNA Sequence Number=SeqID_23664
MRSGEVVSPPEAEAEAEAWGRARRRPSPEAEDEAEAWGRASSRNGVNSVVSLSERSVKGRSDCGHFDLAN

SEQ ID NO: 65444 - protein, 125 aa, Zea mays
  Coding DNA Sequence Number=SeqID_23665
  Subcellular localization annotation: CTP_CleavageSite=70; ConfidenceScore=5.29e-01
MTHAPEPFLEPTHTHSPLPAQLRIQPSTTALSLALRARPGRPPSFTVSAHPFRHHSWALAVPFASVSPASVSATWDVPQFTLSLSGSHYLCSPEHSSRSRRAATVDPSLRRVSVVVQGSQSLFSR

SEQ ID NO: 65445 - protein, 102 aa, Zea mays
  Coding DNA Sequence Number=SeqID_23666
MVGGEGKRGRPGRSTTQASHAQGGAAPEGGWVAGEPSARQASMGHIGAAELRRETKREGDLTFNEADWLTTARSDTASPARITRRMRGFPMARDLYPGGLNF

SEQ ID NO: 65446 - protein, 131 aa, Zea mays
  Coding DNA Sequence Number=SeqID_23667
  Subcellular localization annotation: CTP_CleavageSite=62; ConfidenceScore=5.59e-01
MPHVSPCVDAVLVPSSCHCVFPKRVFNLDAVSLYPGRRSFSTPWPRSSQASPAAVAFSAGLSSDAASSGWSSSLFVPSWRVTLHHLAGPLFLAVMLLLGIVPHGVVTVDEKSLNSGAWGVWLAPPLVCLTG

SEQ ID NO: 65447 - protein, 1148 aa, Zea mays
  Coding DNA Sequence Number=SeqID_23668
  Gene Ontology: Mol. function=protein kinase activity; Cellular component=nucleus; Biological process=protein amino acid phosphorylation
  Homolog annotation: Hit_ID=O04390; Match level="QueryCoverage=83%, HitCoverage=85%, E-value=1e-114, Identity=30%"; Hit description =Nuclear matrix constituent protein 1
MGLLLIEKKEWAAKFEEISEVLTQKEEILKREQAAHLNAISEYERREENMRKALGVEKQCVADLEKALRDIRAEIAEVKFTSEKKITDAQSLEASLEEKSLEIEGKLHAADAKLAEANRKKSQADRDLEEAEARQRRLEKEKLRKAREKQLKEQEESLQEWEKKLKESQNRLNELQRSINEREERANKNDQLFKIKQDELEEARRTVEAAKVTLKVKEDDINKRLNELHLQEKDADSKRSALEEQGKKLDEREAKVTNREKEGLQKLLEDHQVELESKRRDFELELERERKSFDQNMTQKQADLLKREKDVKSLEAKLSKSEQALNDKKKSMENLQNDLDAKSKALKSWDESLKNDEKRLLKEKQQMDHEREQLETYKLELEKIKSALEAEKEKISEEQNNLKLTAQERQEHSLLIAKLKKEIEEYRMRSNSLSEEMEDLRKQRQKFEEEWEQLDEKRALLVEEDKRLNIERMNLERWRDNEEKRLNDMKLKMDEEYKQQLESLERKEKALSDDMKHKQMENDEFLKGERADVQRKLQLKRHELEMEMEQKQATKEKELEEKENELNKKIDFVENKLRHAIELNESKIEKLLLEKREVQMERELLLEERKKTETDKADIRRDIESLHSLSKSLKERREAYNRDRSRLIELFEKYKACKNCGISIFEGLDSLLLKDSAEIEHPSLAVEGDDHALTTDTSGPDTGTLVNSGGRFSLLQKCSRLFKFSPRKKGEQSSEQPSERNISFGARLEEATQSDGDYVPTPVYEIAHDSFNAEDELPSDGETRENEESERHDIADNAQMESSVGVADNSIDILGTKSFDGANDMAVEATIVSVDQNGEDSVVPAEAGVEPETSEQGRRQQNQRGRRKGGMKRTRSVNAVVEDAKMILGEVFEEKTDDQGDTVKVGATRKRRFAGATISEQDEEGSEAHSESVSLGGQRRKRRQTAGAVTDAPGERRYNLRHSRAANAGAATAQADKKKSSKARNKHTVEASADDTEGTSKVVEEPAPESKRVSESADYDASQLHEFSQVEVGDAHAVDGEGAGEEDGDILDGQDALPDVPMTPSGSEFGAEQEDEDDDDSERRNQSISKKLCGHSLMALTEVADEMYNGDDGMPCKAVTPVAWFVIVLFPRIPQSTGASETSIVKIP

SEQ ID NO: 65448 - protein, 200 aa, Zea mays
  Coding DNA Sequence Number=SeqID_23669
  Homolog annotation: Hit_ID=Q9FN45; Match level="QueryCoverage=52%, HitCoverage=36%, E-value=4e-32, Identity=64%"; Hit description =Genomic DNA, chromosome 5, P1 clone:MYJ24
  Pfam annotation: Domain name=DUF617; Domain location=1-108; Score =133.5; E_value=5.8e-37; Accession=PF04759.4; Description=Protein of unknown function, DUF617
EKRRGLLEEPTWRAYCNGRKCGFAVRRDCGADEWRVLGAVEPVSVGAGVLPDDDVAGSVSGSGAAEGDLMYMRARFERVVGSRDSEAFYMMNPDGSGGPELSIYLLRLVVNNSPAGASNASASGMKKKKVQRMVGRQEAARMIGVRTFWRELYCVDKYGTQCHQYSEEEEEEEKKLLLQACARASPWIKDRLGMCSTVTF

SEQ ID NO: 65449 - protein, 388 aa, Zea mays
  Coding DNA Sequence Number=SeqID_23670
  Subcellular localization annotation: CTP_CleavageSite=45; ConfidenceScore=5.70e-01
MRGLLRSPSGTAKRRTPHVASATALFHSEATRSSSLVSRHTGTARAGSGRASCPLPPACGLPPRAAPASLFRFTQPGRRQPLSHTLVHAYAAMLRCGAGPGPGPGPALPSRIRISDRADQCIYADTGRTPGVPSGPAPARPLCQKRSSRAAHAPAPNLPQVPSQALKSVSALGLRLRHQILPPRARALALGTYHYCHHAPRSRTLRPIERAYPTPTMARAFRAASPLPLPSSRSAAAAATSGGGRGNFPWLTKKQGSSSSSKPSPSGGGQESKGDEHEGASAAGSVEQSPSPSPSPSRRRADALARLRALFLAAITHRRRRRQLGSCVTGTIFGRQTARLTVRLSTPPASPPWSSWKMTAYSTGALVREMSSGLVRLALECEKPPLAA

SEQ ID NO: 65450 - protein, 170 aa, Zea mays
  Coding DNA Sequence Number=SeqID_23671
  Homolog annotation: Hit_ID=Q10NP2; Match level="QueryCoverage=42%, HitCoverage=8%, E-value=4e-24, Identity=79%"; Hit description =Calcium-binding EF hand family protein, putative, expressed
  Pfam annotation: Domain name=efhand; Domain location=97-125; Score =21.3; E_value=0.0035; Accession=PF00036.22; Description=EF hand
MRSSEVSSRLVQELVLYAASVALSCLVLFAGLRHLDPNCAASQKAQQKKKEITKRLGRPLVSTTPYEDVIACDIINPDSMALFASAASTGRGSRVEKVRRIFERFDTNGDGGLDRNKMATLIVAINPRGKFSEDQIFAILDEVFRTYIEFILLDGCAGAAARGRRWGRLR

SEQ ID NO: 65451 - protein, 247 aa, Zea mays
  Coding DNA Sequence Number=SeqID_23672
LMRREGLNEREHGGRARAWRTTRQRGLASDSSVNWRRDSSSGLSGTPAAVAPPPRPPGPPTVTGTAGAASPAPPRPPGQGVSLPPRPPLRPCVLAPAATDGQLESSTISMDGNSNRIDNNTSQSFTDPLTLTSTDCENALDADIGGTAATPSTATVSTASTETICHKRGRKSTSDVWNDFEQFFKDINGKKVRYAAKCLYCKSQLTASSTADRVKTVIADFGLTDKKGHDGVGSAGLLDAVTRRPRA

SEQ ID NO: 65452 - protein, 280 aa, Zea mays
  Coding DNA Sequence Number=SeqID_23673
  Homolog annotation: Hit_ID=Q6QP51; Match level="QueryCoverage=63%, HitCoverage=93%, E-value=5e-15, Identity=33%"; Hit description =Putative growth-regulating factor 1
MMTASKKVRHVIRFCILFHFLFLSLTIGTGKGDTPKGILLREGSGPRAPLLIRGSKAGPSEGFNSRLRALGLRAHYWSKVRRLAPRKGSTAALGHSGSAPTTDQGFVGWPPKGSDSRLRARRARDDPGYLRYITKARATLPRVRLTAAKSGLGRHRKLRLARPQGSDSASAPKDDKLCLARPQGSDSASAPKDDKLRLARPRAQTQPRLRKTTNSASLDPGLRLSLGPQTTVSASPDPGLGLDLDLGRQTRPRPRRSLRLARPRARTDHVIGGHHYPTPS

SEQ ID NO: 65453 - protein, 129 aa, Zea mays
  Coding DNA Sequence Number=SeqID_23674
  Subcellular localization annotation: CTP_CleavageSite=83; ConfidenceScore=5.40e-01
MLLRAAPCGLGGATRPCSLPTAARPAPAPSPAPRRRGPAPAPHAVVPAPYARPRLPAARPGPLRAASRTLAAQLPGPLAGGPSAPMRGPCPRQRGPRCGSRGLGAALRSPVYPNAFPRCLMCDVARPVA

SEQ ID NO: 65454 - protein, 147 aa, Zea mays
  Coding DNA Sequence Number=SeqID_23675
MMDEEKNLATERRLESLPWCDCGDRVVVCEDTVKYFVCPNSNYPYNGRKCIFREWLYGLRSNWPELEAKEKKKMSGAEEWKSNPILCKCGIEAKYGLVRFELSVGYFCGYGDEEMQLGEIRREIRGDAYNKVKVTHGIEDALWISAC

SEQ ID NO: 65455 - protein, 160 aa, Zea mays
  Coding DNA Sequence Number=SeqID_23676
  Subcellular localization annotation: CTP_CleavageSite=34; ConfidenceScore=5.08e-01
MSLCRPRAARANEVLPRRTAHRLACSSRAPLGLLAGQSSPPMHRHRRVCMSAIVLFVSLQVSETSLYREDTRPSGSTSAIGSLSPLEPQMNVLITLYHGGNVEKNVYGNLSFDGMKKSPPFPLPLVLSSRLPPSNSYAQHASGCHNPAIPRTYASPVCDL

SEQ ID NO: 65456 - protein, 45 aa, Zea mays
  Coding DNA Sequence Number=SeqID_23677
MAPPGAAPPPVAEEGRGSARCRSADLGAGSWHALRVATAEAVETA

SEQ ID NO: 65457 - protein, 139 aa, Zea mays
  Coding DNA Sequence Number=SeqID_23678
MRITLCVARRIPRLVVTSGAKGDGKLLLWNALRGELASDLNSNLRSQDMIYPSVDTMEFYSENHLACGSDCDYGGSAVVQLWDIDSPESYLSFSASDSVLAMGLLAYLTSVLVLQLATCQWDLVVRYCCIEVGIESCIV

SEQ ID NO: 65458 - protein, 81 aa, Zea mays
  Coding DNA Sequence Number=SeqID_23679
MGVNRRGKGVRERLRQCGTGRPATDDVQEASYQEDGRRLRPSGGGVGITGTVKESKVGIGGGCAIQGEVGVGDSPPSREGG

SEQ ID NO: 65459 - protein, 452 aa, Zea mays
  Coding DNA Sequence Number=SeqID_23680
  Homolog annotation: Hit_ID=Q9FK31; Match level="QueryCoverage=27%, HitCoverage=53%, E-value=8e-23, Identity=40%"; Hit description =Arabidopsis thaliana genomic DNA, chromosome 5, P1 clone:MXI22
  Subcellular localization annotation: CTP_CleavageSite=53; ConfidenceScore=5.14e-01
MPEPQAILPLRALPPDAPLPFPVPAPFHPQAPGPGGTAPATPPNPTPPQPLTPAAPPSSSSTRPPHPWEISARAWLESFPDGRPPTEPEVDAYIDVHRPELPSLPRSQLHQRLLALRGDQVLDADQSAFPYRFQRTDLWKPVYQWLESLELDSLVATQQISDWLTSNPKIMDRMVEKHSKYHLIHYTQRMHLKMLKKKGKLPKTLQLSAARATVRPIAAPFTPEENIVPLQKTITPVTGLLSMYYIFYRSATSVVHERRQQSGTTGRFSSASSGRQQSCTPGRFQGGNATLRDKKTSLSKKKEALLKYELLTDLQNQLTAVLLKQCRTVAIKETDSSYVESPNPETNMSIQGTTTANASAPSEAKNVFINEQSVPAGATESEPGHKRKRNPIIVTPAWCYSEASAGWNSPAFQFEGPAVHVVRKSYLSWCPTSCAYTSSAPSAQPHGREKVA

SEQ ID NO: 65460 - protein, 115 aa, Zea mays
  Coding DNA Sequence Number=SeqID_23681
MEIRCRMSGGAINSFLPFLTDMRDCFRSWRFSRRKYQGERKASGRLLGKGLTEEQSHRRRHDRLASCRTGEQPWLCGTSRFRPSSKRGRGEVSPDSPPEWREQGQRPGEVGPSGQ

SEQ ID NO: 65461 - protein, 114 aa, Zea mays
  Coding DNA Sequence Number=SeqID_23682
  Homolog annotation: Hit_ID=Q6ZJ66; Match level="QueryCoverage=97%, HitCoverage=19%, E-value=9e-17, Identity=44%"; Hit description =Putative microtubule-associated protein
MQMRKEASEAVHGGRLGNEAVAVDEEDLSLKRLQEFQSELQRLKREKVYVCLVHLMRNMNCHEHIIALLDLISEFYFLQSDRLCKVEEYKALVDNFAKVMVMEPSNILANVHPR

SEQ ID NO: 65462 - protein, 112 aa, Zea mays
  Coding DNA Sequence Number=SeqID_23683
  Gene Ontology: Mol. function=nucleotide binding; Cellular component =phragmoplast; Biological process=translation
  Homolog annotation: Hit_ID=Q6ZJ66; Match level="QueryCoverage=81%, HitCoverage=18%, E-value=8e-39, Identity=89%"; Hit description =Putative microtubule-associated protein
MAGKAPGAAALPESSCAYLLQELKMIWDEVGQDQSERERILGELEQECQEVYRSKVNSANMSRIQLHQALAESEAEFTNLLLSLGERSFPARVNILILRVSPYLAGNSGKLT

SEQ ID NO: 65463 - protein, 71 aa, Zea mays
  Coding DNA Sequence Number=SeqID_23684
MTDIEDVYRGRCWRQSKSLRAIHVLQRVLVESVNSSISSFWPPKAAADYQTLSFSASFYKIRLGKKHSKST

SEQ ID NO: 65464 - protein, 113 aa, Zea mays
  Coding DNA Sequence Number=SeqID_23685
  Subcellular localization annotation: CTP_CleavageSite=61; ConfidenceScore=5.59e-01
MGQGVPVLPLLPLLPLTLLWLRSSRLLLSSRLIWQRFNSSQSPWFSRRRSPAPAVTTAAVVVFATSSAPAAPAAQPPSESVPAPASTTDPGSETDSDPQLRQMLLGVESWARA

SEQ ID NO: 65465 - protein, 115 aa, Zea mays
  Coding DNA Sequence Number=SeqID_23686
MEIRCRMSGGAINSFLPFLTDMRDCFRSWRFSRRKYQGERKASGRLLGKGLTEEQSHRRRHDRLASCRTGEQPWLCGTPRFRPSSKRDRGEVSPDSPPEWREQGQRPGEVGPSGQ

SEQ ID NO: 65466 - protein, 52 aa, Zea mays
  Coding DNA Sequence Number=SeqID_23687
MERWSEKTTLAAHEVVHGVAAPRDGGDGFPHMIGIPLMRSISIGISQNPLES

SEQ ID NO: 65467 - protein, 264 aa, Zea mays
  Coding DNA Sequence Number=SeqID_23688
  Gene Ontology: Mol. function=DNA binding
  Homolog annotation: Hit_ID=Q6ZJE1; Match level="QueryCoverage=78%, HitCoverage=87%, E-value=4e-57, Identity=73%"; Hit description =Putative DNA-binding protein
  Subcellular localization annotation: CTP_CleavageSite=32; ConfidenceScore=5.29e-01
MASLFAPARRLLSLGRRRHRRGGQLPVPPSSRSNSAEERPPPARSLSLDSTLFPLGHPSTLLVPEIELWAARPRNLLRAVELQRIVKELRKRRRHRQALELDEITEAEDLLKEWESSQNSFDFRVPNVLLTGYRQKALLDKAEMLLDGFLKKGKTPPSTSWGIVAIGYAEKGDVAKAYEMTKNALSVHAPNTGWIPRPSMLEMILKYLGDEGEVKDVEAFVSLLKAAVPVDSDMTEALSRARARAREERKAEEATEAPRGDVIA

SEQ ID NO: 65468 - protein, 93 aa, Zea mays
  Coding DNA Sequence Number=SeqID_23689
MAAGRVKYWQAVECVRREAAPGHGDKLLPCPTKMAIDRQARPSDNLGCVQGWCDAYGSADRVLASGLMNSVVHIAHSGIDPDHSTKRSMCLSD

SEQ ID NO: 65469 - protein, 308 aa, Zea mays
  Coding DNA Sequence Number=SeqID_23690
  Gene Ontology: Mol. function=binding
  Homolog annotation: Hit_ID=Q337F8; Match level="QueryCoverage=99%, HitCoverage=81%, E-value=3e-59, Identity=45%"; Hit description =Expressed protein
  Subcellular localization annotation: CTP_CleavageSite=39; ConfidenceScore=5.11e-01
MPASLRTIQTRRKQAAAQRGVPRATATSAAGCAVAALVKAMEAVQGAAAGGATEAARGAGDAVAWVFSKVHLQSPDLAVGLPLLGMVACCLGTIVEAAEMGRVEAKKPEASSGDAEADHPDGNGDAAAEEPEDDDDDMPELVEADIEKELWGQIGILHGGGLFGDSSYVHEELDEEEIKEIDSARARRRKAAYERAIASGGANSLIMSNYAQLLYEFDKDIDRAEMYFKQAVAAEPADGEAMRRYGMFLWHARGDIGGAEDMFTGAIDEEPESSHHRSSYAWFLWMTGGVETCLIDTTGKQNNGNDVE

SEQ ID NO: 65470 - protein, 298 aa, Zea mays
  Coding DNA Sequence Number=SeqID_23691
  Gene Ontology: Mol. function=nucleic acid binding; Cellular component= nucleus; Biological process=regulation of transcription, DNA-dependent
  Homolog annotation: Hit_ID=P93802; Match level="QueryCoverage=67%, HitCoverage=24%, E-value=9e-83, Identity=67%"; Hit description=MURAZC
MDGGFWSSPAPHAEGLKDRAFLLSSALAGAGNGANAKANGTLLGMATTLAGVILATHRPTANATQETLSNRRVLCCVGANDHVLGREGDIGPGMRGPCISSFHEGSKPFLSVESTTLNERWNVQLTSATGVDGHSWMYPIAFGFFFQSETLNSWTWFMKQLKKAMGDLPILLVCLDAQKGLLHAMRDVFPNVEKRECFGHLMSNYIKSHAGLEHMYLAATTYRKEVYEHHISQVHSVAKIAQYLDQHHKFLWYMSGFNPAIKCDYITNDMAKVFNNWIKYHKYHPVCDLTKKIREMIT

SEQ ID NO: 65471 - protein, 262 aa, Zea mays
  Coding DNA Sequence Number=SeqID_23692
MWLCNTSSGWHASDTEGIRGCCGLAVLGEGNGETRRRRKAKNGVAAARVLLRRKDRPEVEEKRGAGEGMEQRRCVGLLLGASHGARKSLEIVAAASREEEGALCRASAAPRELLQQGTEGGGRHLWKLGCHAERSQPPCLLPWGEEDRESAEIFWAPWVEQTCVGEGKGEQQQGRDVVLGRELGCAEGDGRLLLREGEEAGGVEQLEERARGPWGRRKWRRGGKCRADARPEEEEECGKRRLLAARGGSAKLPSARGEGSYL

SEQ ID NO: 65472 - protein, 548 aa, Zea mays
  Coding DNA Sequence Number=SeqID_23693
  Gene Ontology: Mol. function=gamma-glutamyltransferase activity; Cellular component=integral to membrane; Biological process =glutathione biosynthetic process
  Homolog annotation: Hit_ID=Q5ZEJ5; Match level="QueryCoverage=99%, HitCoverage=74%, E-value=1e-132, Identity=65%"; Hit description =Putative gamma-glutamyl transpeptidase
  Pfam annotation: Domain name=G_glu_transpept; Domain location=1-543; Score=434.9; E_value=1.1e-127; Accession=PF01019.11; Description =Gamma-glutamyltranspeptidase
MYAADPAAKYRGALAAGVPGELAGLHAAWSRYGRLPWRDLVAPAIRLARDGYEVVPYLARALQECEGDVLADPGLRAVFAPGGRRVLAAGETCRNPALAAALERVAEEGAAALYGGAVGEALVRDVRAAGGVLTVDDLRGYRVEVGAALRADAMGFTFLGMPPPSSGTLGMALILNILQGYSSLEFLKELLGIHRVIESIKHMLAIRMDLGDPDFVDVTSDVAEMLSTTFADKVRQRIVDNTTFPPGYYFPKYVCLIWRCGFYRSQPCSQRASLIPVLVIGGNGIRWSQLDDHGTSHLCVVDGDRNAVAMTTTVNAYFGAKVLSPSTGIVLNDEMDDFSVPAKRTPDRLPPAPANFIAPGKRPLSSMTPLIILKVSLFYSPRAVWLALHEPDVGRLSLTARARTSRSVPKLKAVELCAQDGELAGVLGGSGGTNIIATVVQVFVNHFIVGMDPLAAVQHPRVYHKLIPNVVTYENQTVGDGEVIALGGAARAFLEERGHRLRSTDSGAVCQFIVHELAEPPAAPGHGVFRGRLTAVSDPRKGGSPAGL

SEQ ID NO: 65473 - protein, 506 aa, Zea mays
  Coding DNA Sequence Number=SeqID_23694
  Homolog annotation: Hit_ID=Q943K6; Match level="QueryCoverage=99%, HitCoverage=100%, E-value=1e-152, Identity=54%"; Hit description =Putative SLT1 protein
MGEPLLTSLSMENSNSHPCTLLSMDPAGSRPASAESSGGGGAATNGVGSGGDRELFIVPRRESAHPGPPDINLPLSADPLPPPPSWSLDTFDILDVTLGTHNYESEVALTLPKSTGNGNGSATATVSVGTRKCAKRGDSIWGAWFFFNHYFKPALVEKPKGKVTRDASGSISGFDKSDLRLDVFLVQHDMENMYMWVFKERPDNALGKMQLRSFMNGHSKHGEPSFPFSADKGFSRLKRWAELTGRELNFSIPSEASDFEAWRNLPSTDFELDRPHPPAAKSATHGSHSHKKGLNGSGLNLSTPPSSDDGMDLSPKCAKRRKGFFGHGVEEDCVMANNSCSDREQEVEAHAGEPSWMHEFTGVAKHASGPVTAAKTIYEDEEGYLIVVSMLFSDPHSVKVSWRNTLTHGIVKITCVSTARMPYIKRHDRTFKLTDPSPEHCPPGEFVREIPLATRIPEDAKIEAYYDETGTGLEIMVPKHRVGPEEHEVRVCMRPPHLGDSDLVLS

SEQ ID NO: 65474 - protein, 50 aa, Zea mays
  Coding DNA Sequence Number=SeqID_23695
  Homolog annotation: Hit_ID=Q6Z358; Match level="QueryCoverage=68%, HitCoverage=7%, E-value=3e-09, Identity=77%"; Hit description=RRM -containing RNA-binding protein-like
MAHRLLWDVQANGWERSNFTIVCESCLDDKPYVRMFYHKAYNEVFSGDLM

SEQ ID NO: 65475 - protein, 136 aa, Zea mays
  Coding DNA Sequence Number=SeqID_23696
MVKFDRSHPFACTSHNSRCAIPLLFSSVEKPDGKKRRGCGQARRYPEPECRFPTELSTCYHHLALPQLSRLGRGHEASMLEVEASTTGGQGRHGGGILHEEERSVGVIGVCLFLVALQLCHLSQQRSVGVIGVSDQ

SEQ ID NO: 65476 - protein, 72 aa, Zea mays
  Coding DNA Sequence Number=SeqID_23697
MTLAEYVDVYSPLLYTPNPPRLFALQPLLRVLSTLVQALDLHKESFINPFSSLECYILPEAKLTHDEVIKKW

SEQ ID NO: 65477 - protein, 102 aa, Zea mays
  Coding DNA Sequence Number=SeqID_23698
MVKFQWGGRRRRGGHEGHVDGRLVARAGELVGSEKLGLNTAVDFDPVSQGASRKGLGSSLERHHSLSGKLSKVSGEVGVLQEWLATVAGYLVYYNFVNGSKS

SEQ ID NO: 65478 - protein, 142 aa, Zea mays
  Coding DNA Sequence Number=SeqID_23699
MLSKGISRWIKYEGTQLSQVQTEQKELSWNSQTCTSMRVHRTLSGAQARAATNSLLLGIPKDAATKIHRTSAQSTGDTWQEPTVTRPHRTVRCAKGIVATTVGFAKQGNKSCTVHVRWCTGLSGVPTDRRQELRTKWSSNSS

SEQ ID NO: 65479 - protein, 111 aa, Zea mays
  Coding DNA Sequence Number=SeqID_23700
MVWTYGSDRAAMTRLRGARVLISCEVILTYPRADPCGYTGECWLGVRVYSAWRMWAQSGHMTYDYTRHADVAKRGVIYTLVTNRRRSGDLPQTVCCQAEWFPKVLFPTSQI

SEQ ID NO: 65480 - protein, 75 aa, Zea mays
  Coding DNA Sequence Number=SeqID_23701
MGDRNGRWELKWRADYGVCTLGMGDGTGGEVCTMGMGIGNGGRDVGPEQLKKGVHQGMVSTMLKQCSLSTIMLNC

SEQ ID NO: 65481 - protein, 86 aa, Zea mays
  Coding DNA Sequence Number=SeqID_23702
MPHGNKAHSSLFFPSHCCSKDNSQETFHYDLISAEIQMDTPSGVKGSILSCIKFSVQVKGPYFIAIFPSMFQVKGPKSIGALYVTC

SEQ ID NO: 65482 - protein, 177 aa, Zea mays
  Coding DNA Sequence Number=SeqID_23703
MRGSDRPVLCVPSSGRLLRRPRRRTHRDDDDFHGKRYDFPLHDLCLFHLGRDGSRLGKYPHPGQGRCQPLQGRGCAVRRIHGGWHGTEPGLGAEALVDLHPLVVIIIVILLHLSFGRGLEREPLPRLHSATLLHHIMGHHLLAGSPLRLILLLLLLFGCQPVHLIGRRILWDRGSGG

SEQ ID NO: 65483 - protein, 202 aa, Zea mays
  Coding DNA Sequence Number=SeqID_23704
MNLRRIPGPRGCPYARAPEGEAAHAIVVVNSVGKSSRGAGRAMRYSRAEWLTPCPRPAPPDIISVSRYPRSVPLATAIPARPSHARAGDSYPPRLASTTSSSPRMLISGEISPHMWRKVRHLTSLPHPRRQWKVRQISSSFMRRFAEVYATMGEDDKGVVERCARKQLLTTGFHRQLLTTGRKQLVEMLKRSPYFLSTCVHL

SEQ ID NO: 65484 - protein, 141 aa, Zea mays
  Coding DNA Sequence Number=SeqID_23705
  Gene Ontology: Mol. function=RNA-directed DNA polymerase activity; Biological process=RNA-dependent DNA replication
  Homolog annotation: Hit_ID=UPI00004C1731; Match level="QueryCoverage =61%, HitCoverage=6%, E-value=1e-33, Identity=73%"; Hit description =UPI00004C1731 related cluster
MPQTLVSNAFRQGFYWPTAVANAIRIMQSCRGYQFYTKQTHMLAQALQMIPITWPFVVWGLDHIGPLHKAPGDFTHLMVAIDKFSKSIEQNINNPYDATTNGASDPGGSRKVTWCFGYDKTTKDATSSFPPGKDPSSLPWC

SEQ ID NO: 65485 - protein, 214 aa, Zea mays
  Coding DNA Sequence Number=SeqID_23706
  Gene Ontology: Mol. function=RNA-directed DNA polymerase activity; Cellular component=intracellular; Biological process=RNA-dependent DNA replication
  Homolog annotation: Hit_ID=UPI00004C1732; Match level="QueryCoverage =99%, HitCoverage=18%, E-value=4e-73, Identity=53%"; Hit description =UPI00004C1732 related cluster
MPSIPLGVAEHSLDFRANSRPVRQPLRRFDKDKCRVIGEEVHKLLADGFIKKRNTGAAYQHCMNHVFGDHIGSTIEAYVDDIVVKTRKVDNLVADLETAFACLRAKNVRLNPEKVHNLEANPEKVSAITNMGPIKDVKGVQRVMGCLVALSRFISRLGEKGLPLYHLLRKTERFAWTPKVEEALKNLKKLLSDAPILISPDEGEPLLLYVAATT

SEQ ID NO: 65486 - protein, 60 aa, Zea mays
  Coding DNA Sequence Number=SeqID_23707
GFDTIWVFCVSRDLAESRAILVRIARQRCRAASDPRFTVNKASTPPPLKSQWLRIPVFNR

SEQ ID NO: 65487 - protein, 280 aa, Zea mays
  Coding DNA Sequence Number=SeqID_23708
  Homolog annotation: Hit_ID=Q5VNF8; Match level="QueryCoverage=89%, HitCoverage=90%, E-value=3e-92, Identity=66%"; Hit description =Putative TMV-MP30 binding protein 2C
YQMHDRSHKPQPAEAGNGGPAGEGGGGNVDRVLFKNLVEMVPLVESLMDRRVNPAYSRRASLVYTPAPPKKASDLKSVKLPQSVSAKKRRDPGDIAKKSTPDSNGDNGSVVPLSLSGAENMPKDEVAVLSEQINDLQKKLLEKEEALRSAESSVTEMNAAYATIDELRRLVADKEALIRSTNSQLHDAKIMLADKQASLEKLEWEVKMSNKKVEDLQGDMSNMGFEISSLMSEIDKIEVDKLDKERVTYAEALAAARENPDEEHLNIAAEARSRLQVLVL

SEQ ID NO: 65488 - protein, 120 aa, Zea mays
  Coding DNA Sequence Number=SeqID_23709
MNVCELTHVVSHPSHRSRTGVTVDIPVHRRGNLLAVVWDFPKTSRDYPWAFQEQIADQSAAISSRSIVSASVLHLFIDCAPSALLPTRWESPYDEQVTEDPSTQQVENTEQELIEGKFYP

SEQ ID NO: 65489 - protein, 261 aa, Zea mays
  Coding DNA Sequence Number=SeqID_23710
  Pfam annotation: Domain name=DZC; Domain location=12-48; Score=36.1; E_value=1.2e-07; Accession=PF08381.1; Description=Disease resistancezinc fingerchromosome co
MAGGGELARAKGGVSGQRGIRFSEEYFGDAWAAQTWWADNYDCIVELYSIVVQPGLARGVAEGRARRVASGGRGAAGWRGRAALGGTTRPAADCGTFRWRALRQGIPGRATDSDAHNIHPRTLGTPAKGFDRDRGPERRCAQDDSGGASLTLPYGFLRRHFFGDGRKKGRKQRRAGEVTGLILKPGRDGVIESGDLGSAIRAELPVLTPEEVVELVGDEPDAATPRGSESMRAVSPAMTNRWALVCSEARTWASWAALGNH

SEQ ID NO: 65490 - protein, 113 aa, Zea mays
  Coding DNA Sequence Number=SeqID_23711
MELFHTLSSKRSGNHPTGREDYQAIANRNESSRSSTGGNRSSGCRPNDGNTTNGKHSTEMQNQIRQEHQEIRQGRLEIRQEIRQARLERRQQQRPLPPPPPAAPPSYIYILLF

SEQ ID NO: 65491 - protein, 68 aa, Zea mays
  Coding DNA Sequence Number=SeqID_23712
MAQESTGETPPRLDRTPRFEAPPEPLDLHLRGVMGKALARIPRLTAIAAKSTREPPCMQSPTALTPFG

SEQ ID NO: 65492 - protein, 1068 aa, Zea mays
  Coding DNA Sequence Number=SeqID_23713
  Gene Ontology: Mol. function=RNA-directed DNA polymerase activity; Cellular component=mitochondrion; Biological process=RNA-dependent DNA replication
  Homolog annotation: Hit_ID=UPI00005A975E; Match level="QueryCoverage =95%, HitCoverage=59%, E-value=0.0, Identity=88%"; Hit description =PREDICTED: similar to Retrovirus-related Pol polyprotein from transposon 297
  Pfam annotation: Domain name=RVT_1; Domain location=56-225; Score =146.7; E_value=6.2e-41; Accession=PF00078.17; Description=Reverse transcriptase (RNA-dependent
  Pfam annotation: Domain name=RnaseH; Domain location=455-582; Score =6.1; E_value=1.6e-05; Accession=PF00075.14; Description=RNase H
  Pfam annotation: Domain name=rve; Domain location=780-939; Score =125.0; E_value=2.1e-34; Accession=PF00665.16; Description=Integrase core domain
  Pfam module annotation: Pfam domain module=RVT_1::RnaseH::rve; Domain location=56-225::455-582::780-939
MPVIPRDVAEHSLDIRTGARPVRQPLRRFDEEKRRVIGEEIHKLIAAGFIKEVFHPEWLANPVLVRKKGGKWRMCVDYTGLNKACPKVPYPLPRIDQIVDSTAGCETLSFFDAYSGYHQIRMKESDQLATSFITPFDMYCYVTMPFGLRNAGATYQRCMNHVFGEHIGRTVEAYVDDIVVKTRKASDLLSDLEVTFRCLKAKGVKLNPEKCVFGVPRGMLLGFIVSERGIEANPEKIAAITSMGPIKDLKGVQRVMGCLAALSRFISRLGERGLPLYRLLRKAECFAWTPEAEEALGNLKALLTKAPVLVPPADGEALLVYVAATTQVVSAAIVVERQEEGHALPIQRPVYFVSEVLSETKIRYPQVQKLLYAVILTRRKLRHYFESHPVTVVSSFPLGEIIQCREASGRIAKWAVEIMGETISFAPRKAIKSQVLADFVAEWVDTQLPTAPIQPELWTMFFDGSLMKTGAGAGLLFISPLGKHLRYVLRLHFPASNNVAEYEAVVNGLRIAIELGVRRLDAHGDSQLVIDQVMKNSHCRDPKMEAYCDEVRRLEDKFFGLELNHIARRFNETADELAKIASGRTTVLPDVFSRDLHRPSVKIDDAPEPEAPSAQPEAPSAQPEAPSAQPEVPSAPEGEALDVEEEQSGATPDRDWQAPYLQYLRQGELPLDQVEARRVARRAKSFVLLGDGEELYHRSPSGILQRCISIAEGRELLQEIHSGACGHHAAPRALVGNAFRQGFYWPTAVADATRIVRTCERCQFYAKQTHLPAQALQTIPITWPFAVWGLDLVGPLQKAPGGYTHLLVAIDKFSKWIEVRPLNSLRSEQAVAFFTNIIHRFGVPNSIITDNGTQFTGKKFLDFCEDHHIRVDWAAVAHPMSNGQVERANGMILQGLKPRIYNDLNKFGKRWMKELPSVVWSLRTTPSRATGFTPFFLVYGAEAILPTDLEYGSPRTRAYTDQSNQASREDSLDQLEKARDRALLHSARYQQSLRRYHARGVRSRDLQVGDLVLRLRQDTQGRHKLTPPWEGPFVIAKVLKPGTYKLANNQGEIYGNAWNIKQLRRFYP

SEQ ID NO: 65493 - protein, 139 aa, Zea mays
  Coding DNA Sequence Number=SeqID_23714
MASTTPSPIDPNLIAAIGAEFDKRISSLDTKWEQRFSALEKSVAGCNAGFTTFTEEISSDFTNQIVLSESTTSASITRTEQTIYEHIDRVEGSLATWLGGLESAMHAFDDWRPRIESSVTDLEHSVGAVRADLSRLSIR

SEQ ID NO: 65494 - protein, 323 aa, Zea mays
  Coding DNA Sequence Number=SeqID_23715
  Pfam annotation: Domain name=SAM_1; Domain location=153-206; Score =17.0; E_value=0.0044; Accession=PF00536.20; Description=SAM domain (Sterile alpha motif)
MYSDQISTGRKRSIHDRLDGDLPAGTGAGGRVRHTVSKRQRQIDEKWKHDLYREDDEPASKSIDPKDLRLKLQRRSSQQSFTSTRSSGVRDLREKLSGIMHPQPSNADPKPKPKPVSEVVNISRRQTADEMPARQSKRAPKQTSLKKTSQPKVESPLSSFLSSLGLEKYSITFQAEEVDMAALRHMTESDLKALGIPMENNVACPAPTAVPPARFEADSSRVQPQAPQEAPPRPTPRLGPRLGLGRWSPPRPTPGLNLDLGLGRWTSPRPTLGLNLDLGLGRWSPPRPTPGLGLNLDLGGVSASPDLGLGSTTPQGGPSLPYP

SEQ ID NO: 65495 - protein, 178 aa, Zea mays
  Coding DNA Sequence Number=SeqID_23716
MNVDEGFRRAGNDEVWTGFGDVSGEQGNGCDRRWTAREERGGVKGEEKWLIETPFTHGRRGCYGSWRLDVVGLGAVWCAGRCRGVRGAVRRARVAGAGRGARRLARLGLGLGRSTRSAGASVQRLGTWRVVGRLHGRERSAGVATGREARGRRGMEGRERCRWEKHRARRLEDREHAR

SEQ ID NO: 65496 - protein, 448 aa, Zea mays
  Coding DNA Sequence Number=SeqID_23717
  Homolog annotation: Hit_ID=Q10EQ8; Match level="QueryCoverage=21%, HitCoverage=42%, E-value=1e-09, Identity=38%"; Hit description =Expressed protein
  Pfam annotation: Domain name=Hin1; Domain location=205-342; Score =16.2; E_value=6.5e-05; Accession=PF07320.4; Description=Harpin -induced protein 1 (Hin1)
  Pfam annotation: Domain name=TPR_4; Domain location=99-124; Score =17.8; E_value=0.04; Accession=PF07721.5; Description=Tetratricopeptid e repeat
  Pfam module annotation: Pfam domain module=Hin1::TPR_4; Domain location=205-342::99-124
MQFISHGPRAQPDRHGPSWRGWAAAPEQVRSIVQFFSNGKNQPAGCQQVPLGCGSLTNDNPFPITLAASACQIPIGAGSSSSQPTTKLYPSPTRSPASPATASAMASAAAATGDGEKAHAHLGQPLLVPPQPPQQPYYAYPAASYVQPAPPPPPAPTLVFVPSPCSPMLVRLRRLRPRRASCLRRFCARALPLLLFLALLAGLAFLLYPSAPAARVADLRVDSFRAQPPVLGLGLALRLRVSNPGFVLPLRYRAVSAAVSYRGHLLGAAKAWPGSGELAARNEVYADAEVWVDAGKVLDDVIELIGDVAAGSVPLEIVSEVVGSIKVFRFHIPVKDNAKVLVHVDPFEKIARIAITQRTYSKELECIEPLKCKNTPQFISSRYFFMQFLVWVKIKPLNTPAYPGAHIVLGSRYESCCFLLQRECGRLPIPEDILNLQSLLDGTEAGIM

SEQ ID NO: 65497 - protein, 602 aa, Zea mays
  Coding DNA Sequence Number=SeqID_23718
  Gene Ontology: Mol. function=metalloendopeptidase activity; Cellular component=chloroplast thylakoid membrane; Biological process =response to high light intensity
  Homolog annotation: Hit_ID=Q2JRE9; Match level="QueryCoverage=63%, HitCoverage=71%, E-value=1e-43, Identity=34%"; Hit description =Peptidase, M50 family
  Pfam annotation: Domain name=Peptidase_M50; Domain location=333-535; Score=-41.2; E_value=0.05; Accession=PF02163.12; Description =Peptidase family M50
  Subcellular localization annotation: CTP_CleavageSite=51; ConfidenceScore=5.70e-01
MREHSIGVEDMKLRKPFSSSASTSRSATVPRVTRTPLFSKNQYKPPLRPLRSSSVVRRSLQQEQEERVGPASSVSVASGERQEEATASHHVGGVDEAKASGHVGEADKGGQGEGDGEEKRSTDEQQEVDWKSDEEFKKFMGNPSIEAAIKLEKKRADRKLRELDREPDANPVAGLFRGLVKDQLAREKQRLELAEQTFKALDLNKLKSCFGYDTFFAVDVRRFGDGGIFIGNLRKPIEEVRPKLEKKISEAAGTEVTLWFMEEKNDDITKQVCMVQPKAEIDVQLEITKLSTPWGYLSAVALAVTTFGTIALMSGFFLKPGATFDDYVSDVLPLFGGFLTILGVSELMIMRWQIATRLTAAKYGVKLSPSFLVPSNWTGCLGVINNYESLLPNKKALFDIPVARTASAYVTSVVLAVSAFIVDGSFNGGENALFVRPEFFYNNPLLSFVQLVIGPYADELGNVLPNAVEGVGVPVDPLAFAGLLGIVVTSLNLLPIGRLEGGRIAQALFGRGTAALLSFGTSVLLGAGAISGSVLCLAWGLFATFIRGGEEIPAQDEITPLGNERLAWGFVLALVCLLTLFPNGGGTYSASFLGDPFFRGGI

SEQ ID NO: 65498 - protein, 306 aa, Zea mays
  Coding DNA Sequence Number=SeqID_23719
MRREHQVNEILGHANVEAGGLGAGVVGDVDGLAGWDGGQARLPLLPAVRPRFFPPAGGCAPAATCPCLSSSPLGRSSAQAPDEADADAPPISGTRRNMSCHGLGAAPTSFREVVASGAGGALAAGGERARGARLRLLLLLLLISASIFFSSSHALLISFSPLPSAASAEPLFIEANLRKQMRAEERPARGAVPRIAYLVSGSAGDDTARLWWEGHGGLLPSRVGRCTGRRGYSRGWPRLGAWSRLAVVTSARSTGGRDPRQGSGGRVEGQAGAGVRSARGEIRGSGEGRNMKRSGGRSQDRVCNPR

SEQ ID NO: 65499 - protein, 114 aa, Zea mays
  Coding DNA Sequence Number=SeqID_23720
MPPISASPCCTPACLCTVPRAMEAARHAPPTTTAQYRPPRSQRQGAESDEEIRRVPEMGGASASASSGACADERPKGEDDKQGQVAAGAQPPAGGKKRGRTAGRSGCCGTACHY

SEQ ID NO: 65500 - protein, 218 aa, Zea mays
  Coding DNA Sequence Number=SeqID_23721
  Homolog annotation: Hit_ID=Q10DH8; Match level="QueryCoverage=50%, HitCoverage=60%, E-value=1e-32, Identity=63%"; Hit description =Expressed protein
  Subcellular localization annotation: CTP_CleavageSite=78; ConfidenceScore=5.72e-01
MATAISFPRAPLVTPRACTPRRLVHVSAARASPPRGGGRVGRRSPTVPAVAGASSSSSGLAPDTSVPAWDALGGVSVLAAGTGNAVALTDLWDSAEVPLSSSVICGRWELASVLKDAMAEFDSAGAKLIAIGVGTPEKARILADRLPFPMDSLYADPERKAYSVLGLYHGLGRTLFSPASAKIYSRLDYIKKATENYTLEGTPADLTGVLQQVEVVVV

SEQ ID NO: 65501 - protein, 149 aa, Zea mays
  Coding DNA Sequence Number=SeqID_23722
MSNNNIQDNNQQSVIKFISIFHIEIERLRANYLSVWCPWCYGSGAAVLVQGRREGEMVARPRLVQGWCNCGASCTGEGTMRLWSKAVRGRGRRRRQQGAARQEQWHGGSSSRARRGRSSAWGRRDAAWRQQKQGALRQEQRAGDGATWQ

SEQ ID NO: 65502 - protein, 127 aa, Zea mays
  Coding DNA Sequence Number=SeqID_23723
  Gene Ontology: Mol. function=sucrose synthase activity; Biological process=sucrose metabolic process
  Homolog annotation: Hit_ID=Q41607; Match level="QueryCoverage=39%, HitCoverage=6%, E-value=4e-17, Identity=80%"; Hit description =Sucrose synthase 2
MPPHHGMPDLGMPLETCCVNRGRESRICRGAPSSIMLQEVIVIPPWVALSIRPQPGVWEYVRVNVIKLAVEELRAPEYLQFKEQLIEEGLRLRELTIREFLRYLTNWKKSIDIDLECMKGLRAPRGG

SEQ ID NO: 65503 - protein, 242 aa, Zea mays
  Coding DNA Sequence Number=SeqID_23724
  Homolog annotation: Hit_ID=Q10DI5; Match level="QueryCoverage=85%, HitCoverage=97%, E-value=3e-65, Identity=53%"; Hit description =Expressed protein
  Subcellular localization annotation: CTP_CleavageSite=89; ConfidenceScore=5.88e-01
ANPNLPPSQAPSPPPPPGTTGPTSSPARMLLVSQAANGSLSARRLPSKPPGPSTTNPYPLFANPRLLRRRLALSGAGADQAPRRAAPTPAAAGEGPSASSTEDPVLVRVADDGVPLEGVIQIEKPGDAAAESKLVSYAKLGLLAGGDVFCLLLFSAIGRFSHGLPVLDAETFKTADPFIAGWLLSAYLLGGFGDDAKGRNGVGSAVITAAKSWAVGIPQKQQDDVYRRGSPFELFEVSSFTN

SEQ ID NO: 65504 - protein, 106 aa, Zea mays
  Coding DNA Sequence Number=SeqID_23725
MSRGGSSGGGRSSLSYLFEPEETVLYRTRTSNQETEKAPDTNSGCVKQDDDEKKTVGTEAVHSPPKREVSNPILSSHKPPCNIYHTGQLSSGLLITDWKGVCKCLM

SEQ ID NO: 65505 - protein, 271 aa, Zea mays
  Coding DNA Sequence Number=SeqID_23726
  Homolog annotation: Hit_ID=Q019E6; Match level="QueryCoverage=48%, HitCoverage=56%, E-value=1e-26, Identity=42%"; Hit description =Homology to unknown gene
MRIVCSLRSAPNAILAQGQPKGQSEEQCLLAGYVAFHKTLAETATAASRLRAHAQKPVAGSRSRGAGAETATSPSSSRSENAVLKAAWYGSELLGIAASLLRPAPSSPQEGDAGGGGDAEGEAAAVAGALDLDHAGVAEAIKADFARSYFVTGNLTLRAYEEDCEFADPAGSFRGLRRFKRNCTNFGSLLEKSNMKLTKWEDLEDKSIGHWRFSCVMSFPWRPILSATGYTEYYFDAESGKVCRHVENWNVPKMALLRQIFRPSRWVWEKR

SEQ ID NO: 65506 - protein, 466 aa, Zea mays
  Coding DNA Sequence Number=SeqID_23727
  Homolog annotation: Hit_ID=Q2QXG2; Match level="QueryCoverage=22%, HitCoverage=40%, E-value=2e-11, Identity=41%"; Hit description =Uncharacterized plant-specific domain TIGR01568 family protein, expressed
  Pfam annotation: Domain name=DUF623; Domain location=366-425; Score =85.5; E_value=1.6e-22; Accession=PF04844.4; Description=Protein of unknown function, DUF623
MAKKHEAREPGTKPAFWVRSEPGTLTRTTRQTTQHIRSRRPVATVQDSCEPRARHERTRTLFYAARVLGMSPGAGTAKKRLGVGAVAGGGFALGCGCRDAKAVAVAVASSSVSPYSAATSATETTTSTATTATWRRARTTTHPSSASGSTGTLTVPSASSSSFPWEDMDAEGDGEEVDCKRESSAATTSFSGLLRQLNELEQSVVSWGRKSASKDYLSPPPPPPLPARSSAKQRAVHSGGGDSKEGHGNFSPPPQALRPFQFQTTQQHRKSKSMDKDKAARQVEVVHSKQPPPPPPPPPPSLSVPPEQLKVKSTDDKGCKKEAANVSPAPQAPNHRKARSCDAGAGTGPGPARLDGSVAVAVVKQSDDPLSDFRRSMVNMIVENRIATCDELRDLLRHFLALNAPHHHDAILRAFTEIWDEAFSAKTARGHREPVVATRTTTPPRPRPRAPTPPRRRHAPPPPAWR

SEQ ID NO: 65507 - protein, 84 aa, Zea mays
  Coding DNA Sequence Number=SeqID_23728
MGLGVCGSLCQDDDEDNVGFYYDYDYGFWYSFRLERVAFGAIYAQVIIEVKHIEAKAEAAAIETEAIAARATKRAVDDIVSKNI

SEQ ID NO: 65508 - protein, 96 aa, Zea mays
  Coding DNA Sequence Number=SeqID_23729
MELACGDLCFSSCGVIASDPYIKREGYLVLWAVVQRCLVTNVVVARGVVVALKIKGDWCSLVFGHYRIDYPMPIGVLCYLQTLGVSYSWLRIAARY

SEQ ID NO: 65509 - protein, 89 aa, Zea mays
  Coding DNA Sequence Number=SeqID_23730
MATPVAAETARRALAAGVGHATRLAMAVHRGIEGGPSGHAGTPAVGLAGKSCAERNLPVPRGQGRGFAGGLGRGENGREAWRKKRRKAK

SEQ ID NO: 65510 - protein, 77 aa, Zea mays
  Coding DNA Sequence Number=SeqID_23731
  Subcellular localization annotation: CTP_CleavageSite=59; ConfidenceScore=5.51e-01
MGTPALPGLSRTRPKERLAHPSPSAGRGTPRAPGQRRSHPPDPHVTSAVTRRLSPPRTSSHRVAQPQAPPGGGPSKP

SEQ ID NO: 65511 - protein, 1042 aa, Zea mays
  Coding DNA Sequence Number=SeqID_23732
  Gene Ontology: Mol. function=protein serine/threonine kinase activity; Cellular component=integral to membrane; Biological process=multicellular organismal development
  Homolog annotation: Hit_ID=Q2R440; Match level="QueryCoverage=96%, HitCoverage=97%, E-value=0.0, Identity=46%"; Hit description=Leucine Rich Repeat family protein
  Pfam annotation: Domain name=LRRNT_2; Domain location=34-74; Score =56.4; E_value=9.1e-14; Accession=PF08263.3; Description=Leucine rich repeat N-terminal domain
  Pfam annotation: Domain name=LRR_1; Domain location=104-126; Score =11.7; E_value=1.9; Accession=PF00560.23; Description=Leucine Rich Repeat
  Pfam annotation: Domain name=LRR_1; Domain location=128-150; Score =12.4; E_value=1.4; Accession=PF00560.23; Description=Leucine Rich Repeat
  Pfam annotation: Domain name=LRR_1; Domain location=152-174; Score =7.5; E_value=11; Accession=PF00560.23; Description=Leucine Rich Repeat
  Pfam annotation: Domain name=LRR_1; Domain location=176-198; Score =15.9; E_value=0.14; Accession=PF00560.23; Description=Leucine Rich Repeat
  Pfam annotation: Domain name=LRR_1; Domain location=200-222; Score =9.3; E_value=5.3; Accession=PF00560.23; Description=Leucine Rich Repeat
  Pfam annotation: Domain name=LRR_1; Domain location=224-246; Score =8.8; E_value=6.5; Accession=PF00560.23; Description=Leucine Rich Repeat
  Pfam annotation: Domain name=LRR_1; Domain location=248-271; Score =6.7; E_value=16; Accession=PF00560.23; Description=Leucine Rich Repeat
  Pfam annotation: Domain name=LRR_1; Domain location=299-321; Score =13.9; E_value=0.57; Accession=PF00560.23; Description=Leucine Rich Repeat
  Pfam annotation: Domain name=LRR_1; Domain location=352-373; Score =5.4; E_value=28; Accession=PF00560.23; Description=Leucine Rich Repeat
  Pfam annotation: Domain name=LRR_1; Domain location=377-399; Score =1.0; E_value=1.8e+02; Accession=PF00560.23; Description=Leucine Rich Repeat
  Pfam annotation: Domain name=LRR_1; Domain location=401-423; Score =9.8; E_value=4.2; Accession=PF00560.23; Description=Leucine Rich Repeat
  Pfam annotation: Domain name=LRR_1; Domain location=425-447; Score =11.4; E_value=2.1; Accession=PF00560.23; Description=Leucine Rich Repeat
  Pfam annotation: Domain name=LRR_1; Domain location=449-471; Score =13.5; E_value=0.79; Accession=PF00560.23; Description=Leucine Rich Repeat
  Pfam annotation: Domain name=LRR_1; Domain location=473-495; Score =8.5; E_value=7.3; Accession=PF00560.23; Description=Leucine Rich Repeat
  Pfam annotation: Domain name=LRR_1; Domain location=498-520; Score =6.4; E_value=18; Accession=PF00560.23; Description=Leucine Rich Repeat
  Pfam annotation: Domain name=LRR_1; Domain location=522-544; Score =10.9; E_value=2.6; Accession=PF00560.23; Description=Leucine Rich Repeat
  Pfam annotation: Domain name=LRR_1; Domain location=546-568; Score =19.5; E_value=0.012; Accession=PF00560.23; Description=Leucine Rich Repeat
  Pfam annotation: Domain name=LRR_1; Domain location=570-592; Score =9.9; E_value=4; Accession=PF00560.23; Description=Leucine Rich Repeat
  Pfam annotation: Domain name=LRR_1; Domain location=594-616; Score =11.7; E_value=1.8; Accession=PF00560.23; Description=Leucine Rich Repeat
  Pfam annotation: Domain name=LRR_1; Domain location=618-642; Score =10.1; E_value=3.6; Accession=PF00560.23; Description=Leucine Rich Repeat
  Pfam annotation: Domain name=LRR_1; Domain location=80-102; Score =1.3; E_value=1.6e+02; Accession=PF00560.23; Description=Leucine Rich Repeat
  Pfam annotation: Domain name=Pkinase; Domain location=737-1031; Score= 109.6; E_value=9.3e-30; Accession=PF00069.15; Description=Protein kinase domain
  Pfam annotation: Domain name=Pkinase_Tyr; Domain location=737-1031; Score=43.5; E_value=3.8e-15; Accession=PF07714.7; Description =Protein tyrosine kinase
  Pfam module annotation: Pfam domain module=LRRNT_2::LRR_1::LRR_1::LRR_ 1::LRR_1::LRR_1::LRR_1::LRR_1::LRR_1::LRR_1::LRR_1::LRR_1::LRR_1: LRR_ 1::LRR_1::LRR_1::LRR_1::LRR_1::LRR_1::LRR_1::LRR_1::LRR
  Pfam module annotation: Pfam domain module=Pkinase_Tyr; Domain location=34-74::104-126::128-150::152-174::176-198::200-222::224 -246::248-271::299-321::352-373::377-399::401-423::425-447::449 -471::473-495::498-520::...
  Pfam module annotation: Domain location=522-544::546-568::570 -592::594-616::618-642::80-102::737-1031::737-1031
MATLHSMVTLLLLPLLLLTARPASSSSSIDRYEKHHDREALLALKEALIGSSGLLSSWNSSSSDVCRWAGVTCSRRHAGRVVALSLRQRNLGGSISPAIGNLTFLRSLDLFDNMLSGEIPRTMTRLRRLSFLELAYNYLAGEIPEGLANCSNLAYLSVEVNQLHGGIPSGLGLLSRLQVLYVGENSLTGHVPPSLGNLSALQRLALYQNKLEGAIPEGLSRLRYLRYIQAARNSLSGTIPPRFFNISSLQYFGFSSNRLHGRLPPDAGRHLPDLQVLLLGGIGNNFSGTLPASLSNATKLQELGLAHNSFEGKVPPEIGKLCPESVQLGGNKLQAEDDADWEFLRHFTNCTRLAVLDVGGNALGGVLPRFVANFSGPVNTLIMEKNRMSGSIPLGVGSLVHLEDLEFGGNNLRGVIPEDIGRLRNLKFFTLEENLLSGGIPTSFGNLTQLLSLFLSNNRLNGSIPENLGSLRRLTSMALSFNRLTGAIPGALFSLPSLADSLLLSHNYLSGVLPPQIGSLKHATTLDLSTNNLSGEVPGALGDCASLVYLYLDGNSFTGSIPPSIGNLKGLSTLNFTRNGLSGSIPQELSQIHGLQRLCLAHNNLSGAIPQLLQNSSALVELDLSYNHLGSEVPTHGVFANMSGFSATGNDGLCGGVAELKLPPCEVKPHSHRKRLRLKIFLPAIGIAICLSLLLVALLLFKGRKGSDRISATRNHLLENKYPRVSYLQLFEATDGFAPANLIGAGKYGSVYKGRLSITGVGDSVVAVKVFTLQHPGSSRSFLAECEALRQVKHRNLINIITCCSSIDPRGNDFQALVFDFMPRYSLDRWLHPRSDEETHKLSLTQLLDIATDVADALDYLHNSSRPTVIHCDLKPSNILLGSDWTAYVADFGLAKLISESMDQPNLNIGTESTIGIRGTTGYVPPEYGAGGQASVAGDAYSFGVTLLEMFTGKAPTDDMFIEGLTLHLFAEAGLPDRVSEIIDPELFNAELYDHDPEMLSCLASVIRVGVSCSKDNPSERMNMEHAAAQLHRIKEYIEEIP

SEQ ID NO: 65512 - protein, 138 aa, Zea mays
  Coding DNA Sequence Number=SeqID_23733
  Gene Ontology: Mol. function=DNA binding; Cellular component=nucleus; Biological process=regulation of transcription
  Homolog annotation: Hit_ID=Q94CW0; Match level="QueryCoverage=58%, HitCoverage=31%, E-value=5e-36, Identity=85%"; Hit description=NAC transcription factor-like protein
  Pfam annotation: Domain name=NAM; Domain location=30-128; Score=39.5; E_value=3.5e-11; Accession=PF02365.6; Description=No apical meristem (NAM) protein
  Subcellular localization annotation: CTP_CleavageSite=7; ConfidenceScore=5.34e-01
ASTFFCSAIARSASLPAPAVPTAAPAVLQSPPPSTAAAVPPRPQCDGGAGAGEGELWFYFCPRQEREARGGRPSRTTPSGYWKAAGTPGAVYSTDRRAIGVKKTMVFYYGRASSGTKTKWKMNKYRAFQLKLNATKLD

SEQ ID NO: 65513 - protein, 80 aa, Zea mays
  Coding DNA Sequence Number=SeqID_23734
MAMGKHIGGADHPGYGSFPGLPGYAGALATGHRGLLGSQERKARGCSAARSGGRDAREGEGEGSSVTAQGTSGSRKWVSA

SEQ ID NO: 65514 - protein, 245 aa, Zea mays
  Coding DNA Sequence Number=SeqID_23735
  Gene Ontology: Mol. function=zinc ion binding; Biological process =regulation of transcription
  Homolog annotation: Hit_ID=Q6AV25; Match level="QueryCoverage=21%, HitCoverage=27%, E-value=1e-23, Identity=92%"; Hit description =Putative zinc finger protein
  Pfam annotation: Domain name=zf-Dof; Domain location=82-141; Score =98.1; E_value=2.6e-26; Accession=PF02701.6; Description=Dof domain, zinc finger
  Subcellular localization annotation: CTP_CleavageSite=73; ConfidenceScore=5.59e-01
MASFVPLLHNACKHDVRHHLNTMPATWSGSTTNNVSATGAMAAATFGSTSNSNAAPSGATDMASYLQQLQDIAAAKSSGGGGAARGEQCPRCASHDTKFCYYNTSQPRHFYRACRRYWTLGGSLRNVPIGGSTRKRPRLGQGGGGLLGSMFALGAAGLLLEGRGAGSSFDFDFDLGLGLPTGPLHLGAGAGAGAGEAAALQMQGLGLRGGGSAAGSSAFLWPAGAGMLVDNDSVDTWKLHRVSDA

SEQ ID NO: 65515 - protein, 354 aa, Zea mays
  Coding DNA Sequence Number=SeqID_23736
  Gene Ontology: Mol. function=metalloendopeptidase activity; Cellular component=integral to membrane; Biological process=proteolysis
  Homolog annotation: Hit_ID=Q84NY6; Match level="QueryCoverage=92%, HitCoverage=44%, E-value=4e-49, Identity=63%"; Hit description =Hypothetical protein OSJNBb0016P23.2 (Os03g0579000 protein) (Membrane- associated zinc ...
  Homolog annotation: Hit description=metalloprotease family protein, expressed) (Putative sterol-regulatory element binding protein (SREBP) site 2 protease)
  Pfam annotation: Domain name=Peptidase_M50; Domain location=60-281; Score=71.1; E_value=3.6e-18; Accession=PF02163.12; Description =Peptidase family M50
  Subcellular localization annotation: CTP_CleavageSite=58; ConfidenceScore=5.14e-01
MIATHLSPAPKQYRFPSLLHSTSHNHHLPVHLSLPRRHRNFAKPTAAAQDLLASVESVASAASVLAAIVLVHESGHFLAAASRGIHVSQFSIGFGPTLARFRLSPVEYALRAIPLGGYVGFPDDDSESGFAPNDLNLLHNRPIPDRLLVVSAGVAANLAFAFLIVYAQLRSPSASPCRRSSLGFSCPSFARDSPWMPCRRLRGHQPRQGQQAQPDPAAVATPDLLASVESVASAASVLAANGIHVSQFSIGFGPTLVRFCLGPVEYALRAIPLDGYVGFPDDDPESGFAPNDPDLLCNRPVPDHLLVVSAGVAANLAFAFLVVYEQALTIVLRRWLGHGCGAHGGRRASDEDVM

SEQ ID NO: 65516 - protein, 96 aa, Zea mays
  Coding DNA Sequence Number=SeqID_23737
MVGLQVVTRMMVLVMPMVMLVHYSQTGHFAEYVDVYSPLLYTPNPPGCPRCNHCSGEDEVVEEDFQEFQEYYVKEDEVCSEEVTRDKEYLEEQLYK

SEQ ID NO: 65517 - protein, 390 aa, Zea mays
  Coding DNA Sequence Number=SeqID_23738
  Gene Ontology: Mol. function=sequence-specific DNA binding; Cellular component=nucleus; Biological process=regulation of transcription
  Homolog annotation: Hit_ID=Q654W7; Match level="QueryCoverage=66%, HitCoverage=71%, E-value=6e-34, Identity=38%"; Hit description=WRKY transcription factor-like
  Pfam annotation: Domain name=FLYWCH; Domain location=196-255; Score =0.7; E_value=0.059; Accession=PF04500.7; Description=FLYWCH zinc finger domain
  Pfam annotation: Domain name=WRKY; Domain location=204-257; Score =99.2; E_value=1.2e-26; Accession=PF03106.6; Description=WRKY DNA -binding domain
  Pfam module annotation: Pfam domain module=FLYWCH::WRKY; Domain location=196-255::204-257
  Subcellular localization annotation: CTP_CleavageSite=27; ConfidenceScore=5.17e-01
MEAADLRWCCGSSSNDWDLHAVVRFASCSGGGSRVTTSSPLRASDEPFSSCLLPPPQSQTKDEVTDAAAPQQLPTGPAVGVDDLCLQQAFLGLATPQPRNNEAPPPAKRPRTPYRSNNGVGGPTRSKRKYVSARRRRPAAHLNLYFFRLFPREILAVPAYLGGKETTSARACIRIFVERRRARRARRRWRGCPWARLRTPGRGRKYGQKPIKGSPYPRGYYRCSTDKDCRARKQVERCRTDPSTLIVGYTGEHSHPVPLHRNALAGTTRNKPQPAPPSTSSPAEQPDPAASPIDDTTTPLLCPSVLGVECEEEEENTVAAGLLLEDAEMEGYEDVLLFLKPAPSPSNGSGSKDVMLFPDPHRPAPGADNTGGSEKVVPLSNLQSTSYHFQ

SEQ ID NO: 65518 - protein, 604 aa, Zea mays
  Coding DNA Sequence Number=SeqID_23739
  Gene Ontology: Mol. function=structural constituent of ribosome; Cellular component=intracellular; Biological process=translation
  Homolog annotation: Hit_ID=Q2QT41; Match level="QueryCoverage=94%, HitCoverage=89%, E-value=1e-159, Identity=50%"; Hit description =Expressed protein
  Pfam annotation: Domain name=DUF594; Domain location=538-592; Score =37.4; E_value=4.8e-08; Accession=PF04578.4; Description=Protein of unknown function, DUF594
MVVEQFDEGGEFGCVGIPHGCPKRLLLWLAYQLADSTAMYALGNLSLSSTLRQHRLVAFWAPFLLLHLAGPDNITAYSLEDNKLWKRHLLTLVVQVLGAGYVIYNHIAGGGILFSLGAALTTAIAVAKFCEKTWALRCANFGVIRESMEAEDAEQLGKCDLYLEDRPPRGGFREKVVEKEEFLMLRAHAVFRVCKSAMVDSSKNPGSYIVGILKNLKEKEMGYMWTLVEMELSLMYDILYTKAPVIHTLRGYCIRVVSPLAVAASLLLFQFYGREGARTADVAVTYALLGGAFLMETTALLSALCSTWTFSFLCATRWSSLRHSALLSRKWTGTMGQYNMLEMSTARPGWWAGCDMFGMCTVMHDWLAGHGMPAVAVPDGLKDLVVTYIQHMIRSGYINTPGMVRGSWGTEALERWKEHSGISIDSKFLGSELQEGIIIWHIATDVFLARRQAEIEGRDKVKEVQVLSNYMMFLLVKRPDMLPGLAQNKLYQWTKTSLATNVANSDDVNPASALYKMEITGHHVQKFRLLLAIELAKTLVHTKNALELVYEVWADFIIYTANRCSRESHAKKLNSGGEFTTLVWLMTDHLHQVRFNKDLYPPSE

SEQ ID NO: 65519 - protein, 91 aa, Zea mays
  Coding DNA Sequence Number=SeqID_23740
MAPTAAQEETRCNDNSMSASLYDKGDPESPSLESAPLPDDDRLRIASEFRIVPHDLLKATCHTYLCFGVQSYIWRWGLNLCPDGRRAGDTG

SEQ ID NO: 65520 - protein, 45 aa, Zea mays
  Coding DNA Sequence Number=SeqID_23741
MPRTLPPQPDEASALSKTDRGGNEERSDVELAVTEHPSVEMVVNI

SEQ ID NO: 65521 - protein, 129 aa, Zea mays
  Coding DNA Sequence Number=SeqID_23742
MPRTLPPQPDEASALSKTDRGGDEEQSDVELAVTEHPAGEVRRVGPYAPGRAEDSVPNSPIDPRVFVVTPERELCGEEDSDRVGPANQWNTAARGGEQAVLTRRAHQPVYLARLKLDSNRLLLAANQTA

SEQ ID NO: 65522 - protein, 91 aa, Zea mays
  Coding DNA Sequence Number=SeqID_23743
  Subcellular localization annotation: CTP_CleavageSite=53; ConfidenceScore=5.30e-01
MATARNWGAPSQHRAARVGITSKVQEIVSITPKRRRMASVLDAVMESTKLLTPASTEAPSMGDKNSKESTEASMRRLKLKLGRQLSPKRGL

SEQ ID NO: 65523 - protein, 314 aa, Zea mays
  Coding DNA Sequence Number=SeqID_23744
  Gene Ontology: Mol. function=amidase activity; Cellular component =cytosol; Biological process=translation
  Homolog annotation: Hit_ID=Q7G6E7; Match level="QueryCoverage=99%, HitCoverage=61%, E-value=5e-86, Identity=52%"; Hit description =Putative amidase
  Pfam annotation: Domain name=Amidase; Domain location=1-294; Score= -101.1; E_value=7e-07; Accession=PF01425.11; Description=Amidase
  Subcellular localization annotation: CTP_CleavageSite=44; ConfidenceScore=5.03e-01
MAAVTLGTETDGSILCPSSLNSVVGIKPTVGLTSRAGVIPVSPRQDTVGPICRTVADAVHVLDAIVGYDEPDAVATGAAAKYIPDGGYAQFLKMDGLRGKRIGVPAGFFGFPDGSVRQMVYQQHLDTLRRHGAVVTEDLSIANLDVIQNATVSGELAALAAEFKIALNAYLSSDLSRSPVASLAELIVFNNAHPDEEMLKQFGQLIFLVAQNTTGIGAAETAAIQQLDDLTAGGVEKVMRQHQLDAIVAPDSSSATVLAIGGLPGIAVPAGYDELGAPFGITFGGLKGYESRLIEIAYAFEQATKARKPPMFKN

SEQ ID NO: 65524 - protein, 97 aa, Zea mays
  Coding DNA Sequence Number=SeqID_23745
MMKSWRTNEGKRSTKGVTTTKSSPTYQKGQDDTPSACSHMLEGDIGTLAEDGVVLNTNLNLTKSTFYGTHQVWQHGRRASYRDSHTGWTRQNVVPRV

SEQ ID NO: 65525 - protein, 268 aa, Zea mays
  Coding DNA Sequence Number=SeqID_23746
  Gene Ontology: Mol. function=oxidoreductase activity; Cellular component=vacuole; Biological process=response to oxidative stress
  Homolog annotation: Hit_ID=Q5U1N1; Match level="QueryCoverage=83%, HitCoverage=83%, E-value=8e-21, Identity=30%"; Hit description=Class III peroxidase 62 precursor
  Pfam annotation: Domain name=peroxidase; Domain location=30-201; Score=73.2; E_value=8.3e-19; Accession=PF00141.13; Description =Peroxidase
MSSSCWPSALAAGLSVDFHAASCPDLDGIVRSAVEEARRWDAQVTAGLLRIFFHDCFPQGCDASILLGRNQGGSEQDAPQNTGLQQAALDLVERIRGRRQQGAPLQDGPSTGSRPPPMASPSSSATSDRIDKKTGKDNFEWGLTGYCNGDKEKKHALDRTPFNFDNSYFVELQNGRGVLTSDQALYRDGRTRWLVDRCASSQDEFFKRFVESMLKLSRLRGADPGPVRNNCFVRASFGASSATKDDLVIDTTAGDGDGDEDLILAAAA

SEQ ID NO: 65526 - protein, 39 aa, Zea mays
  Coding DNA Sequence Number=SeqID_23747
MAPPRAELRHRRAVSEESDSEDPLDPSQRWRFEGRINLF

SEQ ID NO: 65527 - protein, 100 aa, Zea mays
  Coding DNA Sequence Number=SeqID_23748
  Subcellular localization annotation: CTP_CleavageSite=56; ConfidenceScore=5.50e-01
MESSRSGALIRSQPFNARSTAKSNSLTPVGLWWRSEVPTAVPLPLPQHRSQPTCVSGFSAVPMLRRAICHKPTPISGHTTNPWISHRFVRAFEDEPVERM

SEQ ID NO: 65528 - protein, 62 aa, Zea mays
  Coding DNA Sequence Number=SeqID_23749
MVVLRGWGVVVMEQVPRGSRCVKGLVPAMMAAVGALQRGRGAVVVRMEEGHACWEGGTGAVL

SEQ ID NO: 65529 - protein, 164 aa, Zea mays
  Coding DNA Sequence Number=SeqID_23750
MALSPLLLAERYSPYTISYPNLDIKGRLNPTKESSVHNQLFAYSSTCQIVFLAKIILPYSTNFDGQYQGGKITRKQQTEMNPSDPPPVGIDQVVAAQMMVIQQMANKVTEMQNQIRQERQEIRQDRLEIRQEIRQARLARQQQQRPLPPPPPPSYKYIITICKT

SEQ ID NO: 65530 - protein, 77 aa, Zea mays
  Coding DNA Sequence Number=SeqID_23751
MNIGAAQNATIRVVLVVFQWWGLNVAIIINKWKLPAEAGHRVLLTMPTTPTDRMKEIAQASQEFLYIDADGRATDVA

SEQ ID NO: 65531 - protein, 335 aa, Zea mays
  Coding DNA Sequence Number=SeqID_23752
  Gene Ontology: Mol. function=hydrolase activity; Cellular component =endoplasmic reticulum; Biological process=metabolic process
  Homolog annotation: Hit_ID=Q5Z861; Match level="QueryCoverage=100%, HitCoverage=82%, E-value=1e-157, Identity=75%"; Hit description =Calcineurin-like phosphoesterase-like
  Pfam annotation: Domain name=Metallophos; Domain location=1-267; Score=34.8; E_value=2.9e-07; Accession=PF00149.18; Description =Calcineurin-like phosphoesterase
MHFGNGATTRCRDVGPEGGGARCSDLNTTRFLRRVIEAEKPDLIAFTGDNIFGGSATDAAESLLRAISPAIEYRVPWAAILGNHDQESTMTREELMTFMSLMDYSVSQVNPPGFLVHGFGNYHVGIHGPFGSELVNTSLLNLYFLDSGDREMVNGVKTYGWIRESQLAWLRSTSLELQLICDRLNKRIKIPFGKLPGGEWQTKKKIHAPALAFFHIPIPEVRGLWYSGFKGQYQEGVACSSVHSGVLGTLVSMGDVKSVFLGHDHLNDFCGNLNGIWFCYGGGFGYHAYGRPHWPRRARIIYSELKKGQRSWLEVDSISTWKLLDDEKLSKIDEQ

SEQ ID NO: 65532 - protein, 189 aa, Zea mays
  Coding DNA Sequence Number=SeqID_23753
MSRQALPTLLRSPWPQRRILRDACAPVSAPCPPPTLPRPRLPPKIDQGGDLLRQGLRAGGCPCAGAASRQRALEPPELLLTTHGNLPSVIATENVDALLGQGLLVARLKSHSVVSLRSACGQAGMTSRCGASGGGVGSGCSQAEHCKYYILVVVELSKHLTNAEWNLVKAANPCAEDVLAEHDSTADES

SEQ ID NO: 65533 - protein, 197 aa, Zea mays
  Coding DNA Sequence Number=SeqID_23754
MGKICEVRVNIRRQQRGERESIHCGSMVGCHVKVRTTLLIATRWCVRKHVGTKESYTDAPAHSEFGRLSSEYLALQVHANCAKGSTQTNKKSKLGFKERSKKETEVCPGLAHQTVRCATGQCPVHQGESAQTPQLRISQTQLCYNSPDCLVCHRTVRCTSGATTICAQRSTLTDEQCSTIPQQKSEQQVRGAPECPV

SEQ ID NO: 65534 - protein, 223 aa, Zea mays
  Coding DNA Sequence Number=SeqID_23755
  Homolog annotation: Hit_ID=Q8SA97; Match level="QueryCoverage=47%, HitCoverage=19%, E-value=7e-08, Identity=44%"; Hit description =Ornithine carbamoyltransferase
  Subcellular localization annotation: CTP_CleavageSite=51; ConfidenceScore=5.49e-01
MRLSRGRASVKRPGGTRNHKGDVAVPKKPRLSLPFVAGPSPSQGVGRGGSRSAEARAESEPWGRAKRSFVVFRVLARVRALGSGGAEFAVFRVLARVRALGSSGAEFAVFRVLARVRALGSGGAEFAVFRVLARVRALGSGGAEFAVFRVLARVRALGSGGAEFAVFRVLARVRALGSGGAEFAVAPLARPDCLSDSLCRVALQSEWRRRRCPSVRLASGAVE

SEQ ID NO: 65535 - protein, 528 aa, Zea mays
  Coding DNA Sequence Number=SeqID_23756
  Gene Ontology: Mol. function=chitinase activity; Cellular component =lysosome; Biological process=carbohydrate metabolic process
  Homolog annotation: Hit_ID=Q16PY6; Match level="QueryCoverage=51%, HitCoverage=68%, E-value=3e-32, Identity=33%"; Hit description =Chitinase
  Pfam annotation: Domain name=Glyco_hydro_18; Domain location=258-521; Score=-49.3; E_value=0.02; Accession=PF00704.18; Description=Glycosyl hydrolases family 18
MSGAPEDSNANSPPSGISRGARAIIHRTVRCTPDSVRCAKEERLQELASFGKLQRLVRYNSPDMSGVHRTIRCNSGATAIRRQRLPAAQLMCAQRAQKSGAPILAHRTRNRACPVCTGHPGGPTSQKLQRSESNGTGDVAGAPDMSRLVAAAGEMPPRRRDRRRLRDPSPPSSDARAPPSALGLRLTLLVPLLILVLVLAALGFSGLLSHSPPHSQTLQTTAHSVYERGLVKRDVSAREILSEHTRVSENRSQRNFANPVLAYVTPWNSKGYDMAKLFITKLTHVSPVWYDLKRLVLEGEHNFDAKWVSELQTNGSLVVPRIVLEALPAVLLFEKKQKAKAIDIIVSECRDKGYDGIVLESWSRWAIYGVLDDQELRYMALEFVKQLGEALHSVNSKSSSHHLELIYVIPAPRMQKLNNQDFGPKDLMHLADTVDGFSLMTYDFSGPQNPGPSAPLKWIHHSLAALLSAKGSSHSNSHSRMIFLGINFYGNDFLLSGAYGAEVTQLAAIGYDAERKALDLEVVGSSPT

SEQ ID NO: 65536 - protein, 323 aa, Zea mays
  Coding DNA Sequence Number=SeqID_23757
  Homolog annotation: Hit_ID=Q9AS36; Match level="QueryCoverage=41%, HitCoverage=31%, E-value=3e-48, Identity=70%"; Hit description =Putative ania-6a type cyclin
  Pfam annotation: Domain name=DUF1777; Domain location=188-311; Score=- 85.5; E_value=0.02; Accession=PF08648.2; Description=Protein of unknown function (DUF1777)
MGREEGAERSVEELSRTFWYHLLAQINLQALAPQVGEGCTMHWWQRSSDQLHARRHRVPLPEDPPWWTVFDADEAGIQEVCSVLAHLYSLPKAQYIPVYKEYDSFTVKRISDPQALKESPARAVASDKGTPIPSSSNQEKDSVAKTIPNRVKEKSDDEGRHLPAEFDGKENLVVNSKIEKSDSGVDWSRERERERERSRGRERDARGRDSDHDSRGRDSDRERDRRRRSRDRSSGSVQSLLVFSVSDDSLYLERRTLRQGEIKAPSITRTCVSYVAFVLRFQTELTTTVRIHLVKKIGIDTIDQEQHEFVEPSSPLVPKILEN

SEQ ID NO: 65537 - protein, 535 aa, Zea mays
  Coding DNA Sequence Number=SeqID_23758
  Gene Ontology: Mol. function=pyridoxal phosphate binding; Cellular component=cellular_component; Biological process=amino acid and derivative metabolic process
  Homolog annotation: Hit_ID=Q338J0; Match level="QueryCoverage=92%, HitCoverage=97%, E-value=0.0, Identity=75%"; Hit description =Pyridoxal-dependent decarboxylase conserved domain containing protein, expressed
  Pfam annotation: Domain name=Aminotran_5; Domain location=91-466; Score=-200.2; E_value=0.041; Accession=PF00266.9; Description =Aminotransferase class-V
  Pfam annotation: Domain name=Beta_elim_lyase; Domain location=101 -405; Score=-126.8; E_value=0.037; Accession=PF01212.11; Description =Beta-eliminating lyase
  Pfam annotation: Domain name=Pyridoxal_deC; Domain location=48-425; Score=575.7; E_value=4.5e-170; Accession=PF00282.9; Description =Pyridoxal-dependent decarboxylase cons
  Pfam module annotation: Pfam domain module=Aminotran_5::Beta_elim _lyase::Pyridoxal_deC; Domain location=91-466::101-405::48-425
MGSLPLDASLRPLDPEAFAGDSRAIVDFLAEYYRDVDKYPVRAADLEPGRLRKLLPEAAPEHGEPMEDILEDVRRDILPGLTHWQSPSFFAYFPMNGSAAGFAGEMLSAGLNVAPFVWVASPAAAELESVVVDWMGTLLGLPQRLLFSGGGGGVLQGSTCEAVVCTLAAARDRALARLGHESIVKLVVYASDQTHATFQKGARLVGIPPSNFRVIRTTSASGYGLTADDVRAAVDRDVARGLVPLYLCATVGTTGLGAVDPVRELGEEARRHGMWLHVDAAYAGSAAICPEFQGTLDGAELADSVSMNPHKWFLTNADCCCLWVASPGALTSALSTDPEYLKNVGTDGTGKPAAIDYKDWQISLSRRFRAIKLWVVLRRYGAVGLRAHIRRHVTTAKWFERTVAADERFEVVVPRKFSLVCFRLRERFAGDDAADELNRELLTAVNASGRAFVTHFVVDGKFVIRLAVGGAMTEMRHVMDVWELLQASADHVLRRYSYYFTTLHAMYFRTLRTGNSKESIISGHTTLGAWNADTA

SEQ ID NO: 65538 - protein, 79 aa, Zea mays
  Coding DNA Sequence Number=SeqID_23759
MGDTSKRGTKDARTNHISWLMLTGNLSGQQNLRSFNIRLGKQQVFNRGIAAPNLGDPCKSFLLWKGGAFSWVSHGKLRR

SEQ ID NO: 65539 - protein, 117 aa, Zea mays
  Coding DNA Sequence Number=SeqID_23760
  Homolog annotation: Hit_ID=Q10SM6; Match level="QueryCoverage=60%, HitCoverage=17%, E-value=7e-07, Identity=45%"; Hit description =Riboflavin biosynthesis protein RibD containing protein, expressed
  Subcellular localization annotation: CTP_CleavageSite=45; ConfidenceScore=5.49e-01
MQLITTSLPPMHGAAFTNLGSKSLKVYLCNSTARCLRHTHTLAPMASPLVSCPHLIQRPALATTLDSPTRARLEVGAKAIGGHSRAQAVMDLDAHYMGACVELAHNARRPTTPAPAQ

SEQ ID NO: 65540 - protein, 492 aa, Zea mays
  Coding DNA Sequence Number=SeqID_23761
  Gene Ontology: Mol. function=sequence-specific DNA binding; Cellular component=nucleus; Biological process=regulation of transcription, DNA-dependent
  Pfam annotation: Domain name=Vicilin_N; Domain location=199-355; Score=-74.1; E_value=0.095; Accession=PF04702.3; Description=Vicilin N terminal region
MPRKIQNRKSCFTSFMNTPSLPPQSGQDSRLDHLVVYAAAYIPILASAFLPTIESPFVPNSFTGKRKSTVGNSPVVQPHVGSRAVHEYQFLPEQPSDTYERASPHYYDTPVEASNSRIPSLTSGSQLLHGSEEAAPSYAFQGHTSGSSLLPPSSRPQVFPVAPTDYEMTQFNSNLSSVPVEGQFDTSQVAAFEDPPVSSERRAYHDEDTSRVERKRKHNEEAKIAKEVEAHERRIRKELEKQDFLNRKREEQRHKEMERLERERRKEEERLLRERQREEERFQREQRRENERMEKFLQKQSRRVCFWVPRMLIEEKQRQKEQLRKEKEAARQKAANERAAARRIARDYMELVEDERLELMELAAQNKGLPSMLYLDSDTLQQLDSFRAPVVLSSGDRLLPCSVALASAQLRRSPLLTGQLWRPSAPVCSELCSVFSAHFRVQCLSSDPGWKYGFFCQKVTTFWQKNTLNHLLCNILPKSIFPFLGPKIEPFS

SEQ ID NO: 65541 - protein, 76 aa, Zea mays
  Coding DNA Sequence Number=SeqID_23762
  Subcellular localization annotation: CTP_CleavageSite=26; ConfidenceScore=5.06e-01
MMRVGTFSDDMMTTRMSLSVADSLTRLSTRTQSSQAPGDAATDAGAAAAVAIAETDETNAVAIGPKDLSECPEDPG

SEQ ID NO: 65542 - protein, 699 aa, Zea mays
  Coding DNA Sequence Number=SeqID_23763
  Gene Ontology: Mol. function=glutamate-ammonia ligase activity; Cellular component=nucleus; Biological process=nitrogen compound metabolic process
  Homolog annotation: Hit_ID=UPI0000162EFD; Match level="QueryCoverage =93%, HitCoverage=36%, E-value=1e-162, Identity=49%"; Hit description= HB-1; transcription factor
  Pfam annotation: Domain name=DDT; Domain location=40-98; Score=86.2; E_value=9.9e-23; Accession=PF02791.7; Description=DDT domain
MEQSVRGGRGGGLGMVSQFPPATVKMKLPFSIKPWTGSEDNIGKLLMVWKFLITFTDVLGLCPVTLDEFVQSLHDYDSRLLGELHVALLKSIIKDIEDVARTPSIALGVNPGGGHPQIVEGAYSWGFDIRSWQRHLNLLTWPEILRQFALSAGSGPQLKKRTVEDSHYHYDNEGHDGENVILALRNGTAAVNAVAKMKERGYTNRRRSRHRLTPGTVKFAAFHVLSLEGSNGLTILDVAEKIQKSGLRDLTTSKTPEASIAAALSRDAKLFERTAPSTYCLKSPYRKDPADSEAVLSAAREKIRAFQNVLSDSEAEKEADEAERDDDSDCDDADDDPDGDDVNIEVEEDKDPLLAVKAQDEVPSTTTVIGIKTKLDSVGNALNSSSSFTKSAKGAPLPYLGRSSAADTSNDSPLGGPSANHEVTPGDSENTQIDESNQIEPWVCALAEGDYCDLSVEERLNALVALVGVATEGNSIRGVLEERLELANALKKQMWAEVQLDKRRFKEEFASRVQYNSGMSFKPDIYQENNMTEITSTRACDAYKENDGHVGTINNCEMLDQHSQGNAGGITYDRNVVGQEIHATPDTSYVQQYAYADKTRSQLKSYIGHRAEQLYVYRSLPLGQDRRRNRYWQFTTSASPNDPGSGRIFFESEDGCWRVIDSEDIRDPKAPKINRPCNHVLRNQTAATINLLPTLLTPF

SEQ ID NO: 65543 - protein, 63 aa, Zea mays
  Coding DNA Sequence Number=SeqID_23764
EDAEDEIVSIDARLHIHEEEVTSTDAGVQGHEEEVVSTDAGVEGHEEEHADEDKDEATEAPTL

SEQ ID NO: 65544 - protein, 478 aa, Zea mays
  Coding DNA Sequence Number=SeqID_23765
  Gene Ontology: Mol. function=protein serine/threonine kinase activity; Cellular component=mitochondrion; Biological process =protein amino acid phosphorylation
  Homolog annotation: Hit_ID=Q5QMQ6; Match level="QueryCoverage=97%, HitCoverage=73%, E-value=0.0, Identity=73%"; Hit description =Fertility restorer B-like
  Pfam annotation: Domain name=PPR; Domain location=130-164; Score =20.6; E_value=0.0058; Accession=PF01535.11; Description=PPR repeat
  Pfam annotation: Domain name=PPR; Domain location=198-232; Score =46.1; E_value=1.2e-10; Accession=PF01535.11; Description=PPR repeat
  Pfam annotation: Domain name=PPR; Domain location=233-267; Score =46.7; E_value=8e-11; Accession=PF01535.11; Description=PPR repeat
  Pfam annotation: Domain name=PPR; Domain location=268-302; Score =39.3; E_value=1.4e-08; Accession=PF01535.11; Description=PPR repeat
  Pfam annotation: Domain name=PPR; Domain location=303-337; Score =43.0; E_value=1.1e-09; Accession=PF01535.11; Description=PPR repeat
  Pfam annotation: Domain name=PPR; Domain location=338-372; Score =24.4; E_value=0.00041; Accession=PF01535.11; Description=PPR repeat
  Pfam annotation: Domain name=PPR; Domain location=380-414; Score=4.9; E_value=1.9; Accession=PF01535.11; Description=PPR repeat
  Pfam annotation: Domain name=PPR; Domain location=415-448; Score=4.7; E_value=2.1; Accession=PF01535.11; Description=PPR repeat
  Pfam module annotation: Pfam domain module=PPR::PPR::PPR::PPR::PPR::PP R::PPR::PPR; Domain location=130-164::198-232::233-267::268-302::303 -337::338-372::380-414::415-448
MPPANSTPPKWPKTLTADHLHRLVRAERDPRRALAIFDGATAAASTSAPDPITPSLATVSLLTSRLASAGHLPLATSLLSRSRGVFPSVAALEPPFLGLLRAFSRTHRPLAALHLFRSAPSDLALPHSARSYNAVLAALVAHSHLPLARSLLADMRAAGFAPTAATYNVLLKAHCSDAAAHIEDALRLFRNIPKPDVCSYNTIIDGLCRRGRLAEALDMFSEMVGKCIAPTVVTYTTVIHWLAREGCFDDALKIFHEMGRRGVSPNLVTYSSLIDGLCKGGRATSALELLDRMIKEKKLPNMITYSSVIDGLCKEHMLSEAMEILDRMRLQGRKPDAGLFGKLIVGLCDAGRAVEAANYLDEMVLAGIEPNRVTWSLHARINNTVLTALCDKGELGRAFQVYQSTRTRSISTDPTTFHLLVESFSKNNIEKAARVVLDMLSERCIPERETWDVIISGYWSKKKVRQEAKEIWDHITVS

SEQ ID NO: 65545 - protein, 208 aa, Zea mays
  Coding DNA Sequence Number=SeqID_23766
  Homolog annotation: Hit_ID=Q9FNL3; Match level="QueryCoverage=84%, HitCoverage=82%, E-value=6e-43, Identity=48%"; Hit description =Arabidopsis thaliana genomic DNA, chromosome 5, P1 clone:MCL19
  Pfam annotation: Domain name=DUF679; Domain location=38-203; Score =284.5; E_value=2e-82; Accession=PF05078.3; Description=Protein of unknown function (DUF679)
MVATHLDAELQHNERRPLLTNRADGNNNMSPMQKAIGQTYQSTAHLAKLLPSGTVLSFQILAPTLAKQGHCSDMNRMMTGGLVVLCALSCCVLSFTDSFRDEEGKVRFGFATPRGLWVIDGGAPLDPLGAAGFRMRFLDFVHAIVSAMIFVAIALFDQHVVSCFYPTPSEDTKQLLTALPVGIGIIGSMLFVSFPTTRHSIGSTLSSQ

SEQ ID NO: 65546 - protein, 279 aa, Zea mays
  Coding DNA Sequence Number=SeqID_23767
  Gene Ontology: Mol. function=sequence-specific DNA binding; Cellular component=nucleus; Biological process=regulation of transcription, DNA-dependent
  Homolog annotation: Hit_ID=Q5QMQ5; Match level="QueryCoverage=83%, HitCoverage=81%, E-value=1e-62, Identity=56%"; Hit description =Homeobox transcription factor-like
  Pfam annotation: Domain name=Homeobox; Domain location=47-142; Score =31.0; E_value=2.9e-06; Accession=PF00046.19; Description=Homeobox domain
  Subcellular localization annotation: CTP_CleavageSite=30; ConfidenceScore=5.19e-01
MDAGRDGDGAGKAPPKGPADATTVPPAPVAASAPGSSAGTSGSGEKPVKRVMKTPYQLEVLEYTYAGLWNEDFDESIQMFFFVFFLPAGFFGCFYRLSISGWFAAVEHYPSEAKRLELSAKIGLSDRQLQMWFCHRRLKDRKPPSKRQRRDEESALAPVMPPPPVLPAPVMPVASSDLMVGAPGPYDKLLQPVHLRRGAGRSSAVPRISMPDLGRRYYEPPPVMITPLMQLTQYELRVINSVESQLGEPLREDGPALGINFDPLPPGAFGAPIGMHIEI

SEQ ID NO: 65547 - protein, 143 aa, Zea mays
  Coding DNA Sequence Number=SeqID_23768
  Gene Ontology: Mol. function=nucleic acid binding; Cellular component= nucleus; Biological process=ubiquitin cycle
  Homolog annotation: Hit_ID=Q6ASW7; Match level="QueryCoverage=97%, HitCoverage=20%, E-value=2e-32, Identity=49%"; Hit description =Putative zinc finger protein
  Pfam annotation: Domain name=PHD; Domain location=82-139; Score=23.3; E_value=0.00026; Accession=PF00628.19; Description=PHD-finger
MKNLSHFRIKELKDVLHQLGLSKQGKKAGPSGQSYGSVVEPARSRKMQDPTNTVAVSRSHELGDSVTCKKKPDDSAQAVKVRCPCGDSKPNDSMIKCIDPQCNIWQHVGCVVIPDTEKSADNISPELPSCFYCEVCRLSRADP

SEQ ID NO: 65548 - protein, 166 aa, Zea mays
  Coding DNA Sequence Number=SeqID_23769
MAYGKRKIETFANLNVELTTKIEQLKYSAPSSTIDESPIKQNEKLKAKLAISLDAYESLLHKLETLYIHNNELATKPESINNTPDAPTIEILDIKKCLSLEGHKSYQCKVNTEGDKKKKPTSKISNTYTNKVDKKATTPYLIKKNKNGKVIAIKVNKKANKGKGAK

SEQ ID NO: 65549 - protein, 942 aa, Zea mays
  Coding DNA Sequence Number=SeqID_23770
  Gene Ontology: Mol. function=nucleic acid binding
  Homolog annotation: Hit_ID=Q2RBQ6; Match level="QueryCoverage=93%, HitCoverage=79%, E-value=0.0, Identity=52%"; Hit description =Expressed protein
MVAAGVVGAPTGAPRGGAGGTWSLAMEQRKGAAAADVQRAVAADCRFQRKVEGTGMSRTRDTIYITYAKEEEAIRCIQAVHNFVLEGKVLRACFGTTKYCHAWLRNMTCGNPDCLYLHDVGSQEDSFTKDEIISAYTRTRVPQMASGVSQRRTGTVLPPPGDDFSYSAVVSAKHTFKNGTLNTTSQPRLSPPNSSSGRSTLPSAASWGQRDLNARTTATGATSSQSHTKPKSESQSNPFSSSSVFSCTKTPSSWNDDTSTAAKISEGQQLSEKESRTLQPYKPGISKETQALSSLESSLDIDFSTIPSAWNDDDIVVPDVMPKGSDENQVANKNGELTHPASKSLVLSKKDIKMNITSKTPSDFVSSPAISKSDVSTSDGDHSLTNITPKCLASNAVECQSSHTAVEKMLEDIGSKDTDMEKLSAQISSVTLGGNDEIQSMAGNQQPDVMPCTSVDVLMDQNFGRDLAHPNPDELLLPSENKDSIVSCQYSSDKRLDWSLEMQNCSVTPLNDRMDSALLTDKIHSRQLDGSEQSSYSSFVEFPSTVDTSLWNDTENNAALTIDNITSSQMQPGFSSTDNTYALLNGGQDGLGTVYTHDNVSVYTHGNVSGHPGMGSHHHRAMGSLRNNSIGSFDKTISVNKYERRIISDTLSEFNPWDDSYSTANNFARMLRESKNNDVHCIAPSWKSGTGIKESRFSFARQDNQGNLFDSSLRNCGTGTEQNFSLLPQNSRGNIYQNGLAFQSLENEFSNNNSPGVLDMATTENLLRGTVQGGNSNHYQSQFGRHSSDMEFDDPAILAMGKGLMPGIGDSGLEMKNTPAFQAQLQPASSDPRFQLHVQPNVQSRQNMRFTDPMQDGLNHMNDNYLASRFLAQNQGPLSPYVQIPQQPRNSQVINGHWDGWSDLRQGNNAPMSDMSRILYPSEVNKLHMLGSNDVHNRAFGM

SEQ ID NO: 65550 - protein, 76 aa, Zea mays
  Coding DNA Sequence Number=SeqID_23771
  Homolog annotation: Hit_ID=Q9FQ22; Match level="QueryCoverage=37%, HitCoverage=11%, E-value=5e-08, Identity=100%"; Hit description =Tonneau 1
MDDYAREMMELKTLVTRTLEKKGVLAKIRPKDFWKNELKDFSNKSGAEGSRSAESGPMLLDVLEEKIVYYYIELEQ

SEQ ID NO: 65551 - protein, 170 aa, Zea mays
  Coding DNA Sequence Number=SeqID_23772
MAGGKKGKKGRRPADGKRKRPLSPPSEDFGDSEYSEEVSSEYDPSLIPASPVASSDDSDDSMGLSTAERSYIWSVESTGLGGSDDSEEASSEEVEDSSDSKEGSASEGGGDDDKGDGGSSDVGDDSNRGGDGSGDGNGNGDGGKGSNRGGDGYDKGGGDDSNAGDRVPLA

SEQ ID NO: 65552 - protein, 187 aa, Zea mays
  Coding DNA Sequence Number=SeqID_23773
MVKNFGRKTMQIAMNAVVTSHLLVCLYSAADSGIFAIASVGIQPFAKAKVSGKCFAHVFSGSSTKLVEIISCCLPTLANPSNDVSPCYDNVGPMMSQAHTFKVLPEHVKEVPKFRYAIYMNELTEVASAVCDHISTRRASRLPFRHIRIDLPARGDLFQSSNTECTSHCSHFATSLSQPVLGEKPNT

SEQ ID NO: 65553 - protein, 56 aa, Zea mays
  Coding DNA Sequence Number=SeqID_23774
MGDSHILPERNYDSPELISGDCSSIVKDINVILRRLHPVPIEREMCPWAISKYFGD

SEQ ID NO: 65554 - protein, 136 aa, Zea mays
  Coding DNA Sequence Number=SeqID_23775
MVMHGSMYRPKNKGIGLLAVLIQYQPHVFMLSFAIINDSQKMPLCAHDQVHELLGIGITGRLSTFQIGDGDCAHSKSGTETVLDIATIGVDGGVERRIAKSGFRGGACGMWGSGVGGRVRSRLRITCWIQGVGWGR

SEQ ID NO: 65555 - protein, 181 aa, Zea mays
  Coding DNA Sequence Number=SeqID_23776
  Subcellular localization annotation: CTP_CleavageSite=60; ConfidenceScore=5.08e-01
MGVFKERLVFVVGDEQLALASINRLLASLVSSHIFRSSVSSSPTLLFSSYQPWAEAREVEASLVVSATNASAPQVLPRRTSVTRSTRRKSPPGPRGCRSMPPPASSDDSDDSQGLATEVWMYIRSVERAGLEGSDESEVSSDSSEEESDGSDGGDDGDGDRGGGDGGRGGGCGRTAQTILA

SEQ ID NO: 65556 - protein, 257 aa, Zea mays
  Coding DNA Sequence Number=SeqID_23777
MEANEEGIYNNDGKLSARGQSPPAIASARTHRGGRQDWSPAGASNQLRDHRPASLRGITPPPLAGCREPAGQAPATGTRTAAVEWGMSMTHGTDVWSRRARHDRDDLEEQTRTWGLSAESPGGADRTSGKQLRPVTTQRNGGHYNSNGHGDGYPARTAAAGAEAGRKATNDVRSGPVHAGAQEKAASYPYAGADGTLKQQQQQPAAAAEGHGARGAAPHSYGHYERAQPPPAHRDRGDAADSYYYPPAAATADHERV

SEQ ID NO: 65557 - protein, 34 aa, Zea mays
  Coding DNA Sequence Number=SeqID_23778
MYIGQVGLNRLRRIEILVVKQLDSAVRKGETKAS

SEQ ID NO: 65558 - protein, 665 aa, Zea mays
  Coding DNA Sequence Number=SeqID_23779
  Homolog annotation: Hit_ID=Q9ZU48; Match level="QueryCoverage=45%, HitCoverage=41%, E-value=5e-59, Identity=45%"; Hit description =Expressed protein
  Pfam annotation: Domain name=PB1; Domain location=69-164; Score=83.7; E_value=5.7e-22; Accession=PF00564.15; Description=PB1 domain
MEPLPSATAAGVGAPGPGPGYPESTESSPRSRGGDSWDEPFPSSAAAAAGGGGRLRLMCSFGGRIVPRPTDKSLCYLGGETRIVAVDRHASLADVHARLSRSLLGGRPFTLKYQLPNEDLDSLISVSTDEDLDNLVDEYDRIAATSSGSGSSRTSRIRLFLFPATPESSSSLGSLLDDSSKSENWFVDALNSAISGSLDGIPRGISTDSASVNCLLGLEDDSSVHSRSGVTNSAPAEDQRASQPKLPAGATAVAAAAGAGRHPHDVQSVPDSPMLDKNSSFGSTSSAPSLSNLPPIRVRPEDRPSDARIMQPTAVEDHFAQMGISEQQLPPYMQHQQQVPIPAMTGMSPSEASSRVFSDDDKSDHGGGGRKAQLLKQEVPAIVDPTNRAVYYNDRSPPADLKRDMPVGTEAASYRLPVSAPDAAAAAATQVPAGYVLAQMHAPQQHPPPQQHLPPQQPQQPAPQQQIVSAGNQHFIHNPATGTFIPIQSYYHHHPVPQQAPQTVPRQQQAPAFDPNTGMYYLPMQQNAHQPYSMPPGAQATLPPPPPTLVDTAPKPTVPIPQMAVRPELQQQPGVYRTTAAATPAPAPSAAPPGYAGMAYHHIIQSHHHPSPQPVSNMMAGNFGYEYADPTRPQVYYSQAAAAPPTLPPQYQPIVSPDAGQAEKH

SEQ ID NO: 65559 - protein, 57 aa, Zea mays
  Coding DNA Sequence Number=SeqID_23780
MARGDDADNLWDRARRPDRGWPGGSGLVGLVRVGAGCAMVAWRGAPLLVQLIYGEEQ

SEQ ID NO: 65560 - protein, 195 aa, Zea mays
  Coding DNA Sequence Number=SeqID_23781
  Gene Ontology: Mol. function=sugar porter activity; Cellular component=integral to membrane; Biological process=carbohydrate transport
  Homolog annotation: Hit_ID=Q6VEF2; Match level="QueryCoverage=87%, HitCoverage=31%, E-value=1e-57, Identity=71%"; Hit description =Monosaccharide transporter 4
MPAGGFSVSAPSGVEFEAKITPIVIISCIMAATGGLMFGYDVGISGGVTSMDDFLGKFFPAVLRKKLEDKESNYCKYDNQPLQLFTSSLYLAGLTATFFASYTTRRLGRRLTMLVAGVFFIVGVIFNGAAQNLAMLIVGRILLGCGVGFANQNLDGSQTSVDTWASVTVPSRLACTVFNFQASRFPTQGLAVYDC

SEQ ID NO: 65561 - protein, 321 aa, Zea mays
  Coding DNA Sequence Number=SeqID_23782
  Homolog annotation: Hit_ID=Q10PY9; Match level="QueryCoverage=98%, HitCoverage=98%, E-value=1e-81, Identity=51%"; Hit description =Expressed protein
MAPAGNGADDHELPLFHPSPCAHYYVQSPSAASHTLSHPASDSMALILSPFPNLHHDADARHSSDGRDHEHDHEEASRLTLSRYSSSRGSNSSFPVGDKKPGRRRHALSGRSSGRHDDGDDDADGEAQRSGAWRYVKLDPEAPCCCIAFQVAWRVAASAALALLVFVLATRPRHPRVSFRVGKVQRFALGEGLDGSGVETSFLNCNSSVDMAVENHSKGDGWSHDVGPRGTSTVRLFVAAQDKPMYAAGRGMQDLLESSHGLPLTVTVRARSRYRVVGSLVRLTYRHDSECVVLLRRTPDRSNGIRAAAGSRATTTCSALS

SEQ ID NO: 65562 - protein, 392 aa, Zea mays
  Coding DNA Sequence Number=SeqID_23783
  Gene Ontology: Mol. function=sugar porter activity; Cellular component=integral to membrane; Biological process=carbohydrate transport
  Homolog annotation: Hit_ID=Q6VEF2; Match level="QueryCoverage=92%, HitCoverage=70%, E-value=1e-179, Identity=87%"; Hit description =Monosaccharide transporter 4
  Pfam annotation: Domain name=MFS_1; Domain location=2-325; Score= -47.9; E_value=0.049; Accession=PF07690.6; Description=Major Facilitator Superfamily
  Pfam annotation: Domain name=Sugar_tr; Domain location=1-364; Score =291.9; E_value=1.2e-84; Accession=PF00083.14; Description=Sugar (and other) transporter
  Pfam module annotation: Pfam domain module=MFS_1::Sugar_tr; Domain location=2-325::1-364
MRAFQQSKPTYTTCTAQLCQSRRDWDSVHVAVPLFLSEIAPTRIRGGLNILFQLNVTIGILFANLVNYGTSKIHPWGWRLSLSLAGIPAALLTLGALFVTDTPNSLIERGRLDEGKAVLKRIRGTDNVEPEFNEIVEASRVAQEVKHPFRNLLQRRNRPQLVIAVLLQIFQQFTGINAIMFYAPVLFNTLGFKSDASLYSAVITGAVNVLSTLVSVYSVDRVGRRMLLLEAGVQMFLSQVAIAIVLGIKVTDHSDNLGHGWAIMVVVMVCTFVSSFAWSWGPLGWLIPSETFPLETRSAGQSVTVCVNLLFTFVIAQAFLSMLCHLKYAIFVFFSAWVLVMSLFVLFFLPETKNVPIEEMTERVWKQHWFWKRYMDDDNHHIVNGKLTGASV

SEQ ID NO: 65563 - protein, 219 aa, Zea mays
  Coding DNA Sequence Number=SeqID_23784
  Gene Ontology: Mol. function=ATP binding; Cellular component =membrane; Biological process=anion transport
  Homolog annotation: Hit_ID=Q6Z2T4; Match level="QueryCoverage=93%, HitCoverage=63%, E-value=3e-85, Identity=68%"; Hit description =Putative ATPase
  Pfam annotation: Domain name=ArsA_ATPase; Domain location=1-219; Score=25.7; E_value=3.8e-14; Accession=PF02374.6; Description=Anion -transporting ATPase
MRTVLMCDMFGVLVQINPEKAREEFRTLGELKLGELLDTPPPGLDEAIAISKVMQFLEAQEYSMFSRIVFDTAPTGHTLRLLSLPDFLDASIGKILKLRSKIASATSAIKSVFGQEANKLEQLRERMVKVMAISESSRLHSSLQKESVPVRRLIVNQVLPPSTSDCKFCSIKRKDQTRALDMIRTDPELKGLNIIQAPLVDMEIRGVPALNFLGDILWK

SEQ ID NO: 65564 - protein, 157 aa, Zea mays
  Coding DNA Sequence Number=SeqID_23785
MTLGPKAYKTGPFPLPLPPAHARGVAAIWAHSSAYLFAQAGYCVVGSAGQLLPRENRSVRETTGIDRNGAGSTARENLARIPIPQPFSSGVRSAVGSAFNHRDRLQRSLPWPPGSGLTVVSRAVDGERFSGKEMVALCFDSAGRTERERSTASAQDL

SEQ ID NO: 65565 - protein, 87 aa, Zea mays
  Coding DNA Sequence Number=SeqID_23786
  Subcellular localization annotation: CTP_CleavageSite=50; ConfidenceScore=5.06e-01
MLELLVLPPALDLLLHSCLIVSVSSLLIMLALQPLLPGGTDVASASRGVRSASRAGPRAPPAVVVPHPQRLARGAASSSSSPTVLQV

SEQ ID NO: 65566 - protein, 445 aa, Zea mays
  Coding DNA Sequence Number=SeqID_23787
  Gene Ontology: Mol. function=DNA topoisomerase (ATP-hydrolyzing) activity; Cellular component=mitochondrion; Biological process=DNA unwinding during replication
  Homolog annotation: Hit_ID=Q7XZF7; Match level="QueryCoverage=78%, HitCoverage=35%, E-value=6e-63, Identity=65%"; Hit description =Probable DNA gyrase subunit A, chloroplast/mitochondrial precursor
  Pfam annotation: Domain name=DNA_topoisoIV; Domain location=122-445; Score=77.9; E_value=1.3e-23; Accession=PF00521.10; Description=DNA gyrasetopoisomerase IV, subunit A
  Subcellular localization annotation: CTP_CleavageSite=75; ConfidenceScore=5.63e-01
MALSAALRLPLPLPRLLGPSAVIFGAASRRRAAAAAANAAALRLLSASSPSPASFSSRPTRPLRSRRRNRGDDGRAAAAGGAGGGEGGGAGLVVKERILPVELHKEATEAYMSYAMSVLLGRALPDVRDGLKPVHRRILYAMHEMGLASRRPFRKCARVVGEPFMLLLLPRVITLGCCQVLYAPEHHRAFFVPRLPPPRACLGRHSASFVTELCVLERMLALGHRHTRAPPPGEATAILIDYSLCIFHIQQRNKSMAHEPCDFSMRYPLVQGHGNFGSVDADPPAAMRYTECRLDSLAEAMFLTDLELNTVDFVPNFDNSQKEPSLLPSRVPSLLLNGSSGIAVGMATNIPPHNLGELVDVLSVIIENREATIPYQTNKATLVQKIAELVEDKVLEGISDIRDESDRTGMRVVIELKRSADPAVVLNNLYRHTALQSSFSCNMVA

SEQ ID NO: 65567 - protein, 490 aa, Zea mays
  Coding DNA Sequence Number=SeqID_23788
  Gene Ontology: Mol. function=DNA binding; Cellular component=nucleus; Biological process=regulation of transcription
  Homolog annotation: Hit_ID=Q75HE5; Match level="QueryCoverage=57%, HitCoverage=93%, E-value=1e-115, Identity=71%"; Hit description =Putative NAC-domain protein
  Pfam annotation: Domain name=NAM; Domain location=207-338; Score =292.8; E_value=6.5e-85; Accession=PF02365.6; Description=No apical meristem (NAM) protein
MGVAVSDGNACDATHTLTRPATCLATRAAARDACLPCRPTSLFFFLPYGHSCRRMGPESADVARDATRGPVQSRVAEVAVHEPVAPPRALSLPNPHPPPLSRGIALPPARRYISFLCPRFSASMTAQNPPTGQDTQSRATPPTIGDQQPAAGASCLKTPSRSRTEDWQAQPKPPLLVLGFIASNPDHIMGQPVTRRRERDAEAELDLPPGFRFHPTDDELVEHYLCRKAAGQRLPVPIIAEVDLYRFDPWDLPERALFGAREWYFFTPRDRKYPNGSRPNRAAGDGYWKATGADKPVAPRAAAADARTLGIKKALVFYAGKAPRGVKTDWIMHEYRLADAGRRAKKGSLRLDDWVLCRLYNKKNEWEKMRLGKGAAAGAVKEEEAMDMSTSHSQITHSWGETRTPESEIVDNDLPFPDPAMMVPKKERVDDGGSARTSDLFVDLSYDDIQGMYSGLDMLPPAGEDLYSSLFASPRVRGNQPTGPAGLGPF

SEQ ID NO: 65568 - protein, 172 aa, Zea mays
  Coding DNA Sequence Number=SeqID_23789
MTLGPKAYKTGPFPLPLPPAHARGVAAIWAHSSAYLFAQAGYCVVGSAGQLLPRENRSVRETTGIDRNGAGSTARENLARIPIPQPFSSGVRSAVGSAFNHRDRLQRSLPWLPGSGLTVVSRAVDGERFSGKEMVALCFDSAGRTERERSTASAQDLGAPVLTKGRRWVPGR

SEQ ID NO: 65569 - protein, 228 aa, Zea mays
  Coding DNA Sequence Number=SeqID_23790
  Gene Ontology: Mol. function=nucleic acid binding; Cellular component= intracellular
  Homolog annotation: Hit_ID=Q10NP6; Match level="QueryCoverage=46%, HitCoverage=33%, E-value=4e-51, Identity=85%"; Hit description =Splicing factor 3A subunit 2, putative, expressed
MDALGHRFEAASPHLRKKVKIGRPGYKVTKQYDPETKQHSFLFEIGYPEIEDNCKPRHRFMSSYEQKVQSWDKRYQYLLFAADPYEIIAFKIPSTEIDKSASKFFSYWDPDKKEYLLQLYFKPRPPEGSKPPPGPPGTLPNGTGAPGAPPRPPGQAPPPPPPQIPPPPPAPMGMPPRIPPPPIGAVQPPPPPARVANGLRPMIPPPPNFTPGAPPPRPPMQGFPGQQQ

SEQ ID NO: 65570 - protein, 633 aa, Zea mays
  Coding DNA Sequence Number=SeqID_23791
  Gene Ontology: Mol. function=DNA binding; Cellular component=nucleus; Biological process=regulation of transcription
  Homolog annotation: Hit_ID=Q7EZD3; Match level="QueryCoverage=94%, HitCoverage=92%, E-value=0.0, Identity=54%"; Hit description=NAC2 protein-like
  Pfam annotation: Domain name=NAM; Domain location=1-86; Score=119.9; E_value=7.1e-33; Accession=PF02365.6; Description=No apical meristem (NAM) protein
KSLIRSDDPEWFFFAPKDRKYPNGSRSNRATEAGYWKATGKDRIIKSKGDKRKQHTIGMKKTLVFHRGRAPKGERTGWIMHEYRTTEPEFESGEQGGYVLYRLFRKQEEKTERSSPEEVDRSGYSPTPSRSSPDNLEANEEANTPLNKESPESALHESPIELPKSVETNGGSMTRWLADRNDNLMVTAPDVSHIPFHGHAAGVAKVDPSVGASGHLVNPHNGNDDYNKFVSDFTPILPLENAFFTDIQQGAFGFDGIMNPLDPLDAFLNQTLVDPDEHSSTTSKVQYDSDIPTEFENHWNMKVEPQDDQCWWANIGFEPDEPNPLLPCDTTDQDILSVDSGADSFNELFNSMEETGIIVRPQQLDSTVQPNHVFASQGNAARRLRLQVESREIITKDESEDEVSCVLTPDCLNDSVEESTAEKDVASDGDEAESTGIVIRSHHPAPRSSSESSFTQQGTAMQRLRLQSGLNKGQRPSTDDSSSCIIDEPGSQHKAEKAEIEEDASTNLAGSADDLPGNIHDDEQKNIPEHGAEMTSPEAKSVLRLRKTSEEGNKDVKQESCLEPHVRAPMQKGGFQSYIIWLVLPVALLLLLCVGTYGWNFRFLNPVTDGLLICWRVRIRLDMPQHGLRGYKD

SEQ ID NO: 65571 - protein, 211 aa, Zea mays
  Coding DNA Sequence Number=SeqID_23792
  Gene Ontology: Mol. function=caffeate O-methyltransferase activity; Biological process=lignin biosynthetic process
  Homolog annotation: Hit_ID=Q06509; Match level="QueryCoverage=98%, HitCoverage=61%, E-value=1e-102, Identity=83%"; Hit description =Caffeic acid 3-O-methyltransferase
  Pfam annotation: Domain name=Methyltransf_2; Domain location=1-188; Score=249.6; E_value=6.4e-72; Accession=PF00891.8; Description=O -methyltransferase
MAYYLKDAVLDGGIPFNKAYGMTAFEYHGTDSRFNRVFNEGMKNHSVIITKKLLDFYTGFEGVSTLVDVGGGVGATLHAITSRHPHISGVNFDLPHVISEAPPVPGVRHVGGDMFASVPAGDAILMKWILHDWSDAQLRHAAQELLRRAAGKWQGHRRRGVFHVDMIMLAHNPGGKERYEREFRELAKGAGFSGFKATYIYANAWAIEFIK

SEQ ID NO: 65572 - protein, 237 aa, Zea mays
  Coding DNA Sequence Number=SeqID_23793
MAPFLHVVGGGGIHNNGRHACWWAVVGLNETTIKKLILVFKPNGPDSLSAASLKSWEVGATSSSRGLVKRRVRRKRELSIRQKSTGKTMIPAPDLKYGANETACRCRGAVDPWLHNCEQHTIRRHCLAYIGEEEKHAHDNADDDGGLRQRAQGGRKLGADLAHADEHLALRPQHVIDADLDIHHGSSGDRIYRRRRGTRQWRRRRQQWALATRAGWPRARQRPCPTRAHNAYSVHNT

SEQ ID NO: 65573 - protein, 108 aa, Zea mays
  Coding DNA Sequence Number=SeqID_23794
MGDKTGVLSGSPRKIQGPLTGGWPRGEGRDGARISLSLPPAWTLVTPYCKRTRPERGTNTKAVGFPFYVCLPPAFPPFALRLVGPGTPRGRNADNIRPIHPPLGDFQA

SEQ ID NO: 65574 - protein, 273 aa, Zea mays
  Coding DNA Sequence Number=SeqID_23795
  Homolog annotation: Hit_ID=Q6QP51; Match level="QueryCoverage=20%, HitCoverage=25%, E-value=6e-11, Identity=64%"; Hit description =Putative growth-regulating factor 1
MTASKKVCHVIQFRILFLFLFLSLTTGTGKGDTPKGILLREGNGPRAPLLIRGSKAGPSEGFNSRLRALGLRAHYWSEVRRPAPRKGSTASSGHSGSVPTTDQGFVGWPSKGFDSRLRRRARYDPGYVRYITKARATLLRARTRPRPRKTTNSASPDPRARPRPQKTTNSASPDPRARTRPQPRKTTNSASPDPRAQTRPRPRKTTNSASPDPRARTWPRPRKTTNSASPDPRARTRPQPRKTDSTSTSEDRLDLDLGGASASPNLGLGPTTP

SEQ ID NO: 65575 - protein, 682 aa, Zea mays
  Coding DNA Sequence Number=SeqID_23796
  Gene Ontology: Mol. function=RNA-directed DNA polymerase activity; Cellular component=nucleus; Biological process=RNA-dependent DNA replication
  Homolog annotation: Hit_ID=Q8S472; Match level="QueryCoverage=99%, HitCoverage=63%, E-value=0.0, Identity=79%"; Hit description =Putative gypsy-type retrotransposon RIRE2
  Pfam annotation: Domain name=Retrotrans_gag; Domain location=170-261; Score=68.0; E_value=3e-17; Accession=PF03732.7; Description =Retrotransposon gag protein
MPEPSTTEGRRIQGELKNLLEDAAIRRAVSSASRRQGYPSEHRASTSRFMWEASVHTGRTRNTAPAAPGRLGNEQHHRNRRAHLDEKVRRGYHPRRGGRYDNGEDRSPSPEPPGPHTFSQAIRRAPFPTRFRTPTTIAKYSGETRPELWLVDYRLACNLGGTDDDNLIIRNLPLFLSDTARAWLEHLPPGQISNWDDLVQAFIGNFQGTYVHPGNSWDLLSCCQQPGESLRDYIRRFSKQRTELPNVPDSDVIGAFLAGTTCRDLVSKLGRKTPTRASEVMDIATKFASSPEAVEAIFRKDKQPQGHQPEDVPEASTQRGTKKKGKKKSQAKHDATDADLVAAAEYKNPRKPPRGANLFDKMLKEPCPYHQGPVKHTLEECAMLRRHFHKVGPPAEGGRAHDDDKKEDRKAGEFPEVHDCFMIYGGQVANASARHRKQEHRVVCSVKVAAPVYLDWSDKPITFDQGDHPDRVPSPGKYPLIVDPIVGNVRLTKVLMDGGSNLNIIYAETLGLLRIDLSSVRAGAVPFHGIIPGKRVQPLGQLDLPVCFGTPSNFRRETLTFEVVGFRGTYHAVLGRPCYAKFMVVPNYTYLKLKMPGPNGVITVGPTYRHAYECDVECVEYAEALAESEALITDLESLSKEAQDVKRHASNFEPAETVKSIPLNPSNDTSKQIRIGSELDPK

SEQ ID NO: 65576 - protein, 100 aa, Zea mays
  Coding DNA Sequence Number=SeqID_23797
  Subcellular localization annotation: CTP_CleavageSite=28; ConfidenceScore=5.17e-01
MAIFSQTTSDDVVGTCAITKRHDTTLLRASAPFPCSPANVVVPSGDQCYSNRIRVQSEDCATFVIPKKPTYSMFWHTTLTLRKTSFISINFNLIYRLFVL

SEQ ID NO: 65577 - protein, 33 aa, Zea mays
  Coding DNA Sequence Number=SeqID_23798
MAHGGSGPTEVLRRAISPPPEDILAWKDHEDVR

SEQ ID NO: 65578 - protein, 107 aa, Zea mays
  Coding DNA Sequence Number=SeqID_23799
MNEGLKPKVRKNTFPSLEWRKSMKNGTSACSMSEEKKMTEEKKMNEEKKLYEEKKVVDSFIAGFYESMAKTNTEKITKEIMEDLSEDSDDSDDYDVESGDEDYEDRP

SEQ ID NO: 65579 - protein, 128 aa, Zea mays
  Coding DNA Sequence Number=SeqID_23800
MAATGAYLTLAAAKGMRAAPGEEEQELGRLGTGVWWALAAAHVLAGWGRGLVDGPSWSGGLGRGRSLGRAGRGGKVLGRGGGWADVGRQGKDECPSGQGVTLHKIVTAIGGGVSVAKAQRLWKAVVGP

SEQ ID NO: 65580 - protein, 96 aa, Zea mays
  Coding DNA Sequence Number=SeqID_23801
MDGDGACNQHEATALCTEELDRVLFQRGVPIGVGNTSAAVVRGDIAATGRLHCGAWPGRRRYGPRSRHIKAYPHIKDCIGGLDGTHIRVCLPPDDQ

SEQ ID NO: 65581 - protein, 167 aa, Zea mays
  Coding DNA Sequence Number=SeqID_23802
APAKEGMPPAGRIPGVIVLALGVGALGFPDAMRLVAGRPRNPLLDIAACAVAMVVATAYALGTMLLARFVRSGGGDAPPADAFARLTFVVSLAAALLVSACLLFLPAPAPGAGGLPCHTVDAIAGESDVVVSALVAVGAVAAVVPFARRMLRLRTAPASTSSPTSSS

SEQ ID NO: 65582 - protein, 166 aa, Zea mays
  Coding DNA Sequence Number=SeqID_23803
  Gene Ontology: Mol. function=kinase activity
  Homolog annotation: Hit_ID=Q6QP54; Match level="QueryCoverage=54%, HitCoverage=29%, E-value=2e-11, Identity=68%"; Hit description =Putative kinase
  Subcellular localization annotation: CTP_CleavageSite=57; ConfidenceScore=5.74e-01
MNSASPDPRARTQPRPRKTVSASPDPRARAQPRRWTTNSASPDPRARTQPRPRKTVSASPDPGLGLDLDLGRRTPPRPTPGVGLSLDLGGAPASPDLGLGPTMSQGGIITLPLASSGYGEQDRRPIWLAPVSVRSKRIVVDIWTSHVNLCISFLSFSHIRSWDSNS

SEQ ID NO: 65583 - protein, 236 aa, Zea mays
  Coding DNA Sequence Number=SeqID_23804
MAGTGPIPGVIVLALGAGALGFPDALRQLLDAVAGRPRSPLLDIAACVLAMAVATAYALGTMLLARFVRKAPGGLGAAAGVGGDAPRADLFALLTLVVSLGAALLVSACLFLTAPGAGGLLYRTVDVLAGKSGVVSALVAVAARRRHPLRQACALRRPLLRPGSWASRSWGCLSSPPSSSFPRLGGGLYKHRVSVSVGVMVMALARRFGKLARAASLAIVIVSFALIGLLTTACAK

SEQ ID NO: 65584 - protein, 407 aa, Zea mays
  Coding DNA Sequence Number=SeqID_23805
  Gene Ontology: Mol. function=oxidoreductase activity; Cellular component=integral to membrane; Biological process=electron transport
  Homolog annotation: Hit_ID=Q69P73; Match level="QueryCoverage=99%, HitCoverage=77%, E-value=0.0, Identity=83%"; Hit description =Putative elicitor-inducible cytochrome P450
  Pfam annotation: Domain name=p450; Domain location=35-407; Score =127.3; E_value=4.4e-35; Accession=PF00067.12; Description=Cytochrome P450
MELPPWASFLGIVLATVMLLKALTGRRSRRMYNLPPGPKPWPIIGNLDLVGALPHRSIHELSRKYGPLMQLRFGSFPVVVGSSVDMAKFFLKTHDVVFTDRPKTAAGKYTTYNYRDITWSPYGAYWRQARKMCLTELFSAKRLESYEYIRADEVRALLRDLHAASSSGRAVMLKDYLSTVSLNVITRMVLGKKYLDKEEAAAAGGSVTTPEEFKWMLDELFLLNGVLNIGDSIPWLDWMDLQGYIKRMKKLSKMFDRFLEHVVEEHNQRRLREGKGFVAKDMVDVLLQIADDPTLEVELDRESVKAFTQDLIAGGTESSAVTVEWAISELLKKPEVIAKATEELDRVIGRGRWVTEKDMPSLPYVDAIVKETMRLHPVAPLLVPRLAREDTTVAGYDIPAGTRVLVS

SEQ ID NO: 65585 - protein, 523 aa, Zea mays
  Coding DNA Sequence Number=SeqID_23806
  Gene Ontology: Mol. function=receptor activity; Cellular component =integral to membrane
  Homolog annotation: Hit_ID=Q69P89; Match level="QueryCoverage=96%, HitCoverage=94%, E-value=0.0, Identity=71%"; Hit description =Membrane protein PTM1-like
  Pfam annotation: Domain name=Lung_7-TM_R; Domain location=203-463; Score=374.2; E_value=2e-109; Accession=PF06814.3; Description=Lung seven transmembrane receptor
MAGRFLLVVAVALLLRPGDASVHEYRGLSFANKGNAFILHAGSEGLYAASHANTTAEDAAAVAEALIRAKGWLRYSYSGVDAGSRVDLGSYRAGYSAARHLDGFDKITFRRSEDTNNSVKETSSAKVQVLIFEIEDREMIGGSAYGGQKAICCTSDLAKLGACTEGSVIYRPSQVNPGWPKLFVASFDGSDLIATLPSRTIPITKTGIYNMYFIHCDPSLASLEIEGKTIWKNPTGYLPGRMAPLKNFFGLMSFAFVVLGIYWFYQYMKSWREVLPLQNCITLVITLGMFEMALWYFEYAEFNETGVRPKGITFWAVTFGTVKRTAAEVIVLIVSMGYGVVTPTLGGLTSKVVMLGGTFFLATEILELVENLGAVNDLSGKARLFLVYPVAILDAAFVIWIFISLAKTIGKLQARRLMAKLDIYRKFATALIISVLVSVGWIGYEKSLISLQFLSCRFTPNQQIFSYDASEFFDRKDNISLIRPAPSASKNGWNLSSTPEPKATKDVNTVADFEGDDEENKRE

SEQ ID NO: 65586 - protein, 57 aa, Zea mays
  Coding DNA Sequence Number=SeqID_23807
MAGEMSWVGKKIHLYNVTMGLYMLDWWERVDILVLILLWFVCFNGSRFASDVFERFC

SEQ ID NO: 65587 - protein, 492 aa, Zea mays
  Coding DNA Sequence Number=SeqID_23808
  Gene Ontology: Mol. function=RNA-directed DNA polymerase activity; Cellular component=mitochondrion; Biological process=RNA-dependent DNA replication
  Homolog annotation: Hit_ID=UPI00004C1731; Match level="QueryCoverage =99%, HitCoverage=36%, E-value=0.0, Identity=75%"; Hit description =UPI00004C1731 related cluster
  Pfam annotation: Domain name=RnaseH; Domain location=237-364; Score= -3.7; E_value=0.00013; Accession=PF00075.14; Description=RNase H
MLLGFIVSERGIEVNLEKIATITNMGPIKDLKGVQRVMGCLAALSRFISRLGERSLPLYHLLRKTERFTWTPEAEEALRNLKALLTSAPILVPPAAGEALLIYVAATTQVVSAANVVERREEGHALLIQRSVYFISEVLSETKIRYPQIQKLLYAVILTRRKLRHYFESHPVTMVSSFPLGEIIQCREASGRIAKWAVEIMGDTISFAPRKAIKSQVLADFVAEWVDTQLPAAPIQPELWTMFFDGSLMKTGAGAGLLFISPLGKHLRYVLRLHFPALNNVAEYEALVNGLRIAIELGVRRLDARGDSQLIIDQVMKNSHCRDPKMEAYCNEVRRLEDKFYGLELNHVARRYNETADELAKIASGRTTVPPDVFSRDLHQPSIKTDDTPEPEEASAQPEAPSAPEGEALRVEEERNGKAPGGYTHLLVTIDKFSKWIEVRPLNSIRSEQAVAFFTNIIHRFGVPNSIIIDNGTQFTGRKFLDFCEDHHIRVD

SEQ ID NO: 65588 - protein, 121 aa, Zea mays
  Coding DNA Sequence Number=SeqID_23809
  Subcellular localization annotation: CTP_CleavageSite=51; ConfidenceScore=5.31e-01
MPRLSPSPSLTPPLPCPLRFGLVVPQRSARARGPHRGYALAAGAWKALFCSAENARRCGSDDYAEAEEGWKGGGSRVPSERRIRGGNAATARGRQGRGVAADVVIGEVDGGDAVDAGVALV

SEQ ID NO: 65589 - protein, 165 aa, Zea mays
  Coding DNA Sequence Number=SeqID_23810
  Subcellular localization annotation: CTP_CleavageSite=47; ConfidenceScore=5.07e-01
MDGASVGETSFRDTKSEAGVDVGGGDSPPSPATRRSRRHRSRGSGTSSMDATGGEGEEKTKEKSKKGTRKNRKKQDKSAGDDASGTCQDLPAVPKKSNRRKNKGSSEGSGSAAAKDTTAAAPEEVREEVKEKFLSHFTVDRCEKIIKQGKIKVESIIRSLHDNDD

SEQ ID NO: 65590 - protein, 45 aa, Zea mays
  Coding DNA Sequence Number=SeqID_23811
MEQRDKPRGNLLHNDRLHLAMNMKLAPDRTNKFMEIISVVQAHQR

SEQ ID NO: 65591 - protein, 162 aa, Zea mays
  Coding DNA Sequence Number=SeqID_23812
MAPARRNRSVDRPTSHGTPPNSLSMISQSSLAQPQGSEGQRRRVAQQWHPDPWRYPGADKGRRLGTGSLDRDGSGIRGVSLGEWTSVQEQSARSQAEESAFCCGVQNRGNMKCPAGRRIEEASVDLSPHGGETPSDTSTHEKVRLAIRAHMSSTKHDWARRR

SEQ ID NO: 65592 - protein, 56 aa, Zea mays
  Coding DNA Sequence Number=SeqID_23813
  Subcellular localization annotation: CTP_CleavageSite=36; ConfidenceScore=5.13e-01
MVAVSLGSPSQTAISVPGGPGEMSVSEGFFSPHIPRVSRVLNAQIRFNFVVDLSSH

SEQ ID NO: 65593 - protein, 106 aa, Zea mays
  Coding DNA Sequence Number=SeqID_23814
MGRRKRWGWPSELRRPRRGKPGSMGGTHAPGRRGGKALHLGASAESWVSSGGMEQRMEMAPWLLLFTGDDSVRFGGFGWLMLVGWCQALAKSLVSNDWLRRDVAIH

SEQ ID NO: 65594 - protein, 106 aa, Zea mays
  Coding DNA Sequence Number=SeqID_23815
MYREVGGQGADEASEVRTVQPGHCAGVDDGVRSGQGKGAAKRSSSGRCGRGRRRAREWGERSAPLTAGDPRAMIQAITTIRALWRGDNHGSPKIGLSPSSIVGMAL

SEQ ID NO: 65595 - protein, 89 aa, Zea mays
  Coding DNA Sequence Number=SeqID_23816
MATAPAGATTTSGETSGPARFPRRCGKHSRDWGIALFKVDWINLRFGSPGRVHLYAGSGRCRSTAGAAAVWTGERWGLQTVGSYTDGVD

SEQ ID NO: 65596 - protein, 129 aa, Zea mays
  Coding DNA Sequence Number=SeqID_23817
MNTGVPDDLARFSLIEWVKEHQKNLRTLKREIREHERTWNELAMARSLCAVFRTDLGKIPNWVSLVSNWRHEWVDWMLEYLTKLRVCSIYRALERWLVNLSSRGGGRRGRGALAQAIGGIYRGKLTDDH

SEQ ID NO: 65597 - protein, 135 aa, Zea mays
  Coding DNA Sequence Number=SeqID_23818
MGLEVRERRRGRSRQVGATPASNPGCGDGESGAPRLAPTPVRGEGCLGPRHGHEVGLNRPDTVRVRWIVRQSSSECEFATAGQNQDNQSTRKGSSPRDGTRGGLAWHLELRVDGTAGALLRQARVVAAERERDRE

SEQ ID NO: 65598 - protein, 80 aa, Zea mays
  Coding DNA Sequence Number=SeqID_23819
MPKLPCAQLWLCSILRSPCVSSYSDFDSKAELSPPPEPYDPEANLALKAALETIRIAEETIDEAVNKFLNEAAEKILKED

SEQ ID NO: 65599 - protein, 113 aa, Zea mays
  Coding DNA Sequence Number=SeqID_23820
  Gene Ontology: Mol. function=catalytic activity; Biological process =metabolic process
  Homolog annotation: Hit_ID=Q6L479; Match level="QueryCoverage=91%, HitCoverage=11%, E-value=6e-36, Identity=73%"; Hit description =Putative phospholipase D
MALDGLCVWLVALWILWMIQRTKTSGWPLLRYQFRQSFAHRKEKIGHTTIDLGVALENLETQQEGDLACAKPMERLQDVRGHIVCFPLEFMCQEDLRPFFSESEYYTSPQVFH

SEQ ID NO: 65600 - protein, 113 aa, Zea mays
  Coding DNA Sequence Number=SeqID_23821
MSEKKRKEMEDKKRKIGGPQPGSNNRLCFSGINWLDKYQAVINYDKRTVKLVSGEEVVTELVSPKPKKGGCHQMANDSKEADPLEAIQVVSEFSDVFPKDLPGSHLSEKLSLP

SEQ ID NO: 65601 - protein, 303 aa, Zea mays
  Coding DNA Sequence Number=SeqID_23822
  Gene Ontology: Mol. function=catalytic activity; Cellular component =endoplasmic reticulum; Biological process=metabolic process
  Homolog annotation: Hit_ID=Q6L479; Match level="QueryCoverage=61%, HitCoverage=17%, E-value=1e-93, Identity=89%"; Hit description =Putative phospholipase D
  Pfam annotation: Domain name=PLDc; Domain location=261-288; Score =41.4; E_value=3e-09; Accession=PF00614.12; Description=Phospholipase D. Active site motif
MSKINKSWALAAGLAEGGGGAVEVRGHRSVEGGGGAAQWPMARRSGLWVEGGGSRDLYQYTSLLVKHLVQPEDMVEQLGLRLSPGRGRSHMGFDAAVYGWGRGSGVFLTCVVRSVGPWSAGTAQIEGSIHNAYFSLIEKAEHFVYIENQFFISGLSGDDTIKNRVLEALYRRILRAEKEKRRFRVIIVIPLLPGFQGGIDDGGAASVRAIMHWQYRTICRGPNSILKNLYDVVGSKADDYISFYGLRAHGRSDDGGPLVTNQIYVHSKLMIIDDRMALIGSANINDRSLLGSRDSELIQGSKN

SEQ ID NO: 65602 - protein, 313 aa, Zea mays
  Coding DNA Sequence Number=SeqID_23823
  Gene Ontology: Mol. function=catalytic activity; Biological process =metabolic process
  Homolog annotation: Hit_ID=Q6L479; Match level="QueryCoverage=90%, HitCoverage=28%, E-value=1e-111, Identity=67%"; Hit description =Putative phospholipase D
  Pfam annotation: Domain name=PX; Domain location=48-207; Score=8.3; E_ value=0.014; Accession=PF00787.14; Description=PX domain
MTGEEEQEHGGHRYVRMPPEPPEPEGLAAASSASFRLPESVRVFDELPRARIVQVSRPDAGDITPMLLSYTIEVHYKQFRWLLYKKASQVLYLHFALKRRAFLEEFHEKQEQVKEWLQNLGIGEHVPVVHDDDEADDVHVPSQHDENSVKNRNVPSSAVLPVIRPALGRQQSISDRAKAAMQEYLNHFLGNLDIVNSREVCKFLEVSLLSFLPEYGPKLKEDYVTARHLPKIEMDSKERYCSSCCFSFCSSSWQKVWAVLKPGFLALLQDPFDPKLLDIIIFDVSPCTDRDGDDQTTLAKEIKERNPLHFGFE

SEQ ID NO: 65603 - protein, 133 aa, Zea mays
  Coding DNA Sequence Number=SeqID_23824
MGPPGSDRRSRSQWWERHLEASGLSQQQNGQSQRRSKLKIVGVNCKLHNLGETKQHDQRVPHVPGQRSLGGIGLSGVSWDQRLATVGFAKQGRESHTVHYAVVHRTIRCVHGQKTIKAFLMKEQQLLWPLGAI

SEQ ID NO: 65604 - protein, 271 aa, Zea mays
  Coding DNA Sequence Number=SeqID_23825
  Gene Ontology: Mol. function=galactosyltransferase activity; Cellular component=membrane; Biological process=protein amino acid glycosylation
  Homolog annotation: Hit_ID=Q5GAS2; Match level="QueryCoverage=83%, HitCoverage=67%, E-value=2e-45, Identity=47%"; Hit description=Hypro1
  Pfam annotation: Domain name=Galactosyl_T; Domain location=34-218; Score=-47.2; E_value=0.0018; Accession=PF01762.12; Description =Galactosyltransferase
MLSACGPAAAEPAAVRKPEFRLLIGVLTRADLYERRHLLRMVYGLQLASPGGLAAHVDVRFVFCRLYKDDQRVLVPLEILAHGDVIVLDGCEENLNGGKTYTFLSAVAALYADEPYDYVMKADDDIFLRLPQLVGSLGGMPREDMYYGATIPCDSMDPFREYMAGMAYALSWDLVQWIATSDVARNHSVGTEDMLTGLWLRIGGKGKNRFNAKPGHPRLPQPGARGPVRARVHAHHHRRAQAQEQPEGGQRRSSNSTSRQGSSRPKFYKID

SEQ ID NO: 65605 - protein, 77 aa, Zea mays
  Coding DNA Sequence Number=SeqID_23826
MARKSGSDLPTTAMQQQVRATLLVSGAMAGRGQGVERWGRETATKAWDYGKETGRGIGSSGPIPASNRPTKRALGMN

SEQ ID NO: 65606 - protein, 133 aa, Zea mays
  Coding DNA Sequence Number=SeqID_23827
  Subcellular localization annotation: CTP_CleavageSite=9; ConfidenceScore=5.15e-01
MTPEPSSPRAAPPQHQRRPSPTIPPSTAPEPHPPHARCLRTANGAPSPRHHVPFPTPPCLRGIILACADGLDYGVNRCNLLGGRHQLHCLVLLNKYFLRHVHHALKTVHYVVLIYIEGIEPDAALEPVVDCFR

SEQ ID NO: 65607 - protein, 202 aa, Zea mays
  Coding DNA Sequence Number=SeqID_23828
  Subcellular localization annotation: CTP_CleavageSite=67; ConfidenceScore=5.15e-01
RRRPTPSYPLVGGAFHHPGPRGGSRPPAHPRGVPAPPGAAAIPPAPHPAPRGPLPAPRRGGAPAPPRSAPRPCPSPAALGRLALGAAARLPSPSLPGGDPARPLPAPRRGGAPPRLAPSARPLGPSPRRRPGSPSARPLGPGRFNRPPGRFNRPGPSSPARFPVPASPDRGYEIDGFGYDYGAGEDEAVEGDFQEFQDYDEF

SEQ ID NO: 65608 - protein, 152 aa, Zea mays
  Coding DNA Sequence Number=SeqID_23829
  Subcellular localization annotation: CTP_CleavageSite=62; ConfidenceScore=5.40e-01
MAQVSRCTIIRFLVHTASTSPSEAPRAIQSNSTIVNRPSLSPPPTSSAPARGQNDSDLHWPPSDYRRVRLNLLNLTNPLDRALLPPGRDVVEPTPTKALKTKDENCNLMDGEYILIQEQETQQEEAREPAPKPVAEEPSATPAFEGKPRFYA

SEQ ID NO: 65609 - protein, 153 aa, Zea mays
  Coding DNA Sequence Number=SeqID_23830
MDQKGWSAVVGFGWLLAGGGALCFQAVFRWPSAGKSEGVTVRMSEGPTTYLGIDTGKARGWTDRARARGLGELWPADHGRTRGGIASAPVLAARNLFTSPQATYFLWWSRDLVYWIRRYWVLKWGLSHSPNLRQIPGVVLSKLQISLPSPDMW

SEQ ID NO: 65610 - protein, 120 aa, Zea mays
  Coding DNA Sequence Number=SeqID_23831
MELTLDAQGSRRCLDVDKRVEQCRAVIGVLHVLAWFVLVLQMQHLRANDIKNHLAKASALGGKFYSEVWMKGDREIANEAIKKNEKESHDAQEEAKRAEEAAERARLIGTVGDLLSNAMS

SEQ ID NO: 65611 - protein, 90 aa, Zea mays
  Coding DNA Sequence Number=SeqID_23832
MAPKPLGFYTKNVVYHLRHPLEKVDTETWTFDRFWHQFCRGVGNCNLPDGEYILVPEQGAAQEVAPDPAPEPAPEDLPATALEGKPRFYA

SEQ ID NO: 65612 - protein, 225 aa, Zea mays
  Coding DNA Sequence Number=SeqID_23833
  Gene Ontology: Mol. function=protein dimerization activity; Cellular component=nucleus; Biological process=regulation of transcription, DNA-dependent
  Homolog annotation: Hit_ID=Q8W5R9; Match level="QueryCoverage=61%, HitCoverage=41%, E-value=2e-43, Identity=70%"; Hit description=BZIP transcription factor
  Pfam annotation: Domain name=bZIP_1; Domain location=112-169; Score =27.8; E_value=3.8e-05; Accession=PF00170.11; Description=bZIP transcription factor
  Pfam annotation: Domain name=bZIP_2; Domain location=112-162; Score =12.8; E_value=0.035; Accession=PF07716.5; Description=Basic region leucine zipper
  Pfam module annotation: Pfam domain module=bZIP_1::bZIP_2; Domain location=112-169::112-162
MPWEQPRPGCKGTDVAAHQSYGLSYREFQTSSGDSHPNRRILAVHMAMDQDGTMDNLLILVTCVRLFYEISTSLCGTSNGTGLGEMHLENGQSGAMVPASNSSDRSDRSDKPMDQKVLRRLAQNREAARKSRLRKKAYVQQLESSKLKLASLEQELQKARQQGIFISSSGDQTHTMSGNGAMTFDLEYSRWQEEQNKQINELRTAVNAHASDSDLRLIVDGIMAH

SEQ ID NO: 65613 - protein, 102 aa, Zea mays
  Coding DNA Sequence Number=SeqID_23834
MGTNVIWLGTLPPRHSSRGGLDVPGSGQKDRRGEMRRQQPSLEHQPSEFFYSEDQAVTRERTLVYQTDVDTMVDVGNRDHNYQGHPTFIAIQVFHFSTTYKS

SEQ ID NO: 65614 - protein, 106 aa, Zea mays
  Coding DNA Sequence Number=SeqID_23835
  Gene Ontology: Mol. function=nucleic acid binding; Biological process= DNA integration
  Homolog annotation: Hit_ID=O24587; Match level="QueryCoverage=66%, HitCoverage=6%, E-value=1e-31, Identity=92%"; Hit description=Pol
MDPKGKEMVVNDKEKESLFNKPKDSRSQQGVYASGDSSWIIDSGCTNHMTGEKKMFTSYVKNKDSQDTIIFGDGNQGKVKGLDKIAITSEHSISNVFLVESPIHPL

SEQ ID NO: 65615 - protein, 85 aa, Zea mays
  Coding DNA Sequence Number=SeqID_23836
MELLAPYGDWLEKRDGDSGSTTTVYMSQKQKKMHTYPGSFPKETTESAIRDYGATGDMGWALLLTHGLDGWNCSDLSILRPVWLK

SEQ ID NO: 65616 - protein, 167 aa, Zea mays
  Coding DNA Sequence Number=SeqID_23837
MFFDSDEAEYHTTPIRSPYDRVNMGFFSDEVALSLHKEQFIPSPRSSRVDGLDLNSSGVEFQNIASFQDLRVAVIFDQLVLVVVLQVEASEFHGWPVRVLEVVIEHEASSLVHMKNSTVQCILAIVVEGKLRTESIKNAMNLVKKCGAPEGSVEHYMATKLFMKAEN

SEQ ID NO: 65617 - protein, 449 aa, Zea mays
  Coding DNA Sequence Number=SeqID_23838
  Gene Ontology: Mol. function=protein kinase activity; Biological process=protein amino acid phosphorylation
  Homolog annotation: Hit_ID=O24571; Match level="QueryCoverage=44%, HitCoverage=46%, E-value=1e-110, Identity=97%"; Hit description =Ser/Thr protein kinase
  Pfam annotation: Domain name=B_lectin; Domain location=83-190; Score =123.4; E_value=6.3e-34; Accession=PF01453.15; Description=D-mannose binding lectin
  Subcellular localization annotation: CTP_CleavageSite=24; ConfidenceScore=5.10e-01
MPRPLAALLSTACILSFFIALFPRAASSRDILPLGSSLVVESYESSTLQSSDGSFSSGFYEVYTHAFTFSVWYSKTEAAAANNKTIVWSANPDRPVHARRSALTLQKDGNMVLTDYDGAAVWRADGNNFTGVQRARLLDTGNLVIEDSGGNTVWQSFDSPTDTFLPTQLITAATRLVPTTQSRSPGNYIFRFSDLSVLSLIYHVPQVSDIYWPDPDQNLYQDGRNQYNSTRLGMLTDSGVLASSDFADGYATRNPGNWTEGCMAIVNTTCDRYDKRDICISDCTCKGFQYQEGTGSCYPKAYLFSGRTYPTSDVRTIYLKLPTGVSVSNALIPRSDVFDSVPRRLDCDRMNKSIREPFPDVHKTGGGESKWFYFYGFIAAFFVVEVSFISFAWFFVLKRELRPSELWASEKGYKAMTSNFRRYSYRELVKATRKFKVELGRGESGTVYK

SEQ ID NO: 65618 - protein, 87 aa, Zea mays
  Coding DNA Sequence Number=SeqID_23839
MEDGGREIAEATVRAVSGLAEWFAIRGVGESTSCGLPPTGVGSYYSQNRFGYGSSGFLASLEESEPFCNSFDKTASDEETVAEAVIS

SEQ ID NO: 65619 - protein, 549 aa, Zea mays
  Coding DNA Sequence Number=SeqID_23840
  Gene Ontology: Mol. function=serine carboxypeptidase activity; Cellular component=cellulose and pectin-containing cell wall; Biological process=proteolysis
  Homolog annotation: Hit_ID=Q2R3G8; Match level="QueryCoverage=92%, HitCoverage=91%, E-value=1e-161, Identity=58%"; Hit description =Serine carboxypeptidase family protein, expressed
  Pfam annotation: Domain name=Peptidase_S10; Domain location=44-541; Score=505.0; E_value=8.7e-149; Accession=PF00450.12; Description =Serine carboxypeptidase
MQGRSRDAATIAAAVACAAVLLLGDAWSVSAQAAAEEDKISALPGQPPVGFAQYSGYIPVDAAGKRSLFYYFAEAEADPAAKPLVLWLNGVLFYELLEIGCYFVNAVSNKCYFMDSPRRRGESSGFSASAPVTKEIMLNGSHMHVSVGPGCSSVGVGAFSENGPFRPSGNALTRNEYSWNKEANMLYLESPAGVGFSYSTDPAFYEGVGDSMTARDNLKFLQGWFARFPQYKGRDLYITGESYAGHYVPQLAQRMVEFNKKEKLFNLKGIALGNPVLEFSTDFNSRAEFFWSHGLISDSTYNIFTTVCNYSRYVSEYYRGSLSTACDRVMSQVARETSRFVDKYDVTLDVCISSVLMQSQVLVPQQGSRELDVCVEDETMRYLNRKDVQQAMHARLDGVQRWTLALSYWLTACAALRSRLMDGCICSSVLEYKQLDLQIPTVNTVGALVKAGIPALVYSGDQDSVIPLTGSRTLVGRLAARLRLNATAPYRAWFQGKQVGGWTQVFGGGALSFATVRGASHEAPFSQPERSLGLFRAFLAGQQLPESFQ

SEQ ID NO: 65620 - protein, 83 aa, Zea mays
  Coding DNA Sequence Number=SeqID_23841
  Subcellular localization annotation: CTP_CleavageSite=72; ConfidenceScore=5.22e-01
MGAGADGRSLSVQLQDNLAQLTVFAAGNFQAVMFSPALVWKRTAASGHPPSSSDADLECACTSGAFPAGDIFQAEVQPLNLLP

SEQ ID NO: 65621 - protein, 503 aa, Zea mays
  Coding DNA Sequence Number=SeqID_23842
MKKRRHVAAAALRPATHAAGRAESQQGKEAQVPYDQRSAGRLAGDDATRESNAGRGRGGYIMVLPPLWASDARPLPFLLSPQGWGAQNPHPHERSSRPRAVSRLRSPPARKDRQKGASAQELARRAAAEPGRPGGWNEPAAARMVPARNLQPLARDAHATPCAAAAGLGVTPTAPMAQEPIDKHHSEPTKPPPPPQERQADQDTRRHAHAYGEQQQRTLRPLQPAGVHHQEAAGSSGSSSNGGAGDWLRLGLSPASPSAGGTQPGLVFADRAAGPPLLLSSQPQTRTASEALRPGMGVAPGPFLHQAAPGIPQASITLPVPRAGPPWLPPWSPSAVAPPLVPFGNRAFYTPGAASGLDAIRVVLPPSAVAGVWFALQAAPHQGREPFLPQIPRSYLRIKDARVTVRLLSKYLAGRLGLEDESEVRNNAELASSVGLGKEVEGLDFSLEYVTSRKGPTAFLTLQHVRDGIWCQGDAAAASPSVVPDMSAANHHHLMVLQYGRRS

SEQ ID NO: 65622 - protein, 188 aa, Zea mays
  Coding DNA Sequence Number=SeqID_23843
MAENPPKVPVREGCCRRVHRIVRCASHVTQPLGFDRWSSDIWGHRTVRWCTGQMTVGAVSHCSAWHTGQSGATPDSPVNYSGVAPQIPEAEQFRVDLPGPPLVRNKDVTSGKIKASISLNTLRTLSFPWPMFLILGTSSRAWANALNLKALDQLYETLSRWAWSKAVDGSGKNSGYKGPTPFTLAILL

SEQ ID NO: 65623 - protein, 88 aa, Zea mays
  Coding DNA Sequence Number=SeqID_23844
  Subcellular localization annotation: CTP_CleavageSite=29; ConfidenceScore=5.25e-01
MRGLGVVPPPPFGPLRRKLLVMNRPRPTRAIASRKPMSVSKDANRVLDIANNDALSTLHSHAVDILNIQTFVTLVFDLVMSGPSMIFS

SEQ ID NO: 65624 - protein, 210 aa, Zea mays
  Coding DNA Sequence Number=SeqID_23845
  Subcellular localization annotation: CTP_CleavageSite=53; ConfidenceScore=5.45e-01
MTLYNGIPRGSTSGHLLLPPRCAPRPSATPSSYGTPHWLPAPAVVIAVARAIVVATVARVVHRWPQSDGPGRRLMAILLQPMDRLHLHVSCTVCKYSFIASGRPIIGFYIAPPPLALPAHQLHLSTSRISCLPRPPLLRRVQPPHSRLLRCSTLVGAIGTPRSTYTPFESSASPTLLFYVLVGPLGWRVGHTVSCWVLQHDDTGSTHLGH

SEQ ID NO: 65625 - protein, 221 aa, Zea mays
  Coding DNA Sequence Number=SeqID_23846
  Homolog annotation: Hit_ID=Q6ZAC7; Match level="QueryCoverage=43%, HitCoverage=14%, E-value=1e-27, Identity=65%"; Hit description =Suppressor-like protein
MKSMGDRGSPWRSPRRWTGIRFTIDKDTGGRCGKKQTNEVEPALSKTHIFHDLQQKRPRNEVEGLRDIQFEEHMSFFFLVQGSDHSLNKNELSCMFLPLTKALWLVEIKEDDSDEDDDFAEELGDKDADDSFMESYSDALNKELSSTTLEKSFAHAPRPETNNEGPSDDAATGAEMTPVDVDLNLVESILNSYSSQQGLPGPASSLLGLMGIKVPPDVKKM

SEQ ID NO: 65626 - protein, 567 aa, Zea mays
  Coding DNA Sequence Number=SeqID_23847
  Gene Ontology: Mol. function=RNA-directed DNA polymerase activity; Cellular component=mitochondrion; Biological process=RNA-dependent DNA replication
  Homolog annotation: Hit_ID=UPI00004C1731; Match level="QueryCoverage =92%, HitCoverage=33%, E-value=0.0, Identity=79%"; Hit description =UPI00004C1731 related cluster
  Pfam annotation: Domain name=RnaseH; Domain location=37-164; Score =4.2; E_value=2.3e-05; Accession=PF00075.14; Description=RNase H
  Pfam annotation: Domain name=rve; Domain location=279-438; Score =111.9; E_value=1.8e-30; Accession=PF00665.16; Description=Integrase core domain
  Pfam module annotation: Pfam domain module=RnaseH::rve; Domain location=37-164::279-438
MGETISFAPRKAIKSQVLADFVAEWVDTQLPTVLIQPELWTMFFDGSLMKTGAGAGLLFISPLGKHLGYVLRLHFPASNNVAEYEALVNGLRIAIELGVRRLDARGDSLLVIDQVMKNSHCRNPKMEAYCDEVRCLEDKFYGLELNHIARCYNETADELAKIASGRTTVPPDVFSRDLHQPSVKIDDTSEPEAPSAQPEVPSAQSEAPSARSEAPSAQPEAPSARPEAPSVQPEAPSAPEGFYWPTAVADATRIVRTCEGCQFYARQTHLPAQALQTIPITWPFAVWGLDLVGPLQKAPEGYTHLLVAIDKFSKWIEVRPLNSIRSEHAVAFFTNIIHHFGVPNSIITDNGTQFTGRNFLDFCEDHHIRVDCAAVAHPMTNGQVEHANGMILQGLKPRIYNDLNKFGKRWMKELPSVVWSLRTTPSRATGFTPFFLVYGAEAILPTDLEYGSPRTRAYVDQSNQASREDSLDQLEEARDRALLHSARYQQSLRRYHARGVRSRNLQVGDLVLRLRQDARGRHKLTPPWEGSFVIAKVLKPRTYKLANIQGEVYNNAWNIQQLRRFYP

SEQ ID NO: 65627 - protein, 174 aa, Zea mays
  Coding DNA Sequence Number=SeqID_23848
MALGEGFCRMAHRTVRCASHVTQSLGFDRWSSNMWGHRTVRWCTGQSLFTVRCAFCACSDFCARSRALLITIHLLQMTVGAVSRYSAWHTGQSGATPDSPVNYSGVAAQIPEASELEGIHPGAPDTIPWCTEHCPGRCGAQERWSMAEVKVMRARADGPGAVKGECWVLTDESE

SEQ ID NO: 65628 - protein, 221 aa, Zea mays
  Coding DNA Sequence Number=SeqID_23849
  Gene Ontology: Cellular component=extracellular region; Biological process=sexual reproduction
  Homolog annotation: Hit_ID=P58738; Match level="QueryCoverage=88%, HitCoverage=92%, E-value=8e-52, Identity=46%"; Hit description =Expansin-B1 precursor
  Pfam annotation: Domain name=Pollen_allerg_1; Domain location=123 -206; Score=113.6; E_value=5.7e-31; Accession=PF01357.11; Description= Pollen allergen
MGSLQPNNAVAVAVAAAVVLAALATGGSCWTDDRLKAVPPGPNITADYDGKWLAAKATWYGSPVGAGPDDDNNGGTCGFTGVNLPPYSGMAACGNSPIYKDGKGCGSCYEIRVRCKYAPGKNIVFHVEHGSDPSHLALLAKFVAGDGDIVQMDLKQGASLKWEPMNHSVGAIWRIETAPHKPLKGPFSIRLTSESGQEVVAADVIPEDWKPDTTYQSNVQF

SEQ ID NO: 65629 - protein, 218 aa, Zea mays
  Coding DNA Sequence Number=SeqID_23850
  Gene Ontology: Mol. function=protein serine/threonine kinase activity; Biological process=protein amino acid phosphorylation
  Homolog annotation: Hit_ID=Q9LGV5; Match level="QueryCoverage=31%, HitCoverage=14%, E-value=2e-19, Identity=72%"; Hit description =Putative CBL-interacting protein kinase 1
  Pfam annotation: Domain name=Pkinase; Domain location=7-193; Score= -101.1; E_value=0.015; Accession=PF00069.15; Description=Protein kinase domain
  Subcellular localization annotation: CTP_CleavageSite=63; ConfidenceScore=5.39e-01
MAPRPAANHQATAEQGAKHLGRPSGAPSARAPRPPPAAPERPTGRRAEQSFNSVPDRVFLIQVAASKTKIYMVLELVNGGELLDRIATSEGKLPEQDARRLFQQLVDGVSYCHEKGVCHRDLKVQCRPDVPHPAPLLSVKFCCVRGPGPFLYSTHSLITPRRPNSSPGANSLCRMPAGSAEQRAAKANESPYASITQRYEVWSNHVEKIPLILTDFTD

SEQ ID NO: 65630 - protein, 138 aa, Zea mays
  Coding DNA Sequence Number=SeqID_23851
  Subcellular localization annotation: CTP_CleavageSite=27; ConfidenceScore=5.02e-01
MTFGRKVTVKKAKSGPMERGDRAPGGRAATARPSTARPNTVGWATNCGWNDKGGESGWASVQFYASDSGGRLPDASCRGWPGREMWFGGDEDGNLSLGRRSPPHPTPGLSLGLRRSHRLAQPRPQTDYATGDTSLPYP

SEQ ID NO: 65631 - protein, 71 aa, Zea mays
  Coding DNA Sequence Number=SeqID_23852
MARRSASAARAASHPWPAGATGMRYRLAILAYRCVVNCGNEIDGFGIDSGNGKEGVEADLQEFQDVDEFED

SEQ ID NO: 65632 - protein, 76 aa, Zea mays
  Coding DNA Sequence Number=SeqID_23853
MSSKYGLWTGTFGLHDEKGAIVTKVADTSKLCAKELWLNQGKRNRLKSICYDEEAFENKSTTLAPTSGEPFFDHLR

SEQ ID NO: 65633 - protein, 301 aa, Zea mays
  Coding DNA Sequence Number=SeqID_23854
MIRSAPKLLEPRWPSEGAANHAGATPGRAVGTQAAPRTRGARPRCAPGEAAAGPCEGAPSRLATPGRRSQTALSRGCAPAPAAPAGQGWLAARAALADRRAIALATQAGHRAGPPGWMAALTTLAGQRAGWGRGPRPHRGAATPGRGREQGGCVGPSTPRWGRACARAQGGPSRARDGRATSELEEDARGGAGPRHAGAEDRRAGRAATPGPSRGRARWDCAEADAASRAQGEGARARQGRPRQTSGAGAAPGQAGAGTPRGEGKAERGSPSVGKSRAERDEGKGEEEGAACVQPGRGEVA

SEQ ID NO: 65634 - protein, 911 aa, Zea mays
  Coding DNA Sequence Number=SeqID_23855
  Gene Ontology: Mol. function=protein binding; Cellular component =thylakoid; Biological process=photosynthesis
  Homolog annotation: Hit_ID=Q0QW06; Match level="QueryCoverage=87%, HitCoverage=98%, E-value=0.0, Identity=58%"; Hit description =Ethylene-overproducer1-like protein
  Pfam annotation: Domain name=BTB; Domain location=257-389; Score=2.8; E_value=0.0023; Accession=PF00651.21; Description=BTBPOZ domain
  Pfam annotation: Domain name=TPR_1; Domain location=619-652; Score =0.5; E_value=4.7; Accession=PF00515.18; Description=Tetratricopeptide repeat
  Pfam annotation: Domain name=TPR_1; Domain location=807-840; Score =23.5; E_value=0.00075; Accession=PF00515.18; Description =Tetratricopeptide repeat
  Pfam annotation: Domain name=TPR_2; Domain location=490-523; Score =5.7; E_value=7.2; Accession=PF07719.7; Description=Tetratricopeptide repeat
  Pfam annotation: Domain name=TPR_2; Domain location=619-652; Score =2.7; E_value=16; Accession=PF07719.7; Description=Tetratricopeptide repeat
  Pfam annotation: Domain name=TPR_2; Domain location=733-766; Score =4.6; E_value=9.6; Accession=PF07719.7; Description=Tetratricopeptide repeat
  Pfam annotation: Domain name=TPR_2; Domain location=807-838; Score =8.2; E_value=3.6; Accession=PF07719.7; Description=Tetratricopeptide repeat
  Pfam annotation: Domain name=TPR_2; Domain location=839-872; Score =15.0; E_value=0.27; Accession=PF07719.7; Description=Tetratricopeptid e repeat
  Pfam module annotation: Pfam domain module=BTB::TPR_1::TPR_1::TPR _2::TPR_2::TPR_2::TPR_2::TPR_2; Domain location=257-389::619-652::807- 840::490-523::619-652::733-766::807-838::839-872
  Subcellular localization annotation: CTP_CleavageSite=55; ConfidenceScore=5.19e-01
VDWCCSPLIGRRLGAGFRRLPGSSTGPPIRAPKPPPPGAPLRNSCFLGLRISPPVVASGWRGGLVPGVSLRIRGRSGAPGLDGEDLSGFETNKWRWSPDLGGAPAVVCAMRKLFFSESACKETKLHSAPHSWLPLERGKLSKFSGHAAAGSSIESLMKMPEPAVLPHFKPADYVDVLAQIHEELESCPPDDKSSLYLLQYQVFRGLGEAKLSRRSLQSAWEKGSTIHEKLIFGAWLKYEKKGEEAISDLLSSCSKCLQEFRLLDFVLQVSTGSHVINYDGDDDEFRGSAVVHFRIRDDMVACDRRKLAALSTPLYAMLNGGFRESYLEVIDMSRNGISPIGMRAISKFSLSGRLPYLSADAILEILDFANKFCCKGLKDACERKLASFVSSRQDAIDFMECALELGCSILAASCLQVLLNELPECLNDEQVVRIFSSANKAQRLTMVGNASFSLYCLLSEVSMSTNPTSDVTVSFLEKLVESASDSRQNQLALHQLACTKFLRKDYPESERLFNAAFSAGHLYSIVGLARLASLRGNKHFALKLLDSVMSSRWPLGWMYQERALYLDGDNKLENLNKATELDPTLTYPYMFRAASLMKRQSVEAALMEINRILGFKLVLECLELRFCCYLALEDYRAALCDVQAILTLAPDYRMIGGRVAAKQLRMLVLENVEQWTAADCWMQLYDRWSSVDDIGSLSVIYQMLESDTAKGVLYFRQSLLLLSLLVSMLRVIMKGLSMKGWILYDTGHCEEGLQKAEASIAIQRSFEAFFLKAYALADSSLDPSTSATVVSLLEDALRCPSDRLRKGQALNNLGSVYVDCGKLDLAAECYINALKIGHTRAHQGLARVHFLRNNRAGAYDEMTKLIEKARNNASAYEKRSEYCDRELTKTDLQMVTKLDPLRVYPYRYRAA

SEQ ID NO: 65635 - protein, 587 aa, Zea mays
  Coding DNA Sequence Number=SeqID_23856
  Gene Ontology: Mol. function=catalytic activity; Cellular component =intracellular; Biological process=metabolic process
  Homolog annotation: Hit_ID=Q2HUK9; Match level="QueryCoverage=94%, HitCoverage=92%, E-value=1e-119, Identity=36%"; Hit description =Tetratricopeptide-like helical
  Pfam annotation: Domain name=PPR; Domain location=180-214; Score =21.0; E_value=0.0043; Accession=PF01535.11; Description=PPR repeat
  Pfam annotation: Domain name=PPR; Domain location=281-315; Score =28.9; E_value=1.8e-05; Accession=PF01535.11; Description=PPR repeat
  Pfam annotation: Domain name=PPR; Domain location=317-351; Score=2.8; E_value=3.5; Accession=PF01535.11; Description=PPR repeat
  Pfam annotation: Domain name=PPR; Domain location=353-386; Score=5.7; E_value=1.6; Accession=PF01535.11; Description=PPR repeat
  Pfam annotation: Domain name=PPR; Domain location=419-453; Score =10.2; E_value=0.46; Accession=PF01535.11; Description=PPR repeat
  Pfam annotation: Domain name=PPR; Domain location=48-82; Score=12.0; E_value=0.28; Accession=PF01535.11; Description=PPR repeat
  Pfam module annotation: Pfam domain module=PPR::PPR::PPR::PPR::PPR::PP R; Domain location=180-214::281-315::317-351::353-386::419-453::48-82
MLRLGLRPNDFTFPSAFKAAASAPPRSAAGTQLHALALRFGYLPDDAFVSCAALDMYFKTGCLALARRLFDEMPNRNVVAWNAVMTNAVLDGRPLETVEAYFGLRGAGGMPNVVSVCAFFNACAGMTNLSLGEQFYGFVAKCGFGKDVSVSNSVVDFYGKCRCVGKARAVFDGMGVRNNVSWCSMVVAYAQNGAEEEAFFVYLGARRAGEEPTDFMVSSVLTTCAGLLGLDLGRALHAVAVRSCIDSNIFVASALVDMYGKCGGIEDAEQVFFEMPQRNLVTWNAMIGGYAHIGDAHNALSVFDKMIMGQETAPNYITLVNVLTACSRGGLTKEGYELFQTMKWRFGIEPRIEHYACVVDLLCRAGMEERAYKIIQGMPMRPSISVWGALLGGCKMHGKTELGRIAAEKLFELDPQDSGNHVLLSNMLASAGRWAEATDVRKEMKNVGIKKDPGRSWITWKNVVHVFQAKDTTHDMNREIQALLAKLKGQMQAAGYMPDTQYALYDLEEEEKESEVFQHSEKLALAFGLICIPPGIPIRIMKNLRICVDCHRAFKFISGIAGREIIVRDNNMFHHFKNYECSCKDYW

SEQ ID NO: 65636 - protein, 369 aa, Zea mays
  Coding DNA Sequence Number=SeqID_23857
  Gene Ontology: Mol. function=phosphotransferase activity, alcohol group as acceptor
  Homolog annotation: Hit_ID=Q2R903; Match level="QueryCoverage=94%, HitCoverage=35%, E-value=8e-82, Identity=54%"; Hit description =Phosphatidylinositol 4-kinase, putative, expressed
MRKKAAHQARKRKLIKAIKMQMMIISFIGFSRIRMEKIKGLFMTGMKMTSVRKVIKKTSSANYLRINMRRGELTDLIKNDDYGKGSSGIEEEDNPEFLSFRRLFRVHPEDPKSGHIESNQSNNLSEGSPGSKGFFKRLFRDRDRSLEDSEIFGSKMAKEARIWSHKHPGTTGINEKQSGKPPLPINAVAELRKGSCYASLELIEALCDTSYGLVDIFPIEDRKIASGREKAPYLICVEVLKAEAPSHSKGSSDGHKLSKGGIPLANGDVQLPKPPPWAYPLWSRHETQNYEIDRMLKSTSQVIDQAMAQIWETKVKFVNVSFSTEKLGRSRSIVLSETGRRLRHDATDSNMIVCKARTFYYNNETHICT

SEQ ID NO: 65637 - protein, 168 aa, Zea mays
  Coding DNA Sequence Number=SeqID_23858
MEIQALQPAQREVEKLRWEVTRSGERDRKLSTLRAKADRLDSEATRLRSRRDEAHQNWELAEVVLKNEHRVREAAGVPQQFGPPSHATYDAATGSEDEPDRAPKIPVHGRVTFLPIVLYWVYTDGYQLILHPLEQYRLHTLDEEEEKFVSLCTVVIKCDLFVLVVAIL

SEQ ID NO: 65638 - protein, 135 aa, Zea mays
  Coding DNA Sequence Number=SeqID_23859
  Gene Ontology: Mol. function=protein serine/threonine kinase activity; Cellular component=integral to membrane; Biological process=protein amino acid phosphorylation
  Homolog annotation: Hit_ID=Q0PW22; Match level="QueryCoverage=78%, HitCoverage=17%, E-value=3e-32, Identity=67%"; Hit description =Leucine-rich repeat receptor-like kinase
MDIDVVQLKKMHQEKQLDTLVDKGLESKYDRIELEEMVQVALLCTQSFPGHRTKMSEVVRMLEGDGLAKQWEASQHTKESHKFKVPNFSFSRCHSDLMGDSSLLLQAVELSGPRCGLNMFAHYVAHTFFLLLLSG

SEQ ID NO: 65639 - protein, 78 aa, Zea mays
  Coding DNA Sequence Number=SeqID_23860
MATEGNPYFVLDDTEEKQMWSKFQTMVWLALKSAKAIDLMSMRTELKDKVVATRGRVASLEEAESLREKVAPLEEEVR

SEQ ID NO: 65640 - protein, 54 aa, Zea mays
  Coding DNA Sequence Number=SeqID_23861
MAELKELSDAVAEFSRDLGAVDVPSVASHYEINIERVCEGYVLPDERDLAEPEM

SEQ ID NO: 65641 - protein, 266 aa, Zea mays
  Coding DNA Sequence Number=SeqID_23862
MAGGGLATVAKARVAWRTVGACFLRRSPVISGLGESESGQGDTTEAVGALIGRAQLKPLLDALRRLQEHGLTAVGVNAAFHHMRVLPLTEHRLHLDEMTPDASMESSRMASTALSTDELLPWGCGAIEPPDPQFQRTRLAERHVGKGRYPALGAYHRAHGGERRGPRSRKPRVDVEVIPRSGTKHRAREPTFTATKAVKRGVGTSAKVAGQDANVAEVAEAPLAPLVEAIPVPSEEEAGVANATSTMASPTVSDLLHAIPDTLDAT

SEQ ID NO: 65642 - protein, 160 aa, Zea mays
  Coding DNA Sequence Number=SeqID_23863
MARSPMLSARMPALTSWNITAMFPPTLENEPLMWKTRRLPMLESIWILSDVCLLMLMCQFNETKLISMKLATVNSQVDLNNLPNLLPKDVRTRIHDRSLHVTTFGVSVLPSINPQYHFLNGVSDASSQVKALINGQFPAYVPVRAPLDDPISAGIPAQSA

SEQ ID NO: 65643 - protein, 119 aa, Zea mays
  Coding DNA Sequence Number=SeqID_23864
  Homolog annotation: Hit_ID=Q10BX5; Match level="QueryCoverage=27%, HitCoverage=9%, E-value=5e-09, Identity=78%"; Hit description =Expressed protein
  Pfam annotation: Domain name=DUF569; Domain location=1-94; Score= -51.9; E_value=0.037; Accession=PF04601.4; Description=Protein of unknown function (DUF569)
  Subcellular localization annotation: CTP_CleavageSite=61; ConfidenceScore=5.59e-01
MDPKRFFNSMEVVSLASIFLSQGRATFASTSACTRLLLHGRSRLPLSLVLLRRLTGATGPRRATSSTPMGFPPWRSFVTDDVPHRTATHDWVLWDVEIVLLLKSVPLERNGSVLVVEFN

SEQ ID NO: 65644 - protein, 262 aa, Zea mays
  Coding DNA Sequence Number=SeqID_23865
  Gene Ontology: Cellular component=integral to membrane; Biological process=protein transport
  Homolog annotation: Hit_ID=Q5Z9Q1; Match level="QueryCoverage=99%, HitCoverage=97%, E-value=1e-105, Identity=78%"; Hit description =Putative NPSN12
MDLASVNEELAEIDGQIGDILRVLQNGFQKLEKIKDANRRSRQLEELTDKMRDCKRLIKDFERVSKAEAEHTDPATAKMLHDRKQSMIKELNSYVALKKQQASENKRIDLFDGPSAEDGFGEENVLLASNMTNQQLMDQGNQLMDETDQAIARSKQKESIALLCCPIRKAKGNFGLFLLHQTEQMSRVVNELDSIHFSIKKASQLVKEIGRQVATDRCIMAMLFLIVAGVIAIIIVKIVNPHNKDIRDIPGLAPPVSRRLLR

SEQ ID NO: 65645 - protein, 382 aa, Zea mays
  Coding DNA Sequence Number=SeqID_23866
  Gene Ontology: Mol. function=receptor activity; Cellular component =mitochondrion; Biological process=protein amino acid phosphorylation
  Homolog annotation: Hit_ID=Q5Z9P3; Match level="QueryCoverage=99%, HitCoverage=64%, E-value=1e-164, Identity=78%"; Hit description =Receptor-like protein kinase-like
  Pfam annotation: Domain name=DUF668; Domain location=318-380; Score =73.3; E_value=7.7e-19; Accession=PF05003.3; Description=Protein of unknown function (DUF668)
MGCVCSRHFPEDAPGTLAAAYDARRGRYGPGNFDSGELAIPPPHSNKVSDTGTFLGRASIAAVEVLDTLGSSMTSLNPGSGFLSGGTNRGNRACILAFEVANTIAKASSLWMSCSDESIEELKKEILHSDGVQVLVSSNTIELLHIAVVDKREELAVFSREVIRFGNLCKDPIWHNLGRYFDKYASEKLTTDNTPQDHSKETMEATVQQLINLAQNTSELYHELHALDRFEQDFKKKFHEEEPVPAARRESIMILHSELKRQRKLVKNLKKKSLWSRTLEEIVEKLVDIVVFLHRQIRESFNEAGTDFCASEQTQNKRLGSCGLALHYANIINQIENIISRPLSLPPSARDNLYHGLPVTVKLALRSRLQTYNTEEESAVVL

SEQ ID NO: 65646 - protein, 150 aa, Zea mays
  Coding DNA Sequence Number=SeqID_23867
MDCAACHLRHAVLATGVPISMGYAACHLRHTILATGVPISMNNIACQFCHHMLDAGVPISKDNAKFHHIISVDDMLKAALVTVDLGTRRRDLALSVGHQQRHRTTISKCEHGRHEGASAGYCCDLFQVFVAQEDPRRDYSTSSHRPSKWG

SEQ ID NO: 65647 - protein, 265 aa, Zea mays
  Coding DNA Sequence Number=SeqID_23868
  Gene Ontology: Mol. function=calcium ion binding; Cellular component =endoplasmic reticulum
  Homolog annotation: Hit_ID=Q5Z9P6; Match level="QueryCoverage=80%, HitCoverage=83%, E-value=1e-100, Identity=85%"; Hit description =Putative SSR alpha subunit
  Pfam annotation: Domain name=TRAP_alpha; Domain location=1-264; Score= -47.2; E_value=4.7e-08; Accession=PF03896.7; Description=Translocon -associated protein (TRAP), alpha subunit
MEMIGLGWAAVDWGVLGWGFHGLKAVCNFSVVARAESEEDAAAAEVVEGADLGIVGDDTQVSSDGPLSPAPGVETVVVFPKNAGKIVLAGEETELLVGLQNDGESILNVVAVHSTLHLPFDHNMYGQNLTVQNFFNSSVPVSVQATFPYKFVVSKFLQPGAYDLVGYIVYEIDQHPYQNVFYNGTIEVVEAGGLLSVESVFLITLGFALLGLFGLWAYGQVQQLSKKTKKAPKVELGTGTTDANIDEWLEGTSFVQRSKSKKKQT

SEQ ID NO: 65648 - protein, 746 aa, Zea mays
  Coding DNA Sequence Number=SeqID_23869
  Gene Ontology: Mol. function=nucleoside-triphosphatase activity; Cellular component=integral to membrane; Biological process=protein catabolic process
  Homolog annotation: Hit_ID=Q6H6R9; Match level="QueryCoverage=97%, HitCoverage=89%, E-value=0.0, Identity=77%"; Hit description =Putative cell division protein FtsH3
  Pfam annotation: Domain name=AAA; Domain location=368-558; Score =300.2; E_value=3.9e-87; Accession=PF00004.19; Description=ATPase family associated with various cellular activities (AAA)
  Pfam annotation: Domain name=AAA_2; Domain location=364-498; Score= -19.0; E_value=0.00025; Accession=PF07724.4; Description=ATPase family associated with various
  Pfam annotation: Domain name=AAA_5; Domain location=368-503; Score =10.1; E_value=0.0003; Accession=PF07728.4; Description=ATPase family associated with various cel
  Pfam annotation: Domain name=FtsH_ext; Domain location=181-342; Score= 65.3; E_value=1.9e-16; Accession=PF06480.5; Description=FtsH Extracellular
  Pfam annotation: Domain name=Peptidase_M41; Domain location=565-731; Score=56.2; E_value=7.8e-14; Accession=PF01434.8; Description =Peptidase family M41
  Pfam module annotation: Pfam domain module=AAA::AAA_2::AAA_5::FtsH _ext::Peptidase_M41; Domain location=368-558::364-498::368-503::181 -342::565-731
  Subcellular localization annotation: CTP_CleavageSite=63; ConfidenceScore=5.64e-01
MASAAAETLASFPIASPSRSLLRPFPRRPAGARTGAPSIRISAVPPRGLGLALVHRRCPPAARANVERDGDGASGNGEPSSSSGDGDRDAAAESGGDSTSTSTTSTAATPPPPSSKRNENKWRRRLTKGGGVGRWLWEPIVQGREMGFLLLQLGFAIFALRMLRPEIALPGSEPRPQTTYVSVPYSDFLASINKDQVKKVEVDGVHIMFRLRPEVESQVRVEQTPTQRGADYVIDNAGVSRRIVFTTTRPVDIKTPYEKMVENMVEFGSPDKRSGGMLNSALVGLIYVVLIAVVLQRLPISFSQQSPGQLRNRKNSNSGGAKVSESSDIVTFADVAGVDEAKEELEEIVEFLRNPERYIRLGARPPRGVLLVGLPGTGKTLLAKAVAGEAEVPFISCSASEFVELYVGMGAARVRDLFAKAKKESPSIIFIDEIDAVAKSRDSRYRIVSNDEREQTLNQLLTEMDGFDTNSAVIVLGATNRADVLDPALRRPGRFDRVVMVEAPDRFGRESILKVHVKRRELPLSKDVDLANIAAMTTGFTGADLANLVNEAALLAGRLNKEIVEKVDFIRAVERSIAGIEKKHAKLKGNEKAVVARHEVGHALVGTAVANLLPGQPRVEKLSILPRSGGALGFTYTPPVTEDRYLLFVDELRGRLVTLLGGRAAEEVVLAGRVSTGALDDIRRATDMAYKAVAEYGLSQRIGPISLATLSNGGLDDSGGSPWGKDQFGRLGAYLEGDQPNDLDAL

SEQ ID NO: 65649 - protein, 526 aa, Zea mays
  Coding DNA Sequence Number=SeqID_23870
  Gene Ontology: Cellular component=origin recognition complex; Biological process=DNA replication
  Homolog annotation: Hit_ID=Q945C7; Match level="QueryCoverage=61%, HitCoverage=44%, E-value=3e-58, Identity=95%"; Hit description =Origin recognition complex subunit 2
  Pfam annotation: Domain name=ORC2; Domain location=50-419; Score= -27.2; E_value=4.3e-11; Accession=PF04084.4; Description=Origin recognition complex subunit 2
MDHVTSIKAHGRLVLIMSGLVEVGSLCGITDKGDEMVCTRQRSYFLAKEKEPSSVKKRARAAAGKLSDLNLVDEQVLRASLAQIPPKHKEEVESLTRSYKDQYRNWLFELRCGFGLLMYGFGSKKQLLEDFASTTLTNFTVVVINGYLPAVNLKQVDRAFAHGRQSWGTQRPQQGKRRPGSSLSLRLSPKNTPSTTSGQDLGTKNTSTAAAAQTTTTEEPNPPLLTVARLTPRPQQKSRLLGEGRGGKEESVAPQHLHEPQTAVDATATKTPTHQASMSPRPLSPGCRRGPGQPCRTGEGSPSLTRRCHLLVIATIAEMFWDQTKAKRRKRAGTRSQLSQQFPSQSTEGIISFLMRQTSDDVDDHSLTPNAQSVFRVLAEYQLANEKEEGELVVHIFAGRVGMLHTDTKLTLFLSEVPMRERSTYPKAEAESGRKASGTKRLSVHAPLREGVTLSAVDARTSGAARRTPAPGGQARVVTSDTAQVSASAARRVGGTTASWVAQGIEKLPAADVDAVPASPPRPTPT

SEQ ID NO: 65650 - protein, 131 aa, Zea mays
  Coding DNA Sequence Number=SeqID_23871
MEALPERNQGAGKGNWCPFDATITQGRDTSRETAVGLLELLASRSVGRGWARVRAALCRAGLGSRAGVAQGAGRARRRQGAGRGSRGWLPVRAASVAQGERSGRGEGRKQRKGEIRGEKREGKERLRRERE

SEQ ID NO: 65651 - protein, 178 aa, Zea mays
  Coding DNA Sequence Number=SeqID_23872
  Gene Ontology: Mol. function=RNA-directed DNA polymerase activity; Biological process=RNA-dependent DNA replication
  Homolog annotation: Hit_ID=UPI00004C1733; Match level="QueryCoverage =96%, HitCoverage=24%, E-value=3e-50, Identity=71%"; Hit description =UPI00004C1733 related cluster
MAVPNYTYLKLKMSGPNGVITVGPTYKHAFECDVECVEYAEALAESEALIADLESLSKEVPDVKRHAGNFEPAETGNPSDMPDIPRDVAEHSLDIRAGARPVKQPLRRFDEEKRRAIVEEIHKLMAVGFVKEAKGVKLDPERCVFGVPWGMSLGFIVSKRRIEAFPGKIATIAQHPEP

SEQ ID NO: 65652 - protein, 264 aa, Zea mays
  Coding DNA Sequence Number=SeqID_23873
  Gene Ontology: Mol. function=nucleotidyltransferase activity; Cellular component=integral to membrane; Biological process=aromatic amino acid family biosynthetic process
  Homolog annotation: Hit_ID=Q6H3Z6; Match level="QueryCoverage=99%, HitCoverage=40%, E-value=1e-107, Identity=68%"; Hit description =Putative iron-phytosiderophore transporter protein yellow stripe 1
  Pfam annotation: Domain name=OPT; Domain location=1-248; Score= -214.4; E_value=0.0013; Accession=PF03169.6; Description=OPT oligopeptide transporter protein
MFRQVRWYYVVAAYALAPVLGFSNSYGAGLTDINMGYSYGQLALFVLAAWAGRDDGVVAGLVGCGLVKQLVLISADLMHDFKTAHLTLTSPRSMLAAQAVGAAMGCVVTPLTFLLFYRAFDVGNPDGYWKAPFALIYRNMALLGAQGFSALPTHCLPLSAGFFALAVLANVMKDVLPPRYARYVPLPTAMAVPFLVGASFAIDMVVGTVVVFAWHWIDGNETTLLVPAVASGLICGDGVWTFPSSLLSLAKIKPPICLKFTPGS

SEQ ID NO: 65653 - protein, 64 aa, Zea mays
  Coding DNA Sequence Number=SeqID_23874
MAVMRGVPAVELPINYSRWSIPGREEEIDLPANPYNRRVLRQQQQAEMIPLNPPPVGVDPVISA

SEQ ID NO: 65654 - protein, 65 aa, Zea mays
  Coding DNA Sequence Number=SeqID_23875
MAVGALQKGAWGSGSAHGGGHACEGHGLQGSDSISSGKAGTQLQSETSPRWVKRELMLMTSSGSD

SEQ ID NO: 65655 - protein, 119 aa, Zea mays
  Coding DNA Sequence Number=SeqID_23876
MASTSILPTKERPTSPEAAELTYYQELFVILTSAPTATTWTTSPSDRLRYEYGNGDKYNFIRMDMGCPKSMGNSPLTPLITWFSICRYDDHTLFLKWRSEGSSPKSKASPARSLCLCAF

SEQ ID NO: 65656 - protein, 231 aa, Zea mays
  Coding DNA Sequence Number=SeqID_23877
MDDGWIDDGLMFELFAEHQTCDTSRLHSLLSQIHTDIDQGLRCRFSYVAPHMTRLTDGEQDPSSTVSAAEENRAGDWTERGRAGFDGWEWDTPPWASAAACRRSWTPWGWRGTRLGAHAEHREMERTQGRARSDESAMAIECGIEGQAPGSSTRLRPSAGAGAERHGKDLGRRAPELLRGDASRDSGPSGGAREGSREEPPWEEEEMGSRQEAERSGTRRPAPMEASARGI

SEQ ID NO: 65657 - protein, 147 aa, Zea mays
  Coding DNA Sequence Number=SeqID_23878
  Gene Ontology: Mol. function=DNA binding
  Homolog annotation: Hit_ID=Q9LVR7; Match level="QueryCoverage=96%, HitCoverage=64%, E-value=2e-44, Identity=54%"; Hit description =Arabidopsis thaliana genomic DNA, chromosome 5, P1 clone:MQL5
  Pfam annotation: Domain name=DUF124; Domain location=23-147; Score= -4.1; E_value=1.1e-06; Accession=PF01987.7; Description=Protein of unknown function DUF124
  Subcellular localization annotation: CTP_CleavageSite=23; ConfidenceScore=5.12e-01
MAAPFFSTPFQPYVYQSQQGSVTAFQISGGDVQVLQVMLKSQEKLTAKPGAMCYMSGNMQMDNNYLPENDGGVWQWIFGKRVDLTNFSGELLCQADAFLCSVNDVSVSSTVEPRPRNIEIGAEMILKQKLRGQGMAFLVGGGSDIGI

SEQ ID NO: 65658 - protein, 522 aa, Zea mays
  Coding DNA Sequence Number=SeqID_23879
  Pfam annotation: Domain name=ERG2_Sigma1R; Domain location=314-522; Score=-105.7; E_value=0.029; Accession=PF04622.3; Description=ERG2 and Sigma1 receptor like protein
  Subcellular localization annotation: CTP_CleavageSite=21; ConfidenceScore=5.50e-01
MTCHWSASSSLKVVDLDGACRVARRGPPPSSIPSGATSLRKKQGSGAGPVTPRQGSTNWLKAHLDFWAKATSASLESASRVPHGSISAVHPVPGPDQICEAVAPAGRFKFRTPRRPGPPYNTDPNPRNPTSQPANQPTADEHEPMDETREMDPGAGVPRRAATASGTPTASRGSSTASSCSSNSNPSARASASTSTGTPPSAVVLPWAARAAAGDSCYYPGCRKDANCSCEMCLASIDATRDLVRAPEARRFFGGARDRRLFFRDRAAGAGSGSGEGSDATEPPWTPPMRSTAKSRRAPGREAAGGPEARAGVRSHDWLLYAATVIGFLLLMWVDTGLVPEAAARGFGPKLSPEAVARVGADARLAPGGLEHKLHVMERRVRQLVGGEGIANCSSRDSVWRFHQNDQQVFHWRCTVYKSVAEEVSVWGSPLRTSGLLPRALSARHLTLLSGEITEWSDGKVWPTVRASNGSSWAHRRQSAAAVRLEPETWVVEYQRSALFEGTRLLPAAAELIASRPTLEPF

SEQ ID NO: 65659 - protein, 103 aa, Zea mays
  Coding DNA Sequence Number=SeqID_23880
MDPWGTRDADSSDADVALAQKSRWALSQLVDPCRGVTGPAPAPPETSGRILGYEVIHEGLKSEDHVGSDGKRWCDTTGRGGAGIQNQHSVGPKVHAFKKYVDI

SEQ ID NO: 65660 - protein, 256 aa, Zea mays
  Coding DNA Sequence Number=SeqID_23881
  Homolog annotation: Hit_ID=Q10CY9; Match level="QueryCoverage=84%, HitCoverage=29%, E-value=3e-58, Identity=55%"; Hit description =Expressed protein
METYGTGKLEAGLLEQAIGLTGTRQVRIHEPEPVVADPGGLCKARNSLCNLQREGFVESSPARLECGFDFVEVWKLEGDEGRTTLNAGENSPTTNGVTVLGARQVPEAGALTGHPDLIDPLVDNDFETVIENLPVFITGDQNAASAKFEDEIDLALQELKKSQEAEYSVAEQKLYAQKDHILCLYRQLDAERAELADPMPLSDASNYGAMLANVLSRVDQVKREEEKFRSMLKVAGGFAKAPQSVTREMFGLPADK

SEQ ID NO: 65661 - protein, 98 aa, Zea mays
  Coding DNA Sequence Number=SeqID_23882
MEADQQWHGHEDDAEQPCWAEEDPGTATALGACPGELAGAVEHPSDVGGVLGVGGRGAGIEKRVIPIGAGTIGLVSGVQGVIFSINQGSDLPNVSDAD

SEQ ID NO: 65662 - protein, 564 aa, Zea mays
  Coding DNA Sequence Number=SeqID_23883
  Gene Ontology: Mol. function=metal ion binding; Cellular component =integral to membrane; Biological process=ubiquitin cycle
  Homolog annotation: Hit_ID=Q69KM4; Match level="QueryCoverage=70%, HitCoverage=93%, E-value=2e-84, Identity=50%"; Hit description=RING finger 1-like
  Pfam annotation: Domain name=PHD; Domain location=269-311; Score=0.2; E_value=0.054; Accession=PF00628.19; Description=PHD-finger
  Pfam annotation: Domain name=zf-C3HC4; Domain location=267-308; Score= 42.5; E_value=1.5e-09; Accession=PF00097.15; Description=Zinc finger, C3HC4 type (RING finger)
  Pfam module annotation: Pfam domain module=PHD::zf-C3HC4; Domain location=269-311::267-308
METVADTGGVEGTWTEAQNEDRQYCCCAVAPASQLSFSTRPAFAGLNSTGFLILGSPTLTNPLTITALPLCCIAVRRCHGVSVKSVTNPLPSPKQRPNPRPTHTPHRGLAPCRVSRRQQTTSRPSSSASRWRSSDHSWCGGSKKPGMDAPPAPPPPPGSPAIERKLSPGVLLLIAILAMVFFIFGLLNLLAQNLLRLRRARRRRRVGDAAAPDGSSPTAFQGQLQQLFHLHDAGVDQAFIDALPVFPYRAVAVGRRAAKDADEPFDCAVCLCEFADDDKLRLLPTCGHAFHVPCIDAWLLSHSTCPLCRASILAPQADYYYSSPSPPPSLLVPHSYGLAETPADEDPGAGDGDESPKHAEEVVEVKLGKLRCFDGNASARDLAAGDGTGSGNSSGRGSLGQRRCLSMGSYEYVMDDHAALRVTVKATTPKRRPASPRPSRRRHALSACDLGCPRKAGAWETAVTEAAASLSKDSFSTSKIWMASAAGREEDGRRPGQRRAASFRWPAIASSACKWHRRDEEPFDVEAGSPGGDNAVSSLTEEMPPSVARAAMVWVAGGGHGSHS

SEQ ID NO: 65663 - protein, 135 aa, Zea mays
  Coding DNA Sequence Number=SeqID_23884
  Homolog annotation: Hit_ID=Q945C8; Match level="QueryCoverage=55%, HitCoverage=9%, E-value=2e-38, Identity=97%"; Hit description=Origin recognition complex subunit 1
MKCIKFRPNSHNKSVDEELLNELMSGTWNICTSRHHRDQSLLRSSARIGGSSVSVFGLRNELATTVFSWCRAHRELLPGYDTLLKICCKLGESKIILCEEGTKHKLQKVQLNYPSDDVTFALKESPDLPWLSKYL

SEQ ID NO: 65664 - protein, 237 aa, Zea mays
  Coding DNA Sequence Number=SeqID_23885
  Gene Ontology: Mol. function=DNA-directed RNA polymerase activity; Cellular component=nucleus; Biological process=transcription
  Homolog annotation: Hit_ID=Q84NN3; Match level="QueryCoverage=86%, HitCoverage=92%, E-value=9e-76, Identity=69%"; Hit description =Putative DNA-directed RNA polymerase III subunit 22.9 kDa polypeptide
  Pfam annotation: Domain name=RNA_pol_Rbc25; Domain location=95-222; Score=127.1; E_value=4.9e-35; Accession=PF08292.2; Description=RNA polymerase III subunit Rpc25
  Pfam annotation: Domain name=RNA_pol_Rpb7_N; Domain location=24-93; Score=79.6; E_value=9.8e-21; Accession=PF03876.7; Description=RNA polymerase Rpb7, N-terminal domain
  Pfam module annotation: Pfam domain module=RNA_pol_Rbc25::RNA_pol _Rpb7_N; Domain location=95-222::24-93
MDAMRLWHGNGRQAGRMFSLSQIEHDLPMPPHLLSRPLPDAIKAELERLFLDKVITKLGLCVSVYDIRSIEGGSIHPGEGCSTYKVSFRLLMFKPFNGEILVGRITGYDDKGLQVSLEFFSDICIPGHLMQFGTYDLNYVSYLISVQCSVSKASRGPDGRWMLKTELGDELYLDLDDEIRFLVSSTKYPPIPIDQNEDDPPFAPMQIVGSIKGDGLGLLVWWAADEEEGEEAAEEEQ

SEQ ID NO: 65665 - protein, 129 aa, Zea mays
  Coding DNA Sequence Number=SeqID_23886
MKDLKAGGDVKDMEACRSPERDRARLSTTWGPAPQRPRDHLGAASALCSPGVSATGSGASGTQLHRWISVRTAPRSSLSLPRQQLVPLGPSPSAEVLPTYSAYSGFGSITAEVVYANYANYAIAAREQE

SEQ ID NO: 65666 - protein, 710 aa, Zea mays
  Coding DNA Sequence Number=SeqID_23887
  Homolog annotation: Hit_ID=Q84NN4; Match level="QueryCoverage=34%, HitCoverage=84%, E-value=1e-105, Identity=76%"; Hit description =Putative thioredoxin-like protein CDSP32
  Pfam annotation: Domain name=DnaJ; Domain location=637-672; Score =5.2; E_value=0.0014; Accession=PF00226.21; Description=DnaJ domain
  Pfam annotation: Domain name=Thioredoxin; Domain location=192-293; Score=5.1; E_value=6.4e-05; Accession=PF00085.10; Description =Thioredoxin
  Pfam module annotation: Pfam domain module=DnaJ::Thioredoxin; Domain location=637-672::192-293
  Subcellular localization annotation: CTP_CleavageSite=54; ConfidenceScore=5.79e-01
MASTSTFLSTLASRSAAADSLRSAVPSFAKIVRFLPAQAQISRRRRAAVLPTPRAAVSGTEKAPSSKHERVVRVHSTQEFDDALKAAKNRLVVVEFAASDSEDSSQIYPTMVQLSRTCGDVDFLLVLRDDESEATEELFRREGVTKVPHFNFYKGAEKVHEEEAIGPERLAGDVLYYGDSHSAVVQLHSREDVEALIDEHRGDKGKLVVLDVGLKHCGPCVKVYPTVLKLSRSMVDNTVFARMNGDENDSCMEFLRAMKIVEVPTFVFIRDGQIVGRYVGSGKGELVGEILRYNGVRVIKNGGSTEDFLPASACSVLEGRLVKEQNAEGRVAVSKVKELVEGFSSGSVSRDFISSRVGQMIFDESEVLFMSGPYGDSVQYKNGEPTKQFAKCDGVRILSNSSMIVIHRVSVFITSSVGIGNKIPAALLYNVRDHYGRQNKGSVQLGITGLTQWWLNAFSSGNSGMAVQSQPNIQRNSMNKLRGLSFRMVYDKGKENIVADTFSQGGSLMATYGDLAIQIDIPKSIVTNSYALDKLPIVTIHSPHGVVYSVQWGKVKRLHQFGKQCLVSEQAKEEQQLFGGFWHLFSVLQGIWKGLKSDFLEDFPIPEGCDFIMLLQCVAQDHLPRWKTLPPFVELWYRPDKNASNPEASELFKEVAYSYNILSDPEKQRQYDNADFEALENEGVDMEIELSNLGTVNKCLQHFFPNLVFL

SEQ ID NO: 65667 - protein, 296 aa, Zea mays
  Coding DNA Sequence Number=SeqID_23888
  Homolog annotation: Hit_ID=Q7F0I3; Match level="QueryCoverage=19%, HitCoverage=13%, E-value=3e-21, Identity=86%"; Hit description =Putative serine/threonine protein kinase
MTPLQAAVAVVQKDLRPTIAVDTHPMLAELLQRCWQKDPALRPTFAEIVDILNSIKESSDNFRIRPEELTVFIPRGFVAVCGEESVASLVAHPQHQLEYEMRKSNAHGCSSRLRLGGIELRSTGILRRCGSSAAPQPRTVGSVPVPDEQATVESEVLLVENAEQELVEGKFRRLRRRERRLLSRASTTPIRVRDVISGARHGLRDLCESRGGVQWVDIHGIARYGSSNVAESLRFVVMLHHLCQALDGRPRRKSNAHGCSSRLRLSGIELRSTGILRRCGSSAAPQSRTVGSVPVP

SEQ ID NO: 65668 - protein, 46 aa, Zea mays
  Coding DNA Sequence Number=SeqID_23889
  Gene Ontology: Mol. function=catalytic activity; Biological process =nucleoside metabolic process
  Homolog annotation: Hit_ID=Q9LWK9; Match level="QueryCoverage=93%, HitCoverage=13%, E-value=9e-09, Identity=72%"; Hit description =Putative bark storage protein
MESDVVDLFAHQHDVPFITICSLSDLAGGGSSISNEATTFLDIACT

SEQ ID NO: 65669 - protein, 255 aa, Zea mays
  Coding DNA Sequence Number=SeqID_23890
  Gene Ontology: Mol. function=RNA-directed DNA polymerase activity; Cellular component=mitochondrion; Biological process=RNA-dependent DNA replication
  Homolog annotation: Hit_ID=UPI00004C1731; Match level="QueryCoverage =99%, HitCoverage=21%, E-value=1e-97, Identity=63%"; Hit description =UPI00004C1731 related cluster
  Pfam annotation: Domain name=RnaseH; Domain location=2-124; Score= -9.3; E_value=0.00042; Accession=PF00075.14; Description=RNase H
  Pfam annotation: Domain name=rve; Domain location=125-255; Score =24.5; E_value=5.3e-05; Accession=PF00665.16; Description=Integrase core domain
  Pfam module annotation: Pfam domain module=RnaseH::rve; Domain location=2-124::125-255
MYFNGSLMKTGAGAGLLFVSPLGKHVRYVLRLHFPASNNVAEYEALVNGLRIIVELGVRRLDACGDSQLVIDQVMKNSHCRDRKMEAYCDEFRRLEDKFYGLELNHIARRYNETADELAKIALGRTMVPTDVFFRDIHQPSVKIDDTPEPEEASAQPEKAPRGFSHLLVATDKFSKWIEVRPLTSIRSEQAVAFFTNIIHRFGVPNSIITDNGTEFTGKKFLDFCEDHHISVDWAVVAHPMTNGQVERANGMILQ

SEQ ID NO: 65670 - protein, 81 aa, Zea mays
  Coding DNA Sequence Number=SeqID_23891
MAPLAGPGFLLVSLCQVALQSKWRRRHCPSVRPLYADGGYQLRIRSLEAFYQLNVEGHDDNGNRATIETGSDRRQVDYKEI

SEQ ID NO: 65671 - protein, 663 aa, Zea mays
  Coding DNA Sequence Number=SeqID_23892
  Gene Ontology: Mol. function=2-amino-4-hydroxy-6-hydroxymethyldihydrop teridine diphosphokinase activity; Cellular component=mitochondrion; Biological process=folic acid and derivative biosynthetic
  Homolog annotation: Hit_ID=Q7X7X0; Match level="QueryCoverage=76%, HitCoverage=98%, E-value=0.0, Identity=75%"; Hit description =Putative dihydropterin pyrophosphokinase /dihydropteroate synthase
  Pfam annotation: Domain name=HPPK; Domain location=61-187; Score =210.4; E_value=4.2e-60; Accession=PF01288.10; Description=7,8 -dihydro-6-hydroxymethylpterin-pyrophosphokinase (HPPK)
  Pfam annotation: Domain name=Pterin_bind; Domain location=249-472; Score=329.5; E_value=5.9e-96; Accession=PF00809.12; Description =Pterin binding enzyme
  Pfam module annotation: Pfam domain module=HPPK::Pterin_bind; Domain location=61-187::249-472
  Subcellular localization annotation: CTP_CleavageSite=61; ConfidenceScore=5.39e-01
MLLHAKDSVRKMHSVAKNYFVSDLTHPPRSLNRASRHVVPFKTRFFTHCSLESRSVDQEIVIAMGSNVGDRVSTFNRALQLMKSSDVNITRHACLYETAPAYLTDQPRFLNSAIRGTTRLRPHELLKLLKEIEKDIGRTGGIRYGPRPIDLDILLYGNSQIHSETLIVPHERIHERSFVLAPLVDLLGASSDNGIETSWHSLSKCSGGFFELWNNLGGESIIGTESIKRVLPVGDRLLDWCERTLVMGVLNLTPDSFSDGGKFLEVGAAISQAKSLISEGADIIDIGAQSTRPFAKRLSPNEELERLVPVLDEITKIPEMEGKLLSVDTFYAEVASEAVKRGAHMINDVSSGQLDPRILKVAAELGVPYVAMHMRGDPSTMQSEQNVHYDNVCKEVALELYTQVREAELSGIPLWRLVLDPGIGFSKKSGHNLEVIMGLESIRREMGKMSIGASHVPILLGPSRKSFLGEICNRANPVERDVATVAAVTAGILNGANIVRIHNAGYGVDAAKTPRPPAPIARSPHRAQLHLNTSPTARTLMEGHATASAIRRIRAARPPQYSRLASLSVAPFQGPSITAPPIITLRPRSVDGKRHFRDPPCPCDPRPSKDAPASVLPNPSPGSWGLVPAAHPYSPPPQTAFRTAHARWKSCMVQVHLSLSIHL

SEQ ID NO: 65672 - protein, 64 aa, Zea mays
  Coding DNA Sequence Number=SeqID_23893
  Subcellular localization annotation: CTP_CleavageSite=32; ConfidenceScore=5.12e-01
MVLTRPSSALFFSCSSSACLGQLNPLLSVALPAAPGVGPAPRHQHSRRICVGCDRLYADPLMQY

SEQ ID NO: 65673 - protein, 56 aa, Zea mays
  Coding DNA Sequence Number=SeqID_23894
MTSNILYSTFSDFLVFNATPVSLLITTAQKNLNPIGNGDALGEAGGQGGREAEADF

SEQ ID NO: 65674 - protein, 214 aa, Zea mays
  Coding DNA Sequence Number=SeqID_23895
  Gene Ontology: Mol. function=peptidyl-prolyl cis-trans isomerase activity; Cellular component=mitochondrion; Biological process =protein folding
  Homolog annotation: Hit_ID=Q4CNY4; Match level="QueryCoverage=42%, HitCoverage=4%, E-value=0.0, Identity=38%"; Hit description =Dispersed gene family protein 1 (DGF-1), putative
  Pfam annotation: Domain name=Pro_isomerase; Domain location=61-211; Score=52.8; E_value=1.1e-12; Accession=PF00160.11; Description =Cyclophilin type peptidyl-prolyl cis-tr
MELDCHIGCAISLCYLQPLASKHSSIDEFNLRSAQDFEMELHEAELAVRPEDPKMISRPRYAVMNTAKGPITIEIYKDASADVVDRFINLCKSNHFKGMPFRHIIKNFVIQGGDFDFDGASQEWITKAKASGKNDLSPKHEAFMIGTAKNPNTKGFDLFITTAPIPDLNDKLVVFGRVIKGEDIVQEIEEVDTDEHYQPKAAIGIIDIVLKQEP

SEQ ID NO: 65675 - protein, 132 aa, Zea mays
  Coding DNA Sequence Number=SeqID_23896
  Gene Ontology: Mol. function=electron carrier activity; Cellular component=mitochondrial respiratory chain; Biological process =electron transport
  Homolog annotation: Hit_ID=O22490; Match level="QueryCoverage=61%, HitCoverage=77%, E-value=1e-39, Identity=90%"; Hit description =Cytochrome C
  Pfam annotation: Domain name=Cytochrom_C; Domain location=20-108; Score=56.3; E_value=9.8e-14; Accession=PF00034.11; Description =Cytochrome c
MARSLSTHLARYEAPPPGNPTAGEKIFKTKCAQCHTVDKGAGHKQGPNLNGLFGRQSGTTPGYSYSSANKNMAVIWEENTLYDYLLNPKKVRLEFTLPNCDNLFHRVSLSICCIHASALYVECVALPCIFAI

SEQ ID NO: 65676 - protein, 474 aa, Zea mays
  Coding DNA Sequence Number=SeqID_23897
  Gene Ontology: Mol. function=binding; Cellular component =intracellular; Biological process=metabolic process
  Homolog annotation: Hit_ID=Q8S0S0; Match level="QueryCoverage=99%, HitCoverage=100%, E-value=1e-161, Identity=60%"; Hit description =Selenium-binding protein-like
  Pfam annotation: Domain name=PPR; Domain location=10-44; Score=38.9; E_value=1.7e-08; Accession=PF01535.11; Description=PPR repeat
  Pfam annotation: Domain name=PPR; Domain location=114-148; Score =32.7; E_value=1.3e-06; Accession=PF01535.11; Description=PPR repeat
  Pfam annotation: Domain name=PPR; Domain location=215-249; Score =18.8; E_value=0.02; Accession=PF01535.11; Description=PPR repeat
  Pfam annotation: Domain name=PPR; Domain location=306-340; Score=4.3; E_value=2.3; Accession=PF01535.11; Description=PPR repeat
  Pfam module annotation: Pfam domain module=PPR::PPR::PPR::PPR; Domain location=10-44::114-148::215-249::306-340
MALPAGTVVVAYNAAISRCARAGLYARALALFREMRGRGLRADEYTLPPLLNSAAQLRGPPEAVAALHALLLRAGLAPHLHVANALVDAYARLPHAGAAAARAVFDEMPRRDVVTWTSLLTGLARAGAHGAAVRAYHGMVASGVQPDEFAVPAALSSCAASTALDLGRSVHAAAVRLGLRPFRSVENSLVSMYAKTGALRDARAVFDAMPARCTITWTALIVGYAQNGRGRQSLEVYADMGPVRVQAGLRDLHRLDEAMDLLNRSSTELDATVWKSLLGACRVHQNAELAERAAEMVWRLDPADAVPYVMLSNLYSRARRWGDVARIRALMKARGVTKEPGCSWVGVNGITHLFHVEDRDHPRAAEIYRKVEEMTERIRVEGYVPDTDWALQDEVPEWRQRGLAYHSERLAVAFGLLAVPAAAPIRVFKNLRVCGDCHTAIKMVAKVYGREIILRDANCFHHMKDGECSCGDYW

SEQ ID NO: 65677 - protein, 36 aa, Zea mays
  Coding DNA Sequence Number=SeqID_23898
MTRVLALGTRGGVGVHQRQGPPVAAKGGWGGDVGPS

SEQ ID NO: 65678 - protein, 186 aa, Zea mays
  Coding DNA Sequence Number=SeqID_23899
PIDGGVQFRKVVLAAGDEEGLWRHGFVSHCRGGLTGIGEIAAGKHDDTTEALMVNSVAKLLFVRRECDVWAILQRHQAKHHVNEQLALKSAEVADLLSLCTELKDDVATERGKVPPLEEEVRRLRARVAPLQEEVWLLNGNLPAVAGEQDESRRQVTEASLRVDSLTRELEVERSEGQALRAWMGG

SEQ ID NO: 65679 - protein, 176 aa, Zea mays
  Coding DNA Sequence Number=SeqID_23900
MARRRSEIVDDATVGAASLAPRILHGGDGDGLSQWCRAHDNCLGHSSIRPGRHSNGELGCLNALPSGLLCGVGTRHGPDRCSNTTLHHLGSSKGQFVGLALSVEARQDVRKKASCIGKLYSWFDSLPGSGHDDRPRFPAPQAPSLHHGHWKQGSSPLLKNHPNATTDIATRIFLLH

SEQ ID NO: 65680 - protein, 101 aa, Zea mays
  Coding DNA Sequence Number=SeqID_23901
  Subcellular localization annotation: CTP_CleavageSite=32; ConfidenceScore=5.10e-01
MAQSSKSGGIFCKRQRGGGAALSQWRGGGAARARWRGEGRSRWPGRGGVAAARPLEVFMIKFDGVHKSDELKLRTWHCNHCSGEDEVVEGDFQEFQDYDEF

SEQ ID NO: 65681 - protein, 69 aa, Zea mays
  Coding DNA Sequence Number=SeqID_23902
MAGRATSDVVGAREDRVQDGHRRRSTHRGTGRQSPRSRTAWKRAYQHERSQPDIITRMMGSSTSFQLSR

SEQ ID NO: 65682 - protein, 514 aa, Zea mays
  Coding DNA Sequence Number=SeqID_23903
  Gene Ontology: Mol. function=monooxygenase activity; Cellular component=integral to membrane; Biological process=electron transport
  Homolog annotation: Hit_ID=Q6ZD79; Match level="QueryCoverage=74%, HitCoverage=71%, E-value=1e-102, Identity=54%"; Hit description =Putative cytochrome P450 71C4
  Pfam annotation: Domain name=p450; Domain location=52-471; Score =88.1; E_value=2.8e-23; Accession=PF00067.12; Description=Cytochrome P450
  Subcellular localization annotation: CTP_CleavageSite=42; ConfidenceScore=5.16e-01
MAYHLISSPTFLLAQLLAVAVPLLLLLLYHGSSIRRRRRSSRSAKQGGQLLPPSPPALPIIGHLHLVSDLPHVSLRDLAAKHGGDDGLMLLRLGAVPTLVVSSPRAAEAITRTHDHVFASRPTSTLSDEILYGSSDIAFSPYGEHWRQARKLVTAHLFTVKRVHSYRCARKEEVRLVVAKVREAAVAGTATDMSLAMNTFANDIISRAVSGKFFRAEGRNKLFRELVEANSDLFGGFNLEDYFPGLARALGFLSRRLLFLRNRRRVQETHRRWDELLETILSDHEGRRGSVSVDGGGDFTDVLLSVQTEYGMTRDHLKAILVDMFGAGTDTSSLVLELAMAELMRNPQQMAKLQAQVRRHTPEGQETVEEENLSDMPFLRAVVKETLRLHPPAPAPRPSPVPGGLRRRWLPRPLRHPGHHQRVGSWQRPGLVGEARGVPAGELPMGMEEKDIDMTEVFGLTVHPKEKLMLVPKVARVLQLLVNNSIVQVADRRDSRSIMHVYGLFGVENCMQRV

SEQ ID NO: 65683 - protein, 43 aa, Zea mays
  Coding DNA Sequence Number=SeqID_23904
MGDDAASALGRALEEVNTLVTLCMLMVRWKRAELRHRAHDKQD

SEQ ID NO: 65684 - protein, 364 aa, Zea mays
  Coding DNA Sequence Number=SeqID_23905
  Pfam annotation: Domain name=DUF295; Domain location=274-318; Score =10.4; E_value=0.044; Accession=PF03478.8; Description=Protein of unknown function (DUF295)
  Pfam annotation: Domain name=F-box; Domain location=6-54; Score=32.7; E_value=1.3e-06; Accession=PF00646.23; Description=F-box domain
  Pfam module annotation: Pfam domain module=DUF295::F-box; Domain location=274-318::6-54
MAAAAAGWADLPLDMLDEVIARLPIPGDRARLAAVCRAWRSAAREVVSHLPWIVLPYGTACTAGHGAACSAFRIPGFPDDTTCLGAAYDCWLALDRTDDVVRRTPFRDTGRFVRGEWEEVVYSRPDVNHKHVYALHNPFSNVTVPLPGPGRRHWPCRRDLPEEVLVDYTSNEEDDYYYTDEEEDPEDINEEEAADDEPADQQALEDSFNGDEMVSDNEVLGAKDKDLLLTGRYLVQSLSGELLLVRHHRRACPHCLGRTCNLEVFKADFSAGKWVAAGLAKDEAIFLSRSHSKCARARRGIRQGFVYYTTRINDVFDTTSSTVRAITVGWDTAMRSGEIGMIFPPEPVVDRDMLGKGWYTSAEL

SEQ ID NO: 65685 - protein, 334 aa, Zea mays
  Coding DNA Sequence Number=SeqID_23906
  Homolog annotation: Hit_ID=Q8LGD5; Match level="QueryCoverage=19%, HitCoverage=31%, E-value=1e-07, Identity=50%"; Hit description =Protein MKS1
  Pfam annotation: Domain name=VQ; Domain location=66-96; Score=43.0; E_ value=1e-09; Accession=PF05678.4; Description=VQ motif
  Subcellular localization annotation: CTP_CleavageSite=6; ConfidenceScore=5.27e-01
MEQQPQASSSATTTSPSSSSQRRELQGPRPAPLRLHKDSHKIKKPGPPQPQHVGPVQQVRQPVIVYTVSPKVVHAKPSEFMSVVQRLTGARGHGATATSSSSSSLPAPPPPDLRTAEPHHQVQMTTSSSAPFPFPFLGGQHVHASSSGQLLAPVAPHFPFQQQQQQAPRGGTASQSQHDDLMIHQLSPAARFAAIEQAAASARSSSGVTATANVVGGGLLAPFPSILSPGSLPPRFFSPPAPGGNSYWPGISLLGGLISPAFLGLGSETIVGGGSTSVASATHQSVMSSSPFQQEEEASPSTVTVAPSPSAENACRRSSPLPSGPGDWTGSPFP

SEQ ID NO: 65686 - protein, 112 aa, Zea mays
  Coding DNA Sequence Number=SeqID_23907
  Gene Ontology: Mol. function=receptor activity; Cellular component =integral to membrane; Biological process=red or far red light signaling pathway
  Homolog annotation: Hit_ID=Q6K991; Match level="QueryCoverage=84%, HitCoverage=11%, E-value=4e-42, Identity=81%"; Hit description =Putative phosphate transporter
MPFMQVLMADFFMADQLTSQIPLLRHLKFTGCYFMAETFRTHAYGSCTSSSQYKNLAYVLSFLPYYWRAMQCLRRYLEEGHDMNQLANTGKYVSAMVFKPESVPWHGKPWEL

SEQ ID NO: 65687 - protein, 101 aa, Zea mays
  Coding DNA Sequence Number=SeqID_23908
  Subcellular localization annotation: CTP_CleavageSite=88; ConfidenceScore=5.02e-01
MELSLPQAEPPPPSFSLAPHIRALLLGLPRRNLASVNATAPEPAQHPVKNPCPRAQQHHRSPSCLVGVRPHRSPSMEPHRNSCPPSKRIARVTPFVVDAIA

SEQ ID NO: 65688 - protein, 424 aa, Zea mays
  Coding DNA Sequence Number=SeqID_23909
  Gene Ontology: Mol. function=binding; Cellular component =intracellular; Biological process=nuclear mRNA splicing, via spliceosome
  Homolog annotation: Hit_ID=Q8W3F7; Match level="QueryCoverage=91%, HitCoverage=65%, E-value=1e-132, Identity=63%"; Hit description =Putative pre-mRNA splicing factor
  Pfam annotation: Domain name=PMC2NT; Domain location=152-232; Score= -12.4; E_value=0.047; Accession=PF08066.2; Description=PMC2NT (NUC016) domain
  Pfam annotation: Domain name=PRP1_N; Domain location=33-196; Score =319.4; E_value=6.4e-93; Accession=PF06424.3; Description=PRP1 splicing factor, N-terminal
  Pfam module annotation: Pfam domain module=PMC2NT::PRP1_N; Domain location=152-232::33-196
  Subcellular localization annotation: CTP_CleavageSite=67; ConfidenceScore=5.53e-01
MSGTTPTPTPTPPPLPPPPAARPVRYDFLNSKPPANYVAGLGRGATGFTTRSDIGPARAAPDLPDRSAAAAGPAVGRGRGKPPGEDDGDDDGGDEEKGYDENQKFDEFEGNDAGLFSNADYDDDDREADAVWESIDQRMDSRRKDRREARLKQEIEKYRASNPKITEQFADLKRKLADLSAQEWESIPEIGDYSLRNKKKRFESFVPVPDTLLEKARQEQEHVTALDPKSRAAGGTETPWAQTPVTDLTAVGEGRGTVLSLKLDRLSDSVSGLTVVDPKGYLTDLKSMKITSDAEISDIKKARLLLKLETYDQARKVLNKAREKLPKEPAIWITAAKLEEANGNTQSVNKEAYAAIPNSEEIWLAAFKLEFENNEPERARMLLAKARERGGTERVWMKSAIVERELGNVGEERRLLEEDGRPAW

SEQ ID NO: 65689 - protein, 398 aa, Zea mays
  Coding DNA Sequence Number=SeqID_23910
  Gene Ontology: Mol. function=hydrolase activity; Cellular component =extracellular space; Biological process=biological_process
  Homolog annotation: Hit_ID=Q84V55; Match level="QueryCoverage=91%, HitCoverage=93%, E-value=1e-180, Identity=86%"; Hit description =Secretory acid phosphatase
  Pfam annotation: Domain name=Metallophos; Domain location=95-292; Score=79.4; E_value=1.1e-20; Accession=PF00149.18; Description =Calcineurin-like phosphoesterase
MGPLPLRRRVGVLLFLALVLLGGGGGADAGTTSSYRRKLEATVEMPLDADVFRVPPGYNAPQQHATKYYYAMGFGHTVRTFWFTTPPKPGPDVPFKFGLIGDLGQTFDSNITLSHYESNGGDAVLYVGDLSYADNHPLHDNNRWDTWARFVERSVAYQPWVWTAGNHELDFAPELGETTPFKPFAHRYPTPYRAAGSTEPFWYSVKVASAHVVVLASYSAYGKYTPQWAWLQAELARVDRKTTPWLVVLTHSPWYNSNNYHYMEGETMRVQFERWLVDAKVDLVLAGHVHSYERSHRVSNVAYDIVNGKSTPVRSADAPVYVTIGDGGNIEGIADNFTRPQPGYSAFREASFGHATLDIKNRTHAYYSWHRNHDGAKVVADGVWFTNRYWMPTDDDTN

SEQ ID NO: 65690 - protein, 94 aa, Zea mays
  Coding DNA Sequence Number=SeqID_23911
MAVMGSTSEKMYLCQTNTRKANTQWEWRGGESSMYPPWQEAGRWCICALGWRESSLVLRNPVVRKQQTFAVFALRWCPKKNLNSEAAGGCWPPT

SEQ ID NO: 65691 - protein, 33 aa, Zea mays
  Coding DNA Sequence Number=SeqID_23912
MAWWRPEMKKVTGGSVAAFIGAAVLRCSTSLLY

SEQ ID NO: 65692 - protein, 131 aa, Zea mays
  Coding DNA Sequence Number=SeqID_23913
MASAWRGGFGTVTLSAQWGTSTNVTTNDDCAQLPKSRSFNEGDEGELGVAAAAAVAEEPPPSPDTVQASPGDLQPRPDAPARAQPRLDRQLHRRPSDTGAAPTPPAAAGASAPVPDATGARPDPTGVRFTG

SEQ ID NO: 65693 - protein, 100 aa, Zea mays
  Coding DNA Sequence Number=SeqID_23914
  Gene Ontology: Mol. function=DNA binding; Biological process=DNA integration
  Homolog annotation: Hit_ID=O24587; Match level="QueryCoverage=93%, HitCoverage=10%, E-value=8e-32, Identity=64%"; Hit description=Pol
GNQGKVKGLGKIAITNEHPISNVGSTHHSKNVMTTSRPLELLHMDLFGPVSYLSIGGSKYGLDKSETQGTLKRFLRRAQNEFELKVKKIRSDNRSEFKNL

SEQ ID NO: 65694 - protein, 354 aa, Zea mays
  Coding DNA Sequence Number=SeqID_23915
  Gene Ontology: Mol. function=kinase activity; Cellular component =intracellular; Biological process=transport
  Homolog annotation: Hit_ID=Q2QPW1; Match level="QueryCoverage=84%, HitCoverage=79%, E-value=1e-139, Identity=81%"; Hit description =Guanylate kinase, putative, expressed
  Pfam annotation: Domain name=Guanylate_kin; Domain location=160-264; Score=170.3; E_value=4.9e-48; Accession=PF00625.11; Description =Guanylate kinase
MGEEAVHFSVVDAKDCKQSAFEVGDKTYVICRSDDDLKTSAVKIHDKLTQTWLSPTILGEQPLLTKSQSVIPVSDEKILVIEKGVPLNESIWFLEIDTPFVKQQRKIKETEVVSWSKGVIGVGQKPVVISGPSGVGKGTLIAKLMKDYPSKFGFSVSHTTRSPREKEIDGVHYHFTERIKIEKDISEGKFLEFAHVHGNVYGTSIEAVESVTDEGKRCILDIDVQGARSVRASSLEAIFIFVCPPSFEELEKRLRARGTETEEQIQKRLRNAQAELDQSNEPGLFHHLLVNDDLETCYENLKKLLSLDDDQEDSDDFCWHLICRLSQAVRLDEQGALRLAQLTPFDKGLYWRFR

SEQ ID NO: 65695 - protein, 301 aa, Zea mays
  Coding DNA Sequence Number=SeqID_23916
  Homolog annotation: Hit_ID=Q6QP54; Match level="QueryCoverage=18%, HitCoverage=20%, E-value=2e-08, Identity=66%"; Hit description =Putative kinase
  Subcellular localization annotation: CTP_CleavageSite=61; ConfidenceScore=5.79e-01
LGLGLSPGKTANSAPPDPRARTRAKTRKTANSAPPDPRARTRAKTRKTANSAPPDPRARTRAKTRKTANSAPPDPRARTRAKTRKTTKLRLARPQGSDSALASAERLPPRPTPRLGLGHGNRRQTQPRLRRNPHVALLGAQTATSTGGAIIVLPRIDSGRRRQGLDSSNSCPSTRLRRTSDSHDITPARCQDLSGCHIGMAFLEEVGRAGPRMGQALSWGRSLPSPAWTLVTPLLQAHPTWARDEHEGRGTSTSLTLDSDHLASPPFALAHALDPSGLGHAAHSLVGFGTPLSRNADSWRA

SEQ ID NO: 65696 - protein, 126 aa, Zea mays
  Coding DNA Sequence Number=SeqID_23917
MTTTISPSYEGHAYSCFPGHKRDTQTSTVVPLTIRDGDKTTAITPTPSAVNLDLLATTPTSKRVDFEEEDDMDPGLDFSWLHKPDSMRHFLSTSGYYLSNGSNDYSSDDKGYDPTRECFHAKHEEH

SEQ ID NO: 65697 - protein, 515 aa, Zea mays
  Coding DNA Sequence Number=SeqID_23918
  Homolog annotation: Hit_ID=Q6Z705; Match level="QueryCoverage=71%, HitCoverage=86%, E-value=1e-113, Identity=58%"; Hit description =Putative membrane related protein CP5
MYMFYKCPYGQGDKLSSHARRARITTRDVSARAARKICVGEGAGAAHGVGGRPGRWRSSRGPCGRRPSSACCSAGPGARAGQPALVVAHRGTTAAAPTTAAAAAQPPFATLDFWKAQLPARLRAPLGTAVQQREGDKDAVQRNRGTVALGRSSETETATAREEPVAVAVGMADLVNLWRLVEGADGGPAWTKMMEKSLPTMTYRAWRRDAQTGPPQYQSSSIFENASPEEVRDFFGDDEFRMSNRWDDMLIYHKTLEECRTTGTMKVHWVRKFPFFCSDREYIIARRIWKLGGAYYCVTKGIPCSSIPRRSRPRRVDLYYSSWCIRAVESRRGNGGGRGATACEVLLFHHEDMGIPYEIAKLGIRQGMWGCVKRIEPGLRAYQQARAAGAPPSRSALMARINTKVSADGFARRSMESLSSSSGGDGPETADDAQETENKKPATRSHAAARLLVLGGAVALACCTLDQGLLTKALIFGVARSTAQPNGDRMLGADNYELPGVLRARRVLISDTTKL

SEQ ID NO: 65698 - protein, 124 aa, Zea mays
  Coding DNA Sequence Number=SeqID_23919
MMSSRNSSCLSQDEYMVLFPHSDHCFNHPECDYKQCLILASALEEIFASPKLALGQLPNMEACALNATYSPTNPAEDPCRALLQPLRLDTWKCLRLRHTPMLPNLASTLYLVKGMGYMDWAALS

SEQ ID NO: 65699 - protein, 931 aa, Zea mays
  Coding DNA Sequence Number=SeqID_23920
  Gene Ontology: Mol. function=metal ion binding
  Homolog annotation: Hit_ID=Q54EK0; Match level="QueryCoverage=75%, HitCoverage=38%, E-value=6e-21, Identity=21%"; Hit description =Hypothetical protein vacA2
MASQHAPPRRELDLDAFLPSSPTSSGASDADPADDDHRRAVDDLLRLLSSSDSDSDSEESSRIPSTSIQTLSRVQAPAPVAEPSPSPSPSASPSPRRSASALPSETLSSLVARTFSSNGASSSSKPLPSLFRGVRPSPKPGAALAAAAAASRAVLTPHAAAIKSRRSVSAPVEKVLEEEGSGSEGSKEFLPTGSLEAEVEEKGDSEAVADATKQTAGGNVGAELGEDKQAEVGGEENAEAIKLVEASPLDALAAEDSSGHEQGNDANLAETDQVGNQIEAVYEENEDDQTGGDNHVQSGQGMDLIAIALEESSDDEHEFERSDSILQEQVESGSLIDKVIEDRVEQLEASRKAENTEKKLKVSMKPLEWAEELEKRQASSGQHWEEGAAAQPMQLEGIGKGPPAIGYMQIEMDNPVTRVMSSPSFRSDHGSPQVLAVHRSYIAMGTSKGAVIVIPSKYSIHQADDTDAKMLFFWNQGEKTQSPVTAMCFNQQGDLLLVGYGDGHMTIWDVQKSAAAKVIYGEHTAPVVHACFIRQSKAITGDSKGRLFDGNTGIVLSACPLVMDESFGFSNSSAQGNQTTSSSGGLGSMMGGVVGGVVGVDSGWKFFNEGSSPMEDGVVVMFIMHQHALVVRLRTNIDHVDHIETFSRPDGAREGSIAYAAWKYTSYLNESSSMKERVSWLALAWDRQVQVAKFVKSKIFKHKEWKLDSSAVGVAWLDDQMLVVLNLRGQLCLFSKDGSELRRTTFVPDGLLFDDTILHHAHFFNRFGNPERHFNSSVAVRGATVYILGPSFLTVSRLLPWKERIEALKRAGDWMGALDMAMRLYDGQTQGVVDLPRTVDSIRDAIMPYLVELLLSYISYVFEYISIALPNHTGKGGESGVLIEADRSLLTQRDEQYARVGGVAVEYCVHIGRNDILFDTVFSKFAAAESG

SEQ ID NO: 65700 - protein, 86 aa, Zea mays
  Coding DNA Sequence Number=SeqID_23921
MASHASDSGYKCGHHMAREVFVVDLSSELVEKDIQIEQMGTCTHELEEQVEFRDNTIEVLENQLHDLQVKLDETNAHLEMHHQEMQ

SEQ ID NO: 65701 - protein, 236 aa, Zea mays
  Coding DNA Sequence Number=SeqID_23922
  Subcellular localization annotation: CTP_CleavageSite=38; ConfidenceScore=5.32e-01
ATIARGGARPRPPRPPLPEGGVRPPSYGTSPAALGPARASHSGAALARASSARAARPPARHPRRGGAAPRSAPRRGPHPTSLGAAALNPIPGGARPRPASPAALGTPLGPPRRGGARPRPPLEKPRPGPRRRSASPLAPSPAPASGPAPRLGRPWWPGALPRRGEPPPPARPPLADSTALAPARPPVPPSRPRPTVSPLARARGGDENDGFDYDYGAGEDEAVEGDFQEFQDYDEF

SEQ ID NO: 65702 - protein, 165 aa, Zea mays
  Coding DNA Sequence Number=SeqID_23923
MGSITLWAERGSWLVGKLCNLYRVLETGISVVLTIKAALRSSLIRVTLDTFMMMLNDDYPYATLVFPLGGSATWEAYACEHSNCKLASTLAATREVVELRNGATQQGAPDTSKASSGTFKSAEDMKNVPLDTANASRCVRIRAWLSDKQESALICFLRDNHNIFA

SEQ ID NO: 65703 - protein, 161 aa, Zea mays
  Coding DNA Sequence Number=SeqID_23924
  Homolog annotation: Hit_ID=Q6ZHC0; Match level="QueryCoverage=66%, HitCoverage=27%, E-value=2e-16, Identity=55%"; Hit description =Putative GAMM1 protein
MRLEDSTLRKIHCLCFRHYIFELAYRSALINCHIEHWKLHLFELEEELKTNPLTKYVLYQLHNESHKQDERSKNWRVQAVAVGPDRFESRKALSEKWRGMRDDGLSAETNISWLCVCPYEWLHWEQQDQRGSIGNHKSYSEMLIQPPSISYPCCHSLSRST

SEQ ID NO: 65704 - protein, 779 aa, Zea mays
  Coding DNA Sequence Number=SeqID_23925
  Gene Ontology: Cellular component=membrane
  Homolog annotation: Hit_ID=Q75LY2; Match level="QueryCoverage=82%, HitCoverage=86%, E-value=0.0, Identity=69%"; Hit description =Expressed protein
  Pfam annotation: Domain name=DUF221; Domain location=256-690; Score =507.7; E_value=1.3e-149; Accession=PF02714.6; Description=Domain of unknown function DUF221
MVEDVDVECSGKELEDATEGMVEVGEAMVEVEKAIVVEVRESIWICRKSWLFEDEPPMAEGCRKIFKQELLLVLYRVGIFQFFLFTIYKLMHFFVNSIRIFSLAAILCVFGVLPLNYFGQDMHHVRIPSASLETFTIGNVEERSRCYNHRLWVHCVVLYIISAVACILLYLEYKHIARLRLYHISRATSNPSHFTILVRGIPKSSTESFSRTVESFFTKYHASSYLSHQVVYKVGKVQKIVLLPSDYEQESEKSDVNESSSSLPDEECGAAFVFFKTRYAALVVAKILQTSNPMRWVTTLAPEPDDIYWSNLWLPYKQLWIRHIVTLMCSIVFMVVFLIPVTFIQGLTQLEQLQQRLPFLRGILKKKYMTQLITGYLPSVILQIFLYTVPPTMMFFSTLEGPISHSERKKSACCKVLYFTIWNVFFVNVLSGSAISQLNALSSPKDIPMQLAKAVPVQATFFTTYVLTSGWASLSSELMQLFGLTWNFLRRYLLRIKEDSDFLYSFPYHTEMPKVLLFGLLGFTCSVLAPLILPFLLLYFFLGYVVYRNQFLNVYCTKYDTGGQYWPIAHNTTIFSLILTQIICLGVFGLKESPVAAGFTVPLIIFTLLFNQYCRKRHLPLFKTFPAQNLIDMDKEDQQSDTTEDLHERLHSAYFQFPDTDEVPLERVRVSVGRDEDGSGSSGESSRKESAEDEHKSGLSHPTLDGLPVSRLRNAVDRPHTQIIDSAYRERKLKLPPRLEVEAKVSEEIWVDVDDVSEAGGAGYLLTCKTDAWRGGLVA

SEQ ID NO: 65705 - protein, 257 aa, Zea mays
  Coding DNA Sequence Number=SeqID_23926
  Homolog annotation: Hit_ID=Q10FB7; Match level="QueryCoverage=75%, HitCoverage=64%, E-value=2e-18, Identity=86%"; Hit description =Expressed protein
  Subcellular localization annotation: CTP_CleavageSite=43; ConfidenceScore=5.17e-01
AATAPDHHNPSSFPSGPDPIRSRGRVESLSAKPPSDAMCYQVRCGTCGKTTWAGCGRHVASVHAQISEGQHCACRDWPGVDPATAPAGVKKAASAADDAGKDSGTAASTPAQGGAAQTGHLSSKVNALTRVSIRFTAAPSPSIGFAGQKVTSSAGLGDIVHIDPDFFRYLRFDFESRGKLQLEGRSQREPSAMCYQVKCGSCGKSTWAGCGRHVASVHRQIPQGQHCACRDWPGVAPAGDKAAAAEGPSSTSVCTIL

SEQ ID NO: 65706 - protein, 82 aa, Zea mays
  Coding DNA Sequence Number=SeqID_23927
  Subcellular localization annotation: CTP_CleavageSite=69; ConfidenceScore=5.21e-01
MANWAYDMGKQADPSMGVCGPFKRWQLGFHCPHQPPLASRRASSTSRHAGLCAPAPGEPPRRASELPRRASSRAGLACSRAG

SEQ ID NO: 65707 - protein, 188 aa, Zea mays
  Coding DNA Sequence Number=SeqID_23928
MGKRNEKRKRKRVFLLAEPGGFLAHLGMSARAGAAGGPAGPTARETAGDGAVAWAHMPARGGGLTARSSNGGGRSTRARPPVRSCGGSPSWVQFCGGEAVARHGWGVGDHGGGVNLTGEGLRWPVRSAVEGARGGEVAGEAAECNRRWGEVPCDRDCVAELKHQVNSTESHSRGENKAHQSDGEMRWR

SEQ ID NO: 65708 - protein, 81 aa, Zea mays
  Coding DNA Sequence Number=SeqID_23929
MSNTEVWGAPQAGDCGIPYGYVVVAAPGRYRTICLTCPDYLAVYRTVHIYVSDHPRCAEQGVALGHLPAPVHSVGGRDGDL

SEQ ID NO: 65709 - protein, 55 aa, Zea mays
  Coding DNA Sequence Number=SeqID_23930
  Subcellular localization annotation: CTP_CleavageSite=43; ConfidenceScore=5.12e-01
MAAAQSSTDSLAPHLRRRPRRLVFDRRYGWMFCALTMARSLVSAAACSVIASLTS

SEQ ID NO: 65710 - protein, 170 aa, Zea mays
  Coding DNA Sequence Number=SeqID_23931
MDPRQAPKVRRSSLKAAIGDEAKVLRHEPKWTSIKSPIMVSNLDAENGTDGGTINNSRPLGRKAEKENLRARKREDNDYDPFIEEMKKIRESRVQTDNNRKARDDMFLELEKHKLELEKEMEKQKLDLERDQHDKKVMETDTSGMDDEAKQYFKLLKQEILARRFGSPQP

SEQ ID NO: 65711 - protein, 82 aa, Zea mays
  Coding DNA Sequence Number=SeqID_23932
  Homolog annotation: Hit_ID=Q6F2Y7; Match level="QueryCoverage=59%, HitCoverage=9%, E-value=1e-07, Identity=44%"; Hit description=Heat shock protein 101
MGLLYLIKEDRIVRFPHLFGQLPTLFTAGITSVIGGALMRWATECCSTNEAVGCCSLPRLALDLNTASATAFTTSVWLTTLW

SEQ ID NO: 65712 - protein, 1195 aa, Zea mays
  Coding DNA Sequence Number=SeqID_23933
  Homolog annotation: Hit_ID=Q1SXL0; Match level="QueryCoverage=10%, HitCoverage=80%, E-value=9e-39, Identity=70%"; Hit description =Surfeit locus 5
  Pfam annotation: Domain name=Extensin_2; Domain location=206-536; Score=-118.0; E_value=0.01; Accession=PF04554.4; Description =Extensin-like region
  Pfam annotation: Domain name=SURF5; Domain location=105-231; Score =177.4; E_value=3.5e-50; Accession=PF06179.3; Description=Surfeit locus protein 5
  Pfam module annotation: Pfam domain module=Extensin_2::SURF5; Domain location=206-536::105-231
  Subcellular localization annotation: CTP_CleavageSite=62; ConfidenceScore=5.64e-01
MDDQDRPAHQQPASNRGQSPAANGQRRPKGTRFSGGPSRWRGGAAQATQAPSSGDSLARMLDAANAQCHAGWRLFGAAAARSKRHPPAMSKAGGGPGSAPGPTAAAAAAAVQKQKSLLQKADADVSSLVDNFSSLINIARVNDPPVRNSQEAFQMEMRAARMVHSADSLLKLVSELKRTAIFSGLASLNENVDRRIEVLGQQAEGTERMLERIGQEAAASLKELEAHYYSSVVRGGQASGSGPAEKADIRLQRPSYSYTSSVKPAAVPSPVLHFASRAHWASSRRVLHFSSALHSHLSRSPTEPHLSSATPPRTDRVATDTPTLDSVALLPCPGPSSSRRVPSSSSLAIVEKKPPPFPGGGGGGVLFHLLDWHRRLARKRRLFSPRRLLPSSLRSSSSPRRPPCPPPPASPPPPPPPPRPSDAAAPGLVARLMGLESWPAPPRPQKQRKVEASRADGADSAVVLVLPKTRSRRPPAPAPAPAARSHHGADLPARSPRRTRLVHAAAAKLLDPGARAGSRASARLALAYACSSPQHRRDGHASALLQGSRMADDFLSRSDSLLLEERSARVHVQVQPPGLPAETDTAAVPRRHGHFSGNSNADAATSTSTIVLPRMDFGDGNRSKRGSDMDAKHNESGVRDEVVRTCARVRSSGAAVQTGDERSLRKRATPTRPEVSGSGITEPGGLAGSTRLVGRARESVSATRKVAHGGSGPIRELAGRIVGQGRMTRRDLNSQNGLSSTSRILSNGSAHKRGPGRKVGHDAAISSRDDRNAVAVASRSSTKPVARASSPRSNLSKGGSPSRLAHETTRTRVPAPEKGCVEASPCVMSTSEKDEFSRLLKAKINELGMSDRIECTPNDSPSGKLTVPVLQELISALATDMSTSISQCSNYSGASAPLRCNGNVDCINPAHCIFSNEQSPDFQKCYQGEQDVDSSATSLNNEPNQPSPTSVLEASFSNDTSLGSPVEKNEGKDFIVSIENKMEDLFNLESDIVDLAMSIDTRKTDAEEAHHGNDKLSCLQNFLAHDFNILESRLCSIREAISNAELLLGISLLHSTTSGLPLHPFIVETLENTMDMFSGGEYSDFTEDKKYQHTNFLFDCIIESLDSKFCNLGKCGYKAWLKLPHSLSKDLLKRQLLENISNWRESSGTALRQVSDKEVDQVTDRWDANLEAFDISIAIENDILEALVGEFAVDL

SEQ ID NO: 65713 - protein, 241 aa, Zea mays
  Coding DNA Sequence Number=SeqID_23934
MWHSAKKPRGRVPAVVSGTIIRGTLKTPNSQLVTPISVKLQRPDGLTEGQRRLRHSDYSATQQSESDRQSGLAKSATANSVPPDPRARTRAKTRKTANSAPPDPRARTRAKTRKTANSAPPDPRARTRAKTRKTANSAPPDPRARTRANTRKTANSAPPDPRARTRANTQKTANSAPPNPRARTRANTRKTTKLRLARPQGSDSALASAERLPPRPTPWLGLSPRQQKTDSASEEPPRHPA

SEQ ID NO: 65714 - protein, 159 aa, Zea mays
  Coding DNA Sequence Number=SeqID_23935
MKLLLSNPYGFNSSDDDGDTDVFSSDGEDDHRAAGHGSKRPGESAVETFFSSSRSFSSDSSEFYTNKKQHKKKTATKTKAKGMARRLNSVDGRHLLGTPTIRGADAICCPVTLAIAEANGRNVLNHFELHSWFGMKMMIQMTYMSMPQSSDLKRSLDRL

SEQ ID NO: 65715 - protein, 215 aa, Zea mays
  Coding DNA Sequence Number=SeqID_23936
  Homolog annotation: Hit_ID=Q8SA97; Match level="QueryCoverage=23%, HitCoverage=9%, E-value=8e-09, Identity=68%"; Hit description =Ornithine carbamoyltransferase
  Subcellular localization annotation: CTP_CleavageSite=28; ConfidenceScore=5.03e-01
MRSPYLKMDSVVQPLWTRALNRTQAGVRCRHVSKPSLVRTCPHTPLLRAQAETRCCHVAYCACLLILSKTIIRGTLKAPKSQLEDSAAYAAPTAEPLDRVRLTAAKSGLRRHRKLRFTRPQGSDLGSAPEDGELRSARPQGSDLGSAPKDGELRSARPQGSDSGSAPEDGELRSARPQGSDSGSAPEDGELRSARPQGSDLGSAPEDGELRLARP

SEQ ID NO: 65716 - protein, 154 aa, Zea mays
  Coding DNA Sequence Number=SeqID_23937
METIPIKIPPKWLFPPCLDSPVEALSPVTSAAVRRKKCAALVDIEVRRSARLREKAKGFKPCFGSKNNCSCCAESPAPPSLSHRTIKELGVDFCKVDPQKLSLNSLSASRSSSVAIQRPRSSSCSTNEPSSPSADRRDTSDMDDDAESHPSTGL

SEQ ID NO: 65717 - protein, 80 aa, Zea mays
  Coding DNA Sequence Number=SeqID_23938
MPFAGPISPPVSRATLFFLASTVYIGGRTADCNLADGEYVLVPEQGAAQEVAPDPAPESAPEDLLATALEGKPPVLCMTC

SEQ ID NO: 65718 - protein, 960 aa, Zea mays
  Coding DNA Sequence Number=SeqID_23939
  Gene Ontology: Mol. function=translation initiation factor activity; Cellular component=protein complex; Biological process=translation
  Homolog annotation: Hit_ID=Q9XHR2; Match level="QueryCoverage=89%, HitCoverage=98%, E-value=0.0, Identity=80%"; Hit description =Eukaryotic translation initiation factor 3 subunit 10
  Pfam annotation: Domain name=PCI; Domain location=366-504; Score =35.9; E_value=1.4e-07; Accession=PF01399.17; Description=PCI domain
  Subcellular localization annotation: CTP_CleavageSite=31; ConfidenceScore=5.05e-01
MTQVARDPNPPLALARSSESARRAAVVALTRGESESESESESTAVPVLSAFLKVRRLVGLPPTAGAFADLFAGEEVPSEPSLMATFAKPENALKRAEELIHVGQKQSALQALHDLITSKRYRSWQKPLEKIMMKYVELCVDLRKGRFAKDGLIQYRIVCQQVNVSSLEDVIKHFMQLSNEKAEQAKSQVEALEDALDVEDLEADKRPEDLMLSFVSGEKGKDRSDKEVVTPWFKFLWETYRTVLEILRNNSKLEALYAEAFRSVEDIHGLMTMVKKMPKPSILVVYYAKLTEIFWISDSHLYHAYAWLKLFNLQKSYNKNLSQKDLQLIASSVLLAALSVSPYDKKYGAFETENEKERNMRLSNLPSRPYLLSELASKGVLSCASQEVRDLYNLLEHEFLPLDLASKVQPLLLKISKIGGKLSSASSVPEVKLSQYISALEKLTTLRVLQQASCIFKSIKIDMLSRMIPFFDFSVVEKISVDAAKQNFVAIKVDHLSGVVQFGTVDIESDGLSDHLSVLADSLNKARIHICPPVKKPSKLGESLISLAAIVENEHKRLLARKSIIEKRKEELERQILEKEKEEEKKRMSSQKKTVDEERVRLLNEQRQREQDRIRREIEEKNKAEAKKMLEDLNKAGKKHVVVEGELTKEAIMELARNEQLKERHEMEKKLQKFAKTMDYLERAKRQEEAPLIEQAFQKRLEEEKILHEQEQLREIELSKQHHASDLQEKNRLSRMLEHKVNALQERIIQERAAEFGRLKKERDERMNRLISSRKHERETVRKLMFYLNLEEQRIEMLREEEEARKPEERRKREEAERKAKLDAIAEKQRLREIELEEKAKATREKLLKGSEAVRAPDSAPVAQPPRESAAAPAAAAAAAAPAPAPSKYIPKFKRGGDSSSIPSGSRDEDRWGSRGPLRQDGPPARLDAPSSRQDTDRWRGSRFPSNSTSSSSTWSRSRN

SEQ ID NO: 65719 - protein, 241 aa, Zea mays
  Coding DNA Sequence Number=SeqID_23940
  Gene Ontology: Mol. function=protein kinase activity; Cellular component=nucleus; Biological process=protein amino acid phosphorylation
  Homolog annotation: Hit_ID=Q94BM7; Match level="QueryCoverage=75%, HitCoverage=24%, E-value=4e-46, Identity=47%"; Hit description =Putative phytochrome A supressor spa1 protein
  Pfam annotation: Domain name=WD40; Domain location=137-175; Score =8.7; E_value=3.5; Accession=PF00400.22; Description=WD domain, G -beta repeat
  Pfam annotation: Domain name=WD40; Domain location=72-111; Score =28.5; E_value=2.3e-05; Accession=PF00400.22; Description=WD domain, G-beta repeat
  Pfam module annotation: Pfam domain module=WD40::WD40; Domain location=137-175::72-111
MAKWASAARATTMTIDRLDALNRIPNLPGFDRDREFFATAGVNKKIKVFEYNMIVNEHRDIHYPVVWDVTRSQVFVEMREHERRVWSVDFSIMDPTKLVSGSDDGSVKLRDMNQAILFLHLLYVSFLTNDNMVIELAGSIGTIKTRANVCFVQFQPDTARSIAIGSADHKIYCYDLRHIRAPYCTLVGHTKTGTVGYFTCFAHLVSSSKELGHADVQKSCQKFMTSGIYYIFFCSGLVWSA

SEQ ID NO: 65720 - protein, 177 aa, Zea mays
  Coding DNA Sequence Number=SeqID_23941
MGVPPASGIDRHAACQENGQVALNAKAAHCLPVEWTGRRLTVEWAGLIKCRGGTSFDRQRALSAINAGVAYPGGLTSGTARWLTSRAVGHVAATGLRLGGERKRMRTGPHQTGPGHVSAPDPLPWSCPRPVYVPSWDLGTPLWGDLFSIRRGPDPIPGVQPGHVGVRDQPWGSELYT

SEQ ID NO: 65721 - protein, 51 aa, Zea mays
  Coding DNA Sequence Number=SeqID_23942
MAPPGIRVPPRSSVSVLGRVTIAYRFGVCLIKSGPLNWDRADLIVGYPFAM

SEQ ID NO: 65722 - protein, 91 aa, Zea mays
  Coding DNA Sequence Number=SeqID_23943
  Subcellular localization annotation: CTP_CleavageSite=28; ConfidenceScore=5.46e-01
MACTTPPSPPQSNAINRMDRGEASNPCSLSSYSPLFCSTRKLRRPSPVPQLEAPPTPPQGIPTAGGDPDEDADGDSLGHSTELSEEQEPEG

SEQ ID NO: 65723 - protein, 117 aa, Zea mays
  Coding DNA Sequence Number=SeqID_23944
MDNIWQQYGVTNQAYGNVTYTPGIDLTLSLGNDLTQFQDHAVVHGPGPIIQNVRDSDRRNEGCNCHMTFNITIKVTIHSPKILGQITGGAGEEPNGKQALTRFQKIFALNTMSEYNV

SEQ ID NO: 65724 - protein, 229 aa, Zea mays
  Coding DNA Sequence Number=SeqID_23945
  Gene Ontology: Mol. function=carboxyl- and carbamoyltransferase activity; Cellular component=ornithine carbamoyltransferase complex; Biological process=amino acid metabolic process
  Homolog annotation: Hit_ID=Q8SA97; Match level="QueryCoverage=50%, HitCoverage=23%, E-value=6e-12, Identity=40%"; Hit description =Ornithine carbamoyltransferase
MALPVDVAGLRPRLGDVEAPPKPRSSLSSMAEAEPEPLGRARRSPSPSPGSGGAEFAVFRGLARVRALGRAERSFLWPVSGAAKCRRSLRLYRGACVRIKLYADGGYQLRIRSLEGASAPSTRALACSTRALLIALSCLLCSPLRALNLAAWLPARRSPLTCSAATYQQAWTVLIVMQGGSVQDKGKEPCTGESSSVAACEWVVTTNGTRKQLQGSLDDPWSHGEKWKK

SEQ ID NO: 65725 - protein, 281 aa, Zea mays
  Coding DNA Sequence Number=SeqID_23946
  Gene Ontology: Mol. function=hydrolase activity; Cellular component =integral to membrane; Biological process=metabolic process
  Homolog annotation: Hit_ID=Q6PPF8; Match level="QueryCoverage=99%, HitCoverage=92%, E-value=1e-145, Identity=86%"; Hit description =Putative inosine-uridine preferring nucleoside hydrolase
  Pfam annotation: Domain name=IU_nuc_hydro; Domain location=1-278; Score=108.9; E_value=1.5e-29; Accession=PF01156.9; Description =Inosine-uridine preferring nucleoside hydrolase
MAILMAFRAHTLEIIGLTTIFGNVDTEGATCNALLLGGKPRIADFVHGSDGIGNLFLPAPSAKKVEESAADFMVNKVSEFPGEVSVLALGPLTNVALAIKRDPSFASKVNKIVVLGGAFFVAGNVNPAAEANILGDPEAADIVFTSGADVIVVGINITTQVCLTDEGLLELRNSKGKHAPFLSETCKFYRDWHVKSDGFHGIFLHDPVSFTAVLHPEYFTFKKGVVRVETQGICTGHTLMDQGLKKWNSENPWSGYKPISVAWTVDVPKVIGFVKKLLMAP

SEQ ID NO: 65726 - protein, 84 aa, Zea mays
  Coding DNA Sequence Number=SeqID_23947
MDRRQENDEGGAPSGSGYLPQGIPAAGRGNRAHYNSGYLRQGKGNAMDRNRGSGHGQFGRTLRGCGELAWLSSGERELTMTEQD

SEQ ID NO: 65727 - protein, 90 aa, Zea mays
  Coding DNA Sequence Number=SeqID_23948
MATISVFLSTQPHLFTKAEDPLDTDAFNDLCQYAGYHADSDKKKRDHFRRGLNTKLQKKRKAPMSGPSAPPQTEDGLSGHLSSSKHPTVF

SEQ ID NO: 65728 - protein, 237 aa, Zea mays
  Coding DNA Sequence Number=SeqID_23949
  Gene Ontology: Biological process=regulation of transcription
  Homolog annotation: Hit_ID=Q8S4P3; Match level="QueryCoverage=74%, HitCoverage=40%, E-value=2e-71, Identity=73%"; Hit description =Enhancer of polycomb-like protein
REETKREAMECQHEAQLVEDRTTLSGFQQTNSRFESSDDDYANSDDTTTEQPYIRPAVFHPRFPANKLSVIPPLRIKRERELKRRTQQNGWAFKRDHEEPVFLFTRPLDPEKLIAAGIKPPPDPPIENGATSPPFRCRGRIGRGGRIIFDRWNPLLQTPIDQETSYYVPYGHKPPSPEAPEQLALGEPICDYLSCEFSGSDGKARRLLDKQQPQWKIESVLWGKEAQAIGIAAVQYV

SEQ ID NO: 65729 - protein, 221 aa, Zea mays
  Coding DNA Sequence Number=SeqID_23950
MVNSPAGSLLVAGAHAMLCASSAEDGATFATAAQRKHGRTHREAAAAIHGWLSAHGGSRKLQVVPRARPATTSTGTRCGRRTCAVAFVGVVDCSQEVRRLPCSCDGYIGGCTCTANAWGYAPSRCSRRLWPCAVIAYDGWRSTARLRQCFLAAGSVSDGQDRSLASRSGRRIWCIDPWMNDAGEEMVPSPLILESRAGIRSRGTFRNGWRGPLDPRWRAGI

SEQ ID NO: 65730 - protein, 283 aa, Zea mays
  Coding DNA Sequence Number=SeqID_23951
  Gene Ontology: Mol. function=adenyl-nucleotide exchange factor activity; Cellular component=mitochondrion; Biological process =protein folding
  Homolog annotation: Hit_ID=Q5DPX8; Match level="QueryCoverage=79%, HitCoverage=75%, E-value=1e-117, Identity=95%"; Hit description=GrpE2
  Pfam annotation: Domain name=GrpE; Domain location=65-262; Score =213.2; E_value=6e-61; Accession=PF01025.9; Description=GrpE
MEIKSISEQCKGLRKAGREGYNFGRQEVPNILNHHFRYSTSIFQKIGFSSVSPQQSDDEVNELKDHERALDGSSEDCPSGSIEGLDLSRDDLVKLVREKDELLKSKDGEIKDMKDKVLRSYAEMENIIARTKRESENSKKYAVQNFSKSLLDVADNLARASSVVKESFSKIDTSKDSAGAVPLLKTLLEGVDMTEKQLAEVFKKFGVEKFDPLNEEFDPNRHCAVFQIPDPSKPPGTVASVVKVGYMLHDRVLRPAEVGVTATEGGAHATEEAEKPEEKTARD

SEQ ID NO: 65731 - protein, 223 aa, Zea mays
  Coding DNA Sequence Number=SeqID_23952
  Homolog annotation: Hit_ID=Q8S4P3; Match level="QueryCoverage=21%, HitCoverage=10%, E-value=6e-15, Identity=82%"; Hit description =Enhancer of polycomb-like protein
MAKTYSSTFAETTLFKECSSFGRLFSRPYLFGTKKLVLISTRTHAGQGKGVAGARKAKRPTPDKRGGSVPIITVPTPCHHDSSADVGLNFWLDETPKKAAYVWLAKCRLSERASRRLQFCAQQELVVVFCLFWHCTLVHFGLFSSLSLMMRSSPARSRKKPPPPVNDTNPYNVFRPREKAHRLHTRRMQRRENSIQSFEKLRLREHIRKALILFLNAENVLTN

SEQ ID NO: 65732 - protein, 217 aa, Zea mays
  Coding DNA Sequence Number=SeqID_23953
  Gene Ontology: Biological process=regulation of transcription
  Homolog annotation: Hit_ID=Q8S4P3; Match level="QueryCoverage=62%, HitCoverage=29%, E-value=3e-54, Identity=79%"; Hit description =Enhancer of polycomb-like protein
MDAQESSSCCLGVWEDNEMCSALQVCKCVYELLLPTASPHCSASYLATSAPPRARPSHSALADLGFLPGRSCSFVHCLWASRPRPLDIHKKLPILKSVREFEDEEPGVAPLSSARAGVLLRHSGTELPASGANKTTEGEGSQAPSKKNAQEIPTPQFDAVDTYERDYTRTFAQPTSYIRGRGARAEIGEFVEYDLDNEDEEWLEEFNNERKNINPEK

SEQ ID NO: 65733 - protein, 586 aa, Zea mays
  Coding DNA Sequence Number=SeqID_23954
  Gene Ontology: Mol. function=nucleic acid binding
  Homolog annotation: Hit_ID=Q2RBQ6; Match level="QueryCoverage=92%, HitCoverage=48%, E-value=1e-121, Identity=46%"; Hit description =Expressed protein
  Subcellular localization annotation: CTP_CleavageSite=78; ConfidenceScore=5.88e-01
NTTNQPRPSPPNSSSGRSTLPPAASWGQRDVNARTTATGVTSSQSHTKPKSESQSNPFSSSSVISSTKTPSSWNDDTSTAAKMSEGQQVSEKESKTLQLYKPGISMATQATSSLELSLNIDFSTIPSAWNDDEIVVSDGMSKGSDENQVANENGELTHPASKPLVLSKKDITMKSTSTSKSPPNIVSSLAISKSDVNTSDGDHSLTNISLTSNAVVCQSNHVAGAKILEDIRSRDTDMEKLSVHISSVKLGGNDEIQIMAGNQRPDVMPCTSVDAPMNQNFDRDQSHLNLNEPLLPSENKDTVLSCQYSSDKRLDWSSEMQNGSVTPSNNIVDSTMLTESNTAATIDTTISHMQTEFSSINNMYALLNGGQDGLGTVNTHGNVSEQHPGMGNHQCRAMGSVRTEAMGSVRTDSIGSFEKTISINKDESRIISDMLSSEFNPWDDSYSTANNFVRMLRESENNDVHFAVPSWKSGTGNKESRFSFARQDNQGNLLDSSLRNCGTGTEQNFSLLPQNSRGNIYQNGLAFQSLENDFSNSNSLGVLDMLTTGFMPKSLGASSEILSPCNHLSVQNRPQPSHSESPAELL

SEQ ID NO: 65734 - protein, 182 aa, Zea mays
  Coding DNA Sequence Number=SeqID_23955
  Gene Ontology: Mol. function=nucleic acid binding; Cellular component= cytosol; Biological process=regulation of transcription, DNA-dependent
  Homolog annotation: Hit_ID=Q2RBQ6; Match level="QueryCoverage=87%, HitCoverage=12%, E-value=9e-46, Identity=62%"; Hit description =Expressed protein
MAEKEETEGRCPACRTRYDKDRIVKMAATCDRYLKLTFYIDDGSRTVADKNAEKKQKAQRVKPKAAPTATTTSTVESKKHLATVRVIQRNLVYIIGLPAHLCNESVLERREYFGQYGKVLKVSVSRPTGPPSQQASANSSISVYVSLNYTVYMHDLFILHMNLDFYFQYWSISLMEYQITIY

SEQ ID NO: 65735 - protein, 141 aa, Zea mays
  Coding DNA Sequence Number=SeqID_23956
MPSPITPKVTEVVIAEPKVATDAEASFDVTKASSSKNDLITYAIREKEEDKVKSSKVEGLLEKRGLQAPEEAPLTTHEYIIHHASGGKLKEKWPHFFNVLVIKCLTHKTEQRRKEANCKTSLCAAEVPLGLAHRTVRWYTG

SEQ ID NO: 65736 - protein, 218 aa, Zea mays
  Coding DNA Sequence Number=SeqID_23957
MARTRMRMFCTATAWKPLWMSCEHGGGLLEEHGRVNREANVNRRLVVGVAMGRMPVGGSRVGGAFPGHALEGRPDAVDSGILLLGDGDGDGLGFGLFGPRQGGETGELEGILLILALGVVEERSIGAYHGRGTGGRLERRGSGLAAPSGCAPEGETRWRRLRGCAPEWGWRRLGGSSPGQRKGKGVGAAPRAARRREARWRLGQRAGGEIGQEMGLVS

SEQ ID NO: 65737 - protein, 67 aa, Zea mays
  Coding DNA Sequence Number=SeqID_23958
  Gene Ontology: Mol. function=peroxidase activity; Biological process =protein folding
MSTSEEVNLELLLLGHQRVVNIGAHPRMPFYVEFLWMDKVVWLLHLLTFALEPLPSHFEADRDTKFH

SEQ ID NO: 65738 - protein, 332 aa, Zea mays
  Coding DNA Sequence Number=SeqID_23959
  Gene Ontology: Mol. function=protein dimerization activity; Cellular component=nucleus; Biological process=regulation of transcription, DNA-dependent
  Homolog annotation: Hit_ID=Q6ER85; Match level="QueryCoverage=55%, HitCoverage=55%, E-value=3e-47, Identity=57%"; Hit description=BZIP protein-like
  Subcellular localization annotation: CTP_CleavageSite=101; ConfidenceScore=5.13e-01
MSQDYRPISFRRQLQGRCVCVHQPRLATLAFTVHPNHTRSFPFSSLPTHTPEPFHFVAPTAQPAPTFARFSWALSPIQPSSRFPSGDTFIGEPPCWLDDLLEDSGKAPKLPPLRRACSDSDAILDALSTFQSPIYPIEECDLNSGGEAEDLLGGVEGDESGSVVEASCFYGPNSPRQKSRLTTSESSMVNAVLENVPGNPLQYLTIDACSDVNGNVANVTADACDAFGHPDQDKSFKRADVNFGSCRQKRNMRLYIFAEIKLTNRASNLCNTDNFDLCHDQYQCQKLVASIGGAEAVMESFWKTKSPNLPGPKEAHGGAASAAVMGPPRGIR

SEQ ID NO: 65739 - protein, 50 aa, Zea mays
  Coding DNA Sequence Number=SeqID_23960
MELVIVEPSLPLVASPMGTETPAFYRRLLMNAVLGARQVPLTSRPAPKVE

SEQ ID NO: 65740 - protein, 111 aa, Zea mays
  Coding DNA Sequence Number=SeqID_23961
MAAAEAEKGELRWQLVAERRDASKAIADAQAAQADAKRARAEASLAHQRAKELEAWLGILLNHVDKAKASTRAEVEWTHAQLVDAYLELGVMPTIVMGLMSIDFLVTCNGP

SEQ ID NO: 65741 - protein, 96 aa, Zea mays
  Coding DNA Sequence Number=SeqID_23962
MTSPERSSILRGAEQGEGADTLGLRAEATWWRRQEKGIRGDAVNIIRQDNPNITEVRVLPPDGVPSPLQDGAIRVCIYNDIVNGQAVVVNPAPYIG

SEQ ID NO: 65742 - protein, 197 aa, Zea mays
  Coding DNA Sequence Number=SeqID_23963
  Homolog annotation: Hit_ID=Q6ZJ99; Match level="QueryCoverage=42%, HitCoverage=20%, E-value=3e-30, Identity=89%"; Hit description =Putative GTP-binding protein ERG
  Subcellular localization annotation: CTP_CleavageSite=45; ConfidenceScore=5.43e-01
MLPPDLLLSVIWRSGFAPPHLVAGLLTSTSPRRRRLLFAIAPLASCANDPTNLGSSLCPSIPTPDIKVHSFAGPNVALPMPQAQTAILLWLKQNLPQMLLLVTRRAQRRQVLAHKYHGWDKSGCSFPQDKYYDSRNFGGANKREHTDWLMLGHHGFPYRDVTVRVESASSSINLYDLLIVMLDVNRHLNLIASTLSG

SEQ ID NO: 65743 - protein, 76 aa, Zea mays
  Coding DNA Sequence Number=SeqID_23964
  Pfam annotation: Domain name=potato_inhibit; Domain location=8-76; Score=10.8; E_value=0.0013; Accession=PF00280.8; Description=Potato inhibitor I family
VVKLGITTQTWPDLVGYAVVDAVNIIRQDNPNITEVRVLPPDGVPSPLQDGAIRVCIYNDIVNGQAVVVNPAPYIG

SEQ ID NO: 65744 - protein, 97 aa, Zea mays
  Coding DNA Sequence Number=SeqID_23965
MMARLLLRWGHARAEPGLPQASHAGCHAGCTGRVVPGPSRQLPHKLSRGCAAGRLYRGLAGAVGQKPKPRESKMWERKTRTNHIGENRKGAARRAVG

SEQ ID NO: 65745 - protein, 110 aa, Zea mays
  Coding DNA Sequence Number=SeqID_23966
  Subcellular localization annotation: CTP_CleavageSite=60; ConfidenceScore=5.03e-01
MARRAWKAARGWQCAGAAALSLAAWGRRARLAGAGTARVAGGRRGGSAWADRVGATRGPAAGAAQCAARDLDCIALKTLKTVHAKMIFMLGNTSYDRFYEQTGTFEHHAH

SEQ ID NO: 65746 - protein, 166 aa, Zea mays
  Coding DNA Sequence Number=SeqID_23967
MGTPLADSLPSAVRQTLGNGNSFAECHLGHLAKTPSPSPGAMTAAFFCRVPEKKGLVLVALDELAGLSSMAVPRADRRLHRGGRPQPRKGRPWPWPMGLLGRAMGAAGAAHAGGARRGRSMATLRGRVRMELVQGVQLAGGARGLAIGTAGLDDAGLGRHFSQKRW

SEQ ID NO: 65747 - protein, 106 aa, Zea mays
  Coding DNA Sequence Number=SeqID_23968
MAGLLGVRVRARKRWFLGKVELTGLAHGEETRACAREKRATTLMDEACGAEREWGVRAREAGGDESALPGRGSQYAWARSGADRHGPPVRKGAGACWWGLGCFGLN

SEQ ID NO: 65748 - protein, 116 aa, Zea mays
  Coding DNA Sequence Number=SeqID_23969
  Subcellular localization annotation: CTP_CleavageSite=52; ConfidenceScore=5.60e-01
MSPPPSTLAVSRPRPASSPAHGFAPPHLVAGLLTSTSPRRRRLLFAIAPLASCANDPTNLGSSLCPSIPTPAIKVHSFAGPNVALSMPQAQTAILLWLKQNLPQMLLLVTRHLGFL

SEQ ID NO: 65749 - protein, 122 aa, Zea mays
  Coding DNA Sequence Number=SeqID_23970
  Subcellular localization annotation: CTP_CleavageSite=38; ConfidenceScore=5.65e-01
MIPAANPAPYAQAPRATPAGRSRTPGRPASTRNAAQPDCNAAPCLPRPAPATSLTPVEQRCPGATRTDPADRAKPGRRAARAPNADRARAVRPSTRAGPPLAPTPDAQHPTPSRSTRQDPSR

SEQ ID NO: 65750 - protein, 58 aa, Zea mays
  Coding DNA Sequence Number=SeqID_23971
MLRQGGRVLLLLPLASALLLLVQHLLLSTEYSGDNLGWGGLKSKGDYTSMYSANVSFG

SEQ ID NO: 65751 - protein, 441 aa, Zea mays
  Coding DNA Sequence Number=SeqID_23972
  Homolog annotation: Hit_ID=Q7XE06; Match level="QueryCoverage=42%, HitCoverage=27%, E-value=6e-71, Identity=64%"; Hit description=HAT family dimerisation domain containing protein
  Pfam annotation: Domain name=zf-BED; Domain location=257-302; Score =30.9; E_value=4.4e-06; Accession=PF02892.5; Description=BED zinc finger
  Subcellular localization annotation: CTP_CleavageSite=51; ConfidenceScore=5.16e-01
MAVWTAKKPSMGPWSPATNTTLGILHSRGTIENYFSQISKARRRTRHLSVYATSGAPLETQIIDHKTPSADPKSKSKDHRPTFAMLPYKRGLVSGTEGMLTVVEVPLALGISPPGVDELDDSGAAAKCDGRGLCSGGGPTPLATGSGGLDGARDGKSARGYGYPRVSYLMGTDTGFLFLFVMSTPGDSGSGAGPTSGGGRRDSRAPTPSSTPRDPTPTPSDGIAPTPTDGQGTGTTNTDAVEIDEDVRVGSKRKLKSDVWQDFERVCVGGTWKAKCNWCHKTLSAVCRNGTSHLRSHVNSCESRQTRKGLKQSTLKLSKTQDGNVLLEKYVFDQAVARKELALMICVHEYPLSIVEHVGFRRFCAALQPLFKVMSRNTIRKDILDMYQVQKVSMVHQFQQLGSRIAVTTDMWTANHQKKGYMAVTVHYIDESWNLKNYLLR

SEQ ID NO: 65752 - protein, 191 aa, Zea mays
  Coding DNA Sequence Number=SeqID_23973
  Gene Ontology: Cellular component=membrane
  Homolog annotation: Hit_ID=Q2R2Z4; Match level="QueryCoverage=80%, HitCoverage=44%, E-value=2e-61, Identity=80%"; Hit description =Uncharacterized protein family UPF0016 containing protein, expressed
  Pfam annotation: Domain name=UPF0016; Domain location=94-159; Score =51.7; E_value=2.5e-12; Accession=PF01169.9; Description =Uncharacterized protein family UPF0016
MAALSLMTIVSVIIGRIFQSVPAQFQTTLPIGEYSAVALLAFFGFKSIKDALALPDNANGNLQGNSESGELAEAEELVKEKVSKNLTSPLEVLWKSFSLVFFAEWGDRSMLATIALGAAQSPLGVASGAIAGHLIATAFAILGGAFLANYLSEKLSNSGYEESYSGHLANLASDPFVGQCIISCRLTKIPN

SEQ ID NO: 65753 - protein, 61 aa, Zea mays
  Coding DNA Sequence Number=SeqID_23974
  Gene Ontology: Cellular component=membrane
  Homolog annotation: Hit_ID=Q2R2Z4; Match level="QueryCoverage=87%, HitCoverage=26%, E-value=5e-15, Identity=85%"; Hit description =Uncharacterized protein family UPF0016 containing protein, expressed
  Pfam annotation: Domain name=UPF0016; Domain location=25-60; Score= -13.4; E_value=0.026; Accession=PF01169.9; Description=Uncharacterized protein family UPF0016
MENIWIPLLPETPTNFVAMLAKSGFTAAFTLIFVSEIGDKTFFIAALLAMQYQKSTDSASL

SEQ ID NO: 65754 - protein, 50 aa, Zea mays
  Coding DNA Sequence Number=SeqID_23975
MEVLTREETLTGAERKFVDCRRFGGPIDERSGKREGKQRTERVTPEFGGY

SEQ ID NO: 65755 - protein, 57 aa, Zea mays
  Coding DNA Sequence Number=SeqID_23976
MQMIGDGVVERLGEEAGGATKQQKPLDTYGVVVIAVVGMLLSPPSLGHPSLHILHTP

SEQ ID NO: 65756 - protein, 921 aa, Zea mays
  Coding DNA Sequence Number=SeqID_23977
  Gene Ontology: Mol. function=N-acetyltransferase activity; Biological process=metabolic process
  Homolog annotation: Hit_ID=Q5JJV7; Match level="QueryCoverage=77%, HitCoverage=78%, E-value=1e-154, Identity=46%"; Hit description=PHD finger transcription factor-like
  Pfam annotation: Domain name=Acetyltransf_1; Domain location=626-703; Score=13.5; E_value=0.069; Accession=PF00583.14; Description =Acetyltransferase (GNAT) family
  Pfam annotation: Domain name=PHD; Domain location=446-488; Score =42.4; E_value=1.5e-09; Accession=PF00628.19; Description=PHD-finger
  Pfam module annotation: Pfam domain module=Acetyltransf_1::PHD; Domain location=626-703::446-488
MAARSPGPGGEPGTNSLELLMHLAGWNNHPPWAQSYAGMSPRGQPLVLSPSATSPGWAPSSFAPGALAGTSGGSSSSFGGRGAVAVQSGAVARRYDLGPGSWSAGRGKPPNVSQLQITAAATAATGSCSTSKTKSSPLGGGNTEQERLTPVLAMPTTQGKVAAARIGRVRKRAPKNGIIDSSAAPSRNLRHRAANKQRTAKDAAAGVDESPAANARRVDNQPAGGPAKSAASADARNNDIQIVPSPPPARNGRKRKQNASAASSRCSSLATRRSGTDAVAPATKKHTILTWLIDGGFVSDGETVLYVPGGDGGAGAEKVVSGAVTRAGVHCSCCDGVVPLPVFEAHAGARRRDPGPGQRQPWEKLLLVSGNSLLRCMQEAWEMEKVRTFHAQAKVRAALEQEEDKCSQAKRRLLAKHLKKGVVVERIMSPRMEKIKAGEKDSSDDACGVCADGGELLCCDSCTSTFHPECLAIKVPEGSWSCHYCRCVLCMSNDDLQGLSTCQQCARKYHESCRPLPGNGCDIGTYCGETCKKLFSQLAQVTGVTNPTGDGFWWALLRIQKDEPASSEEMPAVLERNVKLAVALGVFNECFNPVKDRRTKIDMLHQAVYSLGSQFKRLSYEGFYTMVLEKDGEIVSAALLRIHGTQVAEMPFAGTLPAYRKQGMMRRLVSAVEQVLASVQVEKLVIPAIDSLVDTWKRSFFFRPVDPQLREELKRLSLVVITGTTLLHKPIVPLPPPRPPSPQQGMFIHSFSTGNIMSVNCEQQPLTLRPKQNSGESRGMVAQVRGPVGAPDRRRAGVPGDGRRHGAALPLHRPGHRQRVSAQVLSSRELVVGLRRCRVHRESERQRCTASGSGSICGAAGRLAFLPQGCERDGSPAQLRARRRAQRYTPWHEVTDPPPALGAGQGLLQLCGLWCNSALSL

SEQ ID NO: 65757 - protein, 205 aa, Zea mays
  Coding DNA Sequence Number=SeqID_23978
MDGPRWTEEVDDLVDAGDVDGAIALLESVVSDLSTSAAPPATDLRLATALGDPRGPARLPGRHPPSRRAPRPRHRPSVPRHGPWDWDPRLACAIELVDTAHRKLRSCIPPLILADWEAIADSGALDDTLVRSLEQGARVSSCSSPEKSSTPSSGPKRRGRGSFLYNKSVLYSDQCGSERELDNKQSKPQVGSKDHVNEPENNAVT

SEQ ID NO: 65758 - protein, 97 aa, Zea mays
  Coding DNA Sequence Number=SeqID_23979
MVLLAWLVLSLHRPVSGYSSSRRHTDGPQRARAHSRRQHHHRPYRPSKRGQVELVDGRALHFNAVTLARYGQTGHSAQSGPVSVKFGPFWARPVRYG

SEQ ID NO: 65759 - protein, 68 aa, Zea mays
  Coding DNA Sequence Number=SeqID_23980
MPTHTQPNNIDEAYGSSVIGSLRFVFSTRICSNEVSGGRLFIVGLVKEGINMEEEYLEIGISVILHYD

SEQ ID NO: 65760 - protein, 107 aa, Zea mays
  Coding DNA Sequence Number=SeqID_23981
MRQGEIQLDSLWPPPHDGNGILSYCVKADTRAITSNRVLRNRPFGPMGPDPFNRTTGLGTRSPLEDTFDVASCPRGQNAQGYYHESGPQPVVLGPPRLTLEPLVGGA

SEQ ID NO: 65761 - protein, 195 aa, Zea mays
  Coding DNA Sequence Number=SeqID_23982
MTQVGPWNPREREVCGLIKTGGEGRGGRGRALAKDVVDHYEEVVWVSPNPLQPPAATHTSRLQPTPASAAPGGSAFPPGGGLPPADHRAPPTPLPAGCCFLLDLGDQAAFLAPPAMAAPPSAPFFLLLSVAAASLAGAADPYCYFTWTVTYLVHMTTLSLAFPLLHLVASPPLACTLLHLVAPLPLVPPLHARAL

SEQ ID NO: 65762 - protein, 97 aa, Zea mays
  Coding DNA Sequence Number=SeqID_23983
MEGGYSPKVTAQKFPVTARCGIGAACDRRRGISCPQGRSNLRQCHGYFRHALTKLFYRRNWPECLWSLRSMAAAGFTRAVRGDAVVVAMQLGKNTEG

SEQ ID NO: 65763 - protein, 348 aa, Zea mays
  Coding DNA Sequence Number=SeqID_23984
  Gene Ontology: Mol. function=pectinesterase activity; Cellular component=cell wall; Biological process=cell wall modification
  Homolog annotation: Hit_ID=Q84WQ3; Match level="QueryCoverage=84%, HitCoverage=74%, E-value=1e-43, Identity=34%"; Hit description =Putative pectinesterase family protein
  Pfam annotation: Domain name=Pectinesterase; Domain location=53-340; Score=64.2; E_value=1.5e-26; Accession=PF01095.10; Description =Pectinesterase
MARPRLLLTFLLAAAAVLTTVPGVALAKSKLAKKSDDVVNGPLLTEKIQAKKTLIVGPDEEFKTVQSAIDAVPAGNAEGKVVIPENKPFIFVRGNGKGRTSISHESASSDNAESAAFTVNSDNVIVFGVSFRNSARVGLVNDPEIRSVAAMVAGDKVAFYHCAFYSPHHTLFDSAGRHYYESCYIQGNIDFIFGSGQSIFQCPEIFVRPDRRTEIRGSITAQVRQEEDSSGFVFLKGKVYGVGEVYLGRVTAPDSRVIFADTYLSKTIHPAGWTTIGYSGSTEYYSLHCIALHCIRCKVTLAEFNCTGPGADVTNRVPWSRRFSPDDAAKYLTIDFINGKDWLPAYYY

SEQ ID NO: 65764 - protein, 307 aa, Zea mays
  Coding DNA Sequence Number=SeqID_23985
  Subcellular localization annotation: CTP_CleavageSite=8; ConfidenceScore=5.03e-01
MAGRVLFRAAAFGLAAAGAGSLHAMSNWMPPSEISPFSRIVKLKPTLLESANVLLAALLRAHPLSSANLRDVRARAELDLARADMEIGHGGDPAAAVDLRLLLALLATRDGRAYDALRLYAEAARDAPFDPRPCALAANLSLMCGRDDVSAAGISAYTRLVSTLHQGWESDETRELIHELAVAATLGGVYKLRFADSRNFVMRVASRAVDKGLVAAQQDKALSATERLQFRLLRVFLDTKVRHVVKENLAVADIDEVDIATKTGNLVFLKGLIDRVTLETMVVNGGAGPNPKAPAVVGRSASKDGKL

SEQ ID NO: 65765 - protein, 119 aa, Zea mays
  Coding DNA Sequence Number=SeqID_23986
  Gene Ontology: Mol. function=cysteine-type peptidase activity; Biological process=proteolysis
MKFVDRPPANPKRITIESSQEFFSVEILPLASTGDPPNTKHDVHRPAPVERPSVIHETTDQTGTGDDDDDFMTPTKKCNATEISNKILQKTSTKRMKVMETSRQKLNVRCNPPGCYYNH

SEQ ID NO: 65766 - protein, 94 aa, Zea mays
  Coding DNA Sequence Number=SeqID_23987
MGDGSKEWEPVPRGSPEPVWPLSLVPYPKACTLHRSMTDPGLGEAASRELLTTLSDTLVSNLDTSSLHPRQGPSTRGSQQRNISYSRNERYTDK

SEQ ID NO: 65767 - protein, 285 aa, Zea mays
  Coding DNA Sequence Number=SeqID_23988
  Gene Ontology: Mol. function=1,3-beta-glucan synthase activity; Cellular component=1,3-beta-glucan synthase complex; Biological process=1,3-beta-glucan biosynthetic process
  Homolog annotation: Hit_ID=UPI000034F02F; Match level="QueryCoverage =97%, HitCoverage=13%, E-value=2e-64, Identity=49%"; Hit description =ATGSL11 (GLUCAN SYNTHASE-LIKE 11); 1,3-beta-glucan synthase/ transferase, transferring glycosyl
  Subcellular localization annotation: CTP_CleavageSite=30; ConfidenceScore=5.28e-01
MASAGAGPSGPVRSISQTGRSRTMGRMPTRAFTIRPDGSSGEDGVDIVEEELVPSSLAPIVPILRAANEIEEENPRVAYLCRFTAFEKAHHMDQNSSGRGVRQFKTYLLHRLEKDEHETKRSLATTDAREIQKFYAQYCRKYLEQDHDKRKPEEMARYYQIASVLYDVMKTVTPGKNEYDDYAKDIENEKASFSQYNILPLNISAREQPIMKIPEIKAAVKLLEQINGLPMPRIELPQSSDRKTVSDKMDRPVVKDLLDWLRQTFGFQRALGKQGKQRRKTPLTI

SEQ ID NO: 65768 - protein, 107 aa, Zea mays
  Coding DNA Sequence Number=SeqID_23989
MKVGDDDSIVHHWGIGRLQRYRGKEDQPMQHLEGVVKSVGQTGASPSAPRTPRLRPAAPRLTAARAPRLAAVTPRPTSLGQDLRCPHNQVVAEEEAVGGYWVAAEEV

SEQ ID NO: 65769 - protein, 210 aa, Zea mays
  Coding DNA Sequence Number=SeqID_23990
MWLRPRQKRRGIDGSSRESHDNDESSHEDDDPAKGRTDLAGKVATEGPAPGLTGRLDADNGRSLKEPHRALLGGRAVHREGSPPREGQRRGGRSGEGHLRRQWRAVELGCGSGVRALAHPSGSGVHARAPAAAMQRLVPARLLAAAEGREGERTTGAGRFGGTGNRDGGAAPEGDGGASRGRQGRSELCCRWRQSWVVRWRLVGWKETLI

SEQ ID NO: 65770 - protein, 70 aa, Zea mays
  Coding DNA Sequence Number=SeqID_23991
MKAVSADNNKSHLCRSNSTSPCKGSPHRPEQTNKIEVHHPSPQRAIHQPFHEGTVHTNSMETPFHTLFNP

SEQ ID NO: 65771 - protein, 68 aa, Zea mays
  Coding DNA Sequence Number=SeqID_23992
MADVMDDVTMMQDPISGIKKEEKLTWAVFLKWPNREYLNSPRYDFGVLHRRGLWGSGRPGSPVVGQDW

SEQ ID NO: 65772 - protein, 88 aa, Zea mays
  Coding DNA Sequence Number=SeqID_23993
MDLKSTLEIKGPSDLISAYISEINDYDFFIMMGYLRFNRERSSPGRRPGSFLPRMILFTPEWGCDILPAVSGPPTSGGCCGAMDEMSL

SEQ ID NO: 65773 - protein, 127 aa, Zea mays
  Coding DNA Sequence Number=SeqID_23994
  Gene Ontology: Mol. function=RNA-directed DNA polymerase activity; Cellular component=chromatin; Biological process=RNA-dependent DNA replication
  Homolog annotation: Hit_ID=UPI00004C1734; Match level="QueryCoverage =87%, HitCoverage=31%, E-value=2e-59, Identity=96%"; Hit description =UPI00004C1734 related cluster
MCVDYTGLNKACPKVPYPLPRIDQIVDSTAGCETLSFLDAYSGYHQIRMKESDQLATSFITPFGMYCYITMPFGLRNAGATYQRFMNHVFGEHNGRTVEAYVDDIVVKTRKASDLVSDHSSVSSRKA

SEQ ID NO: 65774 - protein, 85 aa, Zea mays
  Coding DNA Sequence Number=SeqID_23995
  Subcellular localization annotation: CTP_CleavageSite=69; ConfidenceScore=5.48e-01
MAHRTLSGAPGLYRLKPATLGNSASVLRYNSSDCPVCQRSNDSLRANGQLLRRTVVNSAAQKSEVTELSGAAKRQRAPTVNSSKP

SEQ ID NO: 65775 - protein, 93 aa, Zea mays
  Coding DNA Sequence Number=SeqID_23996
MAVVLDVRSTRVLPLGVASSASRVFRHGWFVASQRDKGGTVVKIYRSAHEDPHIRDPSEATRRNWLTRGPARQRASSARVEKAGGELGCALWE

SEQ ID NO: 65776 - protein, 98 aa, Zea mays
  Coding DNA Sequence Number=SeqID_23997
MAVVLDVRSTRVLPPGVASSASRVFRHGWFVASQRDKGGTVVKIYRSAHEDPHSRDPSEATRRNWLTRGPARQRASSARVEKVGGELGCALGVEVGRK

SEQ ID NO: 65777 - protein, 714 aa, Zea mays
  Coding DNA Sequence Number=SeqID_23998
  Gene Ontology: Mol. function=protein dimerization activity; Cellular component=nucleus; Biological process=regulation of transcription, DNA-dependent
  Homolog annotation: Hit_ID=Q1SYN6; Match level="QueryCoverage=90%, HitCoverage=89%, E-value=8e-87, Identity=30%"; Hit description=Zinc finger, BED-type predicted
  Pfam annotation: Domain name=VHP; Domain location=405-437; Score=5.0; E_value=0.029; Accession=PF02209.10; Description=Villin headpiece domain
  Pfam annotation: Domain name=hATC; Domain location=588-670; Score =124.3; E_value=3.5e-34; Accession=PF05699.5; Description=hAT family dimerisation domain
  Pfam annotation: Domain name=zf-BED; Domain location=69-116; Score =63.1; E_value=8.9e-16; Accession=PF02892.5; Description=BED zinc finger
  Pfam module annotation: Pfam domain module=VHP::hATC::zf-BED; Domain location=405-437::588-670::69-116
MASSSRSEEIEVVDAEANLEQQQDDKQQDGAVEPENLTEGASAQQHGNKRTRSVANSSTDQSQPNSRKSKVWKDFTIISREGESEVAECKHCKKKFAANTQNGTSSMLRHVKTKHPTTRAEMGNYFLKTEKDDDGSVALKNYKVDLPAVRTGITMFLLGGAHPFTVVEEHDFKNMLSLACPQYKHVGRHTIKRDVMDMFQKERKEVIDALTNSPGRVSFTSDNWKSDCQKFNYICITGHYIDDKWKLHKRIIWFKKLNPPLDGVSIADEVHMCFREWKVDSKIMCMTLDNASYNDRMIATLSSRLMSKGVLPLWGTFFQVRCCAHILNLVVQAGLKLIDMSIDKLRDGIQYIKASYNRMHAFYENAVKIFQLEPKRRLCVDMPIRWNSTYKMIETALYFHPVLEHLSERDSTFKSKFFPSRSEWAKLDAMKKFLKIFYDATCIFSGTKYPTSNLYFRSVFMVHSRLIEAANESENFMTPMVIEMKKKFDKYWTDYSTILSCAAVLDPRYKLEFISYCYNKLYGDDGQHRVDLLKQTLQSLFDGYRGSVVLSSADQGISKKTSASGESDMFLDYDIFLRSRRTIEEKSQLENYLAEPTRDINEKLDVLDYWNKASARYPEVASMARDILAIPVSSVASESAFSTSRKVITHTRSSLSSKTIEALMCLQDWYRERMDEGKCNHTQAHKEQTLPQLEMKRGLILNEMKLNRRSELMK

SEQ ID NO: 65778 - protein, 51 aa, Zea mays
  Coding DNA Sequence Number=SeqID_23999
MGRCGGGSGAGAGGGALGGCALLTAALVISTLVIQGAGGHTGKGKRQGSTF

SEQ ID NO: 65779 - protein, 366 aa, Zea mays
  Coding DNA Sequence Number=SeqID_24000
  Gene Ontology: Mol. function=nucleic acid binding
  Homolog annotation: Hit_ID=Q6Z1K3; Match level="QueryCoverage=67%, HitCoverage=52%, E-value=1e-14, Identity=27%"; Hit description=Zinc knuckle domain containing protein-like
  Subcellular localization annotation: CTP_CleavageSite=36; ConfidenceScore=5.38e-01
MEKGLLENPVPSGHSQRSLCNKKKRRRSKGGRGTLSSGKVVSHSLSAPEVIHEVSPPRLTSRVLAFSNDIARKELNLRRALLVTVTGTRPEVLGSEVLEEVAHCFSIKLEDMTIQSAKPEDFLLFFPNEETAMRVLNGGKVLRGPWFNLVFKRWSRFSHASSSIMSNLVEVEIIGIPVHAWCRSTAEFILGDSCIIEEVHLDTLLQKTLPSFVARAWCFQPKQLHRDMILHILEPGPQSYERRCLAYNISVRVLAICHDGLRGSLLLTPSEDGDQFDGSDDMDDQRNDEPRRLGSPLPHQRSVHLCLGPPPPSGHGRTSHTSRGHEQPLFDTPELQQMASDNGMILLNELPIEKPNSLLDEAPIDS

SEQ ID NO: 65780 - protein, 41 aa, Zea mays
  Coding DNA Sequence Number=SeqID_24001
METAIRKAEEGVMWEMAGDRIFSLMVPIPGTSYWLGYDMLV

SEQ ID NO: 65781 - protein, 359 aa, Zea mays
  Coding DNA Sequence Number=SeqID_24002
  Subcellular localization annotation: CTP_CleavageSite=53; ConfidenceScore=5.75e-01
MALVPNLSSPVGASPPHQPTSAPTPGPTITHITATSLSPPPPPASVLTPNRPSQAKSPTSRVERWIDGSLDPECLDSPPRRAVSHCSYRDAVIATPDVQPAEAVPKVADAPSVRTSHAQRESAGGLSVRLCGASQDVQTSGEKDGAWKVVESKRTKQQRLKMKQQRLRPAVHLPVGQRLAPEVAPVRSASNGDPSRPEAPARSEGGSNGQHLTTACRGDPSRPEEIASVWTRIKLPKNDMINVGGGSIHSRPEARDSVWRRISSTSVSTDQDTAPVVKARDKVWRRISPHQDVGVIPGSRTTVEVPSNVQELNCVQTKRHQGRRRRSRTMPSSGPLLSTASTKIIAQVGQTERPTSRPT

SEQ ID NO: 65782 - protein, 261 aa, Zea mays
  Coding DNA Sequence Number=SeqID_24003
  Gene Ontology: Mol. function=zinc ion binding; Cellular component =nucleus; Biological process=intracellular signaling cascade
  Homolog annotation: Hit_ID=Q6K431; Match level="QueryCoverage=88%, HitCoverage=22%, E-value=1e-126, Identity=88%"; Hit description =Trithorax-like
  Pfam annotation: Domain name=C1_1; Domain location=49-98; Score=-2.4; E_value=0.051; Accession=PF00130.12; Description=Phorbol estersdiacylglycerol binding
  Pfam annotation: Domain name=C1_3; Domain location=57-88; Score=7.3; E_value=0.071; Accession=PF07649.3; Description=C1-like domain
  Pfam annotation: Domain name=PHD; Domain location=170-207; Score=2.5; E_value=0.032; Accession=PF00628.19; Description=PHD-finger
  Pfam annotation: Domain name=PHD; Domain location=58-107; Score=37.5; E_value=4.5e-08; Accession=PF00628.19; Description=PHD-finger
  Pfam module annotation: Pfam domain module=C1_1::C1_3::PHD::PHD; Domain location=49-98::57-88::170-207::58-107
MVAIDKFSNWIEVQPLNNISCEQAELPNARSCLKYFENGGDTILGYRAVQVNWKDLDYCNVCDMDEEYEDNLFLQCDKCRMMVHARCYGELKQLDGGLWLCNLCRPGAPRVSPKCCLCPVTGGAMKPTTDGRWAHLACAIWIPETCLKDVKRMEPIDGLSRINKDRWKLVCSICGVSYGVCIQCSHPTCRVAYHPLCARAADLCIELENDDKIHHMYLDEDEDPCIRLLSYCKKHRQPSAAERPSLESDPPEPIQVRDQIR

SEQ ID NO: 65783 - protein, 288 aa, Zea mays
  Coding DNA Sequence Number=SeqID_24004
  Gene Ontology: Mol. function=RNA-directed DNA polymerase activity; Cellular component=mitochondrion; Biological process=RNA-dependent DNA replication
  Homolog annotation: Hit_ID=UPI00004C1731; Match level="QueryCoverage =86%, HitCoverage=21%, E-value=1e-93, Identity=62%"; Hit description =UPI00004C1731 related cluster
  Pfam annotation: Domain name=RnaseH; Domain location=1-123; Score= -18.5; E_value=0.003; Accession=PF00075.14; Description=RNase H
  Pfam annotation: Domain name=rve; Domain location=125-283; Score =34.0; E_value=5e-07; Accession=PF00665.16; Description=Integrase core domain
  Pfam module annotation: Pfam domain module=RnaseH::rve; Domain location=1-123::125-283
MFFDGSLMKTGASAGLLFISPLGKHLHYMLRLHFLASNNVAEYEALVNGLRIAIKLGVRCLDARGDSQLVIDQVMKNSHCRDPKMEAYCDEVRHLEDKFYRLELNHIARRYNETADELAKIASGRTTVPPDIFSRDLHQPSVKTDDTPEPDKKAPGGYTHLLVAIDKFSKWIEVRPLNNIRSEQAVAFFTNIIHRFGVPNSIITDNGTQFTCRKFLDFCEDHHIWVDWAAVAHPMTNGQVDPCDATTPEGFGLETSRWATWCFGYDKTPEGATSSRLPGKGRSSSPRF

SEQ ID NO: 65784 - protein, 146 aa, Zea mays
  Coding DNA Sequence Number=SeqID_24005
  Homolog annotation: Hit_ID=Q6YXW3; Match level="QueryCoverage=73%, HitCoverage=70%, E-value=2e-26, Identity=59%"; Hit description=Auxin- induced protein-like
  Pfam annotation: Domain name=Auxin_inducible; Domain location=15-110; Score=107.8; E_value=3.2e-29; Accession=PF02519.5; Description=Auxin responsive protein
MGEQGRPSSNRIRDIVRLRQLLKKWKQIALSPKAGKSGGGGGSHGVPKGFFTVCVGKEMERFVIPTEYLGHWAFEELLKEAEEEFGFQHEGALRIPCDVKAFEGILRLKSNIVLAHYFLSEVNTASEFSACVHITDASSSLNSSQR

SEQ ID NO: 65785 - protein, 97 aa, Zea mays
  Coding DNA Sequence Number=SeqID_24006
  Subcellular localization annotation: CTP_CleavageSite=66; ConfidenceScore=5.09e-01
MATARSTSRFIPLLALGARLRQRDARAQASTPKLSMLLLRGYFYRGVGKKIAPRSSVRNLGEQDSVASRESESQLGGRIRPRPGVPPAFQEPLRPEH

SEQ ID NO: 65786 - protein, 110 aa, Zea mays
  Coding DNA Sequence Number=SeqID_24007
  Subcellular localization annotation: CTP_CleavageSite=10; ConfidenceScore=5.22e-01
RPRLAGAAARAAMARLGARGGPAPAFPACDARPRPLRGLARPHSPGPGVASACARSPGAARARTEPPASSPHPRLTAVAARSRPHWRVPPLRSAAPARRGFGSRGRGAPA

SEQ ID NO: 65787 - protein, 70 aa, Zea mays
  Coding DNA Sequence Number=SeqID_24008
MERPPGKTVLPQGYNAQLQPSFLCINGWIFENTPPTTQWCKNIFAQEMILNSYMMREMIADNDRQWIQPL

SEQ ID NO: 65788 - protein, 426 aa, Zea mays
  Coding DNA Sequence Number=SeqID_24009
  Gene Ontology: Biological process=protein folding
  Homolog annotation: Hit_ID=Q9LI74; Match level="QueryCoverage=50%, HitCoverage=25%, E-value=2e-07, Identity=21%"; Hit description =Similarity to pherophorin
MEPKPTRGAQQKLARTESACSAAGRLLMSELARQASNAEEIMVVEAATEGPREAAAKKQVQDDQGIMEADEIASLKLTVSALEDRATAIEAQFHEYCDVKEQESAYQKMQIMCLGMKLELLESHNQRLEAAAAEIRAAAGEFAAMRGRLDRLQGKLKKVSKRSERGSDAVVGEKIAALDAKQAQMARRCEEFERAMGEMKQLTLQLVEQKGANNENVEVAVERSLRNLSSGRDLVDGLEALRDRWAAGMEEMIYLGWITAWLQHDLMLVDDDDGYGGAVLGPGSTTYGGGHGDDDEDVRDGVAPEEEEEEGEKKKKKKEKKKGDTMVASVPPSNQVELCKAESVSSSSGSGSAPRRSVEMEPPSAPCMGFAAAAAGGRGRDCGGGWSIGRPRLLRKLRGWAAGGGTKAGGSKTTRCRIAGPCCQKE

SEQ ID NO: 65789 - protein, 70 aa, Zea mays
  Coding DNA Sequence Number=SeqID_24010
MGVGCWLGLALYTMSSVLVFATWMVVGAVPCQDLASVATGAPPKQAQWAALISSIMPYNTPLAMFFGFPG

SEQ ID NO: 65790 - protein, 406 aa, Zea mays
  Coding DNA Sequence Number=SeqID_24011
  Gene Ontology: Mol. function=receptor activity
  Homolog annotation: Hit_ID=Q7XIS2; Match level="QueryCoverage=81%, HitCoverage=58%, E-value=2e-38, Identity=33%"; Hit description =Receptor-like kinase-like
  Pfam annotation: Domain name=F-box; Domain location=12-59; Score =33.5; E_value=7.6e-07; Accession=PF00646.23; Description=F-box domain
MEDRSSKQAGAGLVAHLHDDLLVEILSRVPAKSVCRFKCVSKAWLDLIAGPDHRKKLRQPMQGLIYMNPEKDRHSFSFLDLPLTVGSVPLDVADPAGFISYLTEQPGIHRLVLLDSCNGLILFQHLMELPHYNSLGYVVCNPTTKQWRAVPEPDCSSHVPMNYTYLAFDPTVSSHFHLVRFKKNREYMEPMSTHAYSSKTGIWTYSQTVKEEEEWQNQVYLSISNRCAFVNGFLHLLVWGSNKMQILIVDVQGRPRRMIRLPDAAAGNCEGCYCVYFGQSQGHMHCITKQLFDFNEEKYELSIWALQDYDAQEWVLKDTVSSLQLFGGNCPTSVALELYSEVASMHLDRNVVFFFSHCERRFIAYDMDSKEVSVFSSSKAIHRWKQCHYQELAPVCQEFSVRIRLL

SEQ ID NO: 65791 - protein, 384 aa, Zea mays
  Coding DNA Sequence Number=SeqID_24012
  Gene Ontology: Mol. function=nucleic acid binding; Biological process= cold acclimation
  Homolog annotation: Hit_ID=Q7XI13; Match level="QueryCoverage=99%, HitCoverage=100%, E-value=3e-51, Identity=45%"; Hit description =Glycine-rich RNA-binding protein-like
  Pfam annotation: Domain name=RRM_1; Domain location=85-148; Score =34.7; E_value=3.2e-07; Accession=PF00076.12; Description=RNA recognition motif. (a.k.a. RRM, RBD, or
  Pfam annotation: Domain name=RRM_1; Domain location=9-62; Score=3.5; E_value=0.067; Accession=PF00076.12; Description=RNA recognition motif. (a.k.a. RRM, RBD, or
  Pfam annotation: Domain name=zf-CCHC; Domain location=208-225; Score =29.9; E_value=8.9e-06; Accession=PF00098.13; Description=Zinc knuckle
  Pfam module annotation: Pfam domain module=RRM_1::RRM_1::zf-CCHC; Domain location=85-148::9-62::208-225
MAEDKVRRIFVGGLSWKTTERTLERTFGQYGNVIEAQDYTLKIIICVRYGERRRFNGFLTVVAWSCNFNLTATADSERLQSLPFLYVRILTKLQEKKFTNQLSSLVVVKRETGRSRGFGFVTFSEPRAVDAAIRGMHNAELDGRNISVNKAHPRIADDDYGYGGGGGGGYSSGARGGYRSGGDVVPAVSDECFKCGHSGHDVVPAVSDECFKCGRSGHWARECPYSDGSGRTGRYSPASRYGGGAGGRGDRVGGSDRFARYDDDRYDGGRSVDSRDTYYGAGRDRYARDRHLPATDHHSGDRYSGADRYTSSGFAIERSYERDGGRSTGTYYRDDPRGTGGYGRGGSRGGGGGPARFGGSYRDRPAPYDRPSRGGAARAYDDRY

SEQ ID NO: 65792 - protein, 145 aa, Zea mays
  Coding DNA Sequence Number=SeqID_24013
MENVETEAVAGGFLPHVPEGPLIEILSRLSIKDVLPSTCSFKEQLSRRPANDDDGDGDLLIVAMDGDEGSIRRIIPWPLGVYSRAVFDSSLASPMGACTASGRSLRVRTETTTGPLTFFRTTMQLELKGGAEEDTAAFEKTTSSL

SEQ ID NO: 65793 - protein, 53 aa, Zea mays
  Coding DNA Sequence Number=SeqID_24014
MEAEVVESGRSGGFTAVLVVVVVLALRAPNPGLALSSTPRARLRPVPHGRNRP

SEQ ID NO: 65794 - protein, 121 aa, Zea mays
  Coding DNA Sequence Number=SeqID_24015
MGAGCGLGLALYTMSSILVFATWTVVGAVPCQDLASVATSPRRAAEAGAVGDAHVHAPGADRAREGGARRAGNHGWKPVRSGDRGVAAMDWSWQPWMEALWARFAADLADRRFAAMDVICG

SEQ ID NO: 65795 - protein, 374 aa, Zea mays
  Coding DNA Sequence Number=SeqID_24016
  Gene Ontology: Mol. function=receptor activity
  Homolog annotation: Hit_ID=Q7XIS2; Match level="QueryCoverage=63%, HitCoverage=42%, E-value=1e-30, Identity=35%"; Hit description =Receptor-like kinase-like
  Pfam annotation: Domain name=F-box; Domain location=12-59; Score =20.2; E_value=0.0073; Accession=PF00646.23; Description=F-box domain
MEDRSSKQAGAGLVAHLHDDLLVEILSRVPAKSICRFKCVSQGLGSTSLPVPTTHLMELPHYNSLGYVVCNPTTKQWRAVPEPNCSSNVPMNYTYLAFDPTVSSHFHLVRFKKNREYMEPMSVHAYSSKTGIWTYSQTVKEEEEWQNQVYLSISNRCAFVNGFLHLLVWGSNKMQILIVDVQGRPRRMIRLPDAAAGNCEGCYCVYFGQSQGHLHCITKQLFDFNEEKYELSIWALQDYDAQEWVLKDTVSSLQLFGGNCPTSVALELYSEVASMHLDRNVVFFFSHCELRFIAYDMDSKEVSVFSSSKAIHRWKFFMSSNSCQLLAETFELAPNLWLYVLPRKIPEHIRVVQQCHYQELAPVCQEFSVRIRLL

SEQ ID NO: 65796 - protein, 119 aa, Zea mays
  Coding DNA Sequence Number=SeqID_24017
MAEDVDRQSHRVRASAAKCARNNNNNPVEPYRSIMRQLIAAAAILLLVLGSGAVAAARSSSVPVASDEGGGGSSSAVAQSETKKAAAATATATADSSAQPSGCTNGSGPGGYCHPPSEH

SEQ ID NO: 65797 - protein, 279 aa, Zea mays
  Coding DNA Sequence Number=SeqID_24018
  Homolog annotation: Hit_ID=Q6ZLF9; Match level="QueryCoverage=99%, HitCoverage=87%, E-value=2e-63, Identity=45%"; Hit description =Putative seed specific protein
  Pfam annotation: Domain name=TPX2; Domain location=130-186; Score =83.2; E_value=8.1e-22; Accession=PF06886.2; Description=Targeting protein for Xklp2 (TPX2)
MGKEVVDMSTDEESDCVVMCPPNRNADHEEAVSGSHDEDSSGRQENPYAVNSHMNTRGQEDVSVNPDLLKLIHQQESSVSNSPSKPAGARQQGSSHTVPESCTIAPERRTVTSARAGKTKKTTVAVAPTFVCDNRAEKRGEFYTKLEEKRKALEEEKLQAEARKQEEEEEALRQLRKNLVVRAKPVPSFYQEPPPKVELKKVPPTRAKSPKLTRRKSCSDTPHTPEGGNGGGGAVCCRLHRHSIGNSKDIGSKAQCSPKTGPAAKSRAPPNPGKTRGLP

SEQ ID NO: 65798 - protein, 60 aa, Zea mays
  Coding DNA Sequence Number=SeqID_24019
MCGKASRMNKGNHVGSSDRAEHLVGFEQPITTTSIPVGNISTVYKKFNKFDIIVKKLTLQ

SEQ ID NO: 65799 - protein, 42 aa, Zea mays
  Coding DNA Sequence Number=SeqID_24020
MEGNGIVGAIYLQFEGNEKYKRDAKVNTKISVNSTGVLFTYL

SEQ ID NO: 65800 - protein, 244 aa, Zea mays
  Coding DNA Sequence Number=SeqID_24021
  Homolog annotation: Hit_ID=Q9UQ35-2; Match level="QueryCoverage=57%, HitCoverage=5%, E-value=5e-08, Identity=28%"; Hit description =Isoform 2 of Q9UQ35
MTASKKAGPSEGFNSRLRALGLRAHYWSGVQRLAPRKGSTTASGHSGSTPTTDQGGNDLVTESHQREASSPRTPSKGDRVQQITRRVRLTAAKSSLRRHRKLRFARPQGSDSGSAPEDDELCFARPQGSDSGSAPEDDELRFARPQGSDLGSAPEDDELRLARPRARTRAQPPEDDELRFARLQGSDSGSAPEDDELRFARPQGSDSGSAPEDDELRLARPRARTRAQPRKTTNSASPDPRART

SEQ ID NO: 65801 - protein, 364 aa, Zea mays
  Coding DNA Sequence Number=SeqID_24022
  Gene Ontology: Mol. function=phosphopantothenoylcysteine decarboxylase activity; Biological process=electron transport
  Homolog annotation: Hit_ID=Q69K55; Match level="QueryCoverage=59%, HitCoverage=98%, E-value=1e-98, Identity=80%"; Hit description =Putative HAL3B
  Pfam annotation: Domain name=Flavoprotein; Domain location=133-253; Score=147.8; E_value=2.9e-41; Accession=PF02441.9; Description =Flavoprotein
HHRLHPSPPPLTPASPTASEEEDVDLRKKTRIQGLTAEEEDATPRLRSGELPPLLLLFVTGAQTALLLSWSEHPVHPTRASFGFLSTMGTLLLDGRHGRAATSASSPTLAELMATSEPVQESLVVHYSQPSRPRVLLAASGSVAAIKFESLCRSFSEWADVRAVATTSSLHFVDRSSLPSGIVLYTDDDEWSTWKKIGDEVLHIELRKWADVMVIAPLSANTLAKIAGGLCDNLLTCIVRAWDYSKPLFVAPAMNTLMWNNPFTERHLHTINQLGIALIPPVTKRLACGDYGNGAMAETSQIHTSVRLACKTQPHDASSSLAGPGRRRVDKRGQASATSHRTGTADGPFRVTMKIMHRQPDSVV

SEQ ID NO: 65802 - protein, 88 aa, Zea mays
  Coding DNA Sequence Number=SeqID_24023
  Subcellular localization annotation: CTP_CleavageSite=35; ConfidenceScore=5.25e-01
MAPTGATSCCVCSAASGLRGPRQLSAASTSCSRLRATLGAPLITDTMVTIDDDGSVNDGLDYGFWYFLYEEMKVMKDTPSTLCKNNNS

SEQ ID NO: 65803 - protein, 158 aa, Zea mays
  Coding DNA Sequence Number=SeqID_24024
MGKSNKRKREPTPPSEDFGDSEYSEEEFSSESEGSPAPVSPPASSDDSDDSQGIAAEVWTYIRAVEHSGLEGSDDSEYSSDEEDSDSGEDEDDDDDDSDDDDGGDGDGDGSGSGGGSGGGDGSKGSTRGGSSKGSTRGGISKGSTRGGGGGSSSKASG

SEQ ID NO: 65804 - protein, 268 aa, Zea mays
  Coding DNA Sequence Number=SeqID_24025
MAPRWNNCPLLRLGSRSGLDDRAKGRKAIGSRVLEAEGLLARSPHSDATKFVWDCLNQDDDELMGLLGNQTPLRDCRDFFADLGDFTCKETLDLEESRESKRRRTLEYPSESSQSEVGTHDAASPFVTSEAAEISLLCTDKPQSLNWDMHHTSNNLGTSETGPMTESFIMQETRKLCTLKVSKGSSSTLVKVKENLTTSVAYPFTLIKPSWEEGDVTLQDINQRIRAPPKKAPEILGTSAFSGKPVIGKTRIRTEGGKGSITILRTKG

SEQ ID NO: 65805 - protein, 96 aa, Zea mays
  Coding DNA Sequence Number=SeqID_24026
MWARAVGVVSYPVSRMQQTPSWALKSLCEIFGADPAALASPQGYKSRTPRPSCPSHRHPEIGVEASIPVSTAMDPATSAIDKLQTSTMLGLDGCQW

SEQ ID NO: 65806 - protein, 162 aa, Zea mays
  Coding DNA Sequence Number=SeqID_24027
MVERRPSPSVWGGALASRARELVTRRVRAVCLPRVPEQAEQDFGLYTDPSSPARSMDRMLARSAADNPMEPSESSDNVVGVPVAESCCPRKRNPPQRTSSLQRVGGVGGRLRFPFAEPRLPLHPLPPAMVLSSESKKKKKKKKKNAEEQERVKKTGTGKETI

SEQ ID NO: 65807 - protein, 58 aa, Zea mays
  Coding DNA Sequence Number=SeqID_24028
MAHSGGDGMAWAVGGDGTAQSQGAGTQGANSADLPHLKESRPRDSEWVREKVRVFLPQ

SEQ ID NO: 65808 - protein, 109 aa, Zea mays
  Coding DNA Sequence Number=SeqID_24029
MGWLGQEVATGRLRHRARGCKAPIWLVRAAVPYFFFLGAIRPCGQAGLSAFTKMSRDFTTEKAKLGFTATKLPARMYGRTLSRVHRDGRSNSDQTLNKAKSFGLVRHRR

SEQ ID NO: 65809 - protein, 179 aa, Zea mays
  Coding DNA Sequence Number=SeqID_24030
MPCRAVSGGMARDFTVAPFGVPEEDFFLGGAMRCKSSLYIRHTEDGPEAKNSFWIEGDLALENDGHEVNVDRRDTPYLARQLSVFRVRLHTRGKEEKRVTRDDGRQGRRDPGTCADLAATELGAVTVSGQSLKGNFLRLTIAPRKLAIRLAGQQMKLNFIEEAVGSYDVLTSDIFYKIP

SEQ ID NO: 65810 - protein, 142 aa, Zea mays
  Coding DNA Sequence Number=SeqID_24031
MVYEAAAAVAARDQSQLRSREGRRGGRSRRRQPPEEKEKVVMRCSVFRILGRVLLLSKASASEKKHYGGWVSRDPLRGENFARGHMAVVSLWHPVGGRANGNSGRRPVQERKRPNVRASRGLNVIVLKPFAFPTPDILKHRR

SEQ ID NO: 65811 - protein, 41 aa, Zea mays
  Coding DNA Sequence Number=SeqID_24032
MSLTLMAFEALTTLSSMGAAEIAAAFRLENAPTGSSPAWPT

SEQ ID NO: 65812 - protein, 284 aa, Zea mays
  Coding DNA Sequence Number=SeqID_24033
  Gene Ontology: Mol. function=DNA binding; Cellular component=nucleus; Biological process=regulation of transcription
  Homolog annotation: Hit_ID=Q6Z1G9; Match level="QueryCoverage=75%, HitCoverage=89%, E-value=4e-26, Identity=38%"; Hit description =Putative development regulation gene OsNAC4
  Pfam annotation: Domain name=NAM; Domain location=46-174; Score =152.1; E_value=1.5e-42; Accession=PF02365.6; Description=No apical meristem (NAM) protein
LIWEKKQLALLINNEASQLQQSPARLSAASPAPAGMDRPAQAPTQLPPGFRFHPTDEELVVLYLRRKALARPLPAAVIPVVHDVARLDPWDVTGASEGEGYFFSLRRAPATGRRRRAGSGYWKATGKEKPVFLQCGGEQRQLLVGVKTALAFHRREPPPPSSRTGWVMHEYRLAVPRGVADQRKKNARHGCVAEPGEWVVCRVFLKNRPNRDAGSKTLRHGASARRRRRQQQPEDVRGQQPLPFSAPQPSSSSCVTDVTDCLSDEDEDEASSGSTARAAPQREA

SEQ ID NO: 65813 - protein, 97 aa, Zea mays
  Coding DNA Sequence Number=SeqID_24034
  Subcellular localization annotation: CTP_CleavageSite=76; ConfidenceScore=5.31e-01
MTIATGQQEISAGHPQFIFPTPRPRPDRTPAAPPPASTSPVHRAPEVGAIRRRHISVLFGADWGSAARSSIPPPVFAAARATIGGAAIAQSTVAACS

SEQ ID NO: 65814 - protein, 540 aa, Zea mays
  Coding DNA Sequence Number=SeqID_24035
  Gene Ontology: Mol. function=metal ion binding; Cellular component =integral to membrane
  Homolog annotation: Hit_ID=Q336R3; Match level="QueryCoverage=99%, HitCoverage=58%, E-value=1e-177, Identity=63%"; Hit description=Zinc finger, C3HC4 type family protein, expressed
MDSTALQYENQKLVQQLEVQKSEMHALERKFKELSDDQCSYDKTLISLNKLWNQLIDDLVLLGVRAGGDLDNLQALDHEELSEESLESCPSEEIFLLRLLKTNNIRDNSDTSLLKFVEEALAFRSSATVTLMKSLQETISSQQARSESLSLALNGQKSNEDVIVALRNHNDCLKEVAENASQAISIINEKHKRYLDEIEAFKSNHSRELQEIKRISVQLSLKEGGPFPTEEDELPGEAKTSREEGIPEEGELEESIAELEESQRKLVVLQLQRHGSVMDASGANAVNGGISTHKSSDKSMSWQDLKDAVDAAKILFGTPIFSVFILVTLAGNRLLELHQTQEDNLILSKELGDLEGQLKDEKYVLVSKPYMILNDKLQHLNAEIERYRGLVEVLQNDKDQLMQREKEISAKAESLDSVKQTIITYEKKIEELETQIQILFSEKNDLETKVEETLQDSGKKDFKNEIHVMAAALSNELGMMENQLSRSKDAASEALALREQAESLRSLVAKKIEEHKKISDKYNSQVIEIKSLKALVVLNC

SEQ ID NO: 65815 - protein, 166 aa, Zea mays
  Coding DNA Sequence Number=SeqID_24036
ALASCDYHMQQRQRRIAGVEGGGSATAGGGRSTGRRAKEEAQGRKKRKRKGRKNYRRAGRGRRTGEEEAQAGARRCRSAGGSQRCRPDHRMEAEEQLDGGSGAANAEFQAPALPTSNAMATPSLLWRRHTSRGYGGHDAVIWIVPRRQAGASALQGLLGHLLSVGV

SEQ ID NO: 65816 - protein, 482 aa, Zea mays
  Coding DNA Sequence Number=SeqID_24037
  Gene Ontology: Mol. function=RNA-directed DNA polymerase activity; Cellular component=mitochondrion; Biological process=RNA-dependent DNA replication
  Homolog annotation: Hit_ID=UPI00004C1731; Match level="QueryCoverage =97%, HitCoverage=30%, E-value=0.0, Identity=80%"; Hit description =UPI00004C1731 related cluster
  Pfam annotation: Domain name=RnaseH; Domain location=1-123; Score= -4.2; E_value=0.00014; Accession=PF00075.14; Description=RNase H
  Pfam annotation: Domain name=rve; Domain location=224-383; Score =121.5; E_value=2.5e-33; Accession=PF00665.16; Description=Integrase core domain
  Pfam module annotation: Pfam domain module=RnaseH::rve; Domain location=1-123::224-383
MFFDGSLMKTGAGAGLLFISPLGKHLRYVLRLHFPASNNVAEYEALVNGLRIAIELGVRRLDARGDSQLVIDQVMKNSHCHDPKMEAYCDEVRRLEDKFYGLKLNHIARRYNETADELAKIASGRTTVPLDVFSRDLHQPSVKTDDTPEPEKASVEPEAPSAQSEAPSARPEAPSVRPEVPSAPEGFYWPTAVADATRIVRTYEGCQFYARQTHLPAQALQTIPITWPFAVWGLDLVGPLQKAPGGYTHLLVAIDKFSKWIEVRPLNSIRSEQAVAFFTNIIHRFGVPNSIVTDNGTQFTGRKFLDFCEDHHIQVDWAAVAHPMTNGQVERANNMILQGLKPRIYNNLDKFGKRWMKELPSVVWSLRTTPSRATGFTPFFLVYGVEAILPTDLEYGSPRTRAYADQSNQANREDSLDQLEESRDMALLHSARYQQSLRRYHARGVRSRDLQVGDLVLRLRQDARGRHKLTPPRKGRSSSPKF

SEQ ID NO: 65817 - protein, 83 aa, Zea mays
  Coding DNA Sequence Number=SeqID_24038
MERDEGERSREDARPWETEKEHALEDEELRPGAGRSRGKGGRRHGKGQKEGRAWEHQGARMPERATGGEDEDGDQIFPCYVSG

SEQ ID NO: 65818 - protein, 113 aa, Zea mays
  Coding DNA Sequence Number=SeqID_24039
  Subcellular localization annotation: CTP_CleavageSite=88; ConfidenceScore=5.42e-01
MAVDLQLALPPSLQMACSISLSCCPTFPAASMPLLLPHGAKVTSPLPWTSLPFLQQASAPLLLFRHGCTPICSSSSLPNILLYPYTIRTHMVFDKMPKWSVVSWTTLLASSDV

SEQ ID NO: 65819 - protein, 44 aa, Zea mays
  Coding DNA Sequence Number=SeqID_24040
MGEGAIRIVVIGSWMKSADEIPENGEPPEKTVLPQGWHGTPLAD

SEQ ID NO: 65820 - protein, 163 aa, Zea mays
  Coding DNA Sequence Number=SeqID_24041
  Homolog annotation: Hit_ID=Q6QP51; Match level="QueryCoverage=28%, HitCoverage=20%, E-value=2e-11, Identity=71%"; Hit description =Putative growth-regulating factor 1
  Subcellular localization annotation: CTP_CleavageSite=39; ConfidenceScore=5.16e-01
MAVAGGQEQRSHRQSSLRPIRGQRENPLSRREDNAPVFRSSNGSRTRNGRPANHSPRRINSAAGQAQGPGKGDTPKRILPREGTRLRASLLIRGSKAGPSEGFDSRLRSRGPYNHYWSEVRRSAPRKGSTAASGYSGSTPTTDQGFEGWPPNGSQPPQTQSEG

SEQ ID NO: 65821 - protein, 174 aa, Zea mays
  Coding DNA Sequence Number=SeqID_24042
KKLIPLGLIILMSIGLANAVRVVRYSNADGTGTGQGEGGGYVNGGGSGSGSGTGSGDSGPYVKEGILVMENLLVLVVPVGVELEDKLEAHGIPMLKDPVVELVLALAMLTGIGMDQNEAGASANGNGGGTGNSQNGGGGGGSGAGSGPLGLGVNGGDQAAGFDPFLQPPKAASP

SEQ ID NO: 65822 - protein, 356 aa, Zea mays
  Coding DNA Sequence Number=SeqID_24043
  Homolog annotation: Hit_ID=Q25U51; Match level="QueryCoverage=24%, HitCoverage=7%, E-value=3e-07, Identity=42%"; Hit description =Collagen, type IV, alpha 5 (Alport syndrome) precursor
  Subcellular localization annotation: CTP_CleavageSite=27; ConfidenceScore=5.09e-01
LGLGLRPWKTANSAPPDPGLGLGLRPRKTANSAPPDPGLGLGLRPRKTANSAPPDPGLGLGLRPWKKANTAPPDPGLGLGLRPRKTANSAPPDPGLGLGLGPRRRRTPLRPTPWGRTRVITRKKANSAPPDPRARTRAKTRGSELRPGPRSERLSASPEPLGLGIGHGNRRVDSTSASEEPRTSPCLEAQTATSTGGAIIIPPRTESGRRPLGLDRSNSCPSIRLRRTSDGHDITPAGCPDLSGCHIGMAFLEKVGRAGTRMGQALSWGRSLLSPAWTLVTPYCKRTRPGRGSNTKAAGFPPLSRLVSGHLAFPPFALAHALDPSGLGHAAHSLVGLGTPRSRNADKYFYFEAYTS

SEQ ID NO: 65823 - protein, 101 aa, Zea mays
  Coding DNA Sequence Number=SeqID_24044
MTLGGWGGSGELGGEGQTAVKASEVGNPRLNGNASSSNEHLRRAEREGGNRRGRGGSLPHGETRDPLEGGNNMAMTWNDNGDSRAARGTSVERGHVGNGDT

SEQ ID NO: 65824 - protein, 201 aa, Zea mays
  Coding DNA Sequence Number=SeqID_24045
MAALHCSAYLHLQEPTQPLSLVSSTWHWALAVSYVTRVVLLRCHSLDLDPAAQPKAPRALSSLALVLGSHERACPSVIPLQLYDTNALKSYDDAPIPSHLLPHAKSHGCCPPAPCCNAPHREEAERRPGRKVEERGNHRVFPVRQAQAKLTVAKALAKVQRRRQNCKAIAREGGTTAGECEGRGSANVRQGRAEGVCGVFT

SEQ ID NO: 65825 - protein, 74 aa, Zea mays
  Coding DNA Sequence Number=SeqID_24046
MNRHQVCCGDVEDDPGQWGPFVCEAQDVCSGWEAADDVGHDAILVFSIRVWDKRLRYICYVGQVVGYGRVDLGH

SEQ ID NO: 65826 - protein, 90 aa, Zea mays
  Coding DNA Sequence Number=SeqID_24047
MQSLLIFTHKSCYPLAKGSGRNLPSMVPSDEEIDAEMCGDIMKPENGIRRNPYLRTKPRKWGKLLMNEYIEKDATPATEIADRLRSESEN

SEQ ID NO: 65827 - protein, 76 aa, Zea mays
  Coding DNA Sequence Number=SeqID_24048
MAGEHARAATNGHQGARTGNFGWARTGRNSKGKSPWEQGKQGQRRQDAMADEGSARPTEGPREQPWKLGRSRDTVR

SEQ ID NO: 65828 - protein, 237 aa, Zea mays
  Coding DNA Sequence Number=SeqID_24049
  Gene Ontology: Mol. function=DNA binding; Cellular component=oxygen evolving complex; Biological process=DNA integration
  Homolog annotation: Hit_ID=O24587; Match level="QueryCoverage=99%, HitCoverage=26%, E-value=1e-120, Identity=81%"; Hit description=Pol
  Pfam annotation: Domain name=rve; Domain location=152-237; Score= -6.6; E_value=0.021; Accession=PF00665.16; Description=Integrase core domain
MTGEKKMFTSYVKNKDSQDSIIFGDGNQGKVKGLGKIAISSEHSISNVFLVESLGRSDGSLAFKGVLDNKLYLVDFAKEEAGLDACLIAKTSMGWLWHRRLAHVGMKNLHKLLKGEHVIGLTNVHFEKDRPCAACQAGKQVGSMHHSKNVMTTSRPLELLHMDLFGPVAYLSIRGSKYGLVIVDDFSCFTWRFLRRAQNEFELKVKKIRSDNGSEFKNLQVEEYLEEEGIKHEFSAP

SEQ ID NO: 65829 - protein, 187 aa, Zea mays
  Coding DNA Sequence Number=SeqID_24050
  Gene Ontology: Mol. function=structural constituent of ribosome; Cellular component=ribonucleoprotein complex; Biological process =translation
  Homolog annotation: Hit_ID=P42036; Match level="QueryCoverage=93%, HitCoverage=92%, E-value=4e-54, Identity=65%"; Hit description=40S ribosomal protein S14-3
  Pfam annotation: Domain name=Ribosomal_S11; Domain location=28-183; Score=201.5; E_value=2e-57; Accession=PF00411.9; Description =Ribosomal protein S11
MSRRKTREPKEENVTLGPTVREGEYVFGVAHIFASFNDTFIHITDLSGRETLVRITGGMKVKADRDESSPYAAMLAAQDVAQRCKELGITALHIKLRATGGNKTKTPGPGAQSALRALARSGMKIGRIGKEILDLSRAGLPVLVSPALFHNALVLYTDAAFVLCAEDVTPVPTDSTRRKGGRRGRRL

SEQ ID NO: 65830 - protein, 131 aa, Zea mays
  Coding DNA Sequence Number=SeqID_24051
  Homolog annotation: Hit_ID=Q6QP51; Match level="QueryCoverage=74%, HitCoverage=54%, E-value=4e-10, Identity=45%"; Hit description =Putative growth-regulating factor 1
MEREGGKQGDMRKGETRDLRVCPAPSLSPRSGEAEAPPRSRSSLSSEVEVKSEPQSSSSSGAEAGSEPWGRARRSFLWRPRPDLAAVRLTLSSGTAVRATQAALSSCQVGQWSDEVTAVTSALSTEGRVSR

SEQ ID NO: 65831 - protein, 233 aa, Zea mays
  Coding DNA Sequence Number=SeqID_24052
  Gene Ontology: Mol. function=structural constituent of ribosome; Cellular component=ribonucleoprotein complex; Biological process =translation
  Homolog annotation: Hit_ID=P42036; Match level="QueryCoverage=75%, HitCoverage=92%, E-value=2e-53, Identity=65%"; Hit description=40S ribosomal protein S14-3
  Pfam annotation: Domain name=Ribosomal_S11; Domain location=74-229; Score=201.7; E_value=1.7e-57; Accession=PF00411.9; Description =Ribosomal protein S11
MWGLRNFDHLGLKAFDDLRLGSSEQRESLSLRMGIVLGPGSRGLRSVSRRKTREPKEENVTLGPTVREGEYVFGVAHIFASFNDTFIHITDLSGRETLVRITGGMKVKADRDESSPYAAMLAAQDVAQRCKELGITALHIKLRATGGNKTKTPGPGAQSALRALARSGMKIGRIGKEILDLSRAGWPVLVSPALFHNALVLYTDAAFVLCAEDVTPVPTDSTRRKGGRRGRRL

SEQ ID NO: 65832 - protein, 315 aa, Zea mays
  Coding DNA Sequence Number=SeqID_24053
  Homolog annotation: Hit_ID=Q9LH72; Match level="QueryCoverage=43%, HitCoverage=33%, E-value=3e-32, Identity=44%"; Hit description =Arabidopsis thaliana genomic DNA, chromosome 3, BAC clone: T21E2
MSAAADDRARRAAAFRPAPLPPPAQKQQLSGVAAAVLDAGGRLGRAVGDVFRRLRIDDTFYSGGGGGGGGAPNRSWRDAGNNGGRPAAAGAPAAASREEATGGGASSGRFARAQGSMNLSATYDSRTHDVESSVVARGDLWRAEASHSSSSSAGAGGNGANNNLFLVQLGPVLFVRDTTLLFPVHLSKRHLIWYGFERKSFMDMQFPNGQLRYVAGDGFTARAFLPLRGGVLQAHGKFPGEKRLSFSFKVRLGIYAADDRCFIAAGNVFTSPHSTLTSSVACRTGMAAASSRWFSGRISHSRWGSSRRCLGGDPA

SEQ ID NO: 65833 - protein, 103 aa, Zea mays
  Coding DNA Sequence Number=SeqID_24054
  Subcellular localization annotation: CTP_CleavageSite=44; ConfidenceScore=5.24e-01
MAKALGFADKLSSPVGSKTPSLVLGEDPFSCGLSRGPLRLRACVCHGNGKTVGNQNSMPLFIWTENHGRPKPWSSGASTLNANPDLAAPPFSFDLPICDDTQR

SEQ ID NO: 65834 - protein, 40 aa, Zea mays
  Coding DNA Sequence Number=SeqID_24055
MNVSRFMDKQIQSRVASVSADAVPNTRFWKQNFSNLLKML

SEQ ID NO: 65835 - protein, 344 aa, Zea mays
  Coding DNA Sequence Number=SeqID_24056
  Gene Ontology: Mol. function=metal ion binding
  Homolog annotation: Hit_ID=Q6CEU8; Match level="QueryCoverage=51%, HitCoverage=46%, E-value=1e-10, Identity=25%"; Hit description =Yarrowia lipolytica chromosome B of strain CLIB122 of Yarrowia lipolytica
MQAGGSRGRRSRDVQHREAARLGDEERKSPADFSRVRVVLPASAVGQPRPVGISSRVSSPARERVVAAAVDDLTFSSREGPGRQLKPTRENRGERGYGEPGRGPAADERYTRPQGLYPHPDIDLRKLRRLILEAKLAPCHPGADDARADLDECPICFLFYPSLNRSKCCAKGICTECFLQMKSPTSCRPTQCPYCKTLNYAVEYRGVKTMEEKGIEQLEEQRVIEAQIRMRRQELQDDAERMKNKQAAPLSDVVASAQVDSCSTDGASTVAASSPRGNDALSSEVQRSELILRNSEVFQQRRGNNFDVDLEEVMLMEAIWLSVQRGGDAENPNVTGGDRLADEV

SEQ ID NO: 65836 - protein, 342 aa, Zea mays
  Coding DNA Sequence Number=SeqID_24057
  Gene Ontology: Mol. function=protein domain specific binding; Cellular component=nucleus; Biological process=oocyte microtubule cytoskeleton polarization (sensu Insecta)
  Homolog annotation: Hit_ID=Q6ZKC0; Match level="QueryCoverage=74%, HitCoverage=99%, E-value=1e-122, Identity=88%"; Hit description=14-3- 3-like protein GF14-C
  Pfam annotation: Domain name=14-3-3; Domain location=3-240; Score =477.4; E_value=1.8e-140; Accession=PF00244.10; Description=14-3-3 protein
MSREDNVYMAKLAEQAERYEEMVEYMEKVAKTVDVEELTVEERNLLSVAYKNVIGARHASWRIISSIEHKEESRKNEEHVIQITEYRGKIEAELSNICDGILKLIDSHLVPSSTATESKVFYLKMKGDYHRYLAEFKTGAERKEAAESTMIAYKAAQDIALVELASTHPIRLGLALNFSVFYYEILNSPDKACNLARQVFDEAISQLDTLGEDSYKDSTLIMQLLRDNLTLWSADSTTEDGIEEGNEASKGDAGEVHCVGNHVLIEGVSRSMHSKILSSPSLTHVATVGSDKPSNIQMKTRSAVRKVPVSRVISKIKSKGKAVVPISDDDSDFPTPLQVKGK

SEQ ID NO: 65837 - protein, 95 aa, Zea mays
  Coding DNA Sequence Number=SeqID_24058
MGHMATPDLFLNGERGPRVHVGLKLWDPLGGGLEGIRGGSGTSCGGPDDTRGGLGPPKGSERHICLGDDGLELPRTYHGIIHAPHLAVPILDLGV

SEQ ID NO: 65838 - protein, 103 aa, Zea mays
  Coding DNA Sequence Number=SeqID_24059
  Subcellular localization annotation: CTP_CleavageSite=34; ConfidenceScore=5.03e-01
MAGGSLELGSVLPSPYMKPQPPHPRSFCQIHCLRLAESDGRGSGKLTVSSRRALRLHGVRNFSVDGKESAASHVVAEFFTFIDVFGENLPSGFALVSAPRRLN

SEQ ID NO: 65839 - protein, 122 aa, Zea mays
  Coding DNA Sequence Number=SeqID_24060
MAARRGAEGAAHRGAEVAAPGAERATPGAKGAASPEAEGAAPGGARGAVPPGAEGAALEGQDDHATGAGSRAQGRVAPTGARTQGRGGRDAHREEGNGVEGEERERGRGEGGKLISGIQIRR

SEQ ID NO: 65840 - protein, 259 aa, Zea mays
  Coding DNA Sequence Number=SeqID_24061
  Pfam annotation: Domain name=DUF569; Domain location=1-149; Score =31.3; E_value=3.7e-09; Accession=PF04601.4; Description=Protein of unknown function (DUF569)
MELFPNGGFVRLRSRARDKYVHADADASGVSLRPLGAAPSVNAVWKPEHWPGEEDIFLLQGAAYGRYLAVSDQDAPPGHRGVRAVQRDYNSPHVDAPFMWTAFRVDADQNYVRLHNHQRWLRANGRHRYWNNVVTVDTRNGSLTTMMQWRVEAIPVSPQPLPLLPPPQQPTMDDDGFIHDKPEFNFNDYSVSNLRTELALRQGDENITLCLRAGIYALAIPLITDLPHNTDPLDIIVVTTGSPGFEMLEYPQFDEPPEP

SEQ ID NO: 65841 - protein, 127 aa, Zea mays
  Coding DNA Sequence Number=SeqID_24062
  Gene Ontology: Cellular component=nucleus; Biological process=DNA replication
  Subcellular localization annotation: CTP_CleavageSite=39; ConfidenceScore=5.11e-01
MSSGGVKDFYRQKKKGGVAKTASSSKNKTRHYTGGASVGASDAAQTSALVSHGSWDLKDDFGDEEEQLRQFDVDMNHQLISGTSYCTRHRQRIAVAVAPLSSAFGRPLVDVCWHSFVSPRHVFGNSI

SEQ ID NO: 65842 - protein, 222 aa, Zea mays
  Coding DNA Sequence Number=SeqID_24063
MVKTEEHYSLPSARKIYGYQSNYLWKIFHHVSKVSFPHNLHLHNQVLQNNEQPTHLPGQQHRWTPNTNNIDGHLTVFDNVSVQNNKARATDLDARSSGRQGGEGDAGCGDSFIEQRPREDRREKAAVVGEGEGDAGCGDNFIEQRPREDKREKAAVVGDSLARMGERSSGRRGGRGRDDVGRSGSVGGRWPHEDGREKTLVVGSSLARTKERSERWACAPSR

SEQ ID NO: 65843 - protein, 217 aa, Zea mays
  Coding DNA Sequence Number=SeqID_24064
  Subcellular localization annotation: CTP_CleavageSite=71; ConfidenceScore=5.82e-01
MGSSASPDPGFGPRLSLGSGRRRTPPRPTPGLGLSLGSGRRRTPPRPTSGLGLSLGSERRRTPPRPTPGLELSLGSGRRRTPPRSTPGLGLNLDLGRRTLPRLTPGLRLSLGLGRRTQPRPRPQRSLRLARPRARTDHVTGGTIITLPLASSGYGEQRSASHLARPGKQIMMAPRVLRDDGGSQPLTEARRRQQGFDIPDSCPSTGLQLSSDDHDIT

SEQ ID NO: 65844 - protein, 460 aa, Zea mays
  Coding DNA Sequence Number=SeqID_24065
  Gene Ontology: Mol. function=RNA-directed DNA polymerase activity; Cellular component=intracellular; Biological process=RNA-dependent DNA replication
  Homolog annotation: Hit_ID=UPI00004C1733; Match level="QueryCoverage =95%, HitCoverage=36%, E-value=1e-150, Identity=61%"; Hit description= UPI00004C1733 related cluster
  Pfam annotation: Domain name=RnaseH; Domain location=276-400; Score= -11.8; E_value=0.00073; Accession=PF00075.14; Description=RNase H
MKESDQLATSFITPFGMYCYVTMSFGLRNAGATYQRCMNHVFDEHIGRTVESYVDDIVVKTRKASNLLSDLETTFRCLKAKGVKFNPEKCVFGVLRGMLLGFIVSERGIEANPEKIAAITNMGPIKDLKGVQRVMGCLVALSRFISRLGERGLPLYRLLRKTECFTWTPEAEEALGNLKALLMNVPILVPPAAGEALLIYVAATTQVVSAAIVVERREEGHALPIQRPVYFISEVLSETKIRYPQIQKLLYAVILTRRKLRHYFESHPVTVVPSFPLGEIIQCRGASGAGVGLLFISPLEKHLLYVLRLHFPVSNNVAEYEALVNGLRIAIELGVQRLDARDDSQLVIDQVMKNSHCRDPKMEAYCDEVRRLEDKFYGLELNHIVRRYNETADELAKIASGRTTVPPDVFSRDLHQPSVKTDDTTDPEKVSAQPKAPSAPEGEALRVEEERNGVTPNRNW

SEQ ID NO: 65845 - protein, 213 aa, Zea mays
  Coding DNA Sequence Number=SeqID_24066
  Homolog annotation: Hit_ID=Q5JN27; Match level="QueryCoverage=38%, HitCoverage=8%, E-value=7e-15, Identity=51%"; Hit description =Putative receptor-like protein kinase 1
MRVLVEVEGHVHQNSLQTLNGNQSSGSLPDEIGYLMNFNRLQIKDNNISGPYLNSFANLIRIKHLLVDNNNLFGPLPPELVDTRSLLAILTQCFFNELSSVQCDLFIVFTLEQVLGDKDRTPKKHASLLLQLLFEMVVASCLEESVPLHTGNMTVDTILGPRTIQHETVVSEAAAATPAAPAINVDACSIHSKAFQYCNVDMLDECRGGGVSA

SEQ ID NO: 65846 - protein, 161 aa, Zea mays
  Coding DNA Sequence Number=SeqID_24067
MGLDPTNSDAESKARLRPGGLGHKHTQRLHQVHYARVTIKLKKNSARELDAHRFLFCCSTHDAWTDGKQGRAAKSRAQHREPATTSIETRLRVACAQRAQPRAARANRWSNIGHPWSSTGCRTKERTAKSELELCSGQQRKAGASRTCRGELGEARLRVSE

SEQ ID NO: 65847 - protein, 43 aa, Zea mays
  Coding DNA Sequence Number=SeqID_24068
MAMMDSTSEKMYLCQDPLLVSIFANRVLILDKPYLDSQKPAYP

SEQ ID NO: 65848 - protein, 47 aa, Zea mays
  Coding DNA Sequence Number=SeqID_24069
MAELTEATYSVSSQRWRWNGRAVTANGGGTSCGAASAYVVGTESDDA

SEQ ID NO: 65849 - protein, 144 aa, Zea mays
  Coding DNA Sequence Number=SeqID_24070
MAVVQVAEMRERGVGRASWLGQTPWGSSPWKKPLHADQRGASWSWATPWRGAGSREQEAGGQIRPRPGEYASEAWWRSTGHGSRKKRRGEQGDRRRVAGAAREKFQREKNTWVRERDKGDDNFKRFPRPWRIKEQARRWMKLTS

SEQ ID NO: 65850 - protein, 135 aa, Zea mays
  Coding DNA Sequence Number=SeqID_24071
MNKMCANKDKLPTMIMRERTCYFMLWIKGFGRGAREIESTPPASTNPRGIHGALGDDAMGNDDQDIGDNSSSNDGGLENIWFMDSGCSCHMTGSKKMVLSLYPMICKEYITFGDKSREKVDVLTSGYIPRTYVRN

SEQ ID NO: 65851 - protein, 185 aa, Zea mays
  Coding DNA Sequence Number=SeqID_24072
MAGVRPTGDSGPNLTKLVMLRDPVHAAETTEDLPALVMAPKRLPTAMGNIAAVMNNDEQLGRNRGPTESIAPLNTNPRAHQTPQQSLEAQVAAELRHPHGGKLSLPLGGAAARRNELWLKVEGDRDVARVLYPGDEGNIPPASRKARADISVFCCGITANTSGARWCSSLMRGKGQTCRRGPTRQ

SEQ ID NO: 65852 - protein, 185 aa, Zea mays
  Coding DNA Sequence Number=SeqID_24073
MAGVRPTGDSGPNLTKLVMLRDPVHAAETTEDLPALVMAPKRLPTAMGNIAAVMNNDEQLRRNRGPTESIAPLNTNPRAQRTPQQSLEAQVATELRHPHGGKLSLPLGGAAARRNELWLKVEGDRDVARVLYPGDEGNIPPASRKARADISVFCCGITANTSGARWCSSLMRGKGQTCRRGPTRQ

SEQ ID NO: 65853 - protein, 142 aa, Zea mays
  Coding DNA Sequence Number=SeqID_24074
  Subcellular localization annotation: CTP_CleavageSite=74; ConfidenceScore=5.22e-01
MHYHDQGLGILDGHYFLANADYVARSSILHPYQGVGCLTTGVKVGGVFNRSSVPSRRRNPATTATSPATPEDSRADVLDANLGSVGYWADSDSHAIILTTTSATTTNADATNAKGQTCRVHEKSPQYLPTLPTPWTPRTCCT

SEQ ID NO: 65854 - protein, 87 aa, Zea mays
  Coding DNA Sequence Number=SeqID_24075
MGASSGQRRWGSQIKKVEPTRSYLPAPGVLHYLQHLWLPNQAPKPYRATLDLTVAISFPVIACLHSYKCRHMLVQGKFGKEQSSRLL

SEQ ID NO: 65855 - protein, 373 aa, Zea mays
  Coding DNA Sequence Number=SeqID_24076
  Homolog annotation: Hit_ID=Q029P0; Match level="QueryCoverage=38%, HitCoverage=19%, E-value=7e-11, Identity=31%"; Hit description =Hypothetical protein precursor
IESFSKLGDSIYFEEKGDPPALNIIQYIPSTYNWKAAGLTVTQQIKTLSSSDQYLQISFSISANTSGQTANINFRIPSWTFADGAGATLNGKDLGSISPGSFLSITKQWNSDDHLALHFPIRLRTEAIKDWNMHPFQAVLFGPFCSCWPIHWLTGMQSWHGSAISDCIAAVPPAHNSQLVTFTQVSNGKAFVLSSANGTLTMQERPEVDGTDAAIHATFRAHPQEDSTELHDIYSTTLTGTSILLEPFDLPGTVITNNLTLSAQKSSDSLFNIVPGLDGNPNSVSLELGTKPGCFLVTGTNYSAGTRIEVNCKSSLESIGGILEQAASFSQTDPLRQYHPISFVAKGVARNFLLEPLYSLRDEFYTVYFNVRV

SEQ ID NO: 65856 - protein, 95 aa, Zea mays
  Coding DNA Sequence Number=SeqID_24077
MSSLEALLDHQRKDVVNKKGEPELCQDEKLVDGVLDAAIISMLSRGSPSIDHRLASPITIPPTVSLIGGAASIVNMAHDVKVADNEAQVIFLLLL

SEQ ID NO: 65857 - protein, 307 aa, Zea mays
  Coding DNA Sequence Number=SeqID_24078
MKGGLATAASPVERGCRGGRMANEKVETIGGGFETRDWRRGRHGEGAAGAAARWSSPVAGRSSSGAVRSRSRGLRWYGEAQTSDGAASQEEQLQGGLEARAQKMVARIRAAGRRAQSGGGIPSDSGADPKRYGSGGTDPGSSGQATCRMEDRNVMAACGPCTQGEVTRAHSVQEQMWNVQWKTLSARKVSAARGAASVPEEVFHRAKGVQLCNIQAYQCTPAFFADSYPLNQFSSEVIASRLPVPPSARVISERHIISVVPVTRVTMARRKQSFSFYVVGYSRDVFIRDYPSKFCWGLCCCFEWLGK

SEQ ID NO: 65858 - protein, 46 aa, Zea mays
  Coding DNA Sequence Number=SeqID_24079
MSATDHQASARSEGLQAGPAGKRVREREKGAAWAARVEFGIGPTRE

SEQ ID NO: 65859 - protein, 278 aa, Zea mays
  Coding DNA Sequence Number=SeqID_24080
  Gene Ontology: Mol. function=transporter activity; Cellular component= integral to membrane; Biological process=transport
  Homolog annotation: Hit_ID=Q9ATL2; Match level="QueryCoverage=99%, HitCoverage=100%, E-value=1e-124, Identity=85%"; Hit description =Tonoplast membrane integral protein ZmTIP5-1
  Pfam annotation: Domain name=MIP; Domain location=12-261; Score =197.4; E_value=3.4e-56; Accession=PF00230.10; Description=Major intrinsic protein
  Subcellular localization annotation: CTP_CleavageSite=59; ConfidenceScore=5.25e-01
MASNNLLVDLKRCFSAPSLRSYLAEFISTFLFVFTAVGSAISARMLATPDVTSSAWPLVATAVAQAFGLFAAVLIAADVSGGHVNPAVTFAYAIGGRIGVPRAIFYWASQLLGATFACLSLNLLSAGEACACLRNRSRFLPANYTVEVPTTRIAVAMTGFGGAVLEGVLTFLLVYTVHVVGEREPRSRGGDGKREFAATALGALAVGLTQGAFVLAAGALTGASMNPARSFGPAVVSGHFKNQAVYWAGPMVGAAVAALVYQIMACPSVTGNVEAVVV

SEQ ID NO: 65860 - protein, 504 aa, Zea mays
  Coding DNA Sequence Number=SeqID_24081
  Gene Ontology: Cellular component=integral to membrane; Biological process=phosphoenolpyruvate-dependent sugar phosphotransferase system
  Homolog annotation: Hit_ID=Q9LS84; Match level="QueryCoverage=90%, HitCoverage=90%, E-value=7e-66, Identity=53%"; Hit description =Membrane related protein-like
MAGWCEEAVALLQRPAAAEMAVDVLLCAVPIWAAVMIGLVVGWSWRPRWTGLLFLGLRTRLRIIWLPPGLGARRLWFACTALSACSVAPRLLSSAFRRCRGKQQDKASPEDTAAVARDGGGCADGRTNFEGEHDTVTEKDLELLLQLLDNKESGDTAWQNLMERTTSNMTYKAWRREPEEGPIMYCSRTIFEDATPELVRDFFWDGDFRLKWDPMLAYSKSLDEFPQNGATIVHWIKKFPFFCSDREYIFGGRIWESGKTYYCVTKMPRRSYSPAPELPGKRPRVVAAAGAGTRTRALPMPGWGHRQVVDFVDFPNSIADESREKATVKFGLGVPYPSLPKKEKPRRVELYFSSWRIRAVQSPKHVGQQSACEVTLVHYEDMGIPKDVARVAVRHGMWGAVKKLQSGFRAYQQMRDTENTLSHSAIMARMTTRVSITASNGGLDHDLSIADKISGENDSSHAVQHGFDWKWVVFGGAVAAVCVLNTGLVGKVLLLGAARRQAKK

SEQ ID NO: 65861 - protein, 254 aa, Zea mays
  Coding DNA Sequence Number=SeqID_24082
MAPRTLCDDGGSQPPYGSKRTALLQKVGRAGKDGTGARVRPLAPSRVDAWFLADRHRSKINQGPPYTDHSPTALAPFGLCHQRSSTIWTDPADLRPTPAAGSPSAHGAATKKNSGEKFLAAPHFFDRREITNSSTTRPRCTTARSHDQIGKGAGFSPGGGGADRSVPPLSLNGGGSWGSGQVRKATRIGPPHRLYAQGKHGGSCNGIPPSSRRRALRADRCDEGERALTTWGHHVSDRSPGERAVRGAASGTRR

SEQ ID NO: 65862 - protein, 417 aa, Zea mays
  Coding DNA Sequence Number=SeqID_24083
  Gene Ontology: Mol. function=protein binding
  Homolog annotation: Hit_ID=Q6Z1B3; Match level="QueryCoverage=93%, HitCoverage=69%, E-value=2e-35, Identity=33%"; Hit description=F-box protein-like
  Pfam annotation: Domain name=F-box; Domain location=18-66; Score =23.7; E_value=0.00064; Accession=PF00646.23; Description=F-box domain
  Pfam annotation: Domain name=LRR_2; Domain location=227-250; Score =8.2; E_value=1.2; Accession=PF07723.3; Description=Leucine Rich Repeat
  Pfam annotation: Domain name=LRR_2; Domain location=308-332; Score =11.6; E_value=0.41; Accession=PF07723.3; Description=Leucine Rich Repeat
  Pfam module annotation: Pfam domain module=F-box::LRR_2::LRR_2; Domain location=18-66::227-250::308-332
MSSLPLPESPMAAENEACDWGEMPSDALVSVFGKLDVIEILTGAGLVCRAWHRLAASDPMLWRRVDMRHMSYGYEGERLQTEKVEDMARAAIDPSAGTMEPFFADTIVNDDLLRCLSQRSGKRLQTEKVEAMARAAIDRSAGTMEAFFADIFVNDDLLRYLSQRSGKFFQLRLHFFLLKDGWRHGLQLTRGSHSRFSLAVRLVDAPNDCKSVATCEQILWPRPRAPSLKCLHLSACNFTDQCFAEAINCFPQLEELDVTLCLLYGSACEAVGRACPQLKRFRLNELWSISRKEDIGMEALGIASTMPRLQELELIGNNLTNDGLMSILDRCPRLESLDIRECFNIQMDDALKLKCSRIRDLRLPHDPIFFDDTRYWPYYINSGVFDSDIDSEVGTYDDPLDDMGESMSIMFNDDFYV

SEQ ID NO: 65863 - protein, 323 aa, Zea mays
  Coding DNA Sequence Number=SeqID_24084
  Gene Ontology: Mol. function=sequence-specific DNA binding; Cellular component=nucleus; Biological process=regulation of transcription
  Homolog annotation: Hit_ID=Q75L34; Match level="QueryCoverage=70%, HitCoverage=42%, E-value=7e-58, Identity=64%"; Hit description=WRKY transcription factor 5
  Pfam annotation: Domain name=WRKY; Domain location=98-158; Score =137.6; E_value=3.4e-38; Accession=PF03106.6; Description=WRKY DNA -binding domain
  Subcellular localization annotation: CTP_CleavageSite=29; ConfidenceScore=5.22e-01
ASGAAKPMLPTSGVQFMDPAGRVPPPPAPAMAAGAAFSGERGGDSEGGSGSGGEAGPNDGTGTPERGENADNRAPAPAEAPLRRARVSVRARSEAPMISDGCQWRKYGQKMAKGNPCPRAYYRCTMATGCPVRKQVQRCAEDKAVLITTYEGTHSHQLPPQAAAMAKTTSAAAAMLLSGPAVSRDAGALFAGHHVAAPLFAQYHPYASAATLSASAPFPTITLDLTHSPPPPAAGLLQHRLPTPPVPAMPFPMPYGFPGAGGHRLAAAPVPAPHPPAGATLLGLDGKEPVGTGHHDGRDRQRPQLYHGAGGRALDDHGRSRRR

SEQ ID NO: 65864 - protein, 93 aa, Zea mays
  Coding DNA Sequence Number=SeqID_24085
MPRESVFSTSNAPWGVPHDAFPLNLKLIKIIGLRIKQLVPLSDLGEVGSNTRADEVVGEVCGNPTLELTRRWRSLPESTKQRVGEASDDPAPE

SEQ ID NO: 65865 - protein, 265 aa, Zea mays
  Coding DNA Sequence Number=SeqID_24086
MAQIRSRYQGNRYASATLGSRINDHDLKFPQSTLLCPILSNGPEQPEPTATLVLISPVDPSINGQRNASYRTVRALLPRPRPSSEMPRPLAEVRSPVTGFSLPGGSTRGKKDAEGLKGPYQCRFHLEFLPRRVQSSGTTGHEARRTHGNSGLRREIPSAAHANRVRRGHEHHPGGKLKLPDPMPGPQSWYTYVSPVAAVSSQLMEILRWKQGGADPVLYTEMCYGRGNRLKRQRNIRAKAESEILKPNRMRTRLPRILLPAVSLI

SEQ ID NO: 65866 - protein, 96 aa, Zea mays
  Coding DNA Sequence Number=SeqID_24087
MGRLVAEEQKRKKDDVKRRAHKNMAACYALERHRRTRTREGLPLESSPSSEEEEDDDDDDDEGMEVCAGFGPEARLGPAPSPTSPSGGTTLPVEGP

SEQ ID NO: 65867 - protein, 469 aa, Zea mays
  Coding DNA Sequence Number=SeqID_24088
MARLPSRRSSESAKQAVTYLPSRRSVKAYNVGGPDRLFRRKGFETYVFYLQSSRLRISGLSAPTIRTHQCATSVAPDPGLRPFTSQSLKPPSLPFSLPPIHSPLALPLSLPAPCSPDYRSSSLAVVHGTHRTVRNRAGASSDHPLGSSVATVRALPCYVQARRAPAHLAGPSEPRPDRPLPAKPAVPSPCLVRASPEFAGQSAPTPGYPPSRTPLEPLHRTSGHSSPFIARSPLEALAEPSLVVRCSRAKRPPVGFMALSLAEAELVRGGELARGLSLGRVRWRACSRAELGSGEAECPMSRPLCLSHMGAPIGGCQVACAHYLAQAASAAHSSQRVCVSPTRATDRWVHLVSRLPPQIGLTAASGLGASTRHQDGARGLAGLDWHVLHWESLVVVHCCRVFAALRGRWCRLIAPSAEGTQDGIDTDPPGREKPVTGERTSANGLGISLLGLGRGRSALAVQSDVGGGG

SEQ ID NO: 65868 - protein, 763 aa, Zea mays
  Coding DNA Sequence Number=SeqID_24089
  Gene Ontology: Mol. function=sugar porter activity; Cellular component=integral to membrane; Biological process=carbohydrate transport
  Homolog annotation: Hit_ID=Q2R4G0; Match level="QueryCoverage=96%, HitCoverage=96%, E-value=0.0, Identity=65%"; Hit description=Hexose transporter, putative, expressed
  Pfam annotation: Domain name=MFS_1; Domain location=11-703; Score =118.4; E_value=2.1e-32; Accession=PF07690.6; Description=Major Facilitator Superfamily
  Pfam annotation: Domain name=Sugar_tr; Domain location=7-744; Score =187.5; E_value=3.1e-53; Accession=PF00083.14; Description=Sugar (and other) transporter
  Pfam module annotation: Pfam domain module=MFS_1::Sugar_tr; Domain location=11-703::7-744
MQGAVLVAIAAAIGNLLQGLDNAAIAAAVLYIKREFHLETDPALEGVVVATSLFGATIVTIFSGPVSDVIGRRPMLIVSSLLYFAGGLLMLWSPSVPVLLVARLVDGFGVGLAVTLVPVYISETAPPEIRGFLNTLPQLTGSLGMFLSYCMIFYMTLGDSPSWRFMLGVLSVPSLAYLALTVLYLPESPRWLVSKGRMKEARAILQMLRGREDVSGEMALLVEGLGSSDDTVIEEYVLGPAAAGDESEHETRDQVTLYGPEQGLSWVAQQVQGARSSVLGSAVGLASRQGSMYEQMKDPVVTLLGSVHDKMPDSGASARASTLFPNLGSMLSVTERHGGDWDEENVPPNDDLDDDEDEEEYLSDDEDAGAGAAARGGGGGGGALHAPLLSRQSTDVDVTSGTSKKDGSHPPESSPMQRYSSITSGEAASTMGIGGGWQLAWKWTEMVGADGVRRGGVKRMYLHEEGGGDGDSSDPAGGYVHAAALVSPSILYTKDVLIGQSPTPAFDSPPPETVANKAGGGPCWRELLEPGVRRALFCGVMIQILQQLSGINGVMYYTPQILDQAGVSVLLSSLGLSADSASILLSGVTMLMMLPCIVVAMRLMDVAGRRSLLLRTIPVLIVSLAVLVLANVVPMAAKVHALLSTACVVVYFCCFVMGFGPIPNILCAEIFPTRVRGICIAVCSLTFWICDIIVTNSLPVMLRTIGLAGVFGSYAFVCCLSLVFVYLRVPETKGFPLEVIIEFFNVGAKAQKPEQHEEEENHD

SEQ ID NO: 65869 - protein, 126 aa, Zea mays
  Coding DNA Sequence Number=SeqID_24090
MGKNKKGGGSSHHSGNKRKREPSPPLEDFGDSEYSEEEFSAESEGAPVYASPPSEVSLDEENSSEEESGGDGDDEGDGGDGGDSGDDGDDDGKGDGGSNGKGGGKGDGNGKGSGGSSKASGKAPLV

SEQ ID NO: 65870 - protein, 166 aa, Zea mays
  Coding DNA Sequence Number=SeqID_24091
  Gene Ontology: Mol. function=calmodulin binding; Cellular component =integral to membrane; Biological process=cell death
  Homolog annotation: Hit_ID=Q94CG9; Match level="QueryCoverage=99%, HitCoverage=29%, E-value=3e-65, Identity=78%"; Hit description=Seven transmembrane protein Mlo6
  Pfam annotation: Domain name=Mlo; Domain location=1-166; Score= -220.2; E_value=1.5e-08; Accession=PF03094.6; Description=Mlo family
MAIDITERHAVIQGIPMVQVSDSYFWFARPTFVLFLIHFTLFQSVSCLCLCLCLSQNGFQIIYFLWILYEYGMDSCFNDSEEFVFARLCLGVVVQVLCSYVTLPLYALVSQMGSTMKQSIFDEQTSKALKNWRAGAKKKAPTGGSKHGGGGSPTAGGSPTKADGDA

SEQ ID NO: 65871 - protein, 297 aa, Zea mays
  Coding DNA Sequence Number=SeqID_24092
  Gene Ontology: Mol. function=calmodulin binding; Cellular component =integral to membrane; Biological process=cell death
  Homolog annotation: Hit_ID=Q94CG9; Match level="QueryCoverage=94%, HitCoverage=64%, E-value=1e-134, Identity=75%"; Hit description =Seven transmembrane protein Mlo6
  Pfam annotation: Domain name=Mlo; Domain location=8-295; Score=176.0; E_value=9.2e-50; Accession=PF03094.6; Description=Mlo family
MGGGGGGGNSRELDQTPTWAVASVCGVIVLISILLEKGLHHVGEFFSHRKKKAMVEALEKVKAELMVLGFISLLLVFGQNYIIKVCISNHAANTMLPCKLEAAAVEGKDGHGKEAAAVVAGKKKVAVAVPGKKKKKAAAAADHLGGVVDWPPPYYAHNARMLAEASMATKCPEGKVPLISINALHQLHIFIFFLAVFHVSYSAITMALGRAKSNFFRQFFRSVRQADYCALRHSFVNVHLAPGSKFDFQKYIKRSLEDDFKVIVGISPPLWASALIFLFLNVNGWHTMLWDLPHARW

SEQ ID NO: 65872 - protein, 657 aa, Zea mays
  Coding DNA Sequence Number=SeqID_24093
  Gene Ontology: Mol. function=monooxygenase activity; Cellular component=nucleus; Biological process=electron transport
  Homolog annotation: Hit_ID=Q7XI44; Match level="QueryCoverage=99%, HitCoverage=65%, E-value=0.0, Identity=72%"; Hit description =Putative anther ethylene-upregulated protein ER1
  Pfam annotation: Domain name=Ank; Domain location=271-303; Score=3.4; E_value=10; Accession=PF00023.20; Description=Ankyrin repeat
  Pfam annotation: Domain name=Ank; Domain location=304-336; Score =29.3; E_value=1.4e-05; Accession=PF00023.20; Description=Ankyrin repeat
  Pfam annotation: Domain name=Ank; Domain location=343-377; Score=4.1; E_value=8; Accession=PF00023.20; Description=Ankyrin repeat
  Pfam annotation: Domain name=IQ; Domain location=478-498; Score=22.1; E_value=0.002; Accession=PF00612.17; Description=IQ calmodulin -binding motif
  Pfam annotation: Domain name=IQ; Domain location=501-521; Score=30.8; E_value=4.7e-06; Accession=PF00612.17; Description=IQ calmodulin -binding motif
  Pfam annotation: Domain name=TIG; Domain location=72-158; Score=15.7; E_value=0.026; Accession=PF01833.14; Description=IPTTIG domain
  Pfam module annotation: Pfam domain module=Ank::Ank::Ank::IQ::IQ::TIG; Domain location=271-303::304-336::343-377::478-498::501-521::72-158
MEPDGLKKFDSFSRWMSNELPEGVDLDIKSSSDAFWSTTETVNVADGSSIPINEPLDVFVVSPSLSQDQLFSIIDVSPSWAYNGTKTKVLITGTFLAKKEDVENCSWSCMFGDSEVSAEVLVDGSLRCYTPVHHSGRVPFYVTCSNRVACSEVREFEFRDSETHYMDISDKHTTGINEMHLRIRLDKLLSLEPEDYEKYVLSNGNKSELINTISSLMLDNNLSNLALPSDEKELCTVQDQNLEKQVKEKLYYWLIHKIHDDGKGPNVLGKEGQGAIHLVAALGYDWAIKPIVAAGVNINFRDIRGWTALHWAACCGRERTVGALIASGAASGALTDPTQQYPSGRTPADLASENGHKGIAGFLAESALTSHLSALTLKESPSGNVEEICGLTAAEGFAASSSSQLACVNSQEESLKDSLGAVRKSTQAAARIFQAFRVESFHRKKVIEYGDDDCGLSDERTLSLVSLRNPKSGHGDSHSAAVRIQNKFRGWKGRKEFMLIRQKIVKIQAHVRGHQVRKNYRKVVWSVGIVEKVILRWRRKGRGLRGFQPEKQLEGPSWQIQPAKAEAEDEYDFLKDGRKQATGRLDRALARVRSMNQYPEARDQYRRLQACVNSLRESQAMQDRMLADSAGTDGGDFMTELEELCRDDGDAPMSTIS

SEQ ID NO: 65873 - protein, 358 aa, Zea mays
  Coding DNA Sequence Number=SeqID_24094
  Gene Ontology: Mol. function=monooxygenase activity; Cellular component=nucleus; Biological process=electron transport
  Homolog annotation: Hit_ID=Q7XI44; Match level="QueryCoverage=90%, HitCoverage=32%, E-value=1e-116, Identity=65%"; Hit description =Putative anther ethylene-upregulated protein ER1
  Pfam annotation: Domain name=CG-1; Domain location=19-137; Score =304.6; E_value=1.9e-88; Accession=PF03859.7; Description=CG-1 domain
MAEIRKYAMSNQPPDIPQILLEAQSRWLRPTEICQILSNYKKFSIAPEPPNRPQSGSLFLFDRKILRYFRKDGHNWRKKKDGKTVKEAHEKLKVGSVDVLHCYYAHGEENENFQRRTYWLLEEGFMNIVLVHYLEIKGAKQSFNHAKEAEETAGLSNADSPACSNSFASQSQVASRSMDAESPISGQISEYEDAETDNSRASSRYHPFTEMQQPVDAAGYLGEMQPTGANFTSHFATRNDIASVFNDTGSELGGGPKTSIDSVLLGEPFPEYPGGFMESTLYSSVATLGNSLEDGLQTFMSEALYTNNLTQKEVDALGAAGITSSKLPSPPAEVSSLALQYHRSALLKAISTSSLEAT

SEQ ID NO: 65874 - protein, 66 aa, Zea mays
  Coding DNA Sequence Number=SeqID_24095
  Gene Ontology: Mol. function=protein phosphatase type 2C activity; Cellular component=nucleus
  Homolog annotation: Hit_ID=Q1SGL9; Match level="QueryCoverage=80%, HitCoverage=14%, E-value=5e-12, Identity=62%"; Hit description =Protein phosphatase 2C-like
MSRAFDDYYIKDCGVISAPEVTQRRTDNNDQFVILATVVVWDVLSNDETMQIVAYIEVCMILIVAM

SEQ ID NO: 65875 - protein, 182 aa, Zea mays
  Coding DNA Sequence Number=SeqID_24096
MARRAVPPVAPAQRRRWHRRERANGERERPLGGGSHAAVRRDRDYVLNMQVSITFQQYNCLIVFCEGAWSYHEKCFQPPSHVSQVVSSNYRLDWLSKCRDLLLVTLPLLSGTRYIPSILQSVSYPRLFFMDQALSKVYPLFIPRKNVCTGGEETPLTESGSSYFGADSGFCQETVFWFQEKQ

SEQ ID NO: 65876 - protein, 157 aa, Zea mays
  Coding DNA Sequence Number=SeqID_24097
MAGLFIKSRGLLMQNLPAERVRVILSRTIRYRGQGLDLLFYTPVIDQGLWIVIQRSDPHTEASTTQAITIAHTEINGPGSPPNRYADGSNLRRRPRIRRHPSATPNPAAEARRSRSPRRHSSPANVPSEPRSPTEQAARGKTFLGTRRNKWGRKYLS

SEQ ID NO: 65877 - protein, 114 aa, Zea mays
  Coding DNA Sequence Number=SeqID_24098
  Gene Ontology: Mol. function=catalytic activity; Biological process =cellular metabolic process
  Homolog annotation: Hit_ID=Q69U05; Match level="QueryCoverage=94%, HitCoverage=33%, E-value=1e-27, Identity=47%"; Hit description =Putative cinnamoyl-CoA reductase
MQSEVLAPAVQGTLNILQACSANNIQKVVVVSSTAAVHFDPNWPPHRPKDEDCWSDINFCKKNEDWYMVAKVIAEKTALEYGERNGLNVVTVCPTMALGPLLRPMLNVIEQVYP

SEQ ID NO: 65878 - protein, 212 aa, Zea mays
  Coding DNA Sequence Number=SeqID_24099
MAGLFIKSRGLLMQNLPAERVRVILSRTIRYRGQGLDLLFYTPVIDQGLWIVIQRSDPHTEASTTQAITIAHTEINGPGSPPNRGGADSARGGMDHPPPSLSIVPHLMTWAAPDGLSRGGKHLRAVDFTGEGKSELVRATAVGASLPARRSRSVAGERGRIRRDDPTKRGSRGSVGGGRALPTARKRCSDRRGEEEWVRQVETTRQRPKVTS

SEQ ID NO: 65879 - protein, 61 aa, Zea mays
  Coding DNA Sequence Number=SeqID_24100
MGKAAGTPGHSLEKPCLFQSAQRCVQDRFLGSQPDPSASDMLTIHAEKKLPGQVLCANVIR

SEQ ID NO: 65880 - protein, 268 aa, Zea mays
  Coding DNA Sequence Number=SeqID_24101
  Gene Ontology: Mol. function=catalytic activity; Cellular component =cytosol; Biological process=cellular metabolic process
  Homolog annotation: Hit_ID=O22809; Match level="QueryCoverage=89%, HitCoverage=68%, E-value=2e-52, Identity=46%"; Hit description =Putative cinnamoyl-CoA reductase
  Pfam annotation: Domain name=Epimerase; Domain location=1-177; Score=- 52.4; E_value=0.01; Accession=PF01370.11; Description=NAD dependent epimerasedehydratase family
  Subcellular localization annotation: CTP_CleavageSite=21; ConfidenceScore=5.22e-01
MQSEVLSPAVKGTLNVLQACSANNVQKVVVVSSTAAVYFNPSWPQGRTKDESCWSDRDLCIKNENWYCAAKTIAEETAVEYGEKNGLIVVTVCPCIVLGPLLQPLINASSELLVYIIKGGFYIFLLVSNIHWLDNYSHGGPRVLKNLPWNIVDVRDVADALLLVYEKVESSGRYICAPNRISTNNMVNLFKKSYPNYNYVNCDNKDYESEISPVTSEKLKSLGWNPRTMEKTLLDNIEYFEKAGFLRDGEDVLHTLLQIEPDNNKPSL

SEQ ID NO: 65881 - protein, 79 aa, Zea mays
  Coding DNA Sequence Number=SeqID_24102
  Gene Ontology: Mol. function=cinnamoyl-CoA reductase activity; Biological process=cellular metabolic process
  Homolog annotation: Hit_ID=Q8H1H7; Match level="QueryCoverage=94%, HitCoverage=22%, E-value=2e-10, Identity=46%"; Hit description =Cinnamoyl CoA reductase
MNASWLQRLVTSTLRGAPLPSYPNNAHLKELEKAPENLYLFKADEPDHDTLTAAVEGCEGIFHLATPAVPEDKIVDPEA

SEQ ID NO: 65882 - protein, 154 aa, Zea mays
  Coding DNA Sequence Number=SeqID_24103
  Gene Ontology: Mol. function=4 iron, 4 sulfur cluster binding; Biological process=electron transport
  Homolog annotation: Hit_ID=Q69QZ2; Match level="QueryCoverage=69%, HitCoverage=38%, E-value=6e-19, Identity=48%"; Hit description=F-box protein-like
MYGEIKVDVGRDELQATSEAFDSAPTRLTDERLKAPGLNCPMLEVVELTFTFCSSVYPTEIRFHTERYGIVALIQTCLVRAFMLDGVYIFYDSGLEGISSAPFLERLKLLDRKRITGAGVSFVAPRLSSLTISGEGVQGPATDIMFGNTVYRNI

SEQ ID NO: 65883 - protein, 206 aa, Zea mays
  Coding DNA Sequence Number=SeqID_24104
  Gene Ontology: Mol. function=metal ion binding
  Homolog annotation: Hit_ID=Q69QZ7; Match level="QueryCoverage=97%, HitCoverage=90%, E-value=4e-18, Identity=35%"; Hit description=RING -H2 zinc finger protein-like
  Pfam annotation: Domain name=zf-C3HC4; Domain location=160-200; Score= 30.5; E_value=5.9e-06; Accession=PF00097.15; Description=Zinc finger, C3HC4 type (RING finger)
MAGMLPGVEFARRRRRASSLCLYAPSSKEWSSACMETTATATARAWTTLGLGSGAREAKERLDQKLRAQRQPVVLKRHEMSTSPTITKAHDDATCRCSGGLHRHHSSACSSDTGVLLRREVVSSPKPNKKGGGGGGGRFGWCRLLAGGRRGPPAAAEAGCAVCLEELRAGDVVARLPCAHRFHWSCAVPWVQAASRCPVCRAHARV

SEQ ID NO: 65884 - protein, 121 aa, Zea mays
  Coding DNA Sequence Number=SeqID_24105
MAREEEGPAAAKLPPSCADEEDPAPKHPPRLRRARRRDGASARLLPAPISLAGSRFRAFPPTSSPSGRGCAADERNDEEIARKCRVKLTTLRGNPLFLAHATDCCIDLFPSSQFRELEQFG

SEQ ID NO: 65885 - protein, 244 aa, Zea mays
  Coding DNA Sequence Number=SeqID_24106
  Homolog annotation: Hit_ID=Q69QZ3; Match level="QueryCoverage=98%, HitCoverage=36%, E-value=7e-90, Identity=67%"; Hit description =Neurochondrin protein-like
MWQDHGQWKGDDLLAAARIVGSYLAEAPYACKEKTGNLLEFIFSIEGQDESRLLLLYFVLSSSFYSICFMLPMLSQITMEVDGCRTLASFGGHKAVIDCLVKMTEQGGMTIDNGSMFLACDTIINFMSNMKSVHIPVDYCFIRLLKALVTWAGTTDASSVTMTASCLCVMLLDMTSEKFLLSCSHFDANILGSLSEIIIRSLQQDIPDDDSEQFKQKQIIVSGYKRWADRFPRLKDVVEQHVSV

SEQ ID NO: 65886 - protein, 142 aa, Zea mays
  Coding DNA Sequence Number=SeqID_24107
MDMEVGRRRGSSGAAVLASWAVGDWRVSEWRWSSGARTGVPRADLPGRPVREWRWSSKREQWTLAVWHAAACRWPLDRAGAVDQCRARAVEQWISDSVPERDGSSGSVDDWTWSVVTWSGGLERRRAERRARSARGGVAATV

SEQ ID NO: 65887 - protein, 298 aa, Zea mays
  Coding DNA Sequence Number=SeqID_24108
  Homolog annotation: Hit_ID=Q33B99; Match level="QueryCoverage=89%, HitCoverage=32%, E-value=3e-14, Identity=27%"; Hit description =Expressed protein
  Pfam annotation: Domain name=DUF639; Domain location=1-293; Score= -204.0; E_value=6.7e-08; Accession=PF04842.3; Description=Plant protein of unknown function (DUF639)
  Subcellular localization annotation: CTP_CleavageSite=58; ConfidenceScore=5.27e-01
AIGLSGTKKPMRLDLTNQNSRAEKTKVGPFGSKLFDSAVSVSSGSMSDEWTLEFVDFSGEMRRDVWLAFISEIISVYRFIREYGPGGDDPAIHNVYGAYKGKKRAVSSAANSIARLQSLQFIRRLYEDPAKLVQFSYLSNAPFGDVVLQTLAVNFWGGPLTTKARSANHRSTQWHRSSEDPSSGRTHVYDIDGSVYLRKWMTSPSWTSSHSANFWRNSSVKYGIILSKSLVVADKNLVEKAMVDCKEKSKVVERTQATIVAATIEGIPSNIDLFKVSYFSMSYFFLSHPEKSNIDPLY

SEQ ID NO: 65888 - protein, 113 aa, Zea mays
  Coding DNA Sequence Number=SeqID_24109
MEQTSMRASPRCCSGWSGVVRLPTRAGVLRCCGGVKGDLCLLRELEAEIIVDKGYVEVEGVGLTTADGVLLNGNLGLTSNGEDEVTPEGVSGSRVEEDENQQPYVLDTSRLNM

SEQ ID NO: 65889 - protein, 175 aa, Zea mays
  Coding DNA Sequence Number=SeqID_24110
  Subcellular localization annotation: CTP_CleavageSite=55; ConfidenceScore=5.02e-01
MGRLLTSSANSGAPGGRGRVVKPRVDGGGLRLRKKCSDERGPVKPEGERTNQGVSRVAKGEAKLIGATDATRAQRRSRNGTGLRARGLKGRGRAEVAAERADVGTSPARDVGGSSERERGREEVRGLAPTGGTRLLGIKGAGTGMGLGLGFFVVYGEMVLTIGDLMMRLTSSHRL

SEQ ID NO: 65890 - protein, 94 aa, Zea mays
  Coding DNA Sequence Number=SeqID_24111
MGIRFFGTEPRPPLGDFQSQATFSSSPDPLQADDWLKAVEKMLNIAQCTDREKIKKKEFLSLKQGGMSVPPLVAVLDNSLHRSKLLLKQVPQQD

SEQ ID NO: 65891 - protein, 105 aa, Zea mays
  Coding DNA Sequence Number=SeqID_24112
MAGWGVFIGPNSILAVGEKLLLCSTLDSPVEAPDSPVPCLMRLAVASDTQVTVGAASFYTGQSGGFSPPMPPGTSRWATVPWCTDPACGTGRSGVPPDSLVSSTR

SEQ ID NO: 65892 - protein, 442 aa, Zea mays
  Coding DNA Sequence Number=SeqID_24113
  Homolog annotation: Hit_ID=Q6K884; Match level="QueryCoverage=89%, HitCoverage=54%, E-value=9e-64, Identity=63%"; Hit description =Transducin-like
  Subcellular localization annotation: CTP_CleavageSite=69; ConfidenceScore=5.18e-01
MDVCPGEPTSSNDIPDAVTVPTSNGNEMHGAGGQSNSRLQGSSSTSNLERFSARDDLQVSSLSRTDPIPLTAGPSGSDLHRAMPLNMLLTGGLDVQMFLRNVGSGQQDHSLFGDSRNWEVPFLQGFLMAPNHAGLHPALVNNSVLEDMSIAGTAGTNNLKSPHMRNFGCPGASSSIPLTTGSSRGPNRRYASRSVPGVGNLLLGPQIDEAEAHAVSLGAGSEITASMLAPGTELPCTVKLRIWRHGTNEPCVPLEPEACCLTISHAVLCRFGDILASRAIRAAHCLTSIQFSPTSEHILLAYGRRHSSLLRSIVVEGENGVPVYTILEVYRVSDMELVRVLPSAEDEVNVACFHPSPGGGLVYGTKEGKLRILQHNGADMTNMGVGCFIEENMVELLTDSAPPFHSFNFSQLRSKARQVDLSQQLKPKAPSKDTTHQNVVVI

SEQ ID NO: 65893 - protein, 120 aa, Zea mays
  Coding DNA Sequence Number=SeqID_24114
  Subcellular localization annotation: CTP_CleavageSite=82; ConfidenceScore=5.17e-01
MSDQGHNLPETQNSRYQLALQMTRTLAASRSNTNKHDPKSNGHALFSFLSPSWATPCPNRGGALAEPRTTDTPMTTGARDPIAAAAHALEVAKQSDSKVTYPRWQCDAYCPRIEALHNDV

SEQ ID NO: 65894 - protein, 107 aa, Zea mays
  Coding DNA Sequence Number=SeqID_24115
MPCSELITEEKPGSSEKKNEGKTPSKETGNKHKEGKDESTSSINSHKKGNKKKKKMKKVVYYETDSSMPSTSSVESTSSKHQEPQAPQVDDEDYDSDEAAQVRHFNS

SEQ ID NO: 65895 - protein, 167 aa, Zea mays
  Coding DNA Sequence Number=SeqID_24116
  Subcellular localization annotation: CTP_CleavageSite=45; ConfidenceScore=5.01e-01
MTSGYRHSRTTSSSERRSDGGAARLSDRSTPSPGRRSCQGGVMVAAEEKKKKDEEKKRARKKMLVHDSLEKHYRPQAREGLTLEASPSTEEEEEEDEEEEEMEFRMGFSLEVGSGSAPASVGPSSGTVPSTQGPTASLSGTRVSADPAPPLPWWKRQGSWRRKSPPP

SEQ ID NO: 65896 - protein, 97 aa, Zea mays
  Coding DNA Sequence Number=SeqID_24117
MALTPAVTSWIVDSGASYHTTLDAGSRYLEPSRLRLPLNIMLSLHLRRSCTHWLLSLYLALDIVDSVILALMCCPSCVVVQSFLILGPLSIYAMPVS

SEQ ID NO: 65897 - protein, 95 aa, Zea mays
  Coding DNA Sequence Number=SeqID_24118
MAWSCRVATTSERGGAPLEHDKVSDASPKVMVALVEATEKIEDECAMGDTPWGQTEGGHHAFHLAIILGDKEVSLKRNVPKGIVKLDIVSLTVCQ

SEQ ID NO: 65898 - protein, 118 aa, Zea mays
  Coding DNA Sequence Number=SeqID_24119
  Homolog annotation: Hit_ID=Q6K884; Match level="QueryCoverage=70%, HitCoverage=12%, E-value=3e-35, Identity=75%"; Hit description =Transducin-like
MWNESPKYDPDSIELRAESQSLHSWSAKYCPLLPPPRSTIAAAFSPDGKTLASTHGDHTVKIIDCQTGKCLKVLTGHRRTPWVISIMCFKLLQRKESSYTVYRPSADGSHMSGGLRKE

SEQ ID NO: 65899 - protein, 76 aa, Zea mays
  Coding DNA Sequence Number=SeqID_24120
MLERREGSGAGEGRGLAQPAGAREGANRGGSGAGGRRGLQTTRESGASGWRDLQRVARIQRYKGSEYPKPFLYTVG

SEQ ID NO: 65900 - protein, 192 aa, Zea mays
  Coding DNA Sequence Number=SeqID_24121
MADAGGGQARANKGVVARGGFASTLWLLHTPLRPPSEFKAPEPRKKFEEQFAQARCKNKTPKFEEQFAQGSCKNKTPFRFFSIPMRTSGSENRKHKKHITFVEVNMTCLNASLVIETGPGKEKKDNISRNEVKTAAAAKQLLATRKQRHTRDETHQAADEPKSSKAISQLPSRGRSEMNPNKRQAIERVQVQ

SEQ ID NO: 65901 - protein, 272 aa, Zea mays
  Coding DNA Sequence Number=SeqID_24122
  Gene Ontology: Mol. function=protein serine/threonine phosphatase activity; Cellular component=protein serine/threonine phosphatase complex; Biological process=protein amino acid dephosphorylation
  Homolog annotation: Hit_ID=Q6L5C4; Match level="QueryCoverage=81%, HitCoverage=41%, E-value=1e-46, Identity=51%"; Hit description =Protein phosphatase 2C
  Subcellular localization annotation: CTP_CleavageSite=39; ConfidenceScore=5.05e-01
MVYDGAVKDQDQETVAASTASAASVVAVSEASPAPVVVVVSARPSARPPHDKRLGVRHPLKHRWFRAGGKMMMEPGGVLPAHAHEEEEEGASEVEEEELVEAEASSAETVTWGAEVEVSSAPAAGVQEMNAEVEGGEMEVSPEPAVAVGGTELEPQQDDEDEVSSVVLARGERKQEAAPASAVLAVEAPMEMGQDEERAEKEKRGKERERQKERERVDEVGYMSGGWKSVDGTLNCGYSSFRGRRASMEDFYDIKASKIDDKQINLFGIFDG

SEQ ID NO: 65902 - protein, 985 aa, Zea mays
  Coding DNA Sequence Number=SeqID_24123
  Homolog annotation: Hit_ID=Q9FSB6; Match level="QueryCoverage=34%, HitCoverage=54%, E-value=1e-50, Identity=34%"; Hit description=67kD chloroplastic RNA-binding protein, P67.1
  Pfam annotation: Domain name=PPR; Domain location=171-205; Score=7.6; E_value=0.95; Accession=PF01535.11; Description=PPR repeat
  Pfam annotation: Domain name=PPR; Domain location=240-274; Score=8.9; E_value=0.66; Accession=PF01535.11; Description=PPR repeat
  Pfam annotation: Domain name=PPR; Domain location=275-309; Score =16.1; E_value=0.093; Accession=PF01535.11; Description=PPR repeat
  Pfam annotation: Domain name=PPR; Domain location=310-344; Score=7.5; E_value=0.96; Accession=PF01535.11; Description=PPR repeat
  Pfam annotation: Domain name=PPR; Domain location=381-415; Score =14.8; E_value=0.13; Accession=PF01535.11; Description=PPR repeat
  Pfam annotation: Domain name=PPR; Domain location=416-450; Score=8.0; E_value=0.83; Accession=PF01535.11; Description=PPR repeat
  Pfam module annotation: Pfam domain module=PPR::PPR::PPR::PPR::PPR::PP R; Domain location=171-205::240-274::275-309::310-344::381-415::416 -450
MEHQSSDHDEITHADYPPYKVGRSTTWDSDDYGSNCALHHTIGLPDFSHELWCFQMVTCYPAFIHNLDDAHERIGTSIATTLRVHGMRVADTPMRAGLGRHARLASTAAVLKACDPDEAVVEAGLQSAFPEPPSEQDTVIMLNMATATRPEIAVLALRWFLGNVEVWKKVIIYKVKLKLLRKKRHWRETEALWAKMLRHGMQPGNTIFSTIISCVRLRPPEQGCRVVRQDAGVWVLTGLAHILCVNKVHSTSGNFNGALNVFEEMKATGVKPNLVMCNTMLDVMGHVLQPWVVKTIHREMVNKQVQPSRTAYYCLLHAYTRALTGEDAMAVYQLMKDEAMGVMLYNMLLSMYADIGYVDKAEEIFRDLSVPMDDHSKPDKWRYSSMVMQYSSTANVLGVEVILNEMVEAGLKPNIFVWTSLSRCYGKAGRTDDVVRSFGMLQDLARRTCLRRGSYLRRGTCLRGRVVSLHHGKLMVDAVERQDVEATSQIGCILLEDAAARIVDEYQPPLQLSPDPASSSPATKATYHLNEQADFRKDTVELVQIRFEEMPSASVRGKDALLHELHTCVCDDDVGAVDIYGMARVGKTAFLKAATEGGNAFKSGLIAKTNRGILYVYEVNLLDNHLVDVLLDSAAPGWNMVDRKGYELIEALAQQKSGEKCGPLVLKKKLVQSWDPGNLFYQGCIRVISHPARFNLINSDQLLMVLSSSAWSGTETATTWRLQGQIQHQDILVLINSGSSHTSINDKYFPLLTGVQPLERCLNVKVAKSPIISCSHQLPQTRWPMSGYQFVVDLIFLSLPLVDLNLGRNWLQVHSTMKVGWYNKWMIISYQGTSVCLQGLVSSFPSGALIKLQLLPDHLIYESAGEHGMSTLEPKGQSILSQLVVVFAEPVQLHTIEAKWELFNGKHNLGGDQCCVLHLSIHGLGDLQMQHASLSFVKKKGWQVLKQSNTLPDKPSPATAPTTKQSSTNLPATSSTPRLATLSAA

SEQ ID NO: 65903 - protein, 251 aa, Zea mays
  Coding DNA Sequence Number=SeqID_24124
MAKISSSQADVRVRTRAWADQQARDVSDPDQNWAVRMGDWDFTFTGKPGAAFPTDTVAPSPAARQAGAPKALGDEVGSLTQTRCLGQLGTARGGSGWPGVEESRWRQAPTCAGERLSTDRAEELRKGESTGESQCPNLRRSSLWPKRWQKCSGDGRTAKRQRGKAALRLGECEGGGSVNVRQGELRECVGYLPSARVTWAGRGDVGAGLTARVHAMGAAVADEGAGLTSRAREPARAGVREHAMVMTGQSH

SEQ ID NO: 65904 - protein, 57 aa, Zea mays
  Coding DNA Sequence Number=SeqID_24125
MKQLRTSPQQGRCEIAHTLFRSFKNEIGFLTRPLAPFPVDEEEVGDDEVAPEADAAE

SEQ ID NO: 65905 - protein, 576 aa, Zea mays
  Coding DNA Sequence Number=SeqID_24126
  Homolog annotation: Hit_ID=Q00XE1; Match level="QueryCoverage=40%, HitCoverage=87%, E-value=4e-10, Identity=26%"; Hit description =Homology to unknown gene
  Pfam annotation: Domain name=DUF179; Domain location=99-291; Score =188.9; E_value=1.2e-53; Accession=PF02622.6; Description =Uncharacterized ACR, COG1678
  Subcellular localization annotation: CTP_CleavageSite=47; ConfidenceScore=5.59e-01
METTSCFLASKASSASRSTAVLPPTAPGFAKPKPYLQLLGSSRRRACCGSISARGAPEDGAAPPPIGPDWRSFRAQLYFKEQLPAVQTGGDRWAHPLAEPEKGCLLIATEKLDGSHIFERTVILLLSSPSSLGPVGVILNRPSLMSIKEASGSIFADDADIARAFAGRPLFFGGPLEECFFVIGPRAAAGGGGDDAVARTGLFEEVMPGLHYGTRETVGCAAELAKRGVVGVRDFRFFDGFCGWEREQLRDEVRAGLWHVAACSAAVLELATVVKGGLWEEVQGLVGERRLCARLPTASSTTASSTDVGRLHTIAEVLAILDSQGFGRLSDAADDSGSEYEADTSDPNAGERNGGGGNAAEDALTGSELGAPAVAAAAASAAQAGGLSWRGHAASPKCERRRPQHQQHMGRQLRQRHGHGHRRGYFYCRAADSSPKYHPGQSCRKIKRKELRSQTEEEEGNTEEVEGNDNAVENTEDGQERSDCTVCTDLPADVDGEVNQDGHGSSSNGRVEGRDDLAMVYQKDGEMERVLEKQAELIGQFKAQENAQREWEEKFSLRRDSVMDNVNLLNNKAKSG

SEQ ID NO: 65906 - protein, 497 aa, Zea mays
  Coding DNA Sequence Number=SeqID_24127
  Gene Ontology: Mol. function=DNA-directed RNA polymerase activity; Cellular component=plastid; Biological process=regulation of transcription, DNA-dependent
  Homolog annotation: Hit_ID=Q84JN3; Match level="QueryCoverage=99%, HitCoverage=100%, E-value=1e-164, Identity=63%"; Hit description=Sig5
  Pfam annotation: Domain name=Sigma70_r2; Domain location=263-336; Score=41.1; E_value=3.9e-09; Accession=PF04542.4; Description=Sigma -70 region 2
  Pfam annotation: Domain name=Sigma70_r3; Domain location=339-420; Score=62.4; E_value=1.5e-15; Accession=PF04539.6; Description=Sigma -70 region 3
  Pfam annotation: Domain name=Sigma70_r4; Domain location=433-486; Score=62.0; E_value=2e-15; Accession=PF04545.6; Description=Sigma-70, region 4
  Pfam annotation: Domain name=Sigma70_r4_2; Domain location=427-484; Score=10.4; E_value=0.058; Accession=PF08281.2; Description=Sigma-70, region 4
  Pfam module annotation: Pfam domain module=Sigma70_r2::Sigma70 _r3::Sigma70_r4::Sigma70_r4_2; Domain location=263-336::339-420::433 -486::427-484
  Subcellular localization annotation: CTP_CleavageSite=50; ConfidenceScore=5.69e-01
MTSTVTTPSRPLAAGSRPRRSGPAVLSLSKGGGGQRRQRRLAPSTSCAVLASPDKQSTANKLPLSSRKQEEEVEKATDYNEVAAALETIYKLSPAVEVEEKKRQGGNEDDGGGEAKKKRKRRVAGRSTVVVRSRRRRGGRRMDLGKRVEMKGAAAASREQQQGGEEQGEREFEEMLLREHSVSTDMGSLDWKRMKIPPVLTSSQSARLFKTMQPMKAIFEAQESLREELQRDPTDAEVAEATGMTVHQLRRRLDVGRAARNKLIKHNLRLVPYALNKYYPDMGGDERFDELCQAGANGLITAIDRFEPKRGFRISTYALFWIRHSIVRAMTLSSFTRFPFAMESERQEIGRAREELAFELGRPPTDEEVRARVGLSPQRYRDVLRMARPTYSLHARNRVTQEELIGEVTDAEAVGVDAGGKHDALLRLAIDDLLDSLKPKESLVIRQRFGLDGRGRRTLSEVAGNLSISREMVRKYELKALMKLKHPTRVEYLRRYM

SEQ ID NO: 65907 - protein, 575 aa, Zea mays
  Coding DNA Sequence Number=SeqID_24128
  Gene Ontology: Mol. function=nucleic acid binding; Biological process= DNA integration
  Homolog annotation: Hit_ID=Q109Y3; Match level="QueryCoverage=35%, HitCoverage=35%, E-value=8e-13, Identity=29%"; Hit description =NUMOD3 motif family protein, expressed
DNGRGRGIANEGHSDIEVDGCQQGRDTGDGPKEAAQVFVVERCAQAHPHERRRHVQQRRLAAFSSYKSESLDFFQADSAPRRSYSYPIVSFASASGCGAGVSLLAAMLRAVAVEGGKHCRLSRAGVATDGSYQSQGAWEGVPHLPLNRDEATLSVARCRWRQKWSGPVAATSILSGEQLSTQPTCDLGSGTDFLVGWEWRSEGEQAQEKWILACSASGGHWRLRCRGWGWAHECEKWIRGRRQWASAVAIVMTGSHYRSRLLVPSSSRGLPEAMAAAAVHCSRAYVPLSSGAYSRKKPTCHKYCASVELTWKPCRLVGYRDFRLKELACQQLAHGVDEQYPVKSSTVEQAQDRQPCLPQGDAYFAGLSKKEIERRRKIGAANKGKVPWTKGRKWSEEHKKVIRQRTAEALRDPKVMSYQEENVRAPQTSKDKISAALRTVWERRIVSVRSRQKVLQIWSNSIAEAAKNGGHGQDMLGWDSYERIKSEMVSTFLWIKERGRMVKKLERAVAKIAAKRLQVVRRREEQATRMKKLKPDCQTLLQNADRQPARVVVSARPKLKERLAKEHHRKDGHVP

SEQ ID NO: 65908 - protein, 341 aa, Zea mays
  Coding DNA Sequence Number=SeqID_24129
  Gene Ontology: Mol. function=ATPase activity; Cellular component =chromosome; Biological process=chromosome organization and biogenesis
  Homolog annotation: Hit_ID=Q8GU54; Match level="QueryCoverage=99%, HitCoverage=32%, E-value=1e-121, Identity=62%"; Hit description=SMC3 protein
  Pfam annotation: Domain name=SMC_N; Domain location=47-319; Score= -127.5; E_value=0.028; Accession=PF02463.9; Description=RecFRecNSMC N terminal domain
IEARKEELETNLSTNLIRRQKELEAIISSADSRTLPLEAEAKEQELKSSKRNLDELTSLLKANVDAINNFTRKMDDLKRKRDDLKAREAILEQTVQDGAKDLEQLMNSRNTYLAKQEECTKKIRDLGLLPADAFEAYKRKNKKQLHKILYDCNEQLKQFSHVNQKALDQYVNFTEQREQLQRRRAELDAGDVKIMELISVLDQRKDESIERTFKGVARHFREVFSELVQGGHGYLVMMKKKDGDAVDDDEEEDGPRDPGPDGRIEKYIVLLLSLSFIPDMIRRLADMADTQFIATTFRPEIAKVADKIYAVRHKNRVSNIDVVSKEEALDFIERDQTYNAS

SEQ ID NO: 65909 - protein, 184 aa, Zea mays
  Coding DNA Sequence Number=SeqID_24130
MQASIAVAEALDAGKLTPQPVADAADFAVAGLAVAIGTLAVTASFMLVSFDARAGQGQLRRILDLGPSLCGPRLLLVFFVGLLAAAEMLRLPFFHGAMLPPRHHVMPCLAYPLVAHGIAEPGLLASSALVVPLACLPFLTVHVLVLATPATVAAYPGQLAHAADGIGHCAYPTYAATLLLALIA

SEQ ID NO: 65910 - protein, 113 aa, Zea mays
  Coding DNA Sequence Number=SeqID_24131
  Subcellular localization annotation: CTP_CleavageSite=64; ConfidenceScore=5.30e-01
MEANPNHCLCRLASALSHGPRLPTPPPPLLFPRLALSSSVPSTGPPPSLDAVRKGEGEEAAEARASEADAEAGKEEEHEDDGGAHVNKATCEVGSVSNAQQLPAMVLSDIKNK

SEQ ID NO: 65911 - protein, 263 aa, Zea mays
  Coding DNA Sequence Number=SeqID_24132
  Gene Ontology: Mol. function=transferase activity; Cellular component= nucleus; Biological process=regulation of transcription, DNA-dependent
  Homolog annotation: Hit_ID=Q5VPG5; Match level="QueryCoverage=92%, HitCoverage=66%, E-value=3e-90, Identity=67%"; Hit description =Putative CCR4-associated factor 1
  Pfam annotation: Domain name=CAF1; Domain location=14-241; Score =214.7; E_value=2.1e-61; Accession=PF04857.10; Description=CAF1 family ribonuclease
MEAAAKKEVRAEVRDVWAGNLDAELANLSAVLPHYPCVCVDTEFPGAVHGSDTPRHLRGPRESYALVKRNVDDLKLLQVGIALSGPAGRFPVAWQFNLRGFDPARHPYAPASIAMLRAQGMDFAALNKFGVDPYDFAVGFHRSGLACGQLTWTAFSGAYDFAYLAKVLTGGQPLPATLDGFLALVRRLFGCNVLDVKHLARCCAMRGGLEQVSAALGVERAAGRAHCAGSDSLLTTDVLLAMMNRFFTNVNVLAHAGTIVDLA

SEQ ID NO: 65912 - protein, 106 aa, Zea mays
  Coding DNA Sequence Number=SeqID_24133
  Subcellular localization annotation: CTP_CleavageSite=95; ConfidenceScore=5.25e-01
MMLVDQTTVLDGPSVSVKGPTWQGVKSVVKMTIGASLAEAQGRAASQTPPSAEARGKSPAAPAPGVGAPTPRVVTQRTGPYGKVLRKQPESPKVSQDHHQDNIIVS

SEQ ID NO: 65913 - protein, 122 aa, Zea mays
  Coding DNA Sequence Number=SeqID_24134
MAQGGAWRCPRSDRGMDVKGKCALGPFLSILNQRKYNWICLGSSSQDSARSRCTGQCPVRQAGSGEKAALGNSSWRTAKIHRTVRCAPDCPGERLQVVEIPHKWEIVKKEEHRGIQADHWIT

SEQ ID NO: 65914 - protein, 147 aa, Zea mays
  Coding DNA Sequence Number=SeqID_24135
MGERRREGTLGGSDNSGEEFRLGRGGLGRAKDWASYDRVRGTLWPKAEAQDQAKSASHGAGATNREEAERGPGGKVEERGNHCGFPVRQAQAELTVAKALGEVQRRWRNGLAGGAHTMGTTVAEEEDGSDGQGPRVSESEWQNGRTG

SEQ ID NO: 65915 - protein, 68 aa, Zea mays
  Coding DNA Sequence Number=SeqID_24136
MELLNLLCQIALKGRMDEQWTKQDHGFSASIAASDLRTAVHAGHRDSRVTAAIRALCEVDNRRRLENE

SEQ ID NO: 65916 - protein, 52 aa, Zea mays
  Coding DNA Sequence Number=SeqID_24137
MGTNGHLDLDMGGKSVDQKGSGVEDNLAIKGQRTITLANGLQAGKCLIESCR

SEQ ID NO: 65917 - protein, 146 aa, Zea mays
  Coding DNA Sequence Number=SeqID_24138
MEVSAARRGKHNRGAMDRELLLACSKGAELGRLSAGRKKLLLGVPSLWELDHGCPAQGRTGRRAPWEELSSLLVAVETREEEKKRAPAAAARGRRSSGRRAAGVEVRPWERGELAGETPWLLALLPARLLLRVGGRKLLAVERNGG

SEQ ID NO: 65918 - protein, 63 aa, Zea mays
  Coding DNA Sequence Number=SeqID_24139
MGKPVPSLLMLLLSRGWVPLDCPTRCDRTCTHHNRSGRPHLRSREEGNLLPGSLRSYGTLRRI

SEQ ID NO: 65919 - protein, 428 aa, Zea mays
  Coding DNA Sequence Number=SeqID_24140
  Gene Ontology: Mol. function=nucleic acid binding; Cellular component= cytoplasm; Biological process=ribosome biogenesis and assembly
  Homolog annotation: Hit_ID=Q4SG97; Match level="QueryCoverage=56%, HitCoverage=61%, E-value=5e-53, Identity=44%"; Hit description =Chromosome 17 SCAF14597, whole genome shotgun sequence
  Pfam annotation: Domain name=zf-CCCH; Domain location=131-156; Score =25.1; E_value=0.00026; Accession=PF00642.15; Description=Zinc finger C-x8-C-x5-C-x3-H type (and similar)
MPPKKAAPSKAELAKKQKVVEDKTFGLKNKNKSKNVQKYVQSLHQAVQPKPDSTKTAAKVPESAQIESPPRCFLRFSLRLPRSSNVYFLFDVDADVGEQKKKEEEKAREKELNDLFKVAVSQPKVPVGVDPKSILCEFFKAGQCQKGFKCKFSHDLNVQRKGEKIDIYTDKRDAETMEDWDQETLEKVVESKKMEYQQNKPTDIVCKYFLDAVEKKQYGWFWVCPNGGKECHYRHALPPGYVLKSQMKALLEEESEKIAIEDEIEDQRKKTKTTTPMTTELFMEWKRRKAEEREAGQAALKAERAKNDRMSGRELFMADASVFVDDAEAYEVYEREESEANEESVNVPSFADICPLSSRRGQRNNRLTNKSQNPGPSSSTSNGKEVEEPDDDDIDVDDDLDIDELNELEASLSRTSIQIREPGEGTSS

SEQ ID NO: 65920 - protein, 63 aa, Zea mays
  Coding DNA Sequence Number=SeqID_24141
MEHGYPCNGCGGNKEKRPPLKRGQLKLRAMSWRACCSIVIWLFSSTQLASQLLIRIRAVVTVS

SEQ ID NO: 65921 - protein, 185 aa, Zea mays
  Coding DNA Sequence Number=SeqID_24142
MATGGCEAAPLGRARLVLVKTPSGNPLPRRRGQVKERIVRDIADALATAAVLACGDRTVVGAGKKGEGGRAPASPSPGAKKKWYPRESGNDEDHRSIIAGGPEIGPLGDGISSHADFMPTARRSALRRSGYAAVGEKRSLPRVSRNPNRFSVVTVSRPAVQYSATMPNLTDGCFVPCDVSSDLLN

SEQ ID NO: 65922 - protein, 627 aa, Zea mays
  Coding DNA Sequence Number=SeqID_24143
  Homolog annotation: Hit_ID=Q01G74; Match level="QueryCoverage=80%, HitCoverage=55%, E-value=8e-59, Identity=43%"; Hit description =Homology to unknown gene
MHIDDLRALAPLWLSKTEEVRQDKSHWSTNITGDIYGMGWISEMYGYSFGAAEVGLRHKINDDIMIYPGYTPRPGIEPLILHYGLPFKVGNWSFSKLEHHEDGIIYDCNRLFDPPPFPREVEMMESDPNIKRGLFLSIECINTLNEGLLLHHASAGCPKPQWSKYLSFLKSRRFSELTKPKYWKGEQVDSIMTMQHVALSKANNEYPKIHTLFSTECSSYFDWQTVGLMHSFRLSGQPGNITRLLSCTDEDLKNYKGHDLAPTHYVPSMSRHPLTGDWYPAINKPAAVLHWLNHVQTDAEFLVILDADMIMRGPITPWEYGAKRGHPVSTPYEYLIGCDNILAKIHTRNPSACDKVGGVIIMHIDDLRRFALLWLHKSEEVRADKAHYATNITGDIYNSGWISEMYGYSFAAAEINLRHIIRRDIMIYPGYVPLPRAKYRVFHYGLRFGVGNWSFDKADWRNADVVNTCWAKFPEPPDPATITKQDLDARERDFLSIECGRALNKALYLHHKRRNCPRLDTISSTSKKTDQVSASNKIVSVAQKSRSISRGNIESMDEGRLKTVKRTAASVQPLHRSRRLARSSRMWIIAVWALSIVVFLLVISMFFTEQRRNASRSRVSRSLKAHV

SEQ ID NO: 65923 - protein, 446 aa, Zea mays
  Coding DNA Sequence Number=SeqID_24144
  Gene Ontology: Mol. function=nucleic acid binding; Biological process= DNA integration
  Homolog annotation: Hit_ID=Q01G74; Match level="QueryCoverage=27%, HitCoverage=21%, E-value=2e-19, Identity=40%"; Hit description =Homology to unknown gene
MAAGIAGAVVAALLLLYPARAAAAAAVGEGRRLHTLFSVECGDYFDWQAVGLLHSLRKARQPGGVTRLVSCAEDQLPSYRGLRIGHTLQVPSFSRHPRTGDWYPAINKPAGVVHWLKHSPEADNVDWVVILDADQIIRGPIIPWELGAEKGKPFAAYYGGIEYLSIYLGLNFVWNSGFLTRDIEEQYDLGGSSGGRSLAGRLNPTIDVLVAHVVSWLQLYDNGSLGGNRTSLGMSRGLVTGATKTGSLRPPWNTVYNRKGKRIAADDSHECRKKKRYEQAHAAQDGAVSTEGVLVLGIASIMAQAEEEELEIEPPSRSRVEATRGGRLSRTRSLWHSWLWYPPATPAPPPKVPPTMMLEIHLDENRLFVHLKDKGGGGSMHWILDTSAENHMTRERMAFFKLDTGVRKTIWFGDGSMVTIEGRDTILFRCKSHEHQVLVGVHFIPD

SEQ ID NO: 65924 - protein, 217 aa, Zea mays
  Coding DNA Sequence Number=SeqID_24145
  Homolog annotation: Hit_ID=Q6ASW7; Match level="QueryCoverage=32%, HitCoverage=8%, E-value=3e-09, Identity=46%"; Hit description =Putative zinc finger protein
MAHRTWRTGQSDALQLRLDRDEAGAVDGGDDPAALPESALFDIDLAQAIHFHLKIPGLWIYAATWEFDQNPNDLAHSNELKLEVLDDLREIPLITRTSYWDWFARLQLSNLNSLVIPIEKMLYQIKSCRDDTSEIDVKPDGSRRVKDRAELKNLTQWHLPDDSEEISGNDGDEGGAMIVMKMVVTMTYLDRMALKMTQSSLMMVASLKGVGLDGYFW

SEQ ID NO: 65925 - protein, 203 aa, Zea mays
  Coding DNA Sequence Number=SeqID_24146
MTNPPIDFTAELEAHDDSTTKNESRKSYSALAKVTTDAKFPRALVDLAQDRLAKPINLKEFILELKIDPIIVPATASTATPTKSTLRPSSTPGGSTSKPSPSSPARRESYTALWTQEGKPRSPHHQHSRGGVLADVEDCLDRNFGRDPTNHRASHANERRALEASTPTPMRADSAVHFAHPGMDPDHSKEGDGGPRCSLDVTP

SEQ ID NO: 65926 - protein, 56 aa, Zea mays
  Coding DNA Sequence Number=SeqID_24147
MTTKTPMMVFSLRRCCKGWSNDSDEDGGDDDIPRSDGIEDDPEFIVDGGSFEGGEA

SEQ ID NO: 65927 - protein, 1072 aa, Zea mays
  Coding DNA Sequence Number=SeqID_24148
  Gene Ontology: Mol. function=ATPase activity; Cellular component =chromosome; Biological process=chromosome organization and biogenesis
  Homolog annotation: Hit_ID=Q8GU55; Match level="QueryCoverage=99%, HitCoverage=91%, E-value=0.0, Identity=81%"; Hit description=SMC2 protein
  Pfam annotation: Domain name=ABC_tran; Domain location=719-1052; Score=-64.1; E_value=0.082; Accession=PF00005.17; Description=ABC transporter
  Pfam annotation: Domain name=DUF869; Domain location=249-800; Score= -364.5; E_value=0.098; Accession=PF05911.2; Description=Plant protein of unknown function (DUF869)
  Pfam annotation: Domain name=Prefoldin_2; Domain location=679-774; Score=-8.4; E_value=0.081; Accession=PF01920.10; Description =Prefoldin subunit
  Pfam annotation: Domain name=SMC_N; Domain location=140-1062; Score =41.7; E_value=8.7e-15; Accession=PF02463.9; Description=RecFRecNSMC N terminal domain
  Pfam annotation: Domain name=SMC_hinge; Domain location=413-534; Score=114.4; E_value=3.4e-31; Accession=PF06470.4; Description=SMC proteins Flexible Hinge Domain
  Pfam module annotation: Pfam domain module=ABC_tran::DUF869::Prefoldin _2::SMC_N::SMC_hinge; Domain location=719-1052::249-800::679-774::140- 1062::413-534
MEIVVGGRNKYLINGHLAQPSRVQTLFHSVQLNVNNPHFLIMQGRITKVLNMKPPEILSMLEEAAGTRMYEMKKESALKTLEKKQNKVDEINKLLDVEILPALEKLRKERCQYMKWANGNAELDRLKRFCIAYDFVQAERVRDGALNDVKQIKTKIVELDETTENIKAAIQEMDNNISTLAAEKEAKVGGEMKVLSDKVDKLSHVLIKETSVMNNQEETLKSEEKGAEKILTNIEDIKRSILERDAAVKNVENEASDMKRRAEDLTKELDEKEKEYQGVLAGKSSANEKKCLEDQLRDAKAAVGDAESGLKQLATKIKHSEKELKEKKTLLVSKRDEAIAAENELKTRTKDLEGIKASMGSINYDEGQMEALQKDRSAELEIIQKLKDRVRNLSGELANVHFSYRDPERNFDRSKVKGVVARLIRIKDSSTATALEVAAGGRLFNVVVDTEETGKQLLKNGDLRSRVTIIPLNKIQTYMIPDRVQQTARRLVGPDNVTLALELVGYGEEVKNAVAFVFGSTFVCRNMDAAKEVAFNRQISSTSVTLEGDTYQPSGLLTGGSKGGRGNLLRKLDELAKAEADLSDHEKKLFVIEQQIGALLPLQKRHTELKSQFELKSYDLSLFQNRVEQNEHHKLGELVKKIEQELQESKQELTEKQVQHEKCVSTVSELEKTIKTYGTEREGKLKALEKRIKSIKSEMQSMSKQLKAYESDRERLIMEKDAVVGELATLEEQLTTSKAQITSLSETLEKQKDKVTSIKQDYDQAESELNVGRSKLKECDSQINRMAKEQQKLQQKLSDSNVERKKMENEVKRMEIEQKDCSSIVDKLVEKYNWIATEKQLFGKSGTDYDFESCEPHKAREELENLQAQQSSLEKRVNKKVMAMFEKAEDEYNDLMSKKNIIENDKAKIKKVIEELDEKKKETLKVTWLKVNKDFGSIFSTLLPGTMAKLDPPEGGTFLDGLEVRVAFGTVWKQSLSELSGGQRSLLALSLILALLLFKPAPLYILDEEVDAALDLSHTQNIGRMIKAHFPHSQFIVVSLKEGMFNNANVIFRTKFVDGVSTVTRTVPSKQR

SEQ ID NO: 65928 - protein, 241 aa, Zea mays
  Coding DNA Sequence Number=SeqID_24149
  Homolog annotation: Hit_ID=Q5N6W3; Match level="QueryCoverage=30%, HitCoverage=15%, E-value=8e-35, Identity=93%"; Hit description=ABC1 -like
MGVPDVCALWRALIAVAGDRWREVAVGPHEAGAEVIWRTGLSEALRYNSPDMSGAHRTVSGVPEDSGSELASFGNPLRYKSPDMSGAHRTVRALRPPPGHQAEKERNGAAAAAAAAAAAVGSRTSDWRTRISNHPSSLARPHPSSDSFRLLAMPLALAQLQDLRDRISDRLRPWSRSAQFWVRAADIYTSYKVCQLRAGFVKDEDEREAMWEQQHELGAQKMYSLCSELGGLFLKAKAIPI

SEQ ID NO: 65929 - protein, 134 aa, Zea mays
  Coding DNA Sequence Number=SeqID_24150
MRVLRSECSEENAWEGFKADDERGLVAGEVAVVGEDARSGKEASSGGGEEVGRIAAGEKTSGGGATCASPKARGEKVNTRGKPQTLNGYSNKYETQKDNIDEVTQKGLKPLKDMEKDKARLARAYNKKAKTKLF

SEQ ID NO: 65930 - protein, 224 aa, Zea mays
  Coding DNA Sequence Number=SeqID_24151
MQYNGSSSLISCEKQTIRIEFYPCKIRAHRLGIQCLTDPDRRRAVTALVPTITGMGDHVSGRVRGKVHCQVQSGLAFQSSGRQILWCRLWCWIRGYLLSSSLLRHEDVLSVSEGGSGGHNGVRLDGGGGPESLGPRTQAGVLVGGGGYLCIESKNGAVSYPVYARRRSDGVRRPWTGLSGEADFDSSLGELHRAKVRAEVVNLGVEKTSCTSDKGKKSKTCTTR

SEQ ID NO: 65931 - protein, 566 aa, Zea mays
  Coding DNA Sequence Number=SeqID_24152
  Gene Ontology: Mol. function=oxidoreductase activity; Cellular component=integral to membrane; Biological process=electron transport
  Homolog annotation: Hit_ID=Q673G1; Match level="QueryCoverage=93%, HitCoverage=97%, E-value=0.0, Identity=65%"; Hit description=Ent -kaurene oxidase 1
  Pfam annotation: Domain name=p450; Domain location=42-557; Score =135.4; E_value=1.6e-37; Accession=PF00067.12; Description=Cytochrome P450
MQSLLAGIPAGGAAAAAAVGGLVAAAALAERADQKNRLNLPPAVPGLPIIGNLHQLKEKKPHQTFARWSEEYGPIYSIRTGASSVVVVNSAEVAKEFALLVISLPAVHFLCFLKVEMYQGLKRPPFCFEKMPYYCRIPLNAMVAKYSSINTRKLPKALSVLTRDKKIVAMSDQGELYKMVKRYIMVSMLGAAAQKQFRDTRNTMIDNMLSTFHALVADDPKAPLNFRDVFQNELFGLSMTQANDFLHILRFETGLQIQALSEDVSSVYVEEFGKALSREEIYQTAVADMMMCAIEVDWRDFFPYLGWIPNRSFETRVLTTEARRTALMQALINQQKERIARGESRMSYVDFLLAENTLTDEQLLMLVWEAVIEAADTTLVTTEWAMYEIAKHPEKQEYLYQEIRKVCGNKTVTEDHLPELPYLNAVFHETLRRHSPVPLVPPRLVHESTNLAGYEVPAGTQMIINLYGCNMNKSDWDAPEEWRPERFLDGSFEVADMYKTMAFGGGRRACAGSIQAVNIACTAIARFVQEFAWTLKEGDEDKDDTIQLTTNRLYPLHVYLTPRGRK

SEQ ID NO: 65932 - protein, 146 aa, Zea mays
  Coding DNA Sequence Number=SeqID_24153
MKIPLTTHSGIMSSGSIDYYRTLTKPERQRKQYIWRSGLPRASIHFRESNILFSAVFYRFTQQNLPAWKPAMTPGFVIEWFDKATCTCIWHNDRFYLQESFHKECCRRTTPSWFSTNERRYTSETFTTPDFCPSFGDFKLPKTVLV

SEQ ID NO: 65933 - protein, 1053 aa, Zea mays
  Coding DNA Sequence Number=SeqID_24154
  Gene Ontology: Mol. function=RNA-directed DNA polymerase activity; Cellular component=intracellular; Biological process=RNA-dependent DNA replication
  Homolog annotation: Hit_ID=UPI00005A975E; Match level="QueryCoverage =95%, HitCoverage=59%, E-value=0.0, Identity=87%"; Hit description =PREDICTED: similar to Retrovirus-related Pol polyprotein from transposon 297
  Pfam annotation: Domain name=RVT_1; Domain location=56-225; Score =149.6; E_value=8.5e-42; Accession=PF00078.17; Description=Reverse transcriptase (RNA-dependent
  Pfam annotation: Domain name=RnaseH; Domain location=455-582; Score =5.8; E_value=1.7e-05; Accession=PF00075.14; Description=RNase H
  Pfam annotation: Domain name=rve; Domain location=780-924; Score =75.5; E_value=1.7e-19; Accession=PF00665.16; Description=Integrase core domain
  Pfam module annotation: Pfam domain module=RVT_1::RnaseH::rve; Domain location=56-225::455-582::780-924
MPGIPRDVAEHSLDIRAGARPVRQPLRRFDEEKRRVIGEEIHKLMAAGFIKEVFHPEWLANPVLVRKKGGKWRMCVDYTGLNKACPKVPYPLPRIDQIVDSTAGCETLSFLDAYSGYHQIRMKESDQLATSFITPFGMYCYVTMPFGLRNAGATYQRCMNHVFGEHIGRTVEAYIDDIVVKTRKASDLLSDLEVTFRCLKAKGVKLNPEKCVFGVPRGMLLGFIVSERGIEANPEKIAAITSMGPIKDLKGVQKVMGCLAALSRFISRLGERGLPLYRLLRKAECFAWTPKAEEALGNLKALLTKAPILVPPADGEALLVYVAATTQVVSAAIVVERQEEGHALPVQRPVYFVSEVLSETKIRYPQVQKLLYDVILTRRKLRHYFESHPVTVVSSFPLGEIIQCQEASGRIAKWAVEIMGKTISFAPRKAIKSQVLADFVAEWVDTQLPTAPIQPELWTMFFDGSLMKTRAGVGLLFISPLGKHLRYVLRLHFPASNNVAEYEALVNGLRIAIELGVRRLDARGDSQLIIDQVMKNSHCRDPKMEAYCDEVRRLEDKFYGLELNHIARRYNETADELAKIASGRTTVSTDVFSRDLHQPSVKIDDMPEPEAPSAQPEAPSARPEAPSVQPEVPSAPEGEALDVEEEQSGATPDRNWQAPYLQYLRQGELPLDQAEARRVARRAKSFVLLGDEEELYHRSPSGILQRCISIAEGQELLQEIHSGACGHHAAPRALVGNAFRQGFYWPTAVADATRIVRTCEGCQFYAKQTHLPAQALQTIPITWPFAVWGLDLVGPLQKAPGGYTHLLVAIDKFSKWIEVRPLNSIRSEQAVAFFTNIIHRFGVPNSIITDNGTQFTGKKFLDFCEDHHIRSVPTGMILQGLKPRIYNDLNKFGKRWMKELPSVIWSLRTTPSRATGFTPFFLVYGAEAILPTDLEYGSPRTRAYNDQSNQASREESLDQLEEARDRALLHSARYQQSLRRYHARGVRSRDLQVGDLVLRLRQDAQGRHKLTPPREGPFVIAKVLKPGTYKLANNQGEVYGNAWNIKQLRRFYP

SEQ ID NO: 65934 - protein, 399 aa, Zea mays
  Coding DNA Sequence Number=SeqID_24155
  Homolog annotation: Hit_ID=Q2QSL7; Match level="QueryCoverage=65%, HitCoverage=60%, E-value=2e-18, Identity=33%"; Hit description =Expressed protein
MALKFQLPSLLLLPADVTGVYCYLSGCRKHNMLPGPCYFGSYDGGWFFLAYGQTCGHRLLNIRTGDSRALPDVLFGLAAHKIHRMVVLATTLSFPPEDLRLRCIVAGIVTYQPDIDASRRRHFAFWRPGAKVVVCDVLPAVPVGSGWEQEDVVYYRDSFHFLTQGGHILMCGPIYGPYGDGGILVVLSALSCFQEGRCSCSDEQFVRARYLVVSRGELLMVVRLAAHHHVPTSSFKVFRMIIIEPDDNGEDADEYTRTWIELGELCGRMLFVGRERWNMLLLKNVISLNPNAEDVSQQRLLLLVAERLVPTFLDRFGPKSPEIWMFVFYASMREWRCVRMQRQFVSWHVIVWFVVCGISWRVNHFDSKVKDEGYVNTREQNITDAIDLFLHLTTGIASA

SEQ ID NO: 65935 - protein, 409 aa, Zea mays
  Coding DNA Sequence Number=SeqID_24156
  Gene Ontology: Mol. function=cation transporter activity; Cellular component=membrane; Biological process=cation transport
  Homolog annotation: Hit_ID=Q84ND6; Match level="QueryCoverage=99%, HitCoverage=94%, E-value=1e-122, Identity=56%"; Hit description =Cation diffusion facilitator 8
  Pfam annotation: Domain name=Cation_efflux; Domain location=144-395; Score=123.0; E_value=8.4e-34; Accession=PF01545.11; Description =Cation efflux family
MDANGCGENDDARAPLLAGPGRRRNSVASMRGEFVSRLPKKVLDAVDPERPSHVDFSRSKGLLEGSTRDPSHSPHSWVVFLCRWWFVGFSVHPTVKLWNMGRESTMRNNLPTLRSFEEVDSLEESNEINEDEELAEQIQSEFAMKISNYANIVLLALKVYATIKSGSIAIAASTLDSLLDLMAGGILWFTHLSMKSINVYKYPIGKLRVQPVGIIIFAAVMATLGFQVFIQAVEKLVVNEAPDKLNQVQLLWLYSIMIFATIVKLGLWLYCRTSGNKIVRAYAKDHYFDVVTNVVGLAAAVLGDRFYWWIDPIGAIVLAVYTISNWSGTVWENAGLTDNLVIAILHVVSLVDIELPEDLPLKEAHAIGESLQIKIEELPEVERAFVHLDFECDHKPEHSILNKLPSSQP

SEQ ID NO: 65936 - protein, 183 aa, Zea mays
  Coding DNA Sequence Number=SeqID_24157
MGKKSACCSRTCGRSAERHRSRGEEGEKLQGKAPRRVHCSSSDQRRSAPWLEQRGLLSLQPPWLGVSQASPRSGASWALPEPTGSFSAGKKMPGELRFGAAWWGRRLIELDGGYMNLAADKCTGTMACGLASRAGAWREGARRGKSREGGAHVWVPREKSAMEADVEVEAGTSGSGMGERAPS

SEQ ID NO: 65937 - protein, 150 aa, Zea mays
  Coding DNA Sequence Number=SeqID_24158
MAPVYLTPPEQVTADKYSIEHEEEVVSQNENPPVENNYYFDICGVETETPATQGKPCAPDSPVRHWTVTVHCQVCATSAQPLGLEQLTVGDVCLLAAPDSPVPQQTVWCPLTSVLLTLSRHCCFCRLDRWRRDRCSTGSPDSPVAHRTVW

SEQ ID NO: 65938 - protein, 180 aa, Zea mays
  Coding DNA Sequence Number=SeqID_24159
MASWRPTESSARGKELDVHRETETELSSTSDKTLRSMAFSCASTRNATQRPWEMLFRTRPRFGLSSHDQRAEGRDGLRIEGEEARPARLAGGAGDCAGGCARRGSAAGNREQRLMLHDLNGEEARNRLELTATRESTFRPSTMVDDIHGEQSTASRELSRQQREPERDDLGAHQGSSAGR

SEQ ID NO: 65939 - protein, 160 aa, Zea mays
  Coding DNA Sequence Number=SeqID_24160
MASWRPTESSARGKELDVHRETETELSSTSDKTLRMSRPWEKPWRGHGQRAEGRDGLRIEGEEARPARLAGGAGDCAGGCARRGSAAGNREQRLMLHDLNGEEARNRLELTATRESTFRPSTMVDDIHGEQSTASRELSRQQREPERNDLGAHQGSSAGR

SEQ ID NO: 65940 - protein, 50 aa, Zea mays
  Coding DNA Sequence Number=SeqID_24161
MAGGIELAGAKGKWLARNLRTRDEAVQNMESRVRMKVEPVSKLHKGASAQ

SEQ ID NO: 65941 - protein, 280 aa, Zea mays
  Coding DNA Sequence Number=SeqID_24162
GLTLDLLIWDRTQEVEVVHLHLGRLLLMGFRLRDGGDGISGSGRERRGQRVCERMGRRGPGLADGGSQGRASGAGMASRDVCKGRVTRTGRELCEGGESVVRGISGCACGCRLGCGGRGHGAGIARELPGGDDEQGHDGGGGYCGGCVSCVEDRIPATTKGYEVARVTLKQGKRKVGHRRLTEGLALDFLIWGGTQEIEIIHLHLDCLLLMRLRLRDGGDGVSGSGRERRRGQRVCERMGRRGPDLADGGSHGEASGGRRGIAQHLRGSSDAHRAGALRG

SEQ ID NO: 65942 - protein, 54 aa, Zea mays
  Coding DNA Sequence Number=SeqID_24163
MKNRSHFRSDRKTALQQDVCVLFYLVFSCGQAEEKVVAREERPLSSKAGIREAA

SEQ ID NO: 65943 - protein, 133 aa, Zea mays
  Coding DNA Sequence Number=SeqID_24164
MNCLIYAKTETKCHIQGIQMIKRFAVNFVLVTNLSTRVTKGGWDIREIKFQHNTIHKKAGEQLPRYLYFTCKKKKKTTSFTVVEQTRIQFLILALRNFWGGCAYAGRHCGYRSRCSKGAHREVNLRIVTRKVI

SEQ ID NO: 65944 - protein, 321 aa, Zea mays
  Coding DNA Sequence Number=SeqID_24165
  Pfam annotation: Domain name=Adeno_PIX; Domain location=60-150; Score= -13.2; E_value=0.043; Accession=PF03955.5; Description=Adenovirus hexon-associated protein (IX)
  Subcellular localization annotation: CTP_CleavageSite=44; ConfidenceScore=5.09e-01
MAVRLVSASPQPGSVILCRRVIASSSPAPHASSCEIRSSALPLLAMAELGIILPVPPVAHGGVVAFLLSGRIAFEGRGWSAHNVRGSEFGQPVRPEHSTIETNDGLPTAQLGLGETWSPCGRVKGSMLGSLTEPMMLEELARAEERLRVLCAEHSNLSMAIDLGFTKKAWICFGRSSTTGSWAIGITSGVSSGPTMRDVPSCQDYRQSHERIEDEILVATGHLRKHQVVYHGEGFPDRYRPFRGQHADRQRRAASACWLAYALGKKGSHSHRWHALSVLLLPAAPVIFGLVLVLVHDVISTALAGFCGAEKAPGLNGNSVL

SEQ ID NO: 65945 - protein, 111 aa, Zea mays
  Coding DNA Sequence Number=SeqID_24166
  Gene Ontology: Mol. function=DNA binding; Cellular component=oxygen evolving complex; Biological process=DNA integration
  Homolog annotation: Hit_ID=Q94HQ0; Match level="QueryCoverage=98%, HitCoverage=11%, E-value=5e-34, Identity=61%"; Hit description =Putative retroelement
  Pfam annotation: Domain name=rve; Domain location=2-111; Score=19.5; E_value=0.00014; Accession=PF00665.16; Description=Integrase core domain
MAAFKSFQASDEVEAGRKVGTFRTDRGGEFTAQAFIEHCCSEGIKRHLTAPYTPEQNGVVERRNQTIMGMVRSMLKAMNLPNWFWGEAVATVVYILNRSPTQGNEGSTPYE

SEQ ID NO: 65946 - protein, 74 aa, Zea mays
  Coding DNA Sequence Number=SeqID_24167
MTKEVSLRGHNIHHNLWGNNKAPSGHQLQGVEAPGALEEDLRSSKIAEASKVALKGAQQKSCRSLKSRSQGSAV

SEQ ID NO: 65947 - protein, 149 aa, Zea mays
  Coding DNA Sequence Number=SeqID_24168
  Gene Ontology: Mol. function=oxidoreductase activity; Biological process=electron transport
  Homolog annotation: Hit_ID=Q9LT42; Match level="QueryCoverage=56%, HitCoverage=26%, E-value=3e-25, Identity=63%"; Hit description =Arabidopsis thaliana genomic DNA, chromosome 3, P1 clone: MOE17
SFGTEKARTEEENMAGDGNGRAELPRIAVIGAGIFARTQYIPRLREIAHLVVLKSIWSRTQESAKAAAELARDFAPDIECKWGDAGLEEIMGDSSIMGVAIVLAGQVQVGVPTPKRVFSVNNPRTRLRVDPIKVESSRGCSRIGRPPGA

SEQ ID NO: 65948 - protein, 166 aa, Zea mays
  Coding DNA Sequence Number=SeqID_24169
EEQSQDRRLPVRINRDPSLFPLRSKPSSSTAEGTSGSAEGTSGWAEAHPSEQNTTEKGWSPCKNPAKPLSEYQHSLRGSGATVGDPSGATGSSASLDLRPRPQPQPRPWEKVSASPDPRPRPQPRPREESHPRPTSASASGEGSRHFSDGHVSTCTGLKALLRQPR

SEQ ID NO: 65949 - protein, 670 aa, Zea mays
  Coding DNA Sequence Number=SeqID_24170
  Homolog annotation: Hit_ID=Q2QYU1; Match level="QueryCoverage=63%, HitCoverage=72%, E-value=1e-175, Identity=70%"; Hit description =Nodulin-like family protein, expressed
  Pfam annotation: Domain name=MFS_1; Domain location=3-383; Score= -3.5; E_value=0.00046; Accession=PF07690.6; Description=Major Facilitator Superfamily
  Pfam annotation: Domain name=Nodulin-like; Domain location=1-151; Score=-27.8; E_value=3.9e-09; Accession=PF06813.4; Description =Nodulin-like
  Pfam module annotation: Pfam domain module=MFS_1::Nodulin-like; Domain location=3-383::1-151
  Subcellular localization annotation: CTP_CleavageSite=53; ConfidenceScore=5.36e-01
VFLVCLIAGCSICWFNTVCFVLCIRNFSANNRSLALSLSISFNGLSAAFYTLFANALSPLALSICLLLNAILPLGVSILALPVILLCHTNDSHLQSAPRHNRRVFLGLYILAFITGIYVVVFGTFTATGSTAWVILIGAMVLLALPLIIPACSSSSYVDTDGPDPASLLNHDDPHQPLLIRNNHQMESNAMMLKPMELQMQGNCCGTIVSKGYLVALGEEHSAKKLIWCVDFWLYYTAYFCGATVGLVYSNNLGQIAQSLHQQSQLTMLLIAYSSCSFFGRLLSALPDILHRKVPLARTGWLAAALVPMPMAFFLMWNQQDASTLVAGTTLVGLSSGFIFAAAMSVTSELFGPNSIGVNHNILITNIPLGSLLYGQIAAMVYDGNGQKMTVVDNWTGIVDTMIMCMGVKCYSTTFFVWACITILGEMLRPFGGADDGKVLPPAHARAPSVGTSCRCHRRRSTLPRWRSLPRCKSHGGGKPVVTDTVDEVTPDKGPETEIKGEEENEAVARRGAPGWLRLDGVAADILAIAAPAVLALAADPITALVDTAFVGHIGSAQLEAVGASTSIFNLVSKLFNVPLLNVTTSFVAEQQAMDGNSNTTRERDEFLTPIEKVRQQKKVLPAVSTSLALATGIGLLEMVALIVGSGTLINIIDYETRFPWSVNSKFKVP

SEQ ID NO: 65950 - protein, 53 aa, Zea mays
  Coding DNA Sequence Number=SeqID_24171
MGVWSQGSECAIDEKVTVLGSEKRAWESSLEAQAMREALNPWQKHDEQEQQKK

SEQ ID NO: 65951 - protein, 221 aa, Zea mays
  Coding DNA Sequence Number=SeqID_24172
  Subcellular localization annotation: CTP_CleavageSite=47; ConfidenceScore=5.63e-01
MKPKARISSPLKRYGGYNPHSSLRSNGSQPYFPATTAIGIGQGRSTVASRRRTAPRRQTSANPEHLREKQCRDHGEQRSGGVAEGNDEVGGVLGAILLRGGATTSTNNPRCIGGQFSMVLGAIQRIDEGEGTEGFLTGDDAVGTAILDAGRIRGNPATPASNLASTDVPPFIPKPRISSPHHSEAPRPLTEGGETALRGSQALRLTISLFALPDFALQRWR

SEQ ID NO: 65952 - protein, 243 aa, Zea mays
  Coding DNA Sequence Number=SeqID_24173
  Gene Ontology: Mol. function=drug transporter activity; Cellular component=membrane; Biological process=multidrug transport
  Homolog annotation: Hit_ID=Q2QYU0; Match level="QueryCoverage=81%, HitCoverage=35%, E-value=2e-60, Identity=61%"; Hit description=MATE efflux family protein, expressed
  Pfam annotation: Domain name=MatE; Domain location=95-240; Score =16.2; E_value=0.00025; Accession=PF01554.9; Description=MatE
MTVWELTLAMITPGQQQQGTDGTMLTGAGNLLNAVLDALLIFPIGLGVSGAALATVTSEYLTAFILLWKLNNEVDLFSWNIIEDGGVIRYLKSGGLLIGRTIAVFLTLTLSTSLATREGPIPMVGYEICLQLWLTISLLNDALALAGQALLASEYAKGNYKPARVVLYKVLQVGGVIGFLLAASLFVGFGSLSLLFTDDPAVLDVAHSRAWFVTISQPVNAIAFVAALQKYPPIATHLCVAKS

SEQ ID NO: 65953 - protein, 192 aa, Zea mays
  Coding DNA Sequence Number=SeqID_24174
  Homolog annotation: Hit_ID=Q2QYU1; Match level="QueryCoverage=54%, HitCoverage=17%, E-value=4e-30, Identity=64%"; Hit description =Nodulin-like family protein, expressed
  Pfam annotation: Domain name=Nodulin-like; Domain location=36-182; Score=-19.6; E_value=1.4e-09; Accession=PF06813.4; Description =Nodulin-like
MVAQPAGGGGAEEEVVVDGGGGRHGRRSGDEEAWRRWAVLVATVWIQAVTGTNFDFSAYSSALKSSLGVSQEALNYLATASDLGKAVGWSSGLALLHMPLHAVLAASAAMGLAAYAVQYYCLIAAASSMAAAVPYPLIGRPTSFTPRPTGHGGARTGYGDHADGELTDGDDREGVVHAGASIRGGDMPPLSN

SEQ ID NO: 65954 - protein, 371 aa, Zea mays
  Coding DNA Sequence Number=SeqID_24175
  Gene Ontology: Mol. function=hydrogen ion transporting ATP synthase activity, rotational mechanism; Cellular component=proton -transporting two-sector ATPase complex; Biological process=ATP synthesis coupled proton transport
  Homolog annotation: Hit_ID=Q2RBL8; Match level="QueryCoverage=99%, HitCoverage=87%, E-value=1e-140, Identity=59%"; Hit description =Expressed protein
  Pfam annotation: Domain name=DUF231; Domain location=213-365; Score =110.9; E_value=3.7e-30; Accession=PF03005.6; Description=Arabidopsis proteins of unknown function
MTNLNSQVGVLRSIIINSLVALYIIVSFIILFYKGHEVQMPMVVKHEHQEMQAKVAAEHHEQLRGKDTSREECNWSTGRKDVMYQHWRWQPHGCDLPRFDAIRLLEKLRNKRLVFVGDSLNRNQWVSLVCMVEISIPDSRHKMHTFNGSLISFKALEYNATIDLYWSPLLLESNSDDPLVHRVEHRIIRADRIEKHASAWRDANIIIFNSYVWWRKHKADMRMKVMYGSFESGDARLDEVEMIDGFEIALKKLTEWLGENIDKNKTRIFFAGSSPSHSWASNWGGENSNKCLNETEPIYKVGYKAATTDYSMMEKAKSYFGTLEEKGIHIQILNITELSEYRKDGHPTVFRKQFAPSQLCGLHALVPPGCS

SEQ ID NO: 65955 - protein, 198 aa, Zea mays
  Coding DNA Sequence Number=SeqID_24176
  Gene Ontology: Mol. function=protein kinase activity; Cellular component=integral to membrane; Biological process=protein amino acid phosphorylation
  Homolog annotation: Hit_ID=Q2RBL3; Match level="QueryCoverage=97%, HitCoverage=33%, E-value=1e-39, Identity=44%"; Hit description =Leucine Rich Repeat family protein, expressed
  Pfam annotation: Domain name=LRR_1; Domain location=125-144; Score =3.4; E_value=66; Accession=PF00560.23; Description=Leucine Rich Repeat
  Pfam annotation: Domain name=LRR_1; Domain location=146-168; Score =14.0; E_value=0.56; Accession=PF00560.23; Description=Leucine Rich Repeat
  Pfam annotation: Domain name=LRR_1; Domain location=170-192; Score =21.4; E_value=0.0033; Accession=PF00560.23; Description=Leucine Rich Repeat
  Pfam annotation: Domain name=LRR_1; Domain location=56-79; Score=7.4; E_value=12; Accession=PF00560.23; Description=Leucine Rich Repeat
  Pfam annotation: Domain name=LRR_1; Domain location=80-102; Score =17.3; E_value=0.057; Accession=PF00560.23; Description=Leucine Rich Repeat
  Pfam module annotation: Pfam domain module=LRR_1::LRR_1::LRR_1::LRR _1::LRR_1; Domain location=125-144::146-168::170-192::56-79::80-102
  Subcellular localization annotation: CTP_CleavageSite=76; ConfidenceScore=5.05e-01
AYKPSSTTLSDPYIFMRSWNDSGVTALLGRVGGHQQQPPHGGRRGAIPPAVANSTRLIQLNLSRNTLSDAVPVEVVASASLVFLDLSYNNLSGPIPDAFAGSDKSPSKLLNNNNNNKEAITGSYQLVFLSLAHNFLDGPIPASVTKLQQLDLYSNSLNGTIPTQLATLADLKVLDLSGNALSGDIPPGLDNLTATCWN

SEQ ID NO: 65956 - protein, 93 aa, Zea mays
  Coding DNA Sequence Number=SeqID_24177
  Subcellular localization annotation: CTP_CleavageSite=54; ConfidenceScore=5.44e-01
MTAVFKSIFGWDPTSLHTSLAMALMYNMSLVASSHPIDPTRARPNSTRPPPLFSVAHRSSTFYKKRHEMVETTGANQVEIVFGRVEVECGQSG

SEQ ID NO: 65957 - protein, 264 aa, Zea mays
  Coding DNA Sequence Number=SeqID_24178
  Subcellular localization annotation: CTP_CleavageSite=64; ConfidenceScore=5.59e-01
MGVSSRQILLPSVLVVAAAPIPNSPFPIRLRRRQSHTTTLRRSGPGGPASTPALQLHRSAALARGAASTGARPPGSSPPHSAALRPCPCPAVPRGHAASRLQRLAYRLQHRSASSRPALGLHAALGRSSAGRDLHHRSASRRPPLARSSRPARGGQVARTQRVVVLRQSSTSRPAAAAQRRPSSKDQVVMATPANSSQHEVSQTSVPPIAAAASIEVVDVPDGQGEDGSGVAATRSHGSQRKLTSTVWEDFTRVCDDDGVWKRK

SEQ ID NO: 65958 - protein, 260 aa, Zea mays
  Coding DNA Sequence Number=SeqID_24179
  Gene Ontology: Mol. function=protein kinase activity; Cellular component=integral to membrane; Biological process=protein amino acid phosphorylation
  Homolog annotation: Hit_ID=Q2RBL3; Match level="QueryCoverage=87%, HitCoverage=27%, E-value=5e-51, Identity=51%"; Hit description =Leucine Rich Repeat family protein, expressed
  Pfam annotation: Domain name=Gemini_mov; Domain location=70-150; Score=-27.3; E_value=0.058; Accession=PF01708.7; Description =Geminivirus putative movement protein
MDLGTSMFQEAIWNRLNEYGLLGRSKRTITTLQSFNVSYNNRSGAAPASLARKFGEPAFTGKGNVLLCGYSASTPCPASPSPAPASPAEEPPRGRGSRKFSRKALVLIVVGIIVGVLVLLLLCCLLLCFLRRNKRSSGGTAGTRSEKQAAAKEAGGAGAGAAAAGHGEKPGSGAGEVESGGDVGGKLVHFDGPLTFTADDLLCATVEIMGKSTYGTVYKATVEDGSLVAVKRLREKITKGHKEFEAEAAVLGRIRHPNPA

SEQ ID NO: 65959 - protein, 389 aa, Zea mays
  Coding DNA Sequence Number=SeqID_24180
  Homolog annotation: Hit_ID=Q7FS87; Match level="QueryCoverage=37%, HitCoverage=12%, E-value=5e-66, Identity=77%"; Hit description =Putative glycerol 3-phosphate permease
MADLFVFGDDTKHERQNPKERDAKRNPSLLQDKQDVTTRCQRRRIGNFSPTTRRSGPRAAAACAAALRGCPVGWRLRVTAPGCGGLVGEPRARCGAAGGGRAASALRVAGDGASRERLGGWRWRPGDGGPRASALERRQDRRTRKQEPGGAEAGRRKQTAGSGAAAAEAEAGRRTAAARSRRATMGLYWAVTADRGCSPGSPGWRSAPDVVSSRFDLRAALSFWFLMLSSMIPLAVRLIGIDEEPIDNPSELEYPFSCQEIDQIIKCLPSNKSPRPDGFNTDFVKKCWLVIAPDFYELYNKFFEGSLCMRSINGSYVTLIPKNSSPDSIGDYRPISLLNTSVKVLTKILANRLQQDCLAWAFEYISLCHKSRKEMVILKLDFEKTFDKL

SEQ ID NO: 65960 - protein, 222 aa, Zea mays
  Coding DNA Sequence Number=SeqID_24181
  Gene Ontology: Mol. function=sequence-specific DNA binding; Cellular component=nucleus; Biological process=regulation of transcription, DNA-dependent
  Homolog annotation: Hit_ID=Q5Z6F6; Match level="QueryCoverage=55%, HitCoverage=48%, E-value=7e-32, Identity=60%"; Hit description =Putative homeodomain leucine zipper protein
  Pfam annotation: Domain name=HALZ; Domain location=143-187; Score =45.1; E_value=2.4e-10; Accession=PF02183.8; Description=Homeobox associated leucine zipper
  Pfam annotation: Domain name=Homeobox; Domain location=88-142; Score =61.1; E_value=3.6e-15; Accession=PF00046.19; Description=Homeobox domain
  Pfam module annotation: Pfam domain module=HALZ::Homeobox; Domain location=143-187::88-142
MEEEGVGKSWLALGIGGGDLMKRNNRPPVQFDLLFPPQSVKEEGAASKKAEKGGGRKRLKVVTADEDGRQSPHGGPGPSDGSGAGARKKLRLTNEQSTLLEDTFRAHNILSNAQKQELARQVDLSARQVEVWFQNRRARTKLKQTEVDCEILKRCCESLTGENQRLRLELAQLQRSAAAAAEAGLYVQSSFPPLATATATASVCPSCDKIEQSRFIFCLVKE

SEQ ID NO: 65961 - protein, 216 aa, Zea mays
  Coding DNA Sequence Number=SeqID_24182
  Gene Ontology: Mol. function=sequence-specific DNA binding; Cellular component=nucleus; Biological process=regulation of transcription, DNA-dependent
  Homolog annotation: Hit_ID=Q5Z6F6; Match level="QueryCoverage=72%, HitCoverage=63%, E-value=9e-37, Identity=53%"; Hit description =Putative homeodomain leucine zipper protein
  Pfam annotation: Domain name=HALZ; Domain location=136-181; Score =31.1; E_value=3.9e-06; Accession=PF02183.8; Description=Homeobox associated leucine zipper
  Pfam annotation: Domain name=Homeobox; Domain location=81-135; Score =62.9; E_value=1e-15; Accession=PF00046.19; Description=Homeobox domain
  Pfam module annotation: Pfam domain module=HALZ::Homeobox; Domain location=136-181::81-135
MEEEGVGKSWLGLGIGGGGDLMKRNNRPPVQLDDLLSFPPQSVAAASKKQAEKGGGGRKRHKIVVTADEDGRQSPHGGARKKLRLTKAQSTLLEDTFRAHNILSHAQKQELARQVNLSARQVEVWFQNRRARTKLKQTEADCEVLKRYCERLTGENQRLRLELAQLQRSPAAEEAGFYVQSSFPFPPLATAMASVCPSCDKVVAVTSGKSSTSYSS

SEQ ID NO: 65962 - protein, 221 aa, Zea mays
  Coding DNA Sequence Number=SeqID_24183
  Gene Ontology: Mol. function=sequence-specific DNA binding; Cellular component=nucleus; Biological process=regulation of transcription, DNA-dependent
  Homolog annotation: Hit_ID=Q5Z6F6; Match level="QueryCoverage=58%, HitCoverage=53%, E-value=6e-38, Identity=62%"; Hit description =Putative homeodomain leucine zipper protein
  Pfam annotation: Domain name=HALZ; Domain location=142-184; Score =41.4; E_value=3.1e-09; Accession=PF02183.8; Description=Homeobox associated leucine zipper
  Pfam annotation: Domain name=Homeobox; Domain location=87-141; Score =60.0; E_value=7.5e-15; Accession=PF00046.19; Description=Homeobox domain
  Pfam module annotation: Pfam domain module=HALZ::Homeobox; Domain location=142-184::87-141
MYSTREEEGVGKSWLGLGIGGGSGGCDLMQRNNRPPVQFDLLFPPQGVVEGVAASKKAEKGGGGRKRLKVVTGTADEDGQQPPGARKKLRLTKAQSTLLEDTFRAHSILSNAQKQELARQVDLSARQVEVWFQNRRARTKLKQTEADCEILKRCCESLTGENQRLRLELAQLQGSEAGLYLQSSFPPLAAAMASVCPSCDKVITVASGGETSGRSSTSYSS

SEQ ID NO: 65963 - protein, 131 aa, Zea mays
  Coding DNA Sequence Number=SeqID_24184
MATMSGSLVAGVEDRDAPRDDRATDRPPRPPENKKAPPSSFTKQTKPFTPGDPKLLPRPPSKNTSDSKRRCLKKSATETPGRKFQMSIESGGSSQAPISSQPEAESRHESINESEAIEIEDEECVEEDGVE

SEQ ID NO: 65964 - protein, 118 aa, Zea mays
  Coding DNA Sequence Number=SeqID_24185
MGFASITAIMNPPKILGPPTDVLDLRTSDSHAGALNGSAETAKLSSFLTYNNMGLKTLSMKCTFAKSYPTKEKDSQGYAGLWESSLSSIGPTKAKLTHDEACGQLKGPPSSSLHELGP

SEQ ID NO: 65965 - protein, 79 aa, Zea mays
  Coding DNA Sequence Number=SeqID_24186
  Gene Ontology: Mol. function=translation initiation factor activity; Cellular component=cytoplasm; Biological process=regulation of translation
  Homolog annotation: Hit_ID=Q03389; Match level="QueryCoverage=60%, HitCoverage=22%, E-value=5e-16, Identity=86%"; Hit description =Eukaryotic translation initiation factor 4E-2 (eIF4E-2) (eIF-4E-2) (mRNA cap-binding ...
  Homolog annotation: Hit description=protein) (eIF-(iso)4F 25 kDa subunit) (eIF-(iso)4F p28 subunit)
MAEVEAPAAAVAAATPEVATVTEGGAATEAKGPHKLHRQWTFWYDIQSKPKPGAAWGTSPQKGVHLRHRRGVLGELFIR

SEQ ID NO: 65966 - protein, 139 aa, Zea mays
  Coding DNA Sequence Number=SeqID_24187
  Homolog annotation: Hit_ID=Q9FUH9; Match level="QueryCoverage=59%, HitCoverage=23%, E-value=4e-24, Identity=77%"; Hit description =Microtubule-binding protein TANGLED1
  Subcellular localization annotation: CTP_CleavageSite=47; ConfidenceScore=5.67e-01
MFHTSTSVTTDPCTTPSSSKKQKWFYKTRSLVVAWQTPCKFLVKSPPSALGSKLRIHGKALPARPAAHESAGITCKNPSLLVLAIKVDDNPDLPCLRDCLYWLQAVRSHDPLILRDTQLKILDCATSTALQAGKSNVVH

SEQ ID NO: 65967 - protein, 236 aa, Zea mays
  Coding DNA Sequence Number=SeqID_24188
  Gene Ontology: Mol. function=binding
  Homolog annotation: Hit_ID=Q5QNE5; Match level="QueryCoverage=99%, HitCoverage=41%, E-value=5e-56, Identity=79%"; Hit description =Tetratricopeptide repeat protein-like
  Pfam annotation: Domain name=TPR_1; Domain location=157-190; Score =21.9; E_value=0.0023; Accession=PF00515.18; Description =Tetratricopeptide repeat
  Pfam annotation: Domain name=TPR_1; Domain location=191-224; Score =10.6; E_value=0.29; Accession=PF00515.18; Description=Tetratricopepti de repeat
  Pfam annotation: Domain name=TPR_2; Domain location=157-190; Score =28.1; E_value=3.1e-05; Accession=PF07719.7; Description =Tetratricopeptide repeat
  Pfam module annotation: Pfam domain module=TPR_1::TPR_1::TPR_2; Domain location=157-190::191-224::157-190
  Subcellular localization annotation: CTP_CleavageSite=23; ConfidenceScore=5.02e-01
MSHRPPAPMLDTLSDAFAAAVLLSSTDKSDTLPPGRLSPVSPLLHSSKHGHHHPTPSSSSGSSGSVSRAPIAPASAPPPRRSPTRSPRATSVPSVASPNRSPPPAPPRPRASHHDVLGFGIANYGHGSIVRSHGEGVVPAATDDDAVLRRAMSTADPEEVKRVGNDLYMKGCFEGALRLYDRALALCPNNAACRGNRIAALIGLDRLGEAVKECEEALWIDSSYGRAHHRLASLHI

SEQ ID NO: 65968 - protein, 85 aa, Zea mays
  Coding DNA Sequence Number=SeqID_24189
  Pfam annotation: Domain name=DUF1068; Domain location=1-84; Score =23.9; E_value=3.5e-08; Accession=PF06364.3; Description=Protein of unknown function (DUF1068)
MPRARRNNNTIPQNCAKHFKGVKSHAYGEEIEKSFTKLLVEELKQREEEATQAQQEADVKLIEAKKLASQYQKEADKCSSSMDNL

SEQ ID NO: 65969 - protein, 1352 aa, Zea mays
  Coding DNA Sequence Number=SeqID_24190
  Gene Ontology: Mol. function=transferase activity, transferring glycosyl groups; Cellular component=membrane; Biological process =cellulose biosynthetic process
  Homolog annotation: Hit_ID=Q6UDF1; Match level="QueryCoverage=83%, HitCoverage=100%, E-value=0.0, Identity=86%"; Hit description =Cellulose synthase catalytic subunit 10
  Pfam annotation: Domain name=C1_3; Domain location=286-319; Score =6.3; E_value=0.092; Accession=PF07649.3; Description=C1-like domain
  Pfam annotation: Domain name=Cellulose_synt; Domain location=491 -1347; Score=2163.1; E_value=0; Accession=PF03552.5; Description =Cellulose synthase
  Pfam annotation: Domain name=IF4E; Domain location=1-115; Score =101.4; E_value=2.6e-27; Accession=PF01652.9; Description=Eukaryotic initiation factor 4E
  Pfam annotation: Domain name=PHD; Domain location=287-336; Score= -1.7; E_value=0.084; Accession=PF00628.19; Description=PHD-finger
  Pfam annotation: Domain name=zf-C3HC4; Domain location=288-333; Score= 2.5; E_value=0.087; Accession=PF00097.15; Description=Zinc finger, C3HC4 type (RING finger)
  Pfam module annotation: Pfam domain module=C1_3::Cellulose _synt::IF4E::PHD::zf-C3HC4; Domain location=286-319::491-1347::1 -115::287-336::288-333
AGVEPKWEDPECANGGKWTVPCNRKPTFETMWLETLMALVGEQFDETDDICGIVASVRPRGDKLALWTRTASNEAVQVNIGKKWKDVIDYNDKIIYTFHDDSRRDKPSRGGRYTVKLGRAGRAQHVCFGNTASVRHISRLDLEASPDVFVMHLPALACALINAGLPNSRLVRDATPPPYRPPRRLTSHHTSRLPSAISPWPLPCPFTDTSPPQPPVDRSAIGMDAGSVTGGLAAGSHMRDELHVMRAREEVSSHCFLILCQLLMALSLIDDRRAQPNAKVRSADVKTCRVCADEVGTREDGQPFVACAECGFPVCRPCYEYERSEGTQCCPQCNTRYKRQKGCPRVEGDEEEGPEMDDFEDEFPAKSPKKPHEPVAFDVYSENGEHPAQKWRTGGQTLSSFTGSGEWCAVPLTMMLACRKMGLLTNMSPRAVAGKDLEAEREMEGSMEWKDRIDKWKTKQEKRGKLNHDDSDDDDDKNEDEYMLLAEARQPLWRKVPIPSSMINPYRIVIVLRLVVLCFFLKFRITTPATDAVPLWLASVICELWFAFSWILDQLPKWAPVTRETYLDRLALRYDREGEACRLSPIDFFVSTVDPLKEPPIITANTVLSILAVDYPVDRVSCYVSDDGASMLLFDALSETAEFARRWVPFCKKFAVEPRAPEFYFSQKIDYLKDKVQPTFVKERRAMKREYEEFKVRINALVAKAQKKPEEGWVMQDGTPWPGNNTRDHPGMIQVYLGNQGALDVEGHELPRLVYVSREKRPGYNHHKKAGAMNALVRVSAVLTNAPFILNLDCDHYVNNSKAVREAMCFLMDPQLGKKLCYVQFPQRFDGIDRHDRYANRNVVFFDINMKGLDGIQGPVYVGTGCVFNRQALYGYDPPRPEKRPKMTCDCWPSWCCCCCCFGGGKRGKARKDKKGDGGEEPRRGLLGFYRKRSKKDKLGGGSVAGSKKGGGLYKKHQRAFELEEIEEGLEGYDELERSSLMSQKSFEKRFGQSPVFIASTLVEDGGLPQGAAADPAALIKEAIHVISCGYEEKTEWGKEIGWIYGSVTEDILTGFKMHCRGWKSVYCTPTRPAFKGSAPINLSDRLHQVLRWALGSVEIFMSRHCPLWYAYGGRLKWLERFAYTNTIVYPFTSIPLLAYCTIPAVCLLTGKFIIPTLNNLASIWFIALFLSIIATSVLELRWSGVSIEDWWRNEQFWVIGGVSAHLFAVFQGFLKVLGGVDTSFTVTSKAAGDEADAFGDLYLFKWTTLLVPPTTLIIINMVGIVAGVSDAVNNGYGSWGPLFGKLFFSFWVIVHLYPFLKGLMGRQNRTPTIVVLWSILLASIFSLVWVRIDPFIPKAKGPILKPCGVEC

SEQ ID NO: 65970 - protein, 126 aa, Zea mays
  Coding DNA Sequence Number=SeqID_24191
  Homolog annotation: Hit_ID=Q5QNE5; Match level="QueryCoverage=29%, HitCoverage=5%, E-value=2e-11, Identity=89%"; Hit description =Tetratricopeptide repeat protein-like
MGADDAPVAVVGDPEAEHVVECRSGETGESLPGGRVSDLSVEERSTAAAKASERVSSIGAEMEGYGSFFTNLVNGALENFEDVSETPNELQHIVPTNDSNTFSKSNQKHKGKNFSEEEDRVLVAAW

SEQ ID NO: 65971 - protein, 152 aa, Zea mays
  Coding DNA Sequence Number=SeqID_24192
  Subcellular localization annotation: CTP_CleavageSite=66; ConfidenceScore=5.77e-01
MADAPAMASSPPASADDGGPSSPSVAVPRVLPSRLLLDTPPPSSGRARGPRGGSAAAASGRGGSAAAASRRGGRGGGTRRESTLPAAASNGTGGRRPERDWLAEAVMMIGRPVEDAGLASADILQLAMAKGPMFEWLSYWPEEGYLKEDHPY

SEQ ID NO: 65972 - protein, 51 aa, Zea mays
  Coding DNA Sequence Number=SeqID_24193
  Gene Ontology: Mol. function=transcriptional repressor activity; Biological process=regulation of nitrogen utilization
  Homolog annotation: Hit_ID=Q10L97; Match level="QueryCoverage=76%, HitCoverage=12%, E-value=4e-09, Identity=75%"; Hit description=NAD dependent epimerase/dehydratase family protein, expressed
MLVKRAVEEFYIKSRLLLRDPEMASTLFGKQDESVLQVYKADTRNPNDLDP

SEQ ID NO: 65973 - protein, 136 aa, Zea mays
  Coding DNA Sequence Number=SeqID_24194
MAECDSHRYQPRAEGTHEVVQGSRSNLNCSPSTLRTNQSALLGNAQYPAPQQVHEDLSLHECKPVNCLSLFGEENSAAKERFHGENHKSVEDESWSAAVESDLDLKLSIGPSSHSPETPRWLFSGSMERNPSGQHR

SEQ ID NO: 65974 - protein, 105 aa, Zea mays
  Coding DNA Sequence Number=SeqID_24195
  Gene Ontology: Cellular component=integral to membrane; Biological process=autophagy
  Homolog annotation: Hit_ID=Q5Z619; Match level="QueryCoverage=67%, HitCoverage=29%, E-value=1e-26, Identity=69%"; Hit description =Putative senescence-associated protein
MPPRAETVGATPSLAATLTPDTNVPFFSPCGGSHPAADVDCVTWSNDPGLLCYACASCKADLLGGLREQWRRATVALIFVYVVGCSAFRNAQTEDLFRRYKWGNY

SEQ ID NO: 65975 - protein, 358 aa, Zea mays
  Coding DNA Sequence Number=SeqID_24196
  Gene Ontology: Mol. function=protein binding; Cellular component =nucleus; Biological process=regulation of transcription, DNA -dependent
  Homolog annotation: Hit_ID=Q6J9V6; Match level="QueryCoverage=99%, HitCoverage=100%, E-value=0.0, Identity=100%"; Hit description=FIE2
  Pfam annotation: Domain name=WD40; Domain location=123-162; Score =26.4; E_value=0.0001; Accession=PF00400.22; Description=WD domain, G- beta repeat
  Pfam annotation: Domain name=WD40; Domain location=168-208; Score =35.3; E_value=2.1e-07; Accession=PF00400.22; Description=WD domain, G-beta repeat
  Pfam annotation: Domain name=WD40; Domain location=235-271; Score =11.9; E_value=1.5; Accession=PF00400.22; Description=WD domain, G -beta repeat
  Pfam annotation: Domain name=WD40; Domain location=77-119; Score=4.6; E_value=11; Accession=PF00400.22; Description=WD domain, G-beta repeat
  Pfam module annotation: Pfam domain module=WD40::WD40::WD40::WD40; Domain location=123-162::168-208::235-271::77-119
MAKLGPGQGLGCEAAEGSLVPSRKREYKPCGKHTEGKRPLYAIGFNFMDARYYDVFATVGGNRVTTYRCLENGSFALLQAYVDEDKDESFYTLSWARDHVDGSPLLVAAGSNGIIRVINCATEKLAKSFVGHGDSINEIRTQPLKPSLIISASKDESVRLWNVHTGICILIFAGAGGHRNEVLSVDFHPSDIERFASCGMDNTVKIWSMKEFWLYVDKSYSWTDLPSKFPTKYVQFPVLIAAVHSNYVDCTRWLGDFILSKSVDNEIVLWEPKTKEQSPGEGSIDILQKYPVPECDIWFIKFSCDFHFNQLAIAQSLELVKTAPSGGGMKWTIRAPETEEVLPLNAGLMVTLGWGCDG

SEQ ID NO: 65976 - protein, 224 aa, Zea mays
  Coding DNA Sequence Number=SeqID_24197
  Gene Ontology: Mol. function=protein binding; Cellular component =integral to membrane; Biological process=protein amino acid phosphorylation
  Homolog annotation: Hit_ID=Q6J9V5; Match level="QueryCoverage=98%, HitCoverage=40%, E-value=4e-93, Identity=78%"; Hit description=Cf2 -like protein
  Pfam annotation: Domain name=LRR_1; Domain location=117-138; Score =8.2; E_value=8.4; Accession=PF00560.23; Description=Leucine Rich Repeat
  Pfam annotation: Domain name=LRR_1; Domain location=45-67; Score =12.9; E_value=1.1; Accession=PF00560.23; Description=Leucine Rich Repeat
  Pfam annotation: Domain name=LRR_1; Domain location=69-91; Score =17.6; E_value=0.045; Accession=PF00560.23; Description=Leucine Rich Repeat
  Pfam annotation: Domain name=LRR_1; Domain location=93-115; Score =16.3; E_value=0.11; Accession=PF00560.23; Description=Leucine Rich Repeat
  Pfam module annotation: Pfam domain module=LRR_1::LRR_1::LRR_1::LRR _1; Domain location=117-138::45-67::69-91::93-115
MAEYNSSGETIDFDSNNYSYEPFYRYSIEFTYKGYFMTFERMLTTVTLIDFSNNRLEGTIPEALGSLLSLRILNLSHNNFIGNIPAQLGSLTDLESLDLSCNQLLGEIPQELTDLTFLATLNLSDNDLVGRIPQSRQFSTFGSSSFGGNPRLCGPPLSEFPCGASPSPYTPSAQLVHRSSPNSFDVVLFLFIGLGFGVGFAAAIVVKWNRVGRWFIANARALHR

SEQ ID NO: 65977 - protein, 126 aa, Zea mays
  Coding DNA Sequence Number=SeqID_24198
MALTRQTQREENEENLGATVKVDDNPHNFAKKARVEGQIWKKLWGKELTNSDPKDNNNKNEPIIGSQENGLVNSSQGIDKYGMNFIVRTDKAEYVKVQSPVINVKSLIFERRASVWLKKDMGIRIE

SEQ ID NO: 65978 - protein, 80 aa, Zea mays
  Coding DNA Sequence Number=SeqID_24199
MPSSGMSRQVRMPRMKNVSAPGGGDDEDPPRPFRQVKGKTVYLEQQEGRKKRRLDRAARAALAVAAATKQAERGDQLWIS

SEQ ID NO: 65979 - protein, 61 aa, Zea mays
  Coding DNA Sequence Number=SeqID_24200
MSLSLPCLWQLRCRGRVWLCPWPTGEDNEQPVVPECVAEDLPEQQPGEGKCPLTHYVLLTL

SEQ ID NO: 65980 - protein, 167 aa, Zea mays
  Coding DNA Sequence Number=SeqID_24201
  Subcellular localization annotation: CTP_CleavageSite=50; ConfidenceScore=5.38e-01
MTSFIGDVVTSTTDTSTEAALTTSSANIGNVSTSIAKGATVGVEDGVSTSTSMFGVVANPWHDRGSNLEDEGRGVETFSTCIAIRVRVTEWVGTSGIKTTIGTRAVVHARASSTRVVVKVGVFAWVNTSGIKDIEGGVGHLDLGVVMRSCLDAIEEAPKRSHLRTVV

SEQ ID NO: 65981 - protein, 608 aa, Zea mays
  Coding DNA Sequence Number=SeqID_24202
  Gene Ontology: Mol. function=protein binding; Cellular component =integral to membrane; Biological process=defense response to fungus
  Homolog annotation: Hit_ID=Q6J9V5; Match level="QueryCoverage=97%, HitCoverage=89%, E-value=1e-136, Identity=48%"; Hit description=Cf2 -like protein
  Pfam annotation: Domain name=LRR_1; Domain location=106-129; Score =11.6; E_value=1.9; Accession=PF00560.23; Description=Leucine Rich Repeat
  Pfam annotation: Domain name=LRR_1; Domain location=135-157; Score =1.0; E_value=1.9e+02; Accession=PF00560.23; Description=Leucine Rich Repeat
  Pfam annotation: Domain name=LRR_1; Domain location=162-186; Score =0.5; E_value=2.3e+02; Accession=PF00560.23; Description=Leucine Rich Repeat
  Pfam annotation: Domain name=LRR_1; Domain location=230-249; Score =9.6; E_value=4.6; Accession=PF00560.23; Description=Leucine Rich Repeat
  Pfam annotation: Domain name=LRR_1; Domain location=253-276; Score =1.7; E_value=1.3e+02; Accession=PF00560.23; Description=Leucine Rich Repeat
  Pfam annotation: Domain name=LRR_1; Domain location=277-299; Score =13.5; E_value=0.75; Accession=PF00560.23; Description=Leucine Rich Repeat
  Pfam annotation: Domain name=LRR_1; Domain location=29-52; Score =10.8; E_value=2.7; Accession=PF00560.23; Description=Leucine Rich Repeat
  Pfam annotation: Domain name=LRR_1; Domain location=301-322; Score =7.4; E_value=12; Accession=PF00560.23; Description=Leucine Rich Repeat
  Pfam annotation: Domain name=LRR_1; Domain location=325-345; Score =7.2; E_value=13; Accession=PF00560.23; Description=Leucine Rich Repeat
  Pfam annotation: Domain name=LRR_1; Domain location=358-381; Score =13.0; E_value=1; Accession=PF00560.23; Description=Leucine Rich Repeat
  Pfam annotation: Domain name=LRR_1; Domain location=428-450; Score =13.2; E_value=0.98; Accession=PF00560.23; Description=Leucine Rich Repeat
  Pfam annotation: Domain name=LRR_1; Domain location=452-474; Score =15.5; E_value=0.2; Accession=PF00560.23; Description=Leucine Rich Repeat
  Pfam annotation: Domain name=LRR_1; Domain location=476-498; Score =15.6; E_value=0.18; Accession=PF00560.23; Description=Leucine Rich Repeat
  Pfam annotation: Domain name=LRR_1; Domain location=5-27; Score=15.0; E_value=0.28; Accession=PF00560.23; Description=Leucine Rich Repeat
  Pfam annotation: Domain name=LRR_1; Domain location=500-521; Score =12.1; E_value=1.6; Accession=PF00560.23; Description=Leucine Rich Repeat
  Pfam annotation: Domain name=LRR_1; Domain location=54-75; Score=7.5; E_value=11; Accession=PF00560.23; Description=Leucine Rich Repeat
  Pfam annotation: Domain name=LRR_1; Domain location=83-101; Score =4.0; E_value=52; Accession=PF00560.23; Description=Leucine Rich Repeat
  Pfam module annotation: Pfam domain module=LRR_1::LRR_1::LRR_1::LRR _1::LRR_1::LRR_1::LRR_1::LRR_1::LRR_1::LRR_1::LRR_1::LRR_1::LRR _1::LRR_1::LRR_1::LRR_1::LRR_1; Domain
  Pfam module annotation: Domain location=253-276::277-299::29-52::301 -322::325-345::358-381::428-450::452-474::476-498::5-27::500-521: 54 -75::83-101
MTTSQLERVYLSNNALSGFIPKSFFQLTKLVALDISSNNLVGSLDLTQLWRLHELTMLDLSNNQLHVIDADDDNPVDSSYLSGLQYIGLASCKITQFPSFLRQVKSISYLDLSCNKIGGNVPNWLWDNMWSVGPSSYYVNLSYNMFTSLQLINSGVLPFNRIVEVFDLSFNNFSGLVPMPSSSGNMLEYSNNMFSSLLPNWTLYLRHTNYFSISKNNINDHVPPSICDGHLDILDMSYNNFYGPIPSCLIENVSTILNLRGNNFNGTLPTNITNKCALKAIDLYGNRIEGKLPRGLSNCFDLEVLDIGSNILVDTFPSWLGWLPNLSVLLLRSNKLSGTIGDDNIVGDTKSAKEFFPSLQIIDLSSNNFSGFLTTQWLKRLKSMTTEYNSSGETIDFEKNILLEPLYRYSIELTYKGISRTFEIVLTTVTVIDFSNNRLEGTISEALGNLVSLRILNLSRNAFTGKIPTQLGSMTDLEALDLSCNQLFGEIPQELTDLTFLEILNLSNNHLVGRIPQSHQFSTFGSSSFGGNPGLCGPPLSELPCGASPYTPSAQRVPRSSPHCVDVVLFLFTGLGFGVGFAAAILVKWNRVGRWFCKSFVWLITIGR

SEQ ID NO: 65982 - protein, 245 aa, Zea mays
  Coding DNA Sequence Number=SeqID_24203
  Gene Ontology: Mol. function=protein binding; Cellular component =integral to membrane; Biological process=protein amino acid phosphorylation
  Homolog annotation: Hit_ID=Q6J9V4; Match level="QueryCoverage=86%, HitCoverage=80%, E-value=1e-94, Identity=74%"; Hit description=Cf2 -like protein
  Pfam annotation: Domain name=LRRNT_2; Domain location=54-95; Score =37.5; E_value=4.7e-08; Accession=PF08263.3; Description=Leucine rich repeat N-terminal domain
MASIRRALLLFLALLAQLLHIPPPIPLSSAHHTHADNYLKSADGHLPVVPFLCRPDQAKSLLQLKKSLSFVDSTTTLSSWRDGTDCCLWEGVGCDASSSGDVTVLDLNNRRLFSHYGLDPAVFSLTSLRRLDLSMNDFSRGDDDVQPLPDNITATTPAGFERFSLLTHLNLSYAGLRGPIPAGIGKLVNLVSLDLSSYFSTDEDGVPDDLWTGPIPAAIGKLTSLEILDIEDGVFRANTSYNWQS

SEQ ID NO: 65983 - protein, 625 aa, Zea mays
  Coding DNA Sequence Number=SeqID_24204
  Gene Ontology: Mol. function=protein binding; Cellular component =integral to membrane; Biological process=protein amino acid phosphorylation
  Homolog annotation: Hit_ID=Q6J9V7; Match level="QueryCoverage=96%, HitCoverage=87%, E-value=0.0, Identity=96%"; Hit description=Cf2 -like protein
  Pfam annotation: Domain name=LRRNT_2; Domain location=6-48; Score =36.3; E_value=1e-07; Accession=PF08263.3; Description=Leucine rich repeat N-terminal domain
  Pfam annotation: Domain name=LRR_1; Domain location=131-153; Score =7.6; E_value=11; Accession=PF00560.23; Description=Leucine Rich Repeat
  Pfam annotation: Domain name=LRR_1; Domain location=197-219; Score =6.5; E_value=17; Accession=PF00560.23; Description=Leucine Rich Repeat
  Pfam annotation: Domain name=LRR_1; Domain location=225-247; Score =9.5; E_value=4.8; Accession=PF00560.23; Description=Leucine Rich Repeat
  Pfam annotation: Domain name=LRR_1; Domain location=249-272; Score =8.3; E_value=8.1; Accession=PF00560.23; Description=Leucine Rich Repeat
  Pfam annotation: Domain name=LRR_1; Domain location=274-297; Score =10.5; E_value=3; Accession=PF00560.23; Description=Leucine Rich Repeat
  Pfam annotation: Domain name=LRR_1; Domain location=298-320; Score =17.5; E_value=0.047; Accession=PF00560.23; Description=Leucine Rich Repeat
  Pfam annotation: Domain name=LRR_1; Domain location=322-342; Score =1.8; E_value=1.3e+02; Accession=PF00560.23; Description=Leucine Rich Repeat
  Pfam annotation: Domain name=LRR_1; Domain location=349-371; Score =8.2; E_value=8.3; Accession=PF00560.23; Description=Leucine Rich Repeat
  Pfam annotation: Domain name=LRR_1; Domain location=373-391; Score =2.5; E_value=98; Accession=PF00560.23; Description=Leucine Rich Repeat
  Pfam annotation: Domain name=LRR_1; Domain location=399-420; Score =1.3; E_value=1.6e+02; Accession=PF00560.23; Description=Leucine Rich Repeat
  Pfam annotation: Domain name=LRR_1; Domain location=422-444; Score =4.4; E_value=44; Accession=PF00560.23; Description=Leucine Rich Repeat
  Pfam annotation: Domain name=LRR_1; Domain location=446-470; Score =3.8; E_value=56; Accession=PF00560.23; Description=Leucine Rich Repeat
  Pfam annotation: Domain name=LRR_1; Domain location=472-494; Score =7.7; E_value=10; Accession=PF00560.23; Description=Leucine Rich Repeat
  Pfam annotation: Domain name=LRR_1; Domain location=496-518; Score =3.6; E_value=60; Accession=PF00560.23; Description=Leucine Rich Repeat
  Pfam annotation: Domain name=LRR_1; Domain location=54-77; Score=2.0; E_value=1.2e+02; Accession=PF00560.23; Description=Leucine Rich Repeat
  Pfam annotation: Domain name=LRR_1; Domain location=79-103; Score =4.8; E_value=35; Accession=PF00560.23; Description=Leucine Rich Repeat
  Pfam module annotation: Pfam domain module=LRRNT_2::LRR_1::LRR_1::LRR_ 1::LRR_1::LRR_1::LRR_1::LRR_1::LRR_1::LRR_1::LRR_1::LRR_1::LRR_1: LRR_ 1::LRR_1::LRR_1::LRR_1; Domain
  Pfam module annotation: Domain location=249-272::274-297::298 -320::322-342::349-371::373-391::399-420::422-444::446-470::472 -494::496-518::54-77::79-103
MPFHCHPDQAKQLLKLKDSFSFSYSTTTTLSSWRDGTDCCLWEGVGCDDPSSGNVTILDLHNRGLVSYGLDPAVFSLTSLRRLDLSMNDFSGAAVDDGDLSMNQFSGDPFNEGIHWLAENIPATGFERFTLLTHLNLSYMGLRGPIPAGIGRLVNLLSLDLSSSFPTDGYDVSNSYFDNVYLLWVPSFDTLMANLSNLRELYLDGVDLSSSEEGWCTTLATYVPHLEILSMANCFLNGPICKSLSRLSSLTVLNLQNNYIIGGPFPRFLMDFLNLTMLQLSNTNLQGQFPSRPFQSKNLRVLDLSDNQNLTGHVPKFSNASSLESLMLDGTNLLPVDKVKPTSTTNFMSLKELRLSGNLVSVDFLSSFGILGSLCKLDLTVNTVSELGPVFSWIGHHNNLTSLVLSGNFSEITPTLVNNFKALRSLSMHFCTLSSHVLHAVGNLIGLQTLELFHCDIMWDSTMPSSIGNLTNLRNMHIDECGFSGPIPATIGRLVNLRNMYVFFSGFSGPIQATIGNLTNLESLHIEDGFSGPIPATIGKLTNLRTMYIGMNSSLLSGPVPDTIGNLTHLNTMGIFGQFYGSSIPYTIGQLSKLVRLHIVGSNFSEKHTEFNGKFDSVNRVDSSR

SEQ ID NO: 65984 - protein, 266 aa, Zea mays
  Coding DNA Sequence Number=SeqID_24205
  Homolog annotation: Hit_ID=Q6QP51; Match level="QueryCoverage=58%, HitCoverage=65%, E-value=2e-15, Identity=38%"; Hit description =Putative growth-regulating factor 1
MQAACNCTKGMHLFDSDAFSMEAQAHTSWTKKGDTPKGILLREGSGPRALLLIRGSKAGPSEGFDSRLRALGLLAHYWLAPEGFDSRLRTRRVKDDSGYVRYMAEARAMLPRTKLCPLKGHDLASPEPSLGQEQQTQADSRIARGPPQATGAIGSSASPDPRARTQPRPRTTDSASPDPRARTQPRSRTTDSTSPDPRARTQPRPRTMDSASPDLGLGLNLNLGRRSLPRPTLGLRLNLDLGRRTPPRPTPGLGLNLDLGRRTLPR

SEQ ID NO: 65985 - protein, 126 aa, Zea mays
  Coding DNA Sequence Number=SeqID_24206
MSAAGDCVGFAGRCSWAAPLDPRSRAASAAPVPYPDAWCYTASCWGLPWARSTGLVAGVGPISHRGRGWSRLRLVSWPGGIALRILVRTIPFAKPCSQFRVALVNSEFRVPGCLVRFVQAMPHRGQ

SEQ ID NO: 65986 - protein, 132 aa, Zea mays
  Coding DNA Sequence Number=SeqID_24207
MGEQSSPNRAVRMSDEDRHGTVTIKISGVKNKRRKRKRLKRCLGRLNFISTHLTISPPRALSPIPKPALRVRRPGMLGPRDSHQTLAPPLQIFTARSSPSHCHFGPRFNYRYCRCQWALSPTGLLPRENSVA

SEQ ID NO: 65987 - protein, 67 aa, Zea mays
  Coding DNA Sequence Number=SeqID_24208
MEYSAKTTLPLNSIGIVYPLPTVRCTSGATAICAQRSTLMDEQCSTVSRQKSEQQACKATPKCLTVC

SEQ ID NO: 65988 - protein, 192 aa, Zea mays
  Coding DNA Sequence Number=SeqID_24209
MMIHRAQARELQGRHVTFSSEAGNSVAEFLRTGDSRYPRRDIVGAMFHHGARSGRGRKQGRDGFIVPRVPQGLAGEPRPSWPSSFDPRGFRAADTEVDEDMRGSVAVNKRESDDMRVPWMGETNKRQQTSRSSRRDHRADSGVHRCGERDKDGEWAPPVSDRDKRKGESTGWVVRNKRWSWAGGGNFGPGEV

SEQ ID NO: 65989 - protein, 176 aa, Zea mays
  Coding DNA Sequence Number=SeqID_24210
MESVGTHRRLIYDKIGPPLFLRARQNVAVATVLLSKLSEAETLSGRKTHQEIRGLLNLVVRQRAKGFVPGHLELGANQSTTSTSAANDASIRRSLGPEEGLVPTSSRWDPGTSGRAQSVPDPGSNEEIWMEAEDDHRYNRIAGADSTVMKTDARAPTVGTSSVQPSHPIGASIAVL

SEQ ID NO: 65990 - protein, 73 aa, Zea mays
  Coding DNA Sequence Number=SeqID_24211
MAVGVMPLMAFMELEWREREKETVTVGSVVGVAQGRGKRLGAWRLSGLGAWGASGRNDAGARAAVVACVFAST

SEQ ID NO: 65991 - protein, 454 aa, Zea mays
  Coding DNA Sequence Number=SeqID_24212
  Gene Ontology: Mol. function=RNA-directed DNA polymerase activity; Cellular component=mitochondrion; Biological process=RNA-dependent DNA replication
  Homolog annotation: Hit_ID=Q8S463; Match level="QueryCoverage=85%, HitCoverage=20%, E-value=0.0, Identity=84%"; Hit description =Putative prpol
  Pfam annotation: Domain name=rve; Domain location=166-325; Score =89.5; E_value=1.1e-23; Accession=PF00665.16; Description=Integrase core domain
MPEAPSVQPEAPSAQLEAPSAPEGEALRVEEERNGVPPNRDWQTSYLQYLHRGELPLDRAEARRLARCAKSFVLLGDGKELYHRSPSGILQRCISIAEGQELLQEIHSGACGHHTAPQALIGNAFRQGFYWPTAVADATRILRTCQGCQFYARQTHLPAQALQTIPITWSFAVWGLDLVGPLQKAPGGYTHRLVAIDKFSKWIEVRPLNSIRSEQTVAFFTNIIHRFGVPNSIITDHGTQFTGRKFLDFCKDHHIRVDWAAVAHPMTNGQVEHANDMILQGLKPRIYNDLNKFGRRWMKELPSVVWSQRTTPSRAMGFTPFFLVYGAEAILPTDLEYGSPRTRAYDDQSNRTNQEDSLDQLQESRDMALLHSAWYQQSLRRYHARGVRSRDLQVGDLVLRLRQDARGRHKLTPPWEGPFVIAKVLKLGTYKLANSQGEVYNNAWNIRQLRRFYP

SEQ ID NO: 65992 - protein, 380 aa, Zea mays
  Coding DNA Sequence Number=SeqID_24213
  Homolog annotation: Hit_ID=Q6ASV3; Match level="QueryCoverage=86%, HitCoverage=72%, E-value=1e-93, Identity=55%"; Hit description =Expressed protein
  Pfam annotation: Domain name=F-box; Domain location=53-99; Score =22.2; E_value=0.0019; Accession=PF00646.23; Description=F-box domain
MENLFKRSWLPGIRNVDLLWSLLLSRILPKLLGLPGILLKKFRKEGVMELDAAALPELPQDVLMDIFGTLEVPDLIRAGSVCSSWHATYKCLLDLRQYKQPQTPCLFYTCESAGSNVGFLYSLKENRSYKLTLPEPPIRSRLLIGSSNGWLITADERSELHLVNPITGEQVALPSVITLEHVKPIFDASGTICMYELSYQTPPDLFDLGDLRDELYFKAFVFPDPSTTGSYIVVLIHEPYSRLSFARPGDDKWTWVGQGSQYKDCTYVDGLLYTVNYSGEIDAFDFTASPVKMTVIMKELKYHVCENMYIIQTPWGDLLHVWRTIDVPPNAPSWVPGKCMVETLKIQVHKVDLEAKQRVEINRLQCDSVLFFGPQRFTLP

SEQ ID NO: 65993 - protein, 404 aa, Zea mays
  Coding DNA Sequence Number=SeqID_24214
  Homolog annotation: Hit_ID=Q6ASV3; Match level="QueryCoverage=89%, HitCoverage=87%, E-value=1e-103, Identity=51%"; Hit description =Expressed protein
  Pfam annotation: Domain name=DUF295; Domain location=309-369; Score =30.0; E_value=8.6e-06; Accession=PF03478.8; Description=Protein of unknown function (DUF295)
  Pfam annotation: Domain name=F-box; Domain location=40-86; Score =21.9; E_value=0.0022; Accession=PF00646.23; Description=F-box domain
  Pfam module annotation: Pfam domain module=DUF295::F-box; Domain location=309-369::40-86
MQPKQLWSLLLSRILPKLLGLPGILLKKFRKEGVMELDAAALPELPQDVLMDIFGTLEVLDLIRAGSVCSSWHATYKCLLDLRQYKQPQTPCLFYTCESAGSNVGFLYSLKENRSYKLTLPEPPIRSRLLIGSSNGWLITADERSELHLVNPITGEQVALPSVITIEHVNPIFDASGTIRMYELSYQTPPDLFDLGDLRDELYFKAFVFPDPSTTGSYIVVLIHEPYSRLSFARPGDDKWTWVGQVIMKELKYPVCENMYIIQAPWGDLLHVWRTIDVPPNAPQWVPGECMFETLKIQVHKVDLEAKQRVEINRLQCDSVLFLGHNDSLCLSAQVHPELKSNHAYFSDDLKEVAVSLKNCMRDMGVMDLENSVKKEIVSQIWSNWPCPTWITPNLMKLNQAFNR

SEQ ID NO: 65994 - protein, 350 aa, Zea mays
  Coding DNA Sequence Number=SeqID_24215
  Homolog annotation: Hit_ID=Q2R1P7; Match level="QueryCoverage=89%, HitCoverage=97%, E-value=3e-61, Identity=44%"; Hit description=F-box domain containing protein
  Pfam annotation: Domain name=DUF295; Domain location=255-315; Score =33.3; E_value=8.5e-07; Accession=PF03478.8; Description=Protein of unknown function (DUF295)
  Pfam annotation: Domain name=F-box; Domain location=29-75; Score =20.6; E_value=0.0058; Accession=PF00646.23; Description=F-box domain
  Pfam module annotation: Pfam domain module=DUF295::F-box; Domain location=255-315::29-75
NLFERSRLPGIWNVDLKFRKEGVSELDAVALPELSQDVLMDIFSTLEVPDLIRAGSVCSSWHATYKCLLDLRQYKQPQTPCLFYTCESAGSNIGFLYNLKENRSYKLTLPEPPIRSRLLIGSSNGWLITADERSELHLVNPITGEQVALPSVITIEHVKPIFDASRTIHMYELSYETPPDLFDLGDLRDELYFKAFVFPDPSTTGSYIVAPWGDLLHVWRTIDVPPNAPSWDPEKCLAETVKIQVHKVDLEAKKWVKINRLQCDGVLFLGHNDSLYRSAQVHPGLKSNHAYFTDDCKELTVAFKNSTRDMGVMDLENNAKKEIVSQIWSNWPCPTWITPNLMKLNQAFNK

SEQ ID NO: 65995 - protein, 236 aa, Zea mays
  Coding DNA Sequence Number=SeqID_24216
MARRKNRLPRQLPEDGCLQWLVRVGADTVARLCSGIMVPVRYIMEMLRQRLLHGEPRPIGPIPITDEAADQQRAPGSGVLQSRGRGRNPNNYYAIKPERLDPHRHRSPPAPGPTNPMTDEAEGSHTATAGTDGVPIDVQSQYSTYVTLSSQLNIKSIICHMCFFERQLHQNSKVPIREIILHCHKQHEIQGIKCNYNGCEVRVRKEDDLKLHRHFCHGLEFVARLAVTRWGVIFPM

SEQ ID NO: 65996 - protein, 61 aa, Zea mays
  Coding DNA Sequence Number=SeqID_24217
MAAVGARESRKEAEDGRDWGSWRLGLFLVAEREGGGGWLWLRDGIQQQKGDGRRRGTAFVR

SEQ ID NO: 65997 - protein, 71 aa, Zea mays
  Coding DNA Sequence Number=SeqID_24218
MAGCAQRNLRGGPGPDPMAAVAAVLDSFIKRCTASKEDFGGQPSQKACFLLGIGFEFDIRGLLATHQSPHP

SEQ ID NO: 65998 - protein, 153 aa, Zea mays
  Coding DNA Sequence Number=SeqID_24219
MARSGVPSPAYVRSGRRAPLAWSCASLRRGPLHPPDGRRHFPAPCPRLVAVAPPSIVAAACRGLPALLQHATRHGHRRVRSAGVASFPVLCRPILQVEEKKTVSASFVHVTKDGERAHSCPRVPIRLGFKNGRLSNPGFSRGTKTRGYVIITR

SEQ ID NO: 65999 - protein, 231 aa, Zea mays
  Coding DNA Sequence Number=SeqID_24220
  Gene Ontology: Mol. function=nucleic acid binding; Cellular component= intracellular
MARRKNRLPRQLPEDGCLQWLVRVGADTVARLCSGIMVPVRYIMEMLRQRLLHGEPEPRPIGPIPITDEAADEQRAPGSGVLQSRGRGRNPNNYYAIKPERLDPHRHRSPPAPGPTNPMTDEAEGSHTATAGTDGVPIDVQSQYSTYVTLSSQLNSKSIICHMCFFEQQLHQNSKVPIREIILHCHNMHKIRGIKCNYNECEVRVRKEDDLKLHRHFCHGLELQGTNDEQE

SEQ ID NO: 66000 - protein, 105 aa, Zea mays
  Coding DNA Sequence Number=SeqID_24221
  Subcellular localization annotation: CTP_CleavageSite=34; ConfidenceScore=5.45e-01
MAAVAVLDSFIKRCTASKEDFGGQPSQRRPASFSASGSSSTSGASWPHTNHLIPNNAAGLTYAARDYGGSDPFEGFRDAVLGPITQRIRKKEGEFRGRKDEGDEE

SEQ ID NO: 66001 - protein, 470 aa, Zea mays
  Coding DNA Sequence Number=SeqID_24222
  Homolog annotation: Hit_ID=Q2R211; Match level="QueryCoverage=84%, HitCoverage=83%, E-value=1e-119, Identity=52%"; Hit description=F -box domain containing protein, expressed
  Pfam annotation: Domain name=DUF295; Domain location=375-435; Score =31.4; E_value=3.2e-06; Accession=PF03478.8; Description=Protein of unknown function (DUF295)
  Pfam annotation: Domain name=F-box; Domain location=69-115; Score =22.2; E_value=0.0019; Accession=PF00646.23; Description=F-box domain
  Pfam module annotation: Pfam domain module=DUF295::F-box; Domain location=375-435::69-115
MATAAPGVCAARPGIELGNLFERSRLPGIRNVDLLWSLLLSRILPKLLGLPGILLKKFRKEGVMELDAAALPELPQDVLMDIFGTLEVPDLIRAGSVCSSWHATYKCLLDLRQYKQPQTPCLFYTCESAGSNVGFLYSLKENRSYKLTLPEPPIRSRLLIGSSNGWLITADERSELHLVNPITGEQVALPSVITIEHVNPIFDASGTIRMYELSYQTPPDLFDLGDLRDELYFKAFVFPDPSTTGSYIVVLIHEPYSRLSFARPGDDKWTWVGQGSQYKDCTYVDGLLYTVNYSGEIDAFDFTASPVKMTVIMKELKYPVCENMYIIQAPWGDLLHVWRTIDVPPNAPPQWVPGECMFETLKIQVHKVDLEAKQRVEINRLQCDSVLFLGHNDSLCLSAQVHPELKSNHAYFSDDFKEVAVSLKNCMRDMGVMDLENSVKKEIVSQIWSNWPCPTWITPNLMKLNQAFNR

SEQ ID NO: 66002 - protein, 130 aa, Zea mays
  Coding DNA Sequence Number=SeqID_24223
  Subcellular localization annotation: CTP_CleavageSite=42; ConfidenceScore=5.38e-01
MDTIAAASGGPRALASRVGDAGRGRGRSRGAGTTMVNWNRLVSSGVRYGQQGRRRIGPWQEERNGGKAPKDTREAELAYRNKKKLAMKISIEERRKKIRTTAVIFTGSERLEDEGWHAVEKDLWESGGIR

SEQ ID NO: 66003 - protein, 63 aa, Zea mays
  Coding DNA Sequence Number=SeqID_24224
MADYSPRSASSAAGCTHTIVNRRQPFFTVMVTEIPLIRHRKHAINAKIVHGQGRCRHCRLRIR

SEQ ID NO: 66004 - protein, 54 aa, Zea mays
  Coding DNA Sequence Number=SeqID_24225
MVLLHHLCCSLQLTLLSSILLDNLGRHPTTLMDQLVHRRTSPAAHLADDLLLAY

SEQ ID NO: 66005 - protein, 109 aa, Zea mays
  Coding DNA Sequence Number=SeqID_24226
MDGIPDHAQGANTIQNAVMRAGNTSKPWKGLLPRWWMMPNWKAAHESVPYKEPSMTEAREAGHMGPQVSVDHERLALEPTRQSPKHDSQGVSGHEPTGHAEQAAGPTGE

SEQ ID NO: 66006 - protein, 74 aa, Zea mays
  Coding DNA Sequence Number=SeqID_24227
MVPNRQAARESVPSEEPSVTEAGREAGHMGPHVSVGHERLAVEPTRQCPKHGSQGVSGHEPTGRAEQAAGPVGV

SEQ ID NO: 66007 - protein, 97 aa, Zea mays
  Coding DNA Sequence Number=SeqID_24228
  Homolog annotation: Hit_ID=Q6K5P5; Match level="QueryCoverage=58%, HitCoverage=18%, E-value=4e-09, Identity=57%"; Hit description =Putative ankyrin-like protein
  Pfam annotation: Domain name=Ank; Domain location=45-77; Score=26.6; E_value=9e-05; Accession=PF00023.20; Description=Ankyrin repeat
MYATFINYLVLFEKPNIAMKAAISERSFIGLKSLIEAGAPVNIGLPETPLIAAATAGLTDFVKCLVQAGADANIPDDVSFILTLSFIVTFDELICCL

SEQ ID NO: 66008 - protein, 127 aa, Zea mays
  Coding DNA Sequence Number=SeqID_24229
MKRNGETADGANWDDRGRGDETYPGRGCIGAGLRSGAHGGVLWELKGLQVPAQGAQARCQRYCQGWFVSIFYFCFLHDVRWVSTRRDGMVRQLDQVSEHGKGDFDLIYGICRGFSLFVRFFVLDKIT

SEQ ID NO: 66009 - protein, 157 aa, Zea mays
  Coding DNA Sequence Number=SeqID_24230
MWQYTGDNYSNRHSAENLVRKDLMACVLATKAGGHCSIKVSRPPLLKDDAIKAEKKRKRKVEQSVTTTRKKCRLERKAKAKRACLTDVLGTNGSGHLDALLLATSVVPLAPSAHVGTPGASVLDTRAGPAVVDVVTIEARMADTTVTVPRARLWLLP

SEQ ID NO: 66010 - protein, 162 aa, Zea mays
  Coding DNA Sequence Number=SeqID_24231
MARTKTTLRKAIGPQGVPRHQLAPCHEGSNSESNDPIGDLEVRVERLTAECAMEAGSLHPNVSPEVAEMGAGAAGAGEGGPYGELDIFRAPPSMNIMDDRPPEASNGSGATKNMPTRTRAQDGTGTSRGSGEETTIPPPIPPTLAEAIAALLHATADNTRFL

SEQ ID NO: 66011 - protein, 339 aa, Zea mays
  Coding DNA Sequence Number=SeqID_24232
  Homolog annotation: Hit_ID=Q8S4P3; Match level="QueryCoverage=96%, HitCoverage=47%, E-value=5e-63, Identity=68%"; Hit description =Enhancer of polycomb-like protein
MERFFVFNRTCTKMFKREKVILVFQQQCTFIANNSLVRRNLEQAKALMDALIKREETKREAMECQVNLQRVQMKYKPFFRDKFTFGPLNDLMSFWTLCSAHRSWRRGNTVPEVLAHTDAVAIFTFIFTVLQLIAPRLWIDFFFLISFLDVRKHEAQLVEDGTTLSGFQQTSSRFESSDDDVDSDDTATEQTYIRPAVFHPRFSANKLSVIPPLRIKRERELKRRPQQNGCVFKRIGKDSSCFSSLVKFIYQLLQIQDPEEPVFLFTRPLDPEKLVAAGIKPPPDPPIENGATSPPFRCRGRIGRGGRIIFDRWNPLLRTPIDQETYYVPYGHRPPSPEG

SEQ ID NO: 66012 - protein, 292 aa, Zea mays
  Coding DNA Sequence Number=SeqID_24233
  Pfam annotation: Domain name=zf-C2HC_plant; Domain location=30-80; Score=5.1; E_value=0.01; Accession=PF07567.3; Description=Protein of unknown function, DUF1544
MESEGSVGAPVDVDAYDPMADPKRRAKSNDHEWNYGYWTATWNRDKVACSIFKTVTTGGIKRLKEHLAASKRTRAASQFRGAAPQPSNMEKETEKIATMLWRTPEQVVDDRRSSGSHQSTIEARMKLKADRDYVNEQWALWFYECGIPFNAISSQKFQIACEAPAQYGSDMLADLLERIDIGKWKDFKKPTAQAKRVTSFIYRHGRILSAMREKTGGMDLMHTKKRNQLLHKKLNDLVYVSYNWKMESRFQMRREKAGSSYDSLVIKDFDWDNKWIDPSVVHPGRDNDGLND

SEQ ID NO: 66013 - protein, 155 aa, Zea mays
  Coding DNA Sequence Number=SeqID_24234
  Gene Ontology: Biological process=regulation of transcription
  Homolog annotation: Hit_ID=Q8S4P3; Match level="QueryCoverage=98%, HitCoverage=31%, E-value=3e-65, Identity=84%"; Hit description =Enhancer of polycomb-like protein
MSRLSFRPRPLDIHKKLPILKSVREFEDEEPGIAPLSSARAGVLLRHSGADFTASGANNATEGEGNQALSKKNAQEIPTPQFDGVDTYERDYTRTFAQPTSYIRGRGELSLSAARAEIGEFVEYDLDNEDEDWLEEFNSERKNINPEKYSAYLSA

SEQ ID NO: 66014 - protein, 231 aa, Zea mays
  Coding DNA Sequence Number=SeqID_24235
MAGEHREDKEGECFVRFGHGGGLTPSGIIIKVLRRCSSPMLMQCRGIGKVHDTLQQFPERAYVRLRSEVHGGYFHADEDGVGVSLRWRRHRLIEEAYAACCYCIRNPWCCSGRSAQVKVRLLEEDNNAGKFGFYSYCLKCHKVAKEEHLRHQDVIIPFAWHKGKLVAWVIGKETWSSSFHDIQGLMSFRSSIDRSFLLHQPKDCRCTSCKDLMSTKQLYGCLISYYSINCW

SEQ ID NO: 66015 - protein, 268 aa, Zea mays
  Coding DNA Sequence Number=SeqID_24236
  Subcellular localization annotation: CTP_CleavageSite=58; ConfidenceScore=5.47e-01
MPALGLANFISLLQPLPPDCSTACWIAQSTSLYCCSSSTTTFSSCSCYLSTSFSPAPSAAAPDTKDEPLQDKTVEESTDVVTGNISGFPASQFDHSAWAYKGAMVRNMPDDPSQSQHLVQEDLVDVFDILDDLKNDPVQRDLLKEVEKHDVKNVSTFGSTERSIPLSQGFTMPRYVVPDDTDIQYTPPQPRATRSQAQPLKSSLRTNETRQIRKGQKKLKKSPKKVSQDVELDDNGFPIIDFAALDRFDPPPHLAVDVESYGGPAASG

SEQ ID NO: 66016 - protein, 81 aa, Zea mays
  Coding DNA Sequence Number=SeqID_24237
MSGVGGRTVHYTGVDAYALLLRSSRDMRIEGDEAASDGAKFSKKLGSSAEAACSAAALFLLYWYARSLASVSSLPTLLFRA

SEQ ID NO: 66017 - protein, 103 aa, Zea mays
  Coding DNA Sequence Number=SeqID_24238
  Subcellular localization annotation: CTP_CleavageSite=50; ConfidenceScore=5.67e-01
MVMPLCPTPAATRTFRLSVARFPMQRVPSPLSPPDSLAWTTPCNTGEQVVASSQVKVSLPLPDPTRSAEHLVGVLVVVEVEPALERLSGGDARRGNRSDPGQG

SEQ ID NO: 66018 - protein, 106 aa, Zea mays
  Coding DNA Sequence Number=SeqID_24239
  Subcellular localization annotation: CTP_CleavageSite=52; ConfidenceScore=5.33e-01
MGPGQQVGASLLRTTSSLLGGAGGDQPGMGMVGAGGVLPSQSSPFSSLVSPRTQYGGGSGNGLLAGASSVASMLSRQHSYGSGGTGAMPGSAAGLPIGGLQHRGGL

SEQ ID NO: 66019 - protein, 180 aa, Zea mays
  Coding DNA Sequence Number=SeqID_24240
  Homolog annotation: Hit_ID=Q1S040; Match level="QueryCoverage=77%, HitCoverage=25%, E-value=6e-12, Identity=30%"; Hit description=IMP dehydrogenase/GMP reductase
MGKKLTIWMPQVKKFRLAREEGTSLMRLIFWVSTSLRKKRSKGLPPGLAPAFEPLRDDDFPEVDIIVGDPSKFDKSPRRTEIQPVNNRELGEASQSTTKPNEADKAGIAPPSTVIETEEDGDVYRPTVISWGMFPRPQNISKAVRYSCSISYFVFASFLHDVKYYAMSNASTRNQYCTYS

SEQ ID NO: 66020 - protein, 166 aa, Zea mays
  Coding DNA Sequence Number=SeqID_24241
  Homolog annotation: Hit_ID=Q9FMR7; Match level="QueryCoverage=21%, HitCoverage=7%, E-value=9e-09, Identity=66%"; Hit description =Arabidopsis thaliana genomic DNA, chromosome 5, P1 clone:MWD9
MESSRLTYPDRFYAAAAYAPHKDEAIVGSPSPSLLWDEPFPSSMTVTAAAAGGMGQLRLMCSFGGRIIPCSTGKMVLAVFGVSHAFVIFLPIQDLIILWMTKSMMDDIHGWGVLFDDRVGDGTVTVYIWNGEESKPNMGHLEWADPFVITTDSISILSEACPLITS

SEQ ID NO: 66021 - protein, 39 aa, Zea mays
  Coding DNA Sequence Number=SeqID_24242
MELKDTPAPLEKFFRNYDLSRKQYQSFDSEIGALIEIWI

SEQ ID NO: 66022 - protein, 91 aa, Zea mays
  Coding DNA Sequence Number=SeqID_24243
  Subcellular localization annotation: CTP_CleavageSite=53; ConfidenceScore=5.66e-01
MANHCSGCRSRMMLNAKRSSTSLQVHHRSAPSPRSLSASIIDNNLSCTRRSTVAAENWTNRAKCISMLAAFRCTRHEAPSWAVSVAAAARA

SEQ ID NO: 66023 - protein, 73 aa, Zea mays
  Coding DNA Sequence Number=SeqID_24244
MTTALGTSSGGDGDRPRRRLVARAAEDRQRRDALGAVRPVLGGHRRASGARQVVVDDGGAKRARARGAAVVDL

SEQ ID NO: 66024 - protein, 89 aa, Zea mays
  Coding DNA Sequence Number=SeqID_24245
MQCALFTARPLQQWAVARWWRSPAESAESAPVRLCLVTNPALCGCHMTDPALGHPGLAPVFKESTIARLQKRNLKLARWIAGAMLSLLT

SEQ ID NO: 66025 - protein, 110 aa, Zea mays
  Coding DNA Sequence Number=SeqID_24246
  Subcellular localization annotation: CTP_CleavageSite=47; ConfidenceScore=5.33e-01
MPHFAATNNGHGWPSGPCASFLRRSDSQADRCGQARRPAQLERFAAPARLGSAGPGLPLLCLPGTPLPLACSSAAAGHRTPLILRCLVGGHRRVLWSLWATPSWADRDPD

SEQ ID NO: 66026 - protein, 73 aa, Zea mays
  Coding DNA Sequence Number=SeqID_24247
  Gene Ontology: Mol. function=structural constituent of ribosome; Cellular component=ribonucleoprotein complex; Biological process =translation
  Homolog annotation: Hit_ID=Q10E81; Match level="QueryCoverage=72%, HitCoverage=6%, E-value=9e-28, Identity=98%"; Hit description =Ribosomal protein S14p/S29e containing protein, expressed
  Pfam annotation: Domain name=Ribosomal_S14; Domain location=3-56; Score=90.7; E_value=4.5e-24; Accession=PF00253.11; Description =Ribosomal protein S14pS29e
MGHSNVWNSHPKNYGPGSRVCRVCANPHGLIRKYGLMCCRQCFRSNAKDIGFIKILAPQQFGTRVKFLIARVR

SEQ ID NO: 66027 - protein, 150 aa, Zea mays
  Coding DNA Sequence Number=SeqID_24248
MLRQLSSRSHRSKKLRASHGFQAFLLVAVAVWIVYQLTHPFGERRRHVAVEETSGSSNDDDAEPARRRLGRMRFVRFPGHASVDDNDIAAGARSWSGGSSDDDLSGKAGDAEGGDEGPEADGDDADDGLAVAADEEDDGMDFQSRDGRRD

SEQ ID NO: 66028 - protein, 106 aa, Zea mays
  Coding DNA Sequence Number=SeqID_24249
MGRDDDPKAVHGGTHQNGLNISGVATVNGTGTVLDGAAVLLSEATGGAADGAALTLTASAKNDSSVVGTALLRGTGSAGELLANSFAAGAPGAEKPANKTQKAGTF

SEQ ID NO: 66029 - protein, 205 aa, Zea mays
  Coding DNA Sequence Number=SeqID_24250
MTLGTSDTWSRLRLRSRGTLGHFRDQQERFCNGVPSEGGIEPSDPIEQDRVWQITCRVWLIAAESSLSRHRKLCLDLGPRPQEKSPPRPTLGLGPRLGLGRWTPPRPTPGLGPRLSLGRWTPPRPTPGLGLDLDLGRWSLPRPTPGLGLNLDLGWNRVLARPRLRPQEESPPRPTLGSDRPRRRGIFRFSSQPDSPRNQILREER

SEQ ID NO: 66030 - protein, 468 aa, Zea mays
  Coding DNA Sequence Number=SeqID_24251
  Gene Ontology: Mol. function=serine carboxypeptidase activity; Cellular component=endoplasmic reticulum membrane; Biological process=proteolysis
  Homolog annotation: Hit_ID=P52712; Match level="QueryCoverage=81%, HitCoverage=100%, E-value=0.0, Identity=74%"; Hit description=Serine carboxypeptidase-like precursor
  Pfam annotation: Domain name=Peptidase_S10; Domain location=95-452; Score=390.2; E_value=3.1e-114; Accession=PF00450.12; Description =Serine carboxypeptidase
MRPADQLLLPFLLLAVASVAAAGGSWENGYGSILRLPSSSPRRFPRSAAVDLIHALNLHPADASPPLSTAGVEGALAPAGTLVERPIRIASFANGGAATSVEDLGHHAGYYRLANTHDARMFYFFFESRGHKDDPVVIWLTGGPGCSSELALFYENGPFNIADNLSLVWNDFGWDKASNLIYVDQPTGTGFSYSSDSRDTRHNEATISNDLYDFLQGFAIGNGLTDPAIQYKAYPDYALDMGLITKTQFNRINKIVPTCEFAVKLCGTSGTVSCLAAYFVCNTIFSAIRTIIGNKNYYDIRKPCIGSLCYDFSNLEKLNRIFFSLRPTVGDIEFVSCSPTVYEGMLLDWMRNLEVGIPELLESDIKVLIYAGEYDLICNWLGNSRWVNSMEWSGKEAFVSSSEKPFTVDGKEAGVLKSHGPLSFLKVHDAGHMVPMDQPKAALEMLKRWTSGNLSEPSSSSQRLDFTM

SEQ ID NO: 66031 - protein, 62 aa, Zea mays
  Coding DNA Sequence Number=SeqID_24252
MSENNEVMPSKSRAKGCPKYAGQFRLRISQGRGRRLDVDERVEQCCAVVGNLHILAQFVLVL

SEQ ID NO: 66032 - protein, 149 aa, Zea mays
  Coding DNA Sequence Number=SeqID_24253
MVQTRTGNKTTKRRALVKMRGGILRLMIQILVCSHHVIISVKKRKRLQISVGIHQRERVSRAKNCVTSEFSLGAVDSFLSVRDPAIANDDLRTPDAKELAAVPVASIGSVVSYRSKMRARSSVGDSLERPSKLKATRNLDSDFERGIPS

SEQ ID NO: 66033 - protein, 326 aa, Zea mays
  Coding DNA Sequence Number=SeqID_24254
  Gene Ontology: Mol. function=DNA binding; Cellular component=nucleus; Biological process=RNA-dependent DNA replication
  Homolog annotation: Hit_ID=Q651V3; Match level="QueryCoverage=91%, HitCoverage=59%, E-value=1e-92, Identity=59%"; Hit description=NAM -like protein
  Subcellular localization annotation: CTP_CleavageSite=27; ConfidenceScore=5.24e-01
MENVDAPSKKSQKGTKKSQKGAKQKVVSRRGGSFTKQEDIVICSTFLNVSKDPITGVNQTSGGYYKLMHEYFNKCKPEGSNRSQISIQHRLGAIQKAVNKFCALKSSVDRHNESSKSEQDRIDDAVFMYEKGEPFVFMHCWKLLRNEAKWNNRFLETISKPPSSQVPPEAGKGHTTMGLDEPGNGGTSRPEGRDATKRRRAAGVADSSASSKAVDVLQRLHEKSEMTEKKQDQQMIEILNRKDEKIKIQRDLLNLQKKQVKVSIKQHKKEAEIREKQTEAQLISAETGIMSIDIEKVPSYQKSYYLGMQRQILERRGFTTPSSNDD

SEQ ID NO: 66034 - protein, 95 aa, Zea mays
  Coding DNA Sequence Number=SeqID_24255
MGKFLSRALGARRGISGDECVGDVKSGLDGGMGFGAFAAVRQVDKRIRGSLPHEIWLTVRLRAENVEGEREKVDRHELWRSGGPVAQPMRQLGPT

SEQ ID NO: 66035 - protein, 168 aa, Zea mays
  Coding DNA Sequence Number=SeqID_24256
MARLERRRHRIPRARTRRRPHEVRAMARWQRPRCRILGARARQRLPEVHAAAAPWGAHVGEVGATVQRRISGTRFYDLYFSSWLRFHLLDTRGVALGVVGGGAKVGAAWSPRRGASLWRWRVGEPVARWRRASVPAGTTYKHADVGTGARRVRSAAEFGGGDGWGVEK

SEQ ID NO: 66036 - protein, 222 aa, Zea mays
  Coding DNA Sequence Number=SeqID_24257
  Gene Ontology: Mol. function=protein dimerization activity
  Homolog annotation: Hit_ID=Q53M47; Match level="QueryCoverage=96%, HitCoverage=20%, E-value=2e-76, Identity=66%"; Hit description=HAT family dimerisation domain, putative
  Pfam annotation: Domain name=hATC; Domain location=99-193; Score =16.0; E_value=0.00067; Accession=PF05699.5; Description=hAT family dimerisation domain
MNIVIPNMDDIIPTRGRSRCRGAKLVSYYHHFHNGIFIVVIDQVLVEFNNRFPERSTQLLGSIACLDPRDSFANFDLEKLIELSKIYDADFSDYERTCLMDQLLLFIDEVRNDDGFRDCNDLGHLATNMVKTDRHICFSLVYRLVELALILPVATATVERAFSAMNIIKIERRNKMGDEWMNNSMLCYIERDMFVEIQDEKILKHFQGLRTRKINLPRSINS

SEQ ID NO: 66037 - protein, 98 aa, Zea mays
  Coding DNA Sequence Number=SeqID_24258
MFPRSRCLGHFWKRRETKGELSDLDSNLVVKEIDNAGCRADRATNTRDLGVSSSSPTRSRPSTLLPVKGYEELKKKVLVEKMKVSDGYWINRVASWEL

SEQ ID NO: 66038 - protein, 622 aa, Zea mays
  Coding DNA Sequence Number=SeqID_24259
  Gene Ontology: Mol. function=RNA-directed DNA polymerase activity; Cellular component=mitochondrion; Biological process=RNA-dependent DNA replication
  Homolog annotation: Hit_ID=UPI00004C1731; Match level="QueryCoverage =99%, HitCoverage=51%, E-value=0.0, Identity=81%"; Hit description =UPI00004C1731 related cluster
  Pfam annotation: Domain name=RnaseH; Domain location=220-347; Score =10.6; E_value=6e-06; Accession=PF00075.14; Description=RNase H
  Pfam annotation: Domain name=rve; Domain location=349-545; Score =92.5; E_value=1.3e-24; Accession=PF00665.16; Description=Integrase core domain
  Pfam module annotation: Pfam domain module=RnaseH::rve; Domain location=220-347::349-545
MPFGLRNAGATYQRCMNHVFDEHIGRTVEAYVDDIVVKTRKAFDLLSDLEVTFRCLKAKGVKLNPEKCVFGVPRGMLLGFIVSKRGIEANPEKIAAITSMGPIKDLKGKPFQRPVYFISEVLSETKIHYPQIQKLLYAVILTRRKLRHYFESHPVTMVSSFPLGEIIQCREASGRIAKWAVEIMGETISFGPRKAIKSQVLADFVAEWVDTQLPTAPIQPKLWTMFFDGSLMKTGAGAGLLFISPLGKHLRYVLRLHFPASNNVAEYEALVNGLRIAIELGVRRLDARGDSQLVIDQVMKNSHCRDPKMEAYCDEVRRLEDKFYGLELNHIARRYNETADELAKIASGRTMVPPDVFSRDLHQPSIKTDDTSEPEKASAEPEAPSAQSEVPSARPEAPSAQPEKAPGGYTHLLVAIDKFSKWIEVRPLNSIRSEQAVAFFTNIIHRFGVPNSIITDNDTQFTGRKFLDFCEDHHIRVDWAAVAHPMTNGQVERANGMILQGLKPWIYNDLNKFGKRWMKELPSVVWSLRTTPSRATGFTPFFLVYGAEAILPTDLEYGSPRTRAYADQSNQVNREDSLDQLEEAWDMALLHSARYQQSLRRYHARGVRSRDLQEGDLVLRLR

SEQ ID NO: 66039 - protein, 115 aa, Zea mays
  Coding DNA Sequence Number=SeqID_24260
MEARAHASCNRRAGCYVRATAPPLAPLPRLLDCGTSAATRGNPTYDPGTQQCQPDATVNTAKNGPTGPGKEDTPKRILLREGNRPRASLLIRGSKAGPSEGFNSRLRALGFHAHY

SEQ ID NO: 66040 - protein, 68 aa, Zea mays
  Coding DNA Sequence Number=SeqID_24261
  Subcellular localization annotation: CTP_CleavageSite=35; ConfidenceScore=5.26e-01
MDSVPSPSSSTRATAAPGPCCRFDALRRACARHAAAAARAAGWALGALLTCVFAVGCLSAVYIKVYLF

SEQ ID NO: 66041 - protein, 733 aa, Zea mays
  Coding DNA Sequence Number=SeqID_24262
  Homolog annotation: Hit_ID=P33628; Match level="QueryCoverage=10%, HitCoverage=73%, E-value=2e-14, Identity=51%"; Hit description =Tubulin alpha chain
MEDEDADLDDRARPPLCMEEGRSGKSQRRYRRGPGLGLGVRITIGQCSNGRCPTTSPPIDPDEVLDNHRVDELISTFTSVGDVAFSSTADVECGTVHSYAATNTEIDAVEAAAATRVGALESWRPRVESHASVDLFDSGDDSNELRYEEPITANNWGGLFDGDGAANAEIADDWDKPSTASTDEPSLVHVLRHGPPLLVESRLHALRVAQELGARPRAGGRARVLTGEDDDDHQPRDLGLGRAALVPVPGLHQALQHVVIPGSDGGAPTRPDDLGEDTIFDGTNVTKLPTTCSTSELSAELAMAHYGAHLPSDKGDSVASWQPAWSLALACQQASSARGTPAMASMGKMSVGDLTEADLKGKRVFVCAEIHEPPDENQNITNDILSTSCDTAVHVVKRCQRLFPLADSTGTFDAAVAARVTQMVVPSPARNATRTGSSPESAACWFPCDNKSSKQLQRGGPSLAERQQPRAMLACRAITERVKRPKEEEQAASVPEAAVVADVKGKEEYNSVARLTMVNCCSDFIIWRSLFDACCRLCKLFNCQELKLTDSQSALTLIDAQVVFEGMQQSATSVGVSQDAFNMFCSKTSSSKQVARAIFVNPEHDLYPEIFHLEQLISGKEDTANNFSRGYYTIGKGMVLVANNLGDDLLARRSEIKQPWPPPQELACLGLNIMVVSVFLATSDLHICSVFVWDPSGVANSSLGASYISKRGKCQFYIVSSSSISASSTAYRQ

SEQ ID NO: 66042 - protein, 99 aa, Zea mays
  Coding DNA Sequence Number=SeqID_24263
MEAKRTLRYRVHRGRSRRPSVLNLMDSNLDQVKPTWCFGVQSRPQTGQQEKTVKRLSMQGKSSKELKLLGENMKKITLTASYLGAPDRLQEWFDGALGD

SEQ ID NO: 66043 - protein, 334 aa, Zea mays
  Coding DNA Sequence Number=SeqID_24264
  Homolog annotation: Hit_ID=Q5KS41; Match level="QueryCoverage=75%, HitCoverage=51%, E-value=4e-45, Identity=39%"; Hit description =FOLDED PETALS
  Pfam annotation: Domain name=Condensation; Domain location=44-309; Score=-116.2; E_value=0.028; Accession=PF00668.10; Description =Condensation domain
  Pfam annotation: Domain name=UPF0089; Domain location=50-302; Score= -45.9; E_value=6.5e-07; Accession=PF03007.7; Description =Uncharacterised protein family (UPF0089)
  Pfam module annotation: Pfam domain module=Condensation::UPF0089; Domain location=44-309::50-302
  Subcellular localization annotation: CTP_CleavageSite=42; ConfidenceScore=5.09e-01
MDGSGAGTGSATLLRKRPLSVNTASSTAAAIELGSKQAAGVVAAIEEEPVSPTGRLFREPNFRCHIVSVFGLGAPVDLPALRAGVAATLARHPRFCSVQVVNEKDARPKWIRTAVNVDDHIIVPELNPATTSADPDKALEDYVSSLSTRPMAHSRPLWEVHVLDFPTADAAAALALRAHHSVGDGVSMLSLFMACTRSAADPGALPSLPPARRAGPVHAVRRPAGALAALAAWLLSLLVLAWRTAVDVACFVATAASLLGDAPTVLKGKEGTEFQPRRFVNRTLSLDDIKLAKNAVGCVSVLLMALRSTGSTILHHCSTGSTNNCLRVLYFFRL

SEQ ID NO: 66044 - protein, 81 aa, Zea mays
  Coding DNA Sequence Number=SeqID_24265
MSDATMVYSMTTDIKDSKIMGLVIELVNTNAPQRGEEVLTYLLEELSINYDPFVNSMTTKTKPLSHNDVFTHLVAFEARQL

SEQ ID NO: 66045 - protein, 69 aa, Zea mays
  Coding DNA Sequence Number=SeqID_24266
  Gene Ontology: Mol. function=RNA polymerase II transcription factor activity; Cellular component=nucleus; Biological process=regulation of transcription
  Homolog annotation: Hit_ID=UPI0000162E27; Match level="QueryCoverage =98%, HitCoverage=36%, E-value=1e-18, Identity=65%"; Hit description =DNA binding / transcription factor/ transcription initiation factor
  Pfam annotation: Domain name=TAFII28; Domain location=1-53; Score =31.3; E_value=6.9e-07; Accession=PF04719.5; Description=hTAFII28 -like protein conserved region
LLASITGSQKISIPTSIVVSGIAKIFVARVVMSERKDSGPIRPCHIREAYRRLKLEGKIPRRSVPRLFR

SEQ ID NO: 66046 - protein, 145 aa, Zea mays
  Coding DNA Sequence Number=SeqID_24267
MTAGGGNLALNGTKDLAVPLEVARKRMRKNEEGRDRRIAEFQGYMLQTAAAETQLSIKEQKNLTTARNTALCVASTAVLRRFQRGGGSSGSSSTIPQQPADVWDPYEHAAIDEMSFCDPFLRVVHKPDFRHGGSDVCIIRASVPQ

SEQ ID NO: 66047 - protein, 249 aa, Zea mays
  Coding DNA Sequence Number=SeqID_24268
  Gene Ontology: Mol. function=RNA-directed DNA polymerase activity; Cellular component=intracellular; Biological process=RNA-dependent DNA replication
  Homolog annotation: Hit_ID=Q8GTL8; Match level="QueryCoverage=99%, HitCoverage=18%, E-value=1e-125, Identity=92%"; Hit description =Putative gag-pol
MKESDQLATSFITPFGMCCYTTMPFGLRNAGATYQRCMNHVFREHIGRTVEAYVDDIVVKTRKASDLLSDLETTFKCLRAKGVKLNPEKCVFGVPRGMLLGFIVSERGIKANLEKIAAITNMGPIKDLKGVQRVMGCLAALSRFISRLGEKGLPLYRLLRKAERFTWTPEAEEALGTLKALLTNAPILVPPAAGEALLIYVAATTQVVSAAIVVERREEEHALLVQRPVYFISEVLFETKICYPQIQKL

SEQ ID NO: 66048 - protein, 206 aa, Zea mays
  Coding DNA Sequence Number=SeqID_24269
MAIILYWVYTVTFSPIVLYWVYTNGYQLVLHSLERYRLHTLDEEEENFVSLCTVVCGILQQHLVHAINVMVFVHDDVCKNMARRSILGWVNRLARMGRYHRFNLSLSCHASEFSCNTVKEVPGRLQQFESRWHGLGFSTYSSANVWELELCALGGLFISFDRASPTWSKLPRVMENDVIARYYGQGKGIVVKAIYDREATPYNFSM

SEQ ID NO: 66049 - protein, 342 aa, Zea mays
  Coding DNA Sequence Number=SeqID_24270
  Gene Ontology: Mol. function=pyridoxal phosphate binding; Cellular component=chloroplast; Biological process=cysteine biosynthetic process from serine
  Homolog annotation: Hit_ID=Q9XEA8; Match level="QueryCoverage=94%, HitCoverage=99%, E-value=1e-126, Identity=69%"; Hit description =Cysteine synthase (EC 2.5.1.47) (O-acetylserine sulfhydrylase) (O- acetylserine (Thiol)-lyase)
  Pfam annotation: Domain name=PALP; Domain location=29-318; Score =423.7; E_value=2.6e-124; Accession=PF00291.15; Description=Pyridoxal- phosphate dependent enzyme
MTSSSTTETVQDEGSKTAKDQGPKIAEDVTQLIGKTPLVYLNKVVAGCEARVAAKLEIMAPCSSVKDRIGYSMIADAEEKGLITPGKSVLIEPTGGNTGIGLAFMAAAKGYRLVVAMPSSVSTERRAVLRAFGAEVVLTDPLLSMDGVVRKAQEVAARTPGAHVLQQFANPANPRAHYEATGPEIWSATAGKVDALVAGIGTGGTVTGAGRYLKEKNPAIKVYGVEPSDSAVLSGGKPGPHKIQGLGAGFVPGVLDVSLLDEVFQVSNEEAAGMAKQIAREEGLLVGISSGAAAVAAVRVARRAENRGKLIVAIFASFGERYLSSFMYESLKEEAESMAFEP

SEQ ID NO: 66050 - protein, 101 aa, Zea mays
  Coding DNA Sequence Number=SeqID_24271
  Subcellular localization annotation: CTP_CleavageSite=64; ConfidenceScore=5.32e-01
MAASRRGLGGAALAPPSAAALLPPRAAASVARLLLLRRRAHQLARPPGGIVGTGSLQQYPTVARMDLASEYKIHLVSSSSWATTHHCGNSDICAATAAARC

SEQ ID NO: 66051 - protein, 41 aa, Zea mays
  Coding DNA Sequence Number=SeqID_24272
MLRRVNLAAVTLLEVGGEDSLEPLDQMRMSRIRRIWRRSIE

SEQ ID NO: 66052 - protein, 114 aa, Zea mays
  Coding DNA Sequence Number=SeqID_24273
MGRGKRGKGWPRRADDKRKRPPSPASEDFGDSEYLEAYWRSIERDGLNGSDDSEETSSEEVEDSSDCKEWSSGDDVSGDDGSEGGDGEGDDDSDGKGDDGDGKGNGDDKGDGDG

SEQ ID NO: 66053 - protein, 119 aa, Zea mays
  Coding DNA Sequence Number=SeqID_24274
MLASSLKLRPRLSHIDGVLTASPSRRTTLQDLDPSWALLYVVRARLGLDIGLFSDQLSRQSSCPTRCQTCLDPSLAKPLRRCSMLLVWIVAMRLGLIALIVSTTSLVQQRCRFLCSRCG

SEQ ID NO: 66054 - protein, 52 aa, Zea mays
  Coding DNA Sequence Number=SeqID_24275
  Subcellular localization annotation: CTP_CleavageSite=19; ConfidenceScore=5.17e-01
MVALASLSSLCPCGIARRRAASATSSTAFSISCCAVATPSFSGKGYFGCNVI

SEQ ID NO: 66055 - protein, 150 aa, Zea mays
  Coding DNA Sequence Number=SeqID_24276
  Gene Ontology: Mol. function=hydrolase activity; Cellular component =nucleus; Biological process=ATP synthesis coupled proton transport
  Homolog annotation: Hit_ID=Q6ER78; Match level="QueryCoverage=84%, HitCoverage=36%, E-value=2e-44, Identity=84%"; Hit description =Putative metallo beta subunit lactamase
MELIKKRLKEFGIFLSSRLKVLRIKKRFQAGPFEVEPIRVTHSIPDCCGLVLRCGDGIIFHTGDWKIDESPVDGKKFDRQALEELSKEGVTLVFVGMSLRTYLEAAFKDGKAPLDPSTLKNQVHMEENSPNTKHKTPTHIENNEQDTMTD

SEQ ID NO: 66056 - protein, 98 aa, Zea mays
  Coding DNA Sequence Number=SeqID_24277
MGKAPLGRYWRPRPNFLRAGPTRASRHCRVGHPRQPHVLGACVHSMPMTVGLQGADLANTGGLTTAWVGGATVGPRWEEDRPGPSDPNREDRIRSSRG

SEQ ID NO: 66057 - protein, 164 aa, Zea mays
  Coding DNA Sequence Number=SeqID_24278
MVGPSPRLGKAEAPPRPRSSLSSVVEVESEPLGRVRWRPSAEARAESEPWGRVRRSSSSSGAEAESEPWGRARRSSSSSGPRPSLSPGVERGGASYGTRGQTWRLSASLCQVAQQSERRRRRCPLVRPLCADGGYQLRLGVLGVPLIMVPDSYLDRPMSYNVSG

SEQ ID NO: 66058 - protein, 117 aa, Zea mays
  Coding DNA Sequence Number=SeqID_24279
MGKYMWSPGAPRPYCAGIEEPPLPPQWRDPPQGKPPCMTMGDRNRPGAITSAHGCSSRLRLGGIVLQTTGILHRSGSSSILPPRTMGSSPGVVSVPGKPSHLVCFVPYAGRSLGFGD

SEQ ID NO: 66059 - protein, 245 aa, Zea mays
  Coding DNA Sequence Number=SeqID_24280
MERNRKSVVVRTPFRCPSAADGTRPTLFHRSPAAQAGALLRIPSIGSPQGLILGRSLHQAVASQLPSPGGVQSSDAGIPSTESGSDSFMNYMIGKEGQNLEENAHFVGTTSHVSDVDIEIDDGIEENRKGSRLIWKHDEDEAPPRSTPGLRLGLGPEDDELRLARPQGSDSASAPEDDELRLTRPQGSDSALASADGLHLTRPKGSDSTSTTEDRLDLGLGGASALPNLGLGPTMPQEGPSLPYP

SEQ ID NO: 66060 - protein, 85 aa, Zea mays
  Coding DNA Sequence Number=SeqID_24281
MRDRKRTSRGKDTAIVIGGHVVDASDLTTRPPFLVWLFSTTTNLKVSQEGEDDVEVVEAELNSDTMRKAPFELEFTHIANPFETK

SEQ ID NO: 66061 - protein, 716 aa, Zea mays
  Coding DNA Sequence Number=SeqID_24282
  Gene Ontology: Mol. function=binding; Cellular component=nucleus; Biological process=lateral root development
  Homolog annotation: Hit_ID=Q9AY55; Match level="QueryCoverage=93%, HitCoverage=82%, E-value=0.0, Identity=58%"; Hit description =Putative arm repeat protein
  Pfam annotation: Domain name=Arm; Domain location=357-397; Score =30.1; E_value=7.6e-06; Accession=PF00514.13; Description =Armadillobeta-catenin-like repeat
  Pfam annotation: Domain name=Arm; Domain location=398-438; Score =35.3; E_value=2.1e-07; Accession=PF00514.13; Description =Armadillobeta-catenin-like repeat
  Pfam annotation: Domain name=Arm; Domain location=439-482; Score =31.6; E_value=2.8e-06; Accession=PF00514.13; Description =Armadillobeta-catenin-like repeat
  Pfam annotation: Domain name=Arm; Domain location=483-524; Score =30.6; E_value=5.6e-06; Accession=PF00514.13; Description =Armadillobeta-catenin-like repeat
  Pfam annotation: Domain name=Arm; Domain location=529-569; Score =47.6; E_value=4.3e-11; Accession=PF00514.13; Description =Armadillobeta-catenin-like repeat
  Pfam annotation: Domain name=Arm; Domain location=589-629; Score =31.2; E_value=3.7e-06; Accession=PF00514.13; Description =Armadillobeta-catenin-like repeat
  Pfam module annotation: Pfam domain module=Arm::Arm::Arm::Arm::Arm::Ar m; Domain location=357-397::398-438::439-482::483-524::529-569::589 -629
MASACRAWRALGSSPCLWRTLDLRAHRYDREVASSLASRCGSLRRIRLRGHEAAEAVLGLRARGLREVVADGCRGLTDATLAVLAARHEDLQSLQIGPDPLERISSDALRHVALCCSQLCRLRLSGLREVDAEAVGALARCCPLLEDVAFLDCGTVDEAALAGIHSVRFLSVAGCRNLKWATASTCWTQLPSLIALDVSRTDVPPSAVSRLISHAKTLKLICTLNCISVEEEQLHNPAVFSNSKGKVVLTINSDIFKSFETMFPVVDVKEHEFFNQCNWSHKDKIPGDTMTWLEWILSQSLLRIAESNPQGMDGFWLQKGTTLLLRLLKSLQEDVQERAATSLATFVVMDDESANVDPARSEAVMQNGGIRMLLDLARCSRESAQSEAAKAIANLSVNTKVAKAVADEGGITILINLAKSMNRLVAEEAAGGLWNLSVGEDHKAAIAVSGGIKALVDLIFRWPAGTDGVLERAAGALANLAADDKCSLEVAKAGGVHALVTLARSCKLDGVLEQAARGLANLAAHGDNNDNNAAVGQEAGALEALVQLTSSQNEGVRQEAAGALWNLSFDDRNREAIAAVGGVEALFFFALVSIAIGQGGGVAPLLTLARSEVEDVHETAAGALWNLAFYSGNALRIVEEGGVPVLDVVVDCDTLADEVEVDLHVLRALTLHEIGGEPTEPGCLDHVVGHKVLLGLSAGAGDDELPLRGPRDEVGA

SEQ ID NO: 66062 - protein, 80 aa, Zea mays
  Coding DNA Sequence Number=SeqID_24283
  Subcellular localization annotation: CTP_CleavageSite=44; ConfidenceScore=5.82e-01
MAYAYMHLRMRTPSSSPNTPAGNGKRRGLSPPTLSNASLRFHPKATKSRSKGAFSFALRESQLLEKAVFWIQPFGLAFGF

SEQ ID NO: 66063 - protein, 77 aa, Zea mays
  Coding DNA Sequence Number=SeqID_24284
MSRPSTGGASARPVHASFIWEFWAFGHGLREPGDGATAPPLGPASPPLSVYGRGRRHQGFSPVADWVDQLSIRTVDL

SEQ ID NO: 66064 - protein, 87 aa, Zea mays
  Coding DNA Sequence Number=SeqID_24285
MATSLRFHRCSPSLYPLSLRCMVKLGDGALGAIKDVAFRLCSRVARRRSATVSRFPRVYDDDDEWFGKILMGPKKEDAIQNQCEFLI

SEQ ID NO: 66065 - protein, 51 aa, Zea mays
  Coding DNA Sequence Number=SeqID_24286
MAVTTRMTKSLASSSRVDDVEGPVLERVGMCPRRQRHRPAKSSLPIQTAIG

SEQ ID NO: 66066 - protein, 322 aa, Zea mays
  Coding DNA Sequence Number=SeqID_24287
MGSEGAGGDGSYRDRETSVSGSWRWRNGEILGRYRSDEPWGGGGYGENGEMAAFRGTLGRLCRLVPQPFARMSRAHVVDFAPTTHAEAVPAPPQPFLAACTPLSLPPPSPMHSQGSNTHLAQCAHQRSPTAVVSGLFRDRRRVPIMSVALVSFASTPATRDALRFTPSPSISLCSRSPDLHRAAGVLPSSTRGLIASLPSSKGLRALSQGNQPTPDFPFPALGCVQSLVGVELHRHRAILSRIATLRCLLRRCRAHGCVHYVAPNPPEPFPVPQGLRRARALVSGGAPPRSREASPLTAKKPYPGLPWDLRRSPKIRRPRFK

SEQ ID NO: 66067 - protein, 87 aa, Zea mays
  Coding DNA Sequence Number=SeqID_24288
MVRRCNSYHTTTRLYVLDLLLALGLSDCSDWLQGQEGEVHGCLVSGTGFLPVDCSSGTTAAAEGTTSETAGDADAGSGADIPEGGFA

SEQ ID NO: 66068 - protein, 120 aa, Zea mays
  Coding DNA Sequence Number=SeqID_24289
  Subcellular localization annotation: CTP_CleavageSite=41; ConfidenceScore=5.19e-01
MAVKGKGKQVAPESPGPGGGGASGAGGKRRKASGDTGEGPSSSSAAKRRRRAGVLQFVDDVAGVDDDNEDEDEDELESEDDPDDGEYGFGSVLKACMRRGWVEWIHLEFCVMRNVDYLGG

SEQ ID NO: 66069 - protein, 319 aa, Zea mays
  Coding DNA Sequence Number=SeqID_24290
  Homolog annotation: Hit_ID=Q10BX5; Match level="QueryCoverage=31%, HitCoverage=27%, E-value=4e-10, Identity=41%"; Hit description =Expressed protein
  Pfam annotation: Domain name=DUF569; Domain location=1-145; Score =36.8; E_value=1.3e-09; Accession=PF04601.4; Description=Protein of unknown function (DUF569)
MELFENARSVRLKSHLGTYLCAADDAEAVSHGYRRNSRGTVWAVEPAGDEYVRIQGQRGLYLGAADPTAALDAATPSCRVVQGVPSTPNDSAFLWTPRRERGAGCLTLSGPLGRLLRASFGETPRDNAVTLDFDVGPEESAWVVEAVPAEQAARPPPCRAQSCDARMQATAATTSDTASSSFIRFYSTKEPKTKLEEPPPTEEPLHMPARRTIFHNTAREDGAVDDFDEGTWRYFTFDEQSLSALSRRLQEETKHKDFVICRRSAGGDAPRLFPVVLDLPPGNDEMEFVLVLVPSTVANDLQWPLGRDDQFGKKGTFLF

SEQ ID NO: 66070 - protein, 296 aa, Zea mays
  Coding DNA Sequence Number=SeqID_24291
  Gene Ontology: Mol. function=binding; Cellular component=membrane; Biological process=photosynthesis
  Homolog annotation: Hit_ID=Q10RB0; Match level="QueryCoverage=96%, HitCoverage=97%, E-value=5e-68, Identity=49%"; Hit description=TPR Domain containing protein, expressed
  Pfam annotation: Domain name=TPR_4; Domain location=191-216; Score =19.4; E_value=0.013; Accession=PF07721.5; Description=Tetratricopepti de repeat
MASSKRRFGAAGGADKKDLFHVVHKVPAGDSPYVVAKHLQNQLVEKQPDVAIVWFWKAINSGDRVDSALKDMAMVMKQQDRSEEAIEAIRSFRHLCSKQAQESLDNLLIDLYKKCGKVEEQIELLKQKLKSIYLGEAFNGKATKKARSHGKKFQLRTQLLSSLKNKQQSPQNNFEAAELVYRKAQAIEPDANRACNLGLCLIKQGRHDEARQALEDVRLRRIYGSEDGKVVARAEQLLRELNPLQCVSSPFQVGLSVHEGIMGKPDLVVMNEWTPFRSRRLPVFEEIATFRDQMAC

SEQ ID NO: 66071 - protein, 429 aa, Zea mays
  Coding DNA Sequence Number=SeqID_24292
  Gene Ontology: Mol. function=hydrolase activity, acting on ester bonds; Cellular component=cellulose and pectin-containing cell wall; Biological process=lipid metabolic process
  Homolog annotation: Hit_ID=Q6H8W7; Match level="QueryCoverage=90%, HitCoverage=86%, E-value=1e-68, Identity=39%"; Hit description =Esterase precursor
  Pfam annotation: Domain name=Lipase_GDSL; Domain location=32-412; Score=108.0; E_value=2.8e-29; Accession=PF00657.12; Description=GDSL- like LipaseAcylhydrolase
  Subcellular localization annotation: CTP_CleavageSite=19; ConfidenceScore=5.17e-01
MALTPVLLLLLAYCLSGVSSSAGPPPRSFTSLFALGDSYIDAGNFVTMATPVAPVWVDKPPYGMTFFERPTGRFSDGRVIVDFVGKISSMHGRAEALCAPRLFNSFNLSIYISCGVYAFRSAAALGVPFLPASLANSSDDDVARRGGVNFAVGGATAVDVAFFERRRLVPFKLLNNSLDVQLGWFEELEPSLCNATAETAGSYGGGRCFSRSLFLVGEFGVNDYTFLWTANKTESEVMAFVPRVVRTIASAVERLIVRDGAAHVVVTGNPPIGCSPTLLTLLRRTSRPTSAADDDDYDHIGCLRGVNDVARHHNALLGAAVVGLRARHPRATIVFADFYTPIRRILENPNQFGVVVSDVLKACCGTGGAYNWNGSAVCGMPGVPACANPSAYVSWDGVHFTEAVNRYVAEGWLYGPYAHPPILKAMRRP

SEQ ID NO: 66072 - protein, 302 aa, Zea mays
  Coding DNA Sequence Number=SeqID_24293
  Gene Ontology: Mol. function=protein binding; Cellular component =nucleus; Biological process=tRNA aminoacylation for protein translation
  Homolog annotation: Hit_ID=Q9AWM9; Match level="QueryCoverage=87%, HitCoverage=91%, E-value=1e-130, Identity=83%"; Hit description=Brix domain-containing protein 1 homolog
  Pfam annotation: Domain name=Brix; Domain location=44-227; Score =147.2; E_value=4.3e-41; Accession=PF04427.8; Description=Brix domain
MTFWHNVQCTMLYAENHVAFFYPSYLLKKVLHNLNLVETSKKTLILHGTKTSAVLNSVLSDIYHLKRDNAVKYTKKNDNISLLKVYGSHSKKRPNNLILARTYDHHIYDLVEVGVENYKSMESYVYDKKLAPLLGSKPFFAFIGEHFESSEELKHLKEVLLDLFRGEVVENLNLAGVDRIYVCTAISPTTVYMMHCALRLKRSGTSIPRMELVEVGPSMDLVVRRHRLPAESLKKEAMKTAEHAKKMKNVTKDPVQGKLGKVYMPDQQVGKLTLSNDVKGLKRERREAKKNQDSKKQKVNPE

SEQ ID NO: 66073 - protein, 219 aa, Zea mays
  Coding DNA Sequence Number=SeqID_24294
  Gene Ontology: Mol. function=protein domain specific binding; Cellular component=nucleus; Biological process=positive regulation of septation initiation signaling
  Homolog annotation: Hit_ID=Q6ZKC0; Match level="QueryCoverage=99%, HitCoverage=100%, E-value=3e-97, Identity=75%"; Hit description=14-3- 3-like protein GF14-C
  Pfam annotation: Domain name=14-3-3; Domain location=3-202; Score =346.1; E_value=5.8e-101; Accession=PF00244.10; Description=14-3-3 protein
MSREDNVYMAKLAEQAERYEEMVEYMEKVAKTVDVEELTVEERNLLFVAYKNVIGARRASWRIISSIEHKEESRKNEEHVIQIKEYRGKIEAELSNICDGILKLIDSHLVPSSTAAESKDIALAELASTHPIRLGLALNFSVFYYEIMNSPDKACNLARQAFDEAISQLDTLGEDSYKDSTLIMQLLRDNLTLWSADSTTEDGIEEGNEASKGDAGEGQ

SEQ ID NO: 66074 - protein, 296 aa, Zea mays
  Coding DNA Sequence Number=SeqID_24295
  Gene Ontology: Mol. function=cysteine-type endopeptidase activity; Cellular component=vacuole; Biological process=proteolysis
  Homolog annotation: Hit_ID=Q93XC2; Match level="QueryCoverage=90%, HitCoverage=67%, E-value=1e-100, Identity=63%"; Hit description =Papain-like cysteine peptidase XBCP3
  Pfam annotation: Domain name=Granulin; Domain location=216-264; Score= 23.0; E_value=2.7e-05; Accession=PF00396.9; Description=Granulin
  Pfam annotation: Domain name=Peptidase_C1; Domain location=1-188; Score=231.3; E_value=2.1e-66; Accession=PF00112.13; Description =Papain family cysteine protease
  Pfam module annotation: Pfam domain module=Granulin::Peptidase_C1; Domain location=216-264::1-188
MAVSNVMSSASIVDFVKMVYLSLLEFFRNRSYNSGCGGGLMDYAYKFVIKNGGIDTEEDYPYREADGTCNKNKLKKRVVTIDGYTDVPSNKEDLLLQAVAQQPVSVGICGSARAFQLYYQGIFDGPCPTSLDHAVLIVGYGSEGGKDYWIVKNSWGESWGMKGYMHMHRNTGDSKGVCGINMMASFPTKTSPNPPPSPGPGPTKCSLLTYCPEGSTCCCSWRVLGFCLSWSCCELDNAVCCKDNRYCCPHDYPVCDTGRGQCLKASGNFSAIEGIRRKQSFSKAPSWTGWLELMDQ

SEQ ID NO: 66075 - protein, 222 aa, Zea mays
  Coding DNA Sequence Number=SeqID_24296
  Gene Ontology: Mol. function=zinc ion binding; Biological process =metabolic process
  Homolog annotation: Hit_ID=Q5VMF2; Match level="QueryCoverage=66%, HitCoverage=14%, E-value=3e-66, Identity=81%"; Hit description=PHD zinc finger protein-like
MAPILASRPNPEFLIIATYGKITRFLDIFVNPEGFNKEVKGIHGYINICSSRNKGDENRTVFIPCYYRDSQLWQSFDPIREALTGRDLIPEMVNGRGPKEGMPGQDYSGMYCALLTVGSTVVSAALLRVMGGDVAELPLVATSQDVQGLGYFQALFSCIERVLVSLKIKHFVLPAAHEAEGIWMNKFGFSRISPEELEAYLNGAHLTIFHGTSYMYKAVPVS

SEQ ID NO: 66076 - protein, 520 aa, Zea mays
  Coding DNA Sequence Number=SeqID_24297
  Gene Ontology: Mol. function=RNA-directed DNA polymerase activity; Cellular component=nucleus; Biological process=RNA-dependent DNA replication
  Homolog annotation: Hit_ID=Q8S463; Match level="QueryCoverage=89%, HitCoverage=25%, E-value=0.0, Identity=77%"; Hit description =Putative prpol
  Subcellular localization annotation: CTP_CleavageSite=57; ConfidenceScore=5.69e-01
MTTSSSATSPVPLRHRSSLAGASALRGQISQLGTTWSKLSPATSRARTCALGTPGISEAATSSPGESLRDYIRRFSKQRTELPNVTDSDVICAFLAGTTCRDLVSKLGRKTPTRASELMDIATKFASGQEAVEAIFRKDKQPQGRQPEDVPEASTQRGTKKKGKKKSQAKRDAADADLVAAAKYKNPRKPPGGANLFDKMLKEPCPYHQGPIKHTLEECVMLQRHFHKAGPPAEGARAHNNDKKEDHKAEEFPEVHDCFMIYDGQVANASARHRKQERREVCSVKVAAPVYLDWSDKPITFDQGDHPDRVPSPGKYLLVVDPVIGNVRLTKVLMDEGSSLNIIYAETIGLLRIDLSSVRTGATPFHGIIPGKRVQPLGQLDLPVCFGTPSHFRRETPTFEVVGFRGTYHAVLGRPCYAKFMSVPNYTYLKLKMPSPNGVITVSPTYRHAYECDVECVEYAEALAESEALIANLESLSKEAPDVKRHACNFEPAATVKFVPLDPSNDASKQIRIGSELDPK

SEQ ID NO: 66077 - protein, 672 aa, Zea mays
  Coding DNA Sequence Number=SeqID_24298
MAEAAGSWPCLPSTLPLFLCDVKQHNQNAEGFPSHRSKRMSLEVSMQKSLGFGLKSDNGKHDYVANDTVQSLHKQDSKIVIKKTIKLLDGPPYPKRPKLEPAQTGRDAEAKGHEFISQKNVPDLTPCTTSEKSRLLKQKRISDGKRTDKKNIRSGVRSKHDCFSSKAGLANFDSGFSGNSVLGAHGLKSDIRDITHHIENLSLIELLDGTYKYSSLGRDKGKKVLHTKEELLVSVRKTFSMLSDMDYRHGKDSNLILSPKLSSASTSSCDIKEQCGDKPPLLVKVSKIFSVTTNIMSVPQSLFDLFNTTTQDPSQINLCDSALCHPKDILSRLTLPHRQDLDSLLAPGRESTAAVKPYMPSMTVHGASLPPFPWSHSQAGGCRQGVDCGKHGSSRSNSQWQWVRVGSNLTSLDHEDTSVHRIDDLLQEMDAAKLCILDPCDGQHNLCGTESTSGSLVQNIHSRKIGGEHGSQQLQPQDHLDSLDGFQKHDIDYSLLKTSQVSPKIQCAAEILCDMRRSTESWIGQGYSNGTIKWPKSPPEKAMKARKPSSQFGTTESSSGSRNNEATWNGSSHSTKKIVDRNNDSARLNNPGKGTIRWPVPVEDNASPVRSERGLMVDMRQPHGNGGRHLVQVSSQTRLEKEYENQQKLRKATLTSSLGSAGDWNREKNRRM

SEQ ID NO: 66078 - protein, 153 aa, Zea mays
  Coding DNA Sequence Number=SeqID_24299
  Homolog annotation: Hit_ID=Q84L59; Match level="QueryCoverage=48%, HitCoverage=19%, E-value=1e-07, Identity=37%"; Hit description =Polypyrimidine track-binding protein homologue
MTESVIRAIFAQYGKVEHVHVFGGLDPVLTHVVFETKQEAANAFGELHGRNIYDGCCQLDIQWCSSQDPTNTNLAFSCGDNMVPIAAAKPATSVIGQDIFPNTNNFVEVANISPTRDAIKERKCELALLENEHLCADKRANSFETTIELREPC

SEQ ID NO: 66079 - protein, 110 aa, Zea mays
  Coding DNA Sequence Number=SeqID_24300
MGKNNKRKREPTPPSEDFGDSEYSEEEFSSESEGGRGGSSGSKDGDGGGSRGGSGGGGSSRGSNRAAVAAAATGPVARCHWSFRCNAERLEGNISVLEVTPSDWRATSAF

SEQ ID NO: 66080 - protein, 45 aa, Zea mays
  Coding DNA Sequence Number=SeqID_24301
MATSEWSTAPGGPTAEQPPPCTRGNEACGVLAGSSIVETVGSVRE

SEQ ID NO: 66081 - protein, 51 aa, Zea mays
  Coding DNA Sequence Number=SeqID_24302
MAATASSHVNADVMDNCSPSSLQLILERATMIKECTEESRHDLQTFLGIEK

SEQ ID NO: 66082 - protein, 81 aa, Zea mays
  Coding DNA Sequence Number=SeqID_24303
MARPTPGLGAATGAASGGRQAGLPRARTRPEAYGSILIISLLRAKAGSIRMSHWQRLPSESLADSTASIGLGLYPWDGRFT

SEQ ID NO: 66083 - protein, 95 aa, Zea mays
  Coding DNA Sequence Number=SeqID_24304
MAGVLGRRNFIPQIQGVTFLQVRLDVLQHEYSKVDPSHAFAMSVVRSFVREHKYWRFWNCPLCDRKKFVDTGLLLSHMCTRQTKTVLPWIEIQEA

SEQ ID NO: 66084 - protein, 159 aa, Zea mays
  Coding DNA Sequence Number=SeqID_24305
MEPKGWARLREAVSGDLDRAIEIGWLRSTQGGLWLRAASLLLIGGEVTGAGAGVDYRGFEVIGVGQDQREGPANSLVGFRPLYRNQRRENSGGKAPSGSGREKAGAGGAQKGAGARGQATWSGFSGEWLLALTRRAREAEKECGHAGEGDRRRQTGPTG

SEQ ID NO: 66085 - protein, 38 aa, Zea mays
  Coding DNA Sequence Number=SeqID_24306
MAVLEKPCGSWWMAHRDRFEDEQMKPSMEDSGWRRQGS

SEQ ID NO: 66086 - protein, 99 aa, Zea mays
  Coding DNA Sequence Number=SeqID_24307
MALNYECTFVSKEGKKYERDAKTNAKSCVQRCVRMERREVEEMETEIRQRQVQGAVAAIGAKQRRSEGGDREVALATAHWPAMEADIAMLQDFSLRMHV

SEQ ID NO: 66087 - protein, 81 aa, Zea mays
  Coding DNA Sequence Number=SeqID_24308
MGFVLVVSLPFIFLSILLGFGCYFLGKHMGREEMRTVEWLMSEVGEKRLKERSIGRKPGFSQNAAKLQNQVRPYLVIREGF

SEQ ID NO: 66088 - protein, 128 aa, Zea mays
  Coding DNA Sequence Number=SeqID_24309
  Subcellular localization annotation: CTP_CleavageSite=46; ConfidenceScore=5.08e-01
MGFVLVVSLPFIFLSILLGFGFYFLGKHWGREESGPASARRSTACRCRRPASSEPPCRRLSHSTARNKGPRLCLKLGKCLKERSIGRKPRYQNAAKFQNQKNNSAQNEQGGEEAKKARQATRADRFPT

SEQ ID NO: 66089 - protein, 150 aa, Zea mays
  Coding DNA Sequence Number=SeqID_24310
MAMKWNWMRQRYLVMEAERMIKVAVLGLSLSSNADVVTGVPSHVSVVAELENGNSKANIHGKNTVINVTMLSGSAEGDETVVTFNLPDQTGLSCDLCRTILEFGLCCITRGREAAWTLPSRFFSTEAMGCGEKRGKVERLTGFIVPTTAV

SEQ ID NO: 66090 - protein, 318 aa, Zea mays
  Coding DNA Sequence Number=SeqID_24311
  Gene Ontology: Mol. function=sugar binding; Cellular component =cellular_component; Biological process=defense response
  Homolog annotation: Hit_ID=Q2R3E5; Match level="QueryCoverage=89%, HitCoverage=33%, E-value=2e-55, Identity=39%"; Hit description =Jacalin-like lectin domain containing protein, expressed
  Pfam annotation: Domain name=Jacalin; Domain location=16-147; Score =106.1; E_value=1e-28; Accession=PF01419.7; Description=Jacalin-like lectin domain
  Pfam annotation: Domain name=Jacalin; Domain location=175-311; Score =54.5; E_value=3.4e-13; Accession=PF01419.7; Description=Jacalin-like lectin domain
  Pfam module annotation: Pfam domain module=Jacalin::Jacalin; Domain location=16-147::175-311
PNGDFAKFGPWGGDGGQPQDIGTLPCRLDRIKISSGLIIDSIEFSYAGPDSQYRTAGPWGGHGGDNSSFQLAGSEFLTGVSGSIGTFNGHANVITSLTFVTNARSYGPFGRGRGTSFHIPVQGNGCIVGFFGRSGRYLNAIGVYTAPKPEPKAVGKQDGGDEAVVARIGPWGGVGNALHDIAERPHRLHRVTIFSGTIVNSLEYLYSDGDGQQHTTGPWGGCGGTGRKIHLAPEEFIVEVTGTFHPCAWDRTIPSVVSSLTLVTSTGKTHGPFGTQLGAAFQVPVQSDSRIVGFFAHGDNYIEAIGAYVKKLTESSNR

SEQ ID NO: 66091 - protein, 91 aa, Zea mays
  Coding DNA Sequence Number=SeqID_24312
MTRAGSALDRAGGASAEGVRAGPSVGIDGELTSGVEASCVGALGVDAGARGGMVGSGTGVDTSAGVGGGVASWGDTLGAGVGVAAGAYESS

SEQ ID NO: 66092 - protein, 132 aa, Zea mays
  Coding DNA Sequence Number=SeqID_24313
MTRAGFALDRAGGASAEGVRAGPSVGIDGELTSGVEASCVGALGVDAGARGGMVGSGTGVDTSAGVGGGVASWGDTLGAGVGVAAGAYPACAAKSMAMAIGDFCCTEHHGRRALCAREADGHGTESSICPTV

SEQ ID NO: 66093 - protein, 125 aa, Zea mays
  Coding DNA Sequence Number=SeqID_24314
MYGGQQLGPGSSLPAFQLRYLETATVPLDARGQLPAAAGAVVTRTYADDAARGYYAIQVKLSLALGGGLHWCHSSCTLYFFAPLPSSSPRRGAPNIFDGDDCWTTCKKSVLHDEKPDKAMQIKEQ

SEQ ID NO: 66094 - protein, 363 aa, Zea mays
  Coding DNA Sequence Number=SeqID_24315
MGEQGAGGSDVAGELAVVGASTAGDRGREARATQIECVTIHMRGTQFKGVTLAGVIGNYLHKGGSSHGQVATTFQDDRRGSIKGDSAERPAPSDAKITRWLTKDMEIRKGADGTIVPYVFPIPGCLQLRPEPGFVEFASSPDSTLFLFFFSRRFCNLRSPPSLLPPTLFSGATERPRSPTEKRDRDGGSSHAGEAATEGDRGAETDSTNKDEDDDEDASAGSDLWAILDASLTVSIADSIFKFPSGATSAFSIMEEEDIPELPARFFGSMASVALIPSPVEPPTDWPLGVACIGSSSALGPSVVPTDAPLGPSVPASKAGARTAASPGCHGGEVPFGGQSGSPQHVAVTPRFKGKPGYVSNVC

SEQ ID NO: 66095 - protein, 109 aa, Zea mays
  Coding DNA Sequence Number=SeqID_24316
MGIDSHLSTCVDTQSPKYLEMAQGHISLSGRAGAGQNPGRSGHGRLDVGRGDEGEAVEPLRHGEGLEAVASMVDEGGRLEVRAPTTRNKGEVSAMARGGRRCPCCWRGG

SEQ ID NO: 66096 - protein, 87 aa, Zea mays
  Coding DNA Sequence Number=SeqID_24317
MGALNAPDLNVSNPHKRLHKNDAPIFMSGGLRMGDSAYHDFPVINLLRHKTVREEWSGINFVEHHFFRDFVRRGSRARRTLPAQMRA

SEQ ID NO: 66097 - protein, 216 aa, Zea mays
  Coding DNA Sequence Number=SeqID_24318
MKITRWLTMDMEIRKGADGTIVPYVFPISGCLQLCPEPGFVEFASSPDSTLSLFFFLVGFATSDPLPPSFLQLSSLVPRNDPAPLPKSMTKKEVARMRREQQRRAKKDRVEKKRRRAKFQIRRDHGAETDSTNKDEDDDEDASAGSDLWAILDAALAVSIADSTFNFPSRAASAFPIMEEDDFPEFTAQFFGSMASVALIPSPIEPRPPGRSGLLA

SEQ ID NO: 66098 - protein, 547 aa, Zea mays
  Coding DNA Sequence Number=SeqID_24319
  Gene Ontology: Mol. function=galactosyltransferase activity; Cellular component=Golgi stack; Biological process=metabolic process
  Homolog annotation: Hit_ID=Q2R1F4; Match level="QueryCoverage=98%, HitCoverage=82%, E-value=0.0, Identity=57%"; Hit description =Pentatricopeptide, putative, expressed
  Pfam annotation: Domain name=PPR; Domain location=123-157; Score =41.2; E_value=3.6e-09; Accession=PF01535.11; Description=PPR repeat
  Pfam annotation: Domain name=PPR; Domain location=158-192; Score =25.0; E_value=0.00028; Accession=PF01535.11; Description=PPR repeat
  Pfam annotation: Domain name=PPR; Domain location=194-228; Score =45.5; E_value=1.8e-10; Accession=PF01535.11; Description=PPR repeat
  Pfam annotation: Domain name=PPR; Domain location=229-263; Score =45.3; E_value=2e-10; Accession=PF01535.11; Description=PPR repeat
  Pfam annotation: Domain name=PPR; Domain location=264-298; Score =35.8; E_value=1.5e-07; Accession=PF01535.11; Description=PPR repeat
  Pfam annotation: Domain name=PPR; Domain location=299-333; Score =39.9; E_value=8.8e-09; Accession=PF01535.11; Description=PPR repeat
  Pfam annotation: Domain name=PPR; Domain location=334-368; Score =28.7; E_value=2e-05; Accession=PF01535.11; Description=PPR repeat
  Pfam annotation: Domain name=PPR; Domain location=369-403; Score =50.8; E_value=4.6e-12; Accession=PF01535.11; Description=PPR repeat
  Pfam annotation: Domain name=PPR; Domain location=404-438; Score =37.0; E_value=6.7e-08; Accession=PF01535.11; Description=PPR repeat
  Pfam annotation: Domain name=PPR; Domain location=53-87; Score=25.8; E_value=0.00015; Accession=PF01535.11; Description=PPR repeat
  Pfam annotation: Domain name=PPR; Domain location=88-122; Score=31.0; E_value=4.3e-06; Accession=PF01535.11; Description=PPR repeat
  Pfam module annotation: Pfam domain module=PPR::PPR::PPR::PPR::PPR::PP R::PPR::PPR::PPR::PPR::PPR; Domain location=123-157::158-192::194 -228::229-263::264-298::299-333::334-368::369-403::404-438::53-87
MLLELRSHGLPLVVETANWVLRVGLRHPGCFAHAREAFDGMARAAGGVRPDHRSFRALVLGCCREGRFEEADALLAAMWAQGFCLDSATCTVVVRAFCRQGRFRNVTDLFRRMSEMGTPPNMVNYSAWIDGLCERGYVKQAFHVLEEMVGKGLKPNVYTHTSLIDGLCKIGWMERAFRLFLKLVKSSSYKPNVHTYTVMIGGYCKEGKLARAEMLLGRMVEQGLAPNTNTYTTLIHGHCKGGSFDRAFELMNKMKLEGFLPNIYTYNAIIGGFCKKGKIQEAYKVLRMATSQGLHLDKVTYTILITEHCKQGHITCALDLFKQMAEKSCHPDIHTYTTIIAMYCQQRQMEQSQQLFDKCLSIGLVPTKQTYTSMIAGYCRLGKLTSALKVFERMVQHGCLPDSITYGALISSLCKESRLEEARALFETMLDKHLVPCDVTRVTLAYEYCRRDKITIAVSFLDRLDKRQQAHTADALVRKLSTVGNLDAASLFLKNVLDKHYAVDHATYTSFINSCYESNRYALASEISEKISKRISGFKKKDTAVIA

SEQ ID NO: 66099 - protein, 94 aa, Zea mays
  Coding DNA Sequence Number=SeqID_24320
MLIYFAMTTDIPPWVFKAIDKIRQRFLWRRRKDAKGGHCLVAWGKIRDCLSQVELQQGVADSHIQFSRNGRYSAKMAYAGFFVGSVPFEPYEKI

SEQ ID NO: 66100 - protein, 460 aa, Zea mays
  Coding DNA Sequence Number=SeqID_24321
MTENMSHIILGKKPLSYVAQSQIYAPRNSDAANPVIINRELKIGELDNSTRGWRSQPTISGICFYPYAPLKQPEQAFTLGNRMISHGLGWENYDIEYIPIPSGYAEWGTIILAKHSFNLRGDGEVDGEFYEEYVPSHHEHEPSMLLYPKCLSQLLEVWDELQVGGEVSLQECLLVVTTAQLHLFPYPTITGNEDFVPSSSDVAQVGDGDDDVTNFCLTRREPPTCDFAQVGDGDDDVTNFCLIRREPPTSPFIDSCVDTTELAEDYSSFPCALPSAVNFSDIDSFLDGCDQLFENQPLDIISPVEKHPSMDTVATLEDLFLKTTRQALANVLDGLNAHTLRDPIRCASLCLASSCLTGQFASIARIKAMLDKLITISKQLQRTYSKFEVARKQDEQSTAEIKQALDVQREALRTVDEELASAEKQRAETMTTIEKLNQILMEVEQKRARLEEMRSTSDLE

SEQ ID NO: 66101 - protein, 140 aa, Zea mays
  Coding DNA Sequence Number=SeqID_24322
MTRRRSQNYSTLVLGYYFPTEKNSTTNRQAIPRRDDEACERRQGEDAAGLDGHRALCSGARRGERELNANNAGVQQPKATTQGRRETSRCCHVLEAWRGPWLRWLEKHRRIEHFQRLIRILDRTNKNNMQIRRGDVRELA

SEQ ID NO: 66102 - protein, 152 aa, Zea mays
  Coding DNA Sequence Number=SeqID_24323
MTRNVANAPGLALLQERSQNYSTLVLGYYFPTEKNSTTNRQAIPRRDDEACERRQGEDAAGLDGHRALCSGARRGERELNANNAGVQQPKATTQGRRETSRCCHVLEAWRGPWLRWLEKHRRIEHFQRLIRILDRTNKNNMQIRRGDVRELA

SEQ ID NO: 66103 - protein, 140 aa, Zea mays; identical to SEQ ID NO: 66101
  Coding DNA Sequence Number=SeqID_24324

SEQ ID NO: 66104 - protein, 182 aa, Zea mays
  Coding DNA Sequence Number=SeqID_24325
MAALCKAARSDIEGHITYPPGVSTLLDFGGLYVEKWVRVFYARVWIDPDHQWMRSTSLPSWQSCSSYCSRLGYFPTPFTDGSRRSPADFTIATKFLHALMRQTLLPRMRDREATTHIQLWLLGALVSHSVFDVVDFLICEIEDTVLDGHRAPRQLPYAHYLCHIFAQLIKPPHSRQFLVTHT

SEQ ID NO: 66105 - protein, 131 aa, Zea mays
  Coding DNA Sequence Number=SeqID_24326
MRKTLAKTMMSFKSSDDPPVVVEEDPEELYHPVGGNVIVEDYSEEFLATPTPLPALHAFVAGASSLAPHVPIAQAPALVGDDHDDSGDDEGNDDEEDNQDNNNNEPDQDGGYDGMWSIAEHYTLMFKTGYK

SEQ ID NO: 66106 - protein, 207 aa, Zea mays
  Coding DNA Sequence Number=SeqID_24327
  Subcellular localization annotation: CTP_CleavageSite=34; ConfidenceScore=5.05e-01
MDELFSKLKCTKIDNQTQAKTENPSAPTIAMVSRCGSSSNPSFSMFALYSLLTIIENDLDHFITNCPKKGKLEASHRDHHSGRCKGKHEYTYDKHKSKGRFDKEALMKKYLQKAKAKDHTFLASLSNLDHDFNDSSSSSSGVKLERWVEDKLNGLCFLNNTTRGLCTSALGDDTVSCGDKDIGDNSPFEVSLSTDDLTADVGELSLG

SEQ ID NO: 66107 - protein, 137 aa, Zea mays
  Coding DNA Sequence Number=SeqID_24328
MGQSKVVKKRLASKVAARDPVPLVDWDELHDDDDDDDRSKAHNDPVRLASREHRFKLQSHQRTLRALEVPHCEEQADDEGDLNTGDTMLLVAEPVTEPEVGPTSISRAKGSKLMTKIVAKLQTDSTLALGSEGAKAS

SEQ ID NO: 66108 - protein, 250 aa, Zea mays
  Coding DNA Sequence Number=SeqID_24329
  Gene Ontology: Mol. function=transferase activity, transferring hexosyl groups; Biological process=metabolic process
  Homolog annotation: Hit_ID=Q6EP59; Match level="QueryCoverage=50%, HitCoverage=25%, E-value=1e-46, Identity=69%"; Hit description =Putative UDP-glycosyltransferase 85A8
MEVDVSMPAEAEAMVNQSKEKSLENIRIVCEYPDIFPEELPRGGGAGATADRPRFTIPFSDLKVTFSGVETIRGHLASWCPQEVVLRHEAVGVFLTHCGWNSTMESLCVGVPMLCWPFFVEQQTNCRYTCMKWGVAMEIGQDVRQEAVEEKIREAMGGEKGMEMQRRAGEWQQTGLRATRPGGRSYANLDKLVADVLLSGGGKSSQEGKPINHGACDGMEGPKEPVAEEVTSRSRQKLEYENLEAKRVNP

SEQ ID NO: 66109 - protein, 149 aa, Zea mays
  Coding DNA Sequence Number=SeqID_24330
MTRSFLPSGSGGSPCGATPPSSEECTTCASISSPAPRGDDPNDSGDDEDNNEEEDDENNDNIEDANNEHEDNFVGLRPIAELYTSMFKTGHFPNLLQDALHVLGTYIRPLYDTQQEIEGFRTPSSHESLTPLSTYATSVKLEKITSTPL

SEQ ID NO: 66110 - protein, 585 aa, Zea mays
  Coding DNA Sequence Number=SeqID_24331
  Gene Ontology: Mol. function=protein serine/threonine kinase activity; Cellular component=flagellin-based flagellum; Biological process=protein amino acid phosphorylation
  Homolog annotation: Hit_ID=Q8LPZ7; Match level="QueryCoverage=81%, HitCoverage=86%, E-value=1e-169, Identity=61%"; Hit description =Putative calcium dependent protein kinase
  Pfam annotation: Domain name=Kdo; Domain location=109-289; Score= -73.5; E_value=0.0089; Accession=PF06293.4; Description =Lipopolysaccharide kinase (Kdo)
  Pfam annotation: Domain name=Pkinase; Domain location=112-370; Score =353.2; E_value=4.3e-103; Accession=PF00069.15; Description=Protein kinase domain
  Pfam annotation: Domain name=Pkinase_Tyr; Domain location=112-368; Score=-20.3; E_value=3.2e-11; Accession=PF07714.7; Description =Protein tyrosine kinase
  Pfam annotation: Domain name=efhand; Domain location=417-445; Score =37.0; E_value=6.6e-08; Accession=PF00036.22; Description=EF hand
  Pfam annotation: Domain name=efhand; Domain location=453-481; Score =25.5; E_value=0.00019; Accession=PF00036.22; Description=EF hand
  Pfam annotation: Domain name=efhand; Domain location=489-517; Score =26.8; E_value=7.8e-05; Accession=PF00036.22; Description=EF hand
  Pfam annotation: Domain name=efhand; Domain location=525-553; Score =39.8; E_value=9.2e-09; Accession=PF00036.22; Description=EF hand
  Pfam module annotation: Pfam domain module=Kdo::Pkinase::Pkinase _Tyr::efhand::efhand::efhand::efhand; Domain location=109-289::112 -370::112-368::417-445::453-481::489-517::525-553
  Subcellular localization annotation: CTP_CleavageSite=21; ConfidenceScore=5.35e-01
MGNVCFCGTTSTSPDQPEPATAGKAPPQGATNRRPATPPSSQQGSSQEPSPAPGANKPGPKARPKATTKANPYDWAPPAAAHASRASASVSASRVLDGVVPHHPRLRVTDKYHLGRELGRGEFGVTRLATDRATRERLACKSIPKRRLRTAVDVADVRREVAIMASLPDHPALVRLRAAYEDADAVHLVMELCDGGELFDRIVARGRYTERAAAAAARTVAEVVRACHAHGVMHRDLKPENFLYAGKSDDAQLKAIDFGLSVFFRPGERFTEIVGSPYYMAPEVLRRSYGPEVDIWSAGVILYILLCGVPPFWAETEQGVARAILRGNLDLQREPWPRISEGAKSLVRQMLQMDPKKRPTAQQVLEHPWLQNARKAPNVPLGDVVRARLQQFSAMNKFKKKAMRVIAEHLSVEEVEVIRDMFALMDTDKDGRVTLEELKAGLRKVGSKLAEPEMELLMEAADVNGNGYLDYGEFVAITIHLQRLSNDAHLRKAFLFFDKDSSGYIERAELADALADEAGHADEAALDNVLREVDTDKDGRISFEEFVAMMKAGTDWRKASRQYSRERFKTLSNSLLKDGSLRMAR

SEQ ID NO: 66111 - protein, 167 aa, Zea mays
  Coding DNA Sequence Number=SeqID_24332
  Gene Ontology: Mol. function=peptidyl-prolyl cis-trans isomerase activity; Cellular component=cell; Biological process=protein folding
  Homolog annotation: Hit_ID=Q40672; Match level="QueryCoverage=57%, HitCoverage=53%, E-value=4e-41, Identity=81%"; Hit description =Cyclophilin 1
  Pfam annotation: Domain name=Pro_isomerase; Domain location=17-153; Score=172.1; E_value=1.4e-48; Accession=PF00160.11; Description =Cyclophilin type peptidyl-prolyl cis-tr
  Subcellular localization annotation: CTP_CleavageSite=35; ConfidenceScore=5.02e-01
MGWRPIISGSGNLGGAQAAVPPSRLRGVLPHAGTNASSGGGDLALSIHRVIPGFMCQGGDFTRGNDTGGESIYGAKFADENFKPRHTEPSVLSMANAGPDTNGSQFFICIVQTPWLDGKHVVFGKVVDGYTVVDKMEVVSSSQVIMDGWGGDLIKTSVFVTLGKSAA

SEQ ID NO: 66112 - protein, 153 aa, Zea mays
  Coding DNA Sequence Number=SeqID_24333
  Gene Ontology: Mol. function=protein serine/threonine kinase activity; Cellular component=cytoplasm; Biological process=protein amino acid phosphorylation
  Homolog annotation: Hit_ID=O24180; Match level="QueryCoverage=90%, HitCoverage=31%, E-value=7e-52, Identity=71%"; Hit description =Protein kinase
  Pfam annotation: Domain name=Pkinase; Domain location=2-152; Score =31.7; E_value=1.9e-10; Accession=PF00069.15; Description=Protein kinase domain
  Pfam annotation: Domain name=Pkinase_Tyr; Domain location=1-152; Score=-82.6; E_value=2.1e-07; Accession=PF07714.7; Description =Protein tyrosine kinase
  Pfam module annotation: Pfam domain module=Pkinase::Pkinase_Tyr; Domain location=2-152::1-152
MGKLLGTGAFGKVHYARDLESNQGVAIKIMDKDRVLKAGLSEQVKREITTMRLVEHKNIVRLHEVMATRNKIYIIMEYAKGGELMDKIKRSGRLTEADAHRYFEQLIDALDHCHSRGVYHRDLKPENLLLDENGDLKVSARDPTCELLQQQFA

SEQ ID NO: 66113 - protein, 569 aa, Zea mays
  Coding DNA Sequence Number=SeqID_24334
  Gene Ontology: Mol. function=RNA-directed DNA polymerase activity; Cellular component=mitochondrion; Biological process=RNA-dependent DNA replication
  Homolog annotation: Hit_ID=UPI00004C1733; Match level="QueryCoverage =99%, HitCoverage=39%, E-value=0.0, Identity=79%"; Hit description =UPI00004C1733 related cluster
  Pfam annotation: Domain name=RnaseH; Domain location=200-327; Score =7.2; E_value=1.2e-05; Accession=PF00075.14; Description=RNase H
  Pfam annotation: Domain name=rve; Domain location=456-569; Score =33.3; E_value=8.5e-07; Accession=PF00665.16; Description=Integrase core domain
  Pfam module annotation: Pfam domain module=RnaseH::rve; Domain location=200-327::456-569
MGCLAALSRFISRLGERGLPLYRLLRKTECFASTPEAEEALGNLKALLTKAPILVPPADGEALLVYVAATTQVVSAAIVVERQEEGHALPVQRPVYFVSEVLSETKIRYPQVQKLLYAVILTRRKLRRYFESHPVTVVSSFPLGEIIQCREASGRIAKWAVEIMGETISFAPRKAIKSQVLADFVAEWVDTQLPTALIQPELWTMFFDGSLMKTGADAGLLFISPLGKHIRYVLRLHFPASNNVAEYEALVNGLRIAIELGVRRLDARGDSQLVIDQVMKNSHCRDPKMEAYCDEVRRLEDKFYGLELNHIARCYNETADELAKIASGRTTVPPDVFSRDLHQPSVKIDNSPEPEAPSVQPEVPSAHPEAPSARPEAPSVQPEVPSASEGEALHVEEERSGATPDRNWQTPYLQYLRQGELPLDRAEARRVVRRAKSFVLLGDEKELYHRSPSGILQRCISITEGLDLVGPLQKAPGGYTHLLVAIDKFSKWVEVRPLNSIRSEQAVAFFTNIIHRFRVPNSIITDNGTQFTGRKFLDFCEDHHIRVDWAAVAHPVSNGQVERANGMIL

SEQ ID NO: 66114 - protein, 512 aa, Zea mays
  Coding DNA Sequence Number=SeqID_24335
  Gene Ontology: Mol. function=protein binding
  Homolog annotation: Hit_ID=Q2QMP5; Match level="QueryCoverage=95%, HitCoverage=92%, E-value=1e-114, Identity=59%"; Hit description =Expressed protein
  Pfam annotation: Domain name=BTB; Domain location=119-231; Score= -3.7; E_value=0.0088; Accession=PF00651.21; Description=BTBPOZ domain
MDGSRQQRQRRGSPAPGRPRTVPIAVTPEGFWCCPSPAALHKSLLKNPHHHHHHNAKQAPTPKTPSAPPSRAPSVQTATSVTDDVDDPAPAVADHHHSQAAAEAPAPATPPQHKVCVGFGRPETSDLTVVLYGKEGVAVSMSVHRDVLAQSSAFFARRLAADGQPCVEIHDCEDAEIYVETVGLMYCDDGANKHRLLKQSVPRVLRVMKAADALGFPACVRSCLDYLEAVPWAGEEEERRVVSSVRRLQCTDGAGVSPLLRRVASSDSGCLRPPADTFAHITEMVLASTDERGRRETKALVLSLLKDSTRGHVGGGADGSPPTPGISSSETLYGSCRGCLDRLRRLLAEASSEPAYSAAVARRIALEADNLVWLVEMLVASQRACDGFVALWSGQAELAASHAGAPAASRHAVSRVTARLFVGVGRGEMLPPRDARLRLLQVWLQPLIDDYAWLQRAGGSRPAAFDRRLVEDGIGQTILTLPLEDQRSLLLAWFGRFLKLGDDCPNLQRAFE

SEQ ID NO: 66115 - protein, 62 aa, Zea mays
  Coding DNA Sequence Number=SeqID_24336
MADNGEIDPTASSFGDSDDLPTSFVNPSSAAILFVNGLGVTHVQIHLYRSDCAAASFFSWNL

SEQ ID NO: 66116 - protein, 70 aa, Zea mays
  Coding DNA Sequence Number=SeqID_24337
  Homolog annotation: Hit_ID=Q6QP51; Match level="QueryCoverage=98%, HitCoverage=56%, E-value=1e-20, Identity=50%"; Hit description =Putative growth-regulating factor 1
MARSVRAQGRARRRLLLRSRSGSGEDAIPPEAEPCPGDWHSSRSGVSGAVFLSGRSAKGRSDCGHFDLAD

SEQ ID NO: 66117 - protein, 34 aa, Zea mays
  Coding DNA Sequence Number=SeqID_24338
MELVHSKSPGWISVTIISSVLILCITANKEKMNS

SEQ ID NO: 66118 - protein, 50 aa, Zea mays
  Coding DNA Sequence Number=SeqID_24339
MKLPEPGIELYLVGDTRSTSSDFTRPPAYVDRAPRFIQPNVVKPILLGSY

SEQ ID NO: 66119 - protein, 365 aa, Zea mays
  Coding DNA Sequence Number=SeqID_24340
  Gene Ontology: Mol. function=transcription factor activity; Cellular component=nucleus; Biological process=regulation of transcription, DNA-dependent
  Homolog annotation: Hit_ID=Q2EPY6; Match level="QueryCoverage=54%, HitCoverage=42%, E-value=2e-51, Identity=54%"; Hit description =AP2/EREBP transcription factor
  Pfam annotation: Domain name=AP2; Domain location=190-249; Score =100.0; E_value=7.1e-27; Accession=PF00847.10; Description=AP2 domain
  Pfam annotation: Domain name=AP2; Domain location=59-131; Score=88.1; E_value=2.7e-23; Accession=PF00847.10; Description=AP2 domain
  Pfam module annotation: Pfam domain module=AP2::AP2; Domain location =190-249::59-131
  Subcellular localization annotation: CTP_CleavageSite=53; ConfidenceScore=5.88e-01
MTKPHSPSSWAASSLSCVFSSSGSCYVPPSWSPKRSSKKKRSSRRRAKNGAAVATRRTSSIYKGVTRHRATGKYEAHLWDKNARNRTGTKKGRQGAFDNEEAAARAYDLAALKYCGWGSHSTLNFPLESYRHEHENMQRMTREAYLAALRRRSSCFSRGASGYRGVANFLQPPLLPVKPCSSKSDERVLVRRHHHNGRWEARIGYPCGKKYVYLGTFGTQEEAARAYDLAALELRGHAAVTNFDISSYTADKDYQQRRHEPAVRTAQPKPKPKVELVDEAPLPQARRPAPTFLTPKPEPEYELGEPLALPPGPVLRDANDADHAISEILPAALHGPRRLRGPVSDTHVVSLCMRVYVRRACSKGD

SEQ ID NO: 66120 - protein, 61 aa, Zea mays
  Coding DNA Sequence Number=SeqID_24341
  Subcellular localization annotation: CTP_CleavageSite=54; ConfidenceScore=5.68e-01
MPFGQNQCKNTSFHYGLSGGRAKTVRALARTVRPQARTVRSGRTVRTRRADRPRSAERPND

SEQ ID NO: 66121 - protein, 160 aa, Zea mays
  Coding DNA Sequence Number=SeqID_24342
  Gene Ontology: Mol. function=carbohydrate binding
MWGHQIVRWCTGQVLFTVRHNVPAGTHLIEVSSIGYFFSPVRVDISVRNLGYIQAALTETRRVLNELVLEPLKEEQYYEVRELFSVMSLLKSPMGLTVGFMVCLCDAQDDGEHSSLLPVTYILQRFILKFQYNPEEMKQAQEQMRNNPVSLSGLLARVQG

SEQ ID NO: 66122 - protein, 386 aa, Zea mays
  Coding DNA Sequence Number=SeqID_24343
  Gene Ontology: Mol. function=DNA binding; Cellular component =intracellular; Biological process=DNA integration
  Homolog annotation: Hit_ID=Q8S474; Match level="QueryCoverage=98%, HitCoverage=47%, E-value=1e-172, Identity=79%"; Hit description =Putative pol protein
  Pfam annotation: Domain name=RVT_2; Domain location=319-386; Score= -140.6; E_value=8.2e-06; Accession=PF07727.4; Description=Reverse transcriptase (RNA-dependent
  Pfam annotation: Domain name=rve; Domain location=1-87; Score=-1.1; E_ value=0.0073; Accession=PF00665.16; Description=Integrase core domain
  Pfam module annotation: Pfam domain module=RVT_2::rve; Domain location=319-386::1-87
MEFKNSQIEGFLEKEGIKHEFSSPYTPQQNSVVERKNRTLLDMARTMLDEYDTPDRFWAEAINTACYSINRLYLHRILKKTSYELLTGKKPNVSYFRVFGSKCFILVKRGRKSKFAPKAVEGFLLGYDSNTRAYRVFNKSTRLVEVSCDIVFDETNGSQVEQVDLDELDDEEAPCVALRNMSIGDVCPKEFEEPPQAQDQPSSSNQASPPTQDDDQAQDNEEEDQEDEPPQEENNDQGGDDNDQDKEDDQEVQGQRPPHPRVHQAIQRDHPVNSILGDIHKGVTTRSRVAHFCEHYSFVSSIEPYRVEDALRDSDWVLAMQEELNNFTRNEVWYLVPRPNQNVVGTKWVFRNKQDEHAVVTRNKARLVAKGYSQVEGLDFGETEST

SEQ ID NO: 66123 - protein, 61 aa, Zea mays
  Coding DNA Sequence Number=SeqID_24344
  Subcellular localization annotation: CTP_CleavageSite=54; ConfidenceScore=5.68e-01
MPFGQNQCKNTSFHYGLSGGRAKTVRALARTVRPQARTVRSGRTVRTRRADRPRSAERPNG

SEQ ID NO: 66124 - protein, 71 aa, Zea mays
  Coding DNA Sequence Number=SeqID_24345
MREIETGDKSASSGRTHSGESAHKHKEDTLPPSSPTEGDRDMMVSLVYYETDSSSSSTSGSQSGIRHLKMS

SEQ ID NO: 66125 - protein, 67 aa, Zea mays
  Coding DNA Sequence Number=SeqID_24346
MKNYTIYVVSITIRIVIIAILNDAAHAVLFEERRARAGETPSSLEEPAEALESSFGEDHSSFDLPAN

SEQ ID NO: 66126 - protein, 50 aa, Zea mays
  Coding DNA Sequence Number=SeqID_24347
MGSPTLGDSSSVWCSAWIRTLSWTLAHGDIWGLCADPRVPAAYRFDIRAI

SEQ ID NO: 66127 - protein, 208 aa, Zea mays
  Coding DNA Sequence Number=SeqID_24348
  Subcellular localization annotation: CTP_CleavageSite=94; ConfidenceScore=5.62e-01
MTYRVRRLASRPRSSAPSTPSATTATLAATAPAPVTPEASTTSAIPTTSTTPASTVPPPAPISAPPIPPPRFRERDETEVQPLATDPRLLDLQRATAARSHRLDSTLCAMVHKILLVAPHGGVALATAHVAALFRPPFTDRSRRSPADFTPAEKYLYQLIRSPQFHGTLEASCLQFGLYRPAPEDLIPVLDPVPDIQAEDEAFRQFET

SEQ ID NO: 66128 - protein, 132 aa, Zea mays
  Coding DNA Sequence Number=SeqID_24349
MSPWASVHDSLRIQAEHHTDEESPSVRNPISPPVVFLAWTRRWWLEHPHSSEASTPARAGQGRAKAEAAGGEAPNFSVPLRIGGRRGGGRSATAFMHHSEVRLRAMLPEFSGETYRPIRTIIGTEVGGIWRG

SEQ ID NO: 66129 - protein, 134 aa, Zea mays
  Coding DNA Sequence Number=SeqID_24350
MTLGEGADLGRSRAGRWEGRGRRPRGEQGKLGVEWRNRAENGVGALAPVIYRRRPRAALVPRPAAAGWLVPGIGQEPGVQLLAEEGGGHPLAEGAASCEWPRLQTASTTVAKWFVLVARGTVDNVYRFGPLRDA

SEQ ID NO: 66130 - protein, 238 aa, Zea mays
  Coding DNA Sequence Number=SeqID_24351
  Gene Ontology: Mol. function=RNA-directed DNA polymerase activity; Biological process=RNA-dependent DNA replication
  Homolog annotation: Hit_ID=UPI00004C1731; Match level="QueryCoverage =72%, HitCoverage=98%, E-value=3e-35, Identity=65%"; Hit description =UPI00004C1731 related cluster
  Subcellular localization annotation: CTP_CleavageSite=62; ConfidenceScore=5.56e-01
MPYASPTFILSAVNRKKASSALGNSPRKGKKVRKNTNQRFEGPALDRARKNHLRTPSAALLLCTMPEPSTTEGRCIHGKLRGLLECTAIQQPKSSASRLREPTSSHQVGPSRFEREASVHPTPTRERAPTNLRTTPSRATRFTTFFLVYGAEAVLPTNLEYGSPRLQAYNECNNQVSRDDLLDQLEEARDVAFLHSAKYQQSHQRYHERRVRPREFQEGDLVLWLRQDNREDDDGLRR

SEQ ID NO: 66131 - protein, 206 aa, Zea mays
  Coding DNA Sequence Number=SeqID_24352
MATYGGTDARAAARIQHPRPQSSCGGGARWVSAPSRAKVRRADVGLGEGGTHGLDTAGAMAEPTVELAGANPREKDAGESRLEADAESAGRAPWAVEGARASVGERRRGCMLVEEVAGAGRRMAFKELGAMERGKRSLLLAPMGGGVVHPWRPSTKEGGARKLGVEWRNGAENGDGALAPFINRRRPHATLAPWPAAVGWLVPGSG

SEQ ID NO: 66132 - protein, 115 aa, Zea mays
  Coding DNA Sequence Number=SeqID_24353
FAECFRYSVEQMIPVVRASRVPGGGGCDGDTNMYIGIPYDGWAKGDPFVANHLLLLLFVTSFGELSQHVLLLAPYEVIKVMLVISRECLHGRLDDAGGGDVGVIFGTGHLGADFW

SEQ ID NO: 66133 - protein, 230 aa, Zea mays
  Coding DNA Sequence Number=SeqID_24354
MADDTVVEVKGGGSRKLVHGKVEKKADTTDLHVREHDQNRDMGVATIIGAGNRRQGKTTYQDHRDDKRNQADDVVSMELGMGAALERAQSEQENPRRAELRAGELSDGAGCGTRKKAELGRDQNTGEEGDPGWGAGRTSERQPWKRAGAWSRGRPPSWVRARGALARNQGEGHELEELSWTQTPGRAAEQEPGHTTQGAAAREEGARGGRSRESTRWKKSGPWERGGQGG

SEQ ID NO: 66134 - protein, 66 aa, Zea mays
  Coding DNA Sequence Number=SeqID_24355
MATSRTFPLSCYWVIRAGVRAPFDKSWLVVQRNAPKGQLPGAEDAFFRLTAERIKVGEAEDEGRTF

SEQ ID NO: 66135 - protein, 188 aa, Zea mays
  Coding DNA Sequence Number=SeqID_24356
MGKNNKRKREPTPPSEDFGDSEYSEEEFSSESEGSPAPVPLRESSDDSDDSQGLAAEVWTYIRAVERSGLEGSDESEYSSDKEDSDGGGEDEDGDDDDDDEGGGDGDGDGSGKGGSSGSKDGDGGGSRGAAAVAAAAGAATGAAAAAAATGPMARCHWSFRWSTAERLEGDVNILEVMPSDLKTTSAL

SEQ ID NO: 66136 - protein, 104 aa, Zea mays
  Coding DNA Sequence Number=SeqID_24357
MTSRESLSRLRSETLLGHLGSDQWRVMIFGQNGNHDLWMARIRCTARKSVITFLPSRLAQRPLRRTVTGQSSYLERLHRLLHEEQERRCQEQEQEQQDSSPSPQ

SEQ ID NO: 66137 - protein, 93 aa, Zea mays
  Coding DNA Sequence Number=SeqID_24358
MAHRHRRTTVYDTTTLRRAIVPRQEHEKGKLGVGQGEREGEGVWLSAQMSRGEWVSGVRAQNEVRVFKSNSDQRQIKIISNMCIKQKDNLGPT

SEQ ID NO: 66138 - protein, 101 aa, Zea mays
  Coding DNA Sequence Number=SeqID_24359
MTPHPIDLPPRPQPPDQALRCHAIIAGLVPPTYLDYKTYALGTSLVPCSPHPTQPLPPLQFGGESRLHGWDRAGLQSGPLGKGRSAVPVNWIVSKGFAKPG

SEQ ID NO: 66139 - protein, 178 aa, Zea mays
  Coding DNA Sequence Number=SeqID_24360
MRVQARWDPRDTGKRSRRFGECSECGHGHNNGVETPENNCLRRVGSTAAQLLSGEQSRLDENRKRGSDSGSASEDDELRLARPRARTRAQPRKTMNSASPDPGLGLGLGPGRRRTPPRPTQGSDSTSADGLHLARPKGSDSTSTSEDKLDLDLGGASASPNPGLGPTTSQEGPSLPYP

SEQ ID NO: 66140 - protein, 92 aa, Zea mays
  Coding DNA Sequence Number=SeqID_24361
MEVAPRGRRILSEPNTNLSIKDKSSVRLMNRRHRDEALDETNAVVPSDSADDTRIESNCSLELSAKLEPFRTSKKAEIIFNIRKIIRRLQKF

SEQ ID NO: 66141 - protein, 381 aa, Zea mays
  Coding DNA Sequence Number=SeqID_24362
MSPWKGRLRSHHATPQSFPKRRPPSQTKNPEEKEELQTCKKHTARKKTARGRHAGAAAQQPRALLRGSSRLAGRDHEHPIMIDDDVNEECKSRADNQQLHLSAGKRKRGTERRLLSKKQSCQDPGPFSAYHQEIASCNESRKSTHRRIENDPSTEVKLKVGDVRLANIDENINKPSGTEREGIEFFCGPDDGTKEQDMALRKAYFSARPSPHFWKRVSKMVPGRSAEDCFNRIYTDLSTPTPIAPRPRANSLGKHSGRSSARKKPFSRLRTKSSDPSPGVLKPIKNVILHERYIDKLARREGAKRPRRRAPAGSKAADSGKSLSEQQAGSLKAAKNALISEATDFISSFKTLQANSLAHAVENSEDEIECDASNCSHDDKE

SEQ ID NO: 66142 - protein, 364 aa, Zea mays
  Coding DNA Sequence Number=SeqID_24363
  Gene Ontology: Mol. function=nucleoside-triphosphatase activity; Cellular component=membrane; Biological process=cell division
  Homolog annotation: Hit_ID=Q5ZDA1; Match level="QueryCoverage=90%, HitCoverage=73%, E-value=1e-126, Identity=69%"; Hit description=BCS1 protein-like
  Pfam annotation: Domain name=AAA; Domain location=133-323; Score =44.4; E_value=3.8e-10; Accession=PF00004.19; Description=ATPase family associated with various cellular activities (AAA)
  Pfam annotation: Domain name=AAA_5; Domain location=133-271; Score= -21.7; E_value=0.08; Accession=PF07728.4; Description=ATPase family associated with various cel
  Pfam module annotation: Pfam domain module=AAA::AAA_5; Domain location=133-323::133-271
MEEGDEMLDVYQGTEFKWCLVCKDNSKDSLNNGGQNESQLFELAFNKRHKDKALKSYLPFILATAKAIKAQERTLMIYMTEYDDWSAIDLNHPSMFDTLSMDHKLKQSIIDDLNMFIKRNDYYKKIGKAWKRGYLLYGPPGTGKSSLIAAMANHLRFDIYDLELTVVTSNSDLRRLLVGMGNRSILVIEDINCTIEMKQREEGEGHGKSNSTEQNRREEKVTLSGLLNFVDGLWSTSGEERIIVFTTNYKEWLDPALLRPRRMDMHIHMGYCTLESFQILANNYHSIEYHDTYLEIEKLIKEMTVTPAEVAEILMRNDDTDVVLHDLIGFLKSRMKGVNEVKIEHKKVNNKMDEKKEDKDNDKD

SEQ ID NO: 66143 - protein, 71 aa, Zea mays
  Coding DNA Sequence Number=SeqID_24364
METRGSDNPGSSAIQQQIHDLKPPYQSHHIWIPEMGVWKEERGVWMSREQHDTSASTPAEHTSMPRDTGKQ

SEQ ID NO: 66144 - protein, 238 aa, Zea mays
  Coding DNA Sequence Number=SeqID_24365
MILSGPTRWCLGAVSHPSVLLPDARPQARLRLDEADAEVPPRRHHRNVGIGLRSISRPAIVAAVIIVPDHKAPSLAMASPACDESLRDAQMRLMLRFHLTTTLATPTPTSSPDLDPPQQQHAVAATIPRPRGTIIGDGVVGRPATSLPEAPSPMMTSTAGDESPLKPVVLHYKVPSMDRRQRAEILNVLLVLVYVSFEHEASCHLATTYVTSINILLFLHWLVGGSGDLKLTKDGNNS

SEQ ID NO: 66145 - protein, 144 aa, Zea mays
  Coding DNA Sequence Number=SeqID_24366
MMSLGIPPPPSVPLRSHDHEAGSSSVAPTAPPAIDPALATILQSLKQQQAHLATEPVTLDFSSPVVGPISAQSLVPPAPAATTAAVMILDLRLTLILSLHLRFCLDRMHPHLLLPLLGRLDGALEQCRIRVSSCQTLVHKLDYA

SEQ ID NO: 66146 - protein, 99 aa, Zea mays
  Coding DNA Sequence Number=SeqID_24367
  Subcellular localization annotation: CTP_CleavageSite=19; ConfidenceScore=5.26e-01
MASPSLVAAVEQQLPLSLPGSSSPSRCCSLPLSKLTPQLWLPPPHQHLPHGRACPCSMDAVPLPTLAASSALPFLQQVDAPSPSLVPLAGHLCCSHGDL

SEQ ID NO: 66147 - protein, 131 aa, Zea mays
  Coding DNA Sequence Number=SeqID_24368
MGDDNTAAAFPLNPELDDCTNVDAMAILPAPQKINHLEVLAMSRIQSVCDKFVKGLIPVHGSNLKELAFAGCLELTSSSIKTVGEYCQELTSLDLRNLNRLRDSALWHLRGCRLLRKLRLQRNTFSFFLAF

SEQ ID NO: 66148 - protein, 285 aa, Zea mays
  Coding DNA Sequence Number=SeqID_24369
  Gene Ontology: Mol. function=N-acetylglucosaminylphosphatidylinositol deacetylase activity; Cellular component=endoplasmic reticulum; Biological process=GPI anchor biosynthetic process
  Homolog annotation: Hit_ID=Q22J58; Match level="QueryCoverage=75%, HitCoverage=76%, E-value=8e-33, Identity=36%"; Hit description =Uncharacterized LmbE-like protein, COG2120 containing protein
  Pfam annotation: Domain name=PIG-L; Domain location=52-185; Score =120.0; E_value=6.5e-33; Accession=PF02585.8; Description=GlcNAc-PI de-N-acetylase
  Subcellular localization annotation: CTP_CleavageSite=55; ConfidenceScore=5.30e-01
MAWIWMVLAAGAVLLWAISLGRVLSSAAPSCVPSSPQFMPPLSGDRRSRNVLLVVAHPDDESMFFAPTILFLKSKGHSIHILCMSRGNADGLGDTRKEELYHACVSLKFLKQIMSLQIPHEQVKVLDHPKLQDGFHEKWDHGLVAELTMEHVQLWAIDTIVTFDSYGVSGHPNHKDVHHGICKFLHTNRQGNVEAWELASLSILRKYSGPIDIWLSSLTSFAWTKQPIYTLVNSSPSRSYEAMAAHRSQWVCVLEINPRSLYKFITKFLVASYSYRYSQDIMTNI

SEQ ID NO: 66149 - protein, 814 aa, Zea mays
  Coding DNA Sequence Number=SeqID_24370
  Gene Ontology: Mol. function=protein phosphatase type 2A regulator activity; Cellular component=protein phosphatase type 2A complex; Biological process=signal transduction
  Homolog annotation: Hit_ID=Q9LDG7; Match level="QueryCoverage=78%, HitCoverage=68%, E-value=1e-143, Identity=44%"; Hit description=WD -40 repeat protein-like
  Pfam annotation: Domain name=WD40; Domain location=299-337; Score =39.4; E_value=1.2e-08; Accession=PF00400.22; Description=WD domain, G-beta repeat
  Pfam annotation: Domain name=WD40; Domain location=416-492; Score =28.7; E_value=2.1e-05; Accession=PF00400.22; Description=WD domain, G-beta repeat
  Pfam annotation: Domain name=WD40; Domain location=496-534; Score =36.3; E_value=1.1e-07; Accession=PF00400.22; Description=WD domain, G-beta repeat
  Pfam annotation: Domain name=WD40; Domain location=538-575; Score =10.6; E_value=2.1; Accession=PF00400.22; Description=WD domain, G -beta repeat
  Pfam annotation: Domain name=WD40; Domain location=588-627; Score =2.4; E_value=19; Accession=PF00400.22; Description=WD domain, G-beta repeat
  Pfam annotation: Domain name=WD40; Domain location=631-669; Score =17.8; E_value=0.038; Accession=PF00400.22; Description=WD domain, G -beta repeat
  Pfam annotation: Domain name=WD40; Domain location=686-806; Score =1.0; E_value=28; Accession=PF00400.22; Description=WD domain, G-beta repeat
  Pfam module annotation: Pfam domain module=WD40::WD40::WD40::WD40::WD4 0::WD40::WD40; Domain location=299-337::416-492::496-534::538 -575::588-627::631-669::686-806
MPEAARARGLREPAGEGEAEQEDEFYESLDRILSSSCSSASASDDDADHRRRRSRRHHLLHQHQHQHQPLSSAYDVWISEPTSVEERRRLLLQRLGLASDPPPRRSPSPPASTPASPPAPPEEPRSGAGLGSPPLTRNPSSSGGEQQCRIRNLDDGTEFEVGEVHEEEVVREVGTGRHLTFEEFELCVGRSPIVHELMKRTTTAASASASNHAAPAASKPRRKPGGGWLRGIRQLAGTVAYGRRGADDGDKEKEKEKKEREARRLSSATDDSLDGAGSRDVRRVQVRQYGKACKELTGLFMTQELAAHSGSVWCINFSLDGRYLATAGEDRVIHVWEVSEGDRKGELLGEGSLAKENGGGCSPFLTFLGNDSPEIAALSFTCADMDKKRRLRKQSNRKSVGSDHLVVPECVFGFRDKPVCSLLGHAADVLDLSWSKSQLNVLQTEKKRLILVVMISRDLATEHYTKFTVKFLAASNLYLISSSMDKTVKLWDITTSTCLKTFSHTDYVTCIQFNPVDDNFFISGSLDEKVRIWSVRDRKIEDWNDLHEMVTAACYSPDGQVAMVGSHKGCCHIFDTSEKKLLYKSQIDLRIRKKKSGQKKITGFQFAPGSSSEVLITSADSRIRVVNGDEFVHKFKGLRNTSSQISASVAPNGKYIICASEDSHVYVWRHDNSSHPSRNRITVDVTNSYEHFHCHGVTVAVTWPGAEARGSFGSRSSRHSDSDGAVNSGRDIPAENSQHNSDAGTSRHPGDRASTSWPDEKLPSAKSSPGHCSSDLCIGAMDVQRRSAWGLVIVTAGRGGEIRVFQNFGFPVQV

SEQ ID NO: 66150 - protein, 180 aa, Zea mays
  Coding DNA Sequence Number=SeqID_24371
MEWDGTMPVAAAVARETLAVTVESDLDHNQLARRWLAGLVTTHCLTGVSRAEGSLVALHTWGLEWGGEAAAGPDRRPPHAAEMLFFGVREATSPLDRAACVRSSGIGLGPAMHGLQEQESGSATSTGKGRTSDRVVVGVHTGRDGRTESGSASACVTVTWVCLPIEETAVCTRGQAASIA

SEQ ID NO: 66151 - protein, 153 aa, Zea mays
  Coding DNA Sequence Number=SeqID_24372
MSGAPEDSDFKLITFGKFQRRLRYNSPDCPVYTGHVRCSKEERPPKLASLGNSSQLLRYNSPDCSLYTGLSGVTAGQRLLRRQRLPAGAINARQRAQRSDTPMLAHRTIYSTCPKPARYNSPDCPVCTGHVRCSKEARSPELASLGFAWQPLR

SEQ ID NO: 66152 - protein, 140 aa, Zea mays
  Coding DNA Sequence Number=SeqID_24373
  Gene Ontology: Cellular component=clathrin vesicle coat; Biological process=intracellular protein transport
MASFFADDGTDDLPRTTSHPFDSDDFGAAAADVAAADGYGGYASFAEGGVEEVDEEITVESDGVPIRHVSGGYSPSPFSPELEPNGGDGPILPPPTEMGRDEGILLREWRRARLATPFSQEILVFPKKTELISLGKMEIP

SEQ ID NO: 66153 - protein, 390 aa, Zea mays
  Coding DNA Sequence Number=SeqID_24374
  Gene Ontology: Mol. function=zinc ion binding; Cellular component =integral to membrane
  Homolog annotation: Hit_ID=Q7EYM0; Match level="QueryCoverage=52%, HitCoverage=99%, E-value=3e-75, Identity=60%"; Hit description=Zinc finger protein family-like
  Pfam annotation: Domain name=zf-C3HC4; Domain location=294-331; Score= 23.9; E_value=0.00052; Accession=PF00097.15; Description=Zinc finger, C3HC4 type (RING finger)
VERPKVPEMVRDYASSAGAVRLHLQPRDPHRRVDGQRPWLRWPRMGPARQSRLSRVAPGPGDGRDACPCSSSPPSALPLPLPQPVSLYPRNEYNTNRGKGASGKPRWGKQGSEAKWSGAGLRLGSARGRSLLPVFHGVGVGGCGDSRSLKRRVVCGGRKEPHGAGRHGEEEEEEEEMVVCSTRKSFKDSLKVLEADIQHANTLPAAHFFLFLVQWTDCSLAGALGLLRILIYKVVSLLLRCAVIFPSLMQLPKGISDVDDRRQKAACTERYRRRDEDEGKRPVSEADIEREEECGICMEMNGKVVLPSCSHAMCIKCYRQWRSRSQSCPFCRDSLKRVNSGDLWMLTDCRDVVDMATVTRENIRRLFMYVEKLPLVAPDNIFYAYDSHVK

SEQ ID NO: 66154 - protein, 150 aa, Zea mays
  Coding DNA Sequence Number=SeqID_24375
  Gene Ontology: Cellular component=integral to membrane
  Homolog annotation: Hit_ID=Q5Z407; Match level="QueryCoverage=76%, HitCoverage=47%, E-value=3e-15, Identity=34%"; Hit description =Senescence-associated protein-like
MDGLTLKLIGGARALMKNIQKNDDADVKQPNSAITMDVFLNSNWEEDFPADPSGKFEDFKHFVRSNFEICEWVGLSVVAAQVLSIILGMVLRTLGPDRETDYDSDDDVTVPARLPLLINQSQHGSYYAEPNTSGRSDSWKLRILDKVRRA

SEQ ID NO: 66155 - protein, 267 aa, Zea mays
  Coding DNA Sequence Number=SeqID_24376
  Gene Ontology: Mol. function=calcium ion binding
MAGSAVAVVLLSAVALLCLYHLLFLSLSVPDPAAAAAVPRRAGGHHGSNVPSGSGTANVVLRFGLSGQPLRLHDPASAAGLPDIDTFRGKLERLLPPDDHDPGWSRRFDAELGPVHRYFGPDAPLDVRQRIAYLFAILDRSPRGVGVGVGVGELEAWLRWQAAARLDAVTRREMAPHDTDRDGAVTLREFFADSSQESVMLWLLKDKLRHSSEMDHDGDGRLSQEEFVAQSHIIISGARHADDGGHAHDLERAEAAKKFTELDADKD

SEQ ID NO: 66156 - protein, 473 aa, Zea mays
  Coding DNA Sequence Number=SeqID_24377
  Gene Ontology: Mol. function=hydrolase activity; Cellular component =mitochondrion; Biological process=purine base metabolic process
  Homolog annotation: Hit_ID=Q6S4R9; Match level="QueryCoverage=94%, HitCoverage=93%, E-value=1e-162, Identity=59%"; Hit description =Allantoinase
  Pfam annotation: Domain name=Amidohydro_1; Domain location=95-447; Score=9.0; E_value=1.9e-05; Accession=PF01979.10; Description =Amidohydrolase family
  Pfam annotation: Domain name=Amidohydro_3; Domain location=95-433; Score=-88.5; E_value=0.046; Accession=PF07969.2; Description =Amidohydrolase family
  Pfam module annotation: Pfam domain module=Amidohydro_1::Amidohydro _3; Domain location=95-447::95-433
MAASAKGRLVPVLAVAAALAAVLLYRAPFSKSLGGEGCSLLPHDHFWIASDRVVTLGRVGPAAVEVKGGLINAIAVGDYRSFVLRRPLLDYGDAVIMPGLIDVHAHLDEPGRAEWEGFSNGTRAAAAGGITTLVDMPLNSFPSTVSEETLKLKLEAARDKLYVDVGFWGGLVPENAFNPSALEGLLKAGVLGLKSFMCPSGINDFPMTNSTHIEEGLVTLAKYKRSLLIHAERIPEAEDHDLQEDELDPRSYMTYLKSRPPSWEEAAIRDLQRAMKDTELGGRSEGAHIHIVHLSDAKTSLELMKDAKRSGASLSIETCPHYLAFSSEEVPDGDTRFKCSPPIRDDTNRENLWKALLDGHIDMLSSDHSPSTPDLKLMEEGDFLRAWGGISSLQFVLPVTWSYGRKYGVTLNQLASWWSERPAKLAGQKNKNISAYLGKQLSGKVLSTFVRGNLVFAEDKHANAACGVPILAK

SEQ ID NO: 66157 - protein, 766 aa, Zea mays
  Coding DNA Sequence Number=SeqID_24378
  Gene Ontology: Mol. function=protein dimerization activity; Cellular component=nucleus; Biological process=regulation of transcription, DNA-dependent
  Homolog annotation: Hit_ID=Q653U3; Match level="QueryCoverage=99%, HitCoverage=93%, E-value=0.0, Identity=68%"; Hit description =Putative auxin response factor
  Pfam annotation: Domain name=Auxin_resp; Domain location=205-294; Score=117.1; E_value=5.2e-32; Accession=PF06507.4; Description=Auxin response factor
  Pfam annotation: Domain name=B3; Domain location=133-234; Score=94.0; E_value=4.5e-25; Accession=PF02362.12; Description=B3 DNA binding domain
  Pfam module annotation: Pfam domain module=Auxin_resp::B3; Domain location=205-294::133-234
MRLSSSSGSVLPAQPGSPEAVEEHKCLNSELWHACAGPLVSLPAVGSRVVYFPQGHSEQVAASTNKEIESQIPNYPNLPPQLICQLHNVTMHADAETDEVYAQMTLQPLNPQELKDPYLPAELGSANKQPTNYFCKTLTASDTSTHGGFSVPRRAAEKVFPPLQPPCQELMAKDLHGNEWKFRHIFRGQPKRHLLTTGWSVFVSAKRLVAGDSVLFIWASPSEFVIPLVKYVKAVYHTRISVGMRFRMLFETEESSVRSLTRSNAFNSRYMGTITGICDLDSVRWPNSHWRSVKVGWDESTAGERQPRVSLWEIEPLTTFPMYPSPFPLRLKRPWPTGLPSLHGGKDDDLANSLMWLRDTANPGFQSLNFGGLGMSPWMQPRLDATLLGLQPDMYQAMATAAFQDATKQASPTMLQFQQPQNIAGRASPLLSSQILQQAHHQFQQQPYLQNISESTIQAQGQSEFLKQQIQRSQSFNEQKPQMQHQQESQQQQQPQFSQSSPMALQTILPFSQAQSFTDTNVGSLSPSNGNTMQNTLRPFSSEAVSHLSMPRPTAIPVADPWSSKRVAVESLLPSRPQVSSQMEQLDPAPASIPHSSALAPLPGRGCLVDQDVNSDPQNHLLFGVSIDSQSLLMQGGIPGLQNGNDSAAIPYSTSNFLSPSQNDFPLDHTLNSSGCLDDSGYVPPCSDNSDKVNRPPATFVKVYKSGTYGRSLDITRFSSYHELRRELGRLFGLEGQLEDPLRSGWQLVFVNREEDVLLVGDDPWQ

SEQ ID NO: 66158 - protein, 127 aa, Zea mays
  Coding DNA Sequence Number=SeqID_24379
MAALSRFISRLGERGMSFFKLLKKTTLLKDYFKIVSKIGACGGQISSGPLEDENPAWSHKPVVPQGRHVAGQAKTTMEMGRPRKAMGSHPDYSRIGRDPVEAARFSRARRPQTPVIARNGDVGFSSG

SEQ ID NO: 66159 - protein, 100 aa, Zea mays
  Coding DNA Sequence Number=SeqID_24380
  Subcellular localization annotation: CTP_CleavageSite=27; ConfidenceScore=5.03e-01
MKALDLPVIDARRGSRCTMGGNDVSPVARSVRAQGWARRRLLLRPRPGSGEDVVPPEVEVEAEPWGRARRRPPSKAEVEAEPWGRARRRPPSEVEVGAEP

SEQ ID NO: 66160 - protein, 470 aa, Zea mays
  Coding DNA Sequence Number=SeqID_24381
  Gene Ontology: Mol. function=protein serine/threonine kinase activity; Cellular component=cytoplasm; Biological process=protein amino acid phosphorylation
  Homolog annotation: Hit_ID=O82051; Match level="QueryCoverage=92%, HitCoverage=94%, E-value=0.0, Identity=81%"; Hit description =Putative serine/threonine protein kinase
  Pfam annotation: Domain name=NAF; Domain location=313-372; Score =98.8; E_value=1.6e-26; Accession=PF03822.5; Description=NAF domain
  Pfam annotation: Domain name=Pkinase; Domain location=12-266; Score =335.7; E_value=7.9e-98; Accession=PF00069.15; Description=Protein kinase domain
  Pfam annotation: Domain name=Pkinase_Tyr; Domain location=12-264; Score=69.2; E_value=1.4e-17; Accession=PF07714.7; Description =Protein tyrosine kinase
  Pfam module annotation: Pfam domain module=NAF::Pkinase::Pkinase_Tyr; Domain location=313-372::12-266::12-264
MDERRTILMDRYEIGRQLGQGNFAKVYFARNLTDGQSVAIKMIDKDKITRVGLIVQIKREISIMRLVKHPNVLQLFEVMASKSKIYFVLEYAKGGELFNKVSKAKLSEDAARRYFHQLVNAVDYCHSRGVYHRDLKPENLLLDENENLRVSDFGLSALSESRRHDGLLHTTCGTPAYVAPEVLGRRGYDGTKADIWSCGVILFVLVAGYLPFHDPNLIEMYRKISRAEYRCPRSFSGELKDLLFRMLDPDPSTRISISRIKRSTWYRKPIEANAAKIKHGTARDTTVRDGEAATASSSIECSNRPEEDQGSSSLPNLNAFDIISLSTGFDLSNLFEERHGRREERFTTRQPVGAVFGRLKELAERLKLKIQKKESGVLKLAAQKEGMKGFLELDAEVFELAPSFLLVELKKASGDTIEYQRLVREEVRPALKDMVWAWQSDRHQQQQQRCEQSVQGEDQQQPLSSLPTQQ

SEQ ID NO: 66161 - protein, 994 aa, Zea mays
  Coding DNA Sequence Number=SeqID_24382
  Gene Ontology: Mol. function=actin binding; Biological process=actin cytoskeleton organization and biogenesis
  Homolog annotation: Hit_ID=Q6H7U3; Match level="QueryCoverage=83%, HitCoverage=98%, E-value=0.0, Identity=58%"; Hit description =Putative formin I2I isoform
  Pfam annotation: Domain name=FH2; Domain location=534-938; Score =334.5; E_value=1.8e-97; Accession=PF02181.13; Description=Formin Homology 2 Domain
  Subcellular localization annotation: CTP_CleavageSite=35; ConfidenceScore=5.25e-01
MSLGPTCLISPRARWANGPRRSFFSLFVLSLLFSCASFAWRRGEKAREWMRRAAIAGGEGGSRSKEAGLAHAGVATPRVEEGPGALGARRYIATPRRRPRGGVRRVDAWPPARPRISTASRRFLFHARVLVRDRQMQVRVPKSTFPSTSTIRRLLVPSGLTSCDAQTAALIRPSEVVGAEEEDWELFLLQWRQHNSLPSPLLNGDLVDRIWSICLPDMAGAQEILGNPLQFASDQLLSQPSENALKAMLFLEFLSLLSPEKLSSTYGCIHANYFGLGIPQELSVSLATYLESHQLLLGSNFYARRHLADNSIGDAPSMAPDFAPSMSSGDDVKLPQSVTETPYAPSSSYNNENPNRPHHSKPAQKHRGVPPISLLEKHKDYVRLVLIVVLPTAAFSFIAAFLIFYCCGCNKNKVSVGSSPDARVSASHLNKDNRSHSGVSMSRCFSCCFKRSTDATPSSEVIGGTPENNVTSDAPKPMSPPAPPPLPPPIKKAPPPPPGPPRGSKARLAQLSPVESSRSEGSSASEQTSESSEAEVNAPRTKLRPFYWDKVLANPDQSMAWHDIKFGSFHVNEDMIEELFGYSGGSRNNLKDKELPSADPASQHISLLNVKKSCNLAVVLKAMNIRVQDIHDALIEGNELPRVLLETILRMKPTDEEEQNLRLYNGDFSQLGLAEQVMKALIDTPFAFKRVDMLLFMSSLQEDASSLRDSFHQLEAACGELKHRLFLKLLEAVLKTGNRLNDGTFRGGANAFKLDTLLKLSDVKGADGKTTLLHFVVQEIVRSEGVREARLAMENGRSPAHSASDDTSNGSLEEDGDHYSNRGLSIVSGLSSEMDNVKRVAALDAEPLFATVVTLRQELLKSREFLNEIATVEETSGFRRSLESFVEHADNETGFLLKEEKRLRSLVKKTIRYFHGNDSKDDGFRLFVVVRDFLVMLDKACKEVGASQKGTNKSRSSGSGSGNGNGNPTFPSILQEQQFPAVIDGHSDSSHTSN

SEQ ID NO: 66162 - protein, 90 aa, Zea mays
  Coding DNA Sequence Number=SeqID_24383
  Homolog annotation: Hit_ID=UPI00004C1733; Match level="QueryCoverage =32%, HitCoverage=2%, E-value=1e-07, Identity=90%"; Hit description =UPI00004C1733 related cluster
  Subcellular localization annotation: CTP_CleavageSite=55; ConfidenceScore=5.61e-01
MKLWKETSRSSKTTTSSRCGLAATPSRLPVKAALSTFLFRTLIYSTKSVKTWDFMAFRGANEIVLPMSSTAHFAIVGSRTPARGGVNSRF

SEQ ID NO: 66163 - protein, 776 aa, Zea mays
  Coding DNA Sequence Number=SeqID_24384
  Gene Ontology: Mol. function=RNA-directed DNA polymerase activity; Cellular component=intracellular; Biological process=RNA-dependent DNA replication
  Homolog annotation: Hit_ID=UPI00005A975E; Match level="QueryCoverage =99%, HitCoverage=44%, E-value=0.0, Identity=87%"; Hit description =PREDICTED: similar to Retrovirus-related Pol polyprotein from transposon 297
  Pfam annotation: Domain name=RVT_1; Domain location=56-225; Score =150.8; E_value=3.7e-42; Accession=PF00078.17; Description=Reverse transcriptase (RNA-dependent
  Pfam annotation: Domain name=RnaseH; Domain location=455-582; Score =8.2; E_value=9.9e-06; Accession=PF00075.14; Description=RNase H
  Pfam module annotation: Pfam domain module=RVT_1::RnaseH; Domain location=56-225::455-582
MPGIPRDVAEHSLDIRAGGRPVRQPLRRFDEEKRRVIGEEIHKLMAAGFIKEVFHPEWLANPVLVRKKGGKWRMCVDYTGLNKACPKVPYPLPRIDQIVDSTAGCETLSFLDAYSGYHQIRMKESDQLATSFITPFGMYCYVTMPFGLRNAGTTYQRCMNHVFGEHIGRTVEAYVDDIVVKTKKASDLLSDLEVTFRCLKAKGVKLNPEKCVFGVPRGMLLGFIVSERGIEANPEKIAAITSMGPIKDLKGVQRVMGCFAALSRFISRLGERGLPLYCLLRKAECFAWTPEAEEALGNLKALLTKAPILVPPADGEALLVYVAATTQVVSAAIVVERQEEGHALPVQRPVYFVSEVLSETMIRYPQVQKLLYAVILTRRKLRHYFESHPVTVVSSFPLGEIIQCREASGRIAKWAVEIMGETISFAPRKAIKSQVLVDFVAEWVDTQLPTAPIQPELWTMFFDGSLMKTGAGAGLLLISPLGKHLRYVLRLHFPASNNVAEYEALVNGLRIAIELGVRRLDARGDSQLVIDQVMKNSHCRDPKMEAYCAEVRRLEDKFYGLELNHIARRYNETADELAKIASGRTTVPPNVFSRDLHQPSVKIDDTPEPEAPSAQPEAPSARPEAPSVQPEVPSAPEGEALHVEEEQSGATPDRNWQTPYLQYLRQGELPPDQAEARRVARRAKSFVLLGDEKELYHRSPSGILQRCISIAEGQELLREIHSGACGHHAAPRALVGNAFRQGFYWPTAVVDATRIVRTCEGCQFYAKQTHLPAQAL

SEQ ID NO: 66164 - protein, 261 aa, Zea mays
  Coding DNA Sequence Number=SeqID_24385
MGRRFHKGIWLGMAVEAGPHCNTPGVYIPLANEYGFKHRALIFSSACAPSLSRPRGLLPVAQGSLRATLSFPKLSHAALPYSSSGAPLRAGPFMASSRCSSGARCESPPSAQPTAPALYRPLSLLLFHGRGNVLLLHRVSHALELQSSRPPAPWFKFLRAELPSVLRRRALPVVDIPSPPLAELHARTPHPAYARTAPSLLVLADPGCPAPGCACPGRRHRVPVRVAMSLCSPWPVPCSRRGSLPAPCARAAVEFSGVCAP

SEQ ID NO: 66165 - protein, 288 aa, Zea mays
  Coding DNA Sequence Number=SeqID_24386
  Gene Ontology: Mol. function=transporter activity; Cellular component= membrane; Biological process=oligopeptide transport
  Homolog annotation: Hit_ID=Q53JI5; Match level="QueryCoverage=96%, HitCoverage=44%, E-value=3e-88, Identity=64%"; Hit description=POT family, putative
  Pfam annotation: Domain name=PTR2; Domain location=54-287; Score= -54.2; E_value=0.00064; Accession=PF00854.12; Description=POT family
MAIAAVGNNLITYVFGEMHFPLSQAANVVTNFVGTIFLLALLGGFLSDSYLGCFWTMLIFGFVELSGFILLSLQAHLPQLKPAPCDMSSTDGGCEKASGFKSTVFFLALYLVALGSGCLKPNMIAHGADQFDAATPGGANSLPTYFNSAYFSFCAGELVALTALVWVQTHSGMDVGFGVSAVAMAAGLASLVAGAAFYRNKPPQGSIFAPVARSAKLLLLTVRNSPGFRRCLHQKEASLPFQLQFCQRRGLRAGAPRRQLPPQQQIQVSIALMQRTERPPVAVSTCDL

SEQ ID NO: 66166 - protein, 72 aa, Zea mays
  Coding DNA Sequence Number=SeqID_24387
MKVKIMQAHVDGPRVAKDERWALIEGMEKLARRRARVDRVVGVAEDWRDRCPGRVSLAIHNMKDAAMSSERY

SEQ ID NO: 66167 - protein, 144 aa, Zea mays
  Coding DNA Sequence Number=SeqID_24388
MDISIFLFFVSLSVDLAPCAALPSSPDVFADVPVRLLTSRWDLDGLGLDADALCLPATYLASYMATPSPPDVFTFVPVYLLASRWDLDGLGLDADVILLLAHQFSVFYGYGGAEGRPSTRGTLKSHNCLFTGSCVDHSVTPLPP

SEQ ID NO: 66168 - protein, 269 aa, Zea mays
  Coding DNA Sequence Number=SeqID_24389
SERRAKPCSSAILSPRCPTPLTGAYVGLGALDHPSPRSGLLAGVTPTHPEHPLRRFASFQPRSHGQNPTIEFAGFPSPVLTSSGNLNPLEPAPTSSMATSPPRTGAAPPEATNTPWRLISTVCSGSSGPDHWIPIAWAPPAPGSYLSIAFAPGARPDCDSESTLGPAAWGSSPPTHPSPMIDSDDSLAFPRGNNPSFEWWSALASSARTSQMRASMKAPRKRRMKAVATGASTALVTSARVDSVGGDCGGVKGAGDGKDDHAGGEVPPA

SEQ ID NO: 66169 - protein, 64 aa, Zea mays
  Coding DNA Sequence Number=SeqID_24390
MAPPRCPVPGRTGGRRGKRALGPWMVKVRLRLDLGADHYVNWNMERPPGKTVLPQGFNGTPLAD

SEQ ID NO: 66170 - protein, 104 aa, Zea mays
  Coding DNA Sequence Number=SeqID_24391
MAGAPVGSRIRHDRVGVHSEDLRMAEQGGERAGSRLRRGRRYPRPGREPEAGGRREVSERRKIHKRLRGEADPGARAVGARGMEWAARGKTADGPNWRQRPRII

SEQ ID NO: 66171 - protein, 250 aa, Zea mays
  Coding DNA Sequence Number=SeqID_24392
GISPLCDEPGLRSAVLSWLPTLNESGVAVRQTGGRDPHRGIHIPSVPPGGSQPADAGSRPPPPPPAAPNSSDKGKGAAGSPSSPGTTGRSEGDMRHRLRLADGSFVSDPPLSSDFSQKHQRMTGEIVEASSQAQGAQRRVSPPPPPYLTRRRRRHHHHHQVRRRHPRGSSSINSSNSSSRGSERPASRVAGRFRAPSVRWERCRRPASAYHYRGGTVGPLGSVYHCRGSAVGPLGSSWGSGGSSAADGYS

SEQ ID NO: 66172 - protein, 122 aa, Zea mays
  Coding DNA Sequence Number=SeqID_24393
MTGLMSFTSLVTCEVAVNALSHEGCGHFEVFDQSDEGFERVIFQVEDPMAHDEEVEDLGDLNSTLPDSTLPEASGVELAPSPDAGKGPSATPAPTGADGFRRLGMRKQPLLTILILRQRLQP

SEQ ID NO: 66173 - protein, 108 aa, Zea mays
  Coding DNA Sequence Number=SeqID_24394
MVGAEVPAPMEKPLRAGDRRGKGSSVMDAGCARLGREHGEGAGFHGEEGRPAMGGSSAMEEKLLFPAPSELDKGTRWRGEKSGGWWKRSGGLGGNGKFPICKGESYYL

SEQ ID NO: 66174 - protein, 164 aa, Zea mays
  Coding DNA Sequence Number=SeqID_24395
  Subcellular localization annotation: CTP_CleavageSite=46; ConfidenceScore=5.60e-01
MASFPPPFLLSQGRCSLLHSLPSAPSSSMDCSSSTLLSMAQAPFFRAAEAPPMAQDIPPASSLPVHGRQPLLLFALLRSTPLCSTSSSERPHQPCPGAARRRSPAGRHHGLVGAPARRRAHVAHGAFPCLLAVPNDQQPSPTLPSPKTAAMVSKFSAQRCRSKK

SEQ ID NO: 66175 - protein, 172 aa, Zea mays
  Coding DNA Sequence Number=SeqID_24396
MDDPVLGVWRMRDGDFKSVKNSSRHHKPHSVQMIPTDPTGIRTAPKPTPKAQHCQHKAFPSMVVHTHSDELWVSPGARRPGLGKSSVDGLRTRNPNLPGELSAVIAIARGMDADGWALDVSNTDHARQQIGLRERLTCRPYLSAQEYTPVRQIAPAHVLARVIHCWAAQDSG

SEQ ID NO: 66176 - protein, 801 aa, Zea mays
  Coding DNA Sequence Number=SeqID_24397
  Gene Ontology: Mol. function=voltage-gated chloride channel activity; Cellular component=membrane; Biological process=chloride transport
  Homolog annotation: Hit_ID=Q0IJ86; Match level="QueryCoverage=92%, HitCoverage=95%, E-value=0.0, Identity=65%"; Hit description =Chloride channel
  Pfam annotation: Domain name=CBS; Domain location=620-787; Score =28.0; E_value=3.3e-05; Accession=PF00571.18; Description=CBS domain
  Pfam annotation: Domain name=Voltage_CLC; Domain location=165-587; Score=561.0; E_value=1.2e-165; Accession=PF00654.10; Description =Voltage gated chloride channel
  Pfam module annotation: Pfam domain module=CBS::Voltage_CLC; Domain location=620-787::165-587
MEEEQSPRLGRDPATEPSPAPEWPDSDSKNDDSANDPEDPAGGSGSGSGNGISSLEQPLLKRSTTLTASHLAIVGAKVSHIESLDYEIIENDLFKHDWRSRSNVEVLQYIFLKWAMAFLVGLLTGVIASLINLAIENISGLKMLQMVNLVRGKRYWAGFLYFAGVNFALTFVAAVLCVVFAPTAAGPGIPEIKAYLNGVDTPNMFGAPQLIVKIIGSIGAVSSGMDLGKEGPLVHIGACLANLLSQGGEGRWRLRWRWLRYFNNDRDRRDLITCGASSGVCAAFRAPVGGVLFALEEVATWWRSALLWRTFFSTATVVVVLRGFIEVCRDGRCGMFGEGGLILFDVSDVTVRYHVGDLLPVTLVGVLGGVLGALYNHVLHQVLRLYNLINAKGRLAKLALALAVSVFTSAGLYLLPFAVPCTPCDPAFGDACPTVGKSGNFKQFNCPTGYYNDLASLLHATNVDATRNIFSTGTAGEFRLDSLLIFFGIYCVLGLFTFGIAVPSGLFLPIILMGSAYGRILALVLARFVRIDHGLYAVLGAAALMSGSMRMTVSLCVIFLELTNNLLLLPITMFVLLIAKTVGDAFNPSIYEIILDLKGLPFLEPKPETWMKDLAVGELAAAKPRVVTLQVIEKVSTVVEVLRSTPHNGFPVLDWPRPGVSELHGLVLRSHLMAVLKKRWFLTDKRRTEEWEARERFSSTELAEKSGSIDEVAVQLTPEELDMYIDLHPFTNTTPYTVVETMSVAKAVVLFRTCALRHMLIIPKFQGPEIAPIVGILTRQDLRAHNILGAFPHLANKRKVH

SEQ ID NO: 66177 - protein, 74 aa, Zea mays
  Coding DNA Sequence Number=SeqID_24398
MASRFTCRAPPTERACGRSRSLRPDWRLFSSVTSVLQAMKGHVFGQWWFMAEAQFHDQGDVHNIAIECSGGVRT

SEQ ID NO: 66178 - protein, 310 aa, Zea mays
  Coding DNA Sequence Number=SeqID_24399
  Gene Ontology: Mol. function=protein binding; Biological process=red or far red light signaling pathway
  Homolog annotation: Hit_ID=Q67W96; Match level="QueryCoverage=94%, HitCoverage=75%, E-value=2e-88, Identity=59%"; Hit description=Kelch repeat containing F-box protein-like
  Pfam annotation: Domain name=Kelch_1; Domain location=139-185; Score =3.3; E_value=1.6; Accession=PF01344.15; Description=Kelch motif
  Pfam annotation: Domain name=Kelch_1; Domain location=46-95; Score =17.6; E_value=0.04; Accession=PF01344.15; Description=Kelch motif
  Pfam annotation: Domain name=Kelch_1; Domain location=97-136; Score =13.0; E_value=0.13; Accession=PF01344.15; Description=Kelch motif
  Pfam annotation: Domain name=Kelch_2; Domain location=45-95; Score =18.2; E_value=0.029; Accession=PF07646.5; Description=Kelch motif
  Pfam annotation: Domain name=Kelch_2; Domain location=97-136; Score =6.2; E_value=5.7; Accession=PF07646.5; Description=Kelch motif
  Pfam module annotation: Pfam domain module=Kelch_1::Kelch_1::Kelch _1::Kelch_2::Kelch_2; Domain location=139-185::46-95::97-136::45 -95::97-136
  Subcellular localization annotation: CTP_CleavageSite=42; ConfidenceScore=5.28e-01
MGSLSLSLPFLFAFAFDPVSRRLQCQALDPFSRRWLLLPPVPGGAAAGSFAVVGLPRRGEIYVIGGVEEGSDKAVTSVAVYSAARNGWEEAAAMRTPRGYMAAGEVGGRVVVAGEDGEAEVFDPDAGRWSPAAPRRGAAVAWYDAAAAGGKLYVTEGWAWPFERAPRGAVYDSATDSWCEMARGMREGWTGSCAVAGGRMYIVAEYGEWRLKQYDEARDEWRMVAGSGVPPEVRRPHVVAGEIGEVAGGRRRIYVVGAGLDVAVGTVSASDTAAAPGVHGVEEEVVEWEVVKGPTEFVGLAPCNAQVLYA

SEQ ID NO: 66179 - protein, 104 aa, Zea mays
  Coding DNA Sequence Number=SeqID_24400
MDRPLPVRLFCVESQRGTSKVQTQSMHYAVCTEARSKESRGVLVATIEHKTARQELTEVRREGQRASRCPARRPRLAQWRLAAAASRQQLGAWGLGSAAAAGTQ

SEQ ID NO: 66180 - protein, 181 aa, Zea mays
  Coding DNA Sequence Number=SeqID_24401
  Homolog annotation: Hit_ID=Q6QP51; Match level="QueryCoverage=61%, HitCoverage=45%, E-value=3e-10, Identity=45%"; Hit description =Putative growth-regulating factor 1
MGKNTRAGTGMGKILYPRVYMGNPTGRIFLMGTGMEWYYPTENNAASVAPTAVPLDRVRLTAAKSSLGRHRKLRLARPQGSDTASASEDGLRLARPRARTQPRPRKTVSASPDPRAWAQPRCWTTDSASPDPRARTQPRPRKTVSASPDPGLGLNLDLERRTPPRPTPGLRLSLDIGGEST

SEQ ID NO: 66181 - protein, 108 aa, Zea mays
  Coding DNA Sequence Number=SeqID_24402
MAQWVRVLSRGELTGDDLTAVKSHGDAIAVFGYVAQGQEAAVHRRAYLLKPPSKGVRRESSEWSPAHRRRKFTYPAILSGSHKRESVRWQHESSCREVAIDEQAVLAT

SEQ ID NO: 66182 - protein, 1094 aa, Zea mays
  Coding DNA Sequence Number=SeqID_24403
  Gene Ontology: Mol. function=protein binding
  Homolog annotation: Hit_ID=Q1RSL1; Match level="QueryCoverage=30%, HitCoverage=43%, E-value=1e-24, Identity=29%"; Hit description=IMP dehydrogenase/GMP reductase
  Pfam annotation: Domain name=PWWP; Domain location=24-98; Score=62.2; E_value=1.7e-15; Accession=PF00855.8; Description=PWWP domain
MADPAAGGAMVPAAGGGSVWANGAPRFGDMVWAKVKSHPWWPGHIYSVSLTDDEEVHRGYRYGLVLVAFFGDKSYGWFEPSELVPFEEHFTEKAAQGGSTRSSFAGAVAEAVDEVARRSALALLCPCKSPDAFRPHPSDGNFLLVDVPAFDTDADYHPDQIQAARQRFVPRKALDYLLDAAVTQRDAAEKAARTVPGMEMAALFSAYRRAVFSPIDNTYAQAFGVDPELALAAEQKAAAERAQRGINTHTPNPSCIIDCAVVLVALYLKLMAKQRYYCTASIDQATNYFDGSNMKDSDGTSLTIEPVGLAIGVRACPIAAIGGFLSFLLRTKLYGERVVAMSWLPASPDQSPCSWSLGPAEQCGSDSPQQARPLKGGPRKTADQATPAAGRRRGGAGGAAARLMEKIVPGAPAMKTKSSKKDQYLLKRRDAPEASAHSQPQLPDAPPPAPTLAAEDGPPGFPASGDPPTPPLPGSSVADEDFMLQRRVPLVDVPPAVQAQPSEGPAAPKNATKLKKPRKREREEGPDATPDSADAAGDPKKKKKKKKLSDVDGAGGKVAFVVEGRDVLDLTQVLSDIRNLPLAPFHGAERLISDAARSFVLAFRSKYYKKSYENDPPEELKSLDKPSAAATDGQSPKKKKPAPRPGAGNDPTKAGVKRGPSDRQGELAIKKKAKLDKIKVLSSEKKAAGLEQKDTAAAAAQQQARAAGAKDKAEMGAAKKKEPASARTVRTPSPTALMMKFPLNSTLPSVASLKARFARFGPLDVDGIRVYWKSHMCRVVYRFKFDAEAALRYAKANAMFGQVDTQYHLREVEAGAGREPLAAPEAAPQQRSELRLMETAAFRPGTSGNGAPLPMSRAGAAPARPAVGVGQPPKSILKKSTDEGSSGTTREVSRVKFVLDGADGGTLAPPPSVGGNGNGADGGSSMVAKAAKSVGFAPSQALQPPPRTLQPPMRPAHQQPPRAAVTQQLPPPPLPQHLPYHQHPRGADGTPLAPPPGQLLAYPPRGHGEGPSALPGLPPPLPYQPRPHRLPRWTAAGFPPRPSNAKAGSEGPAWRRGEKEFKEEVWRLMTGIAKMVEPLTDKNGFFPYHLFRAQ

SEQ ID NO: 66183 - protein, 483 aa, Zea mays
  Coding DNA Sequence Number=SeqID_24404
  Gene Ontology: Cellular component=integral to membrane; Biological process=response to tellurium ion
  Homolog annotation: Hit_ID=Q8L4G8; Match level="QueryCoverage=87%, HitCoverage=66%, E-value=1e-124, Identity=56%"; Hit description=C4 -dicarboxylate transporter-like protein
  Pfam annotation: Domain name=C4dic_mal_tran; Domain location=105-370; Score=271.3; E_value=2e-78; Accession=PF03595.8; Description=C4 -dicarboxylate transportermalic acid transport protein
MAAPDGDRLRSTVAEPPSKPSAGAWSGSCPASAGGAQTHPHPAAADVGGGEARDSEADTDDDGELPTADRYFAALEGPELETLRPTEVPVLPEDEAWPFLLRFPISAFGMCMGVSSQAMMWKTLEQEPSTAFLRVSPGVNDALWWLSVALMVVVSATYVLKAVFYLEAVRREFHHPIRVNFFFAPWIACLFLAKGLPEPVTAVHHVVWYALMAPILFLDIKIYGQWMSGGEWRLSRVASPTSHLAVVGNFVGALLGARMGLREPALFFFAVGAVHYVVLFVTLYQRLPTNVPLPRELHPVFFLFVATPSVASVAWARISGEFGLGARVAYYVSLFLYASLVARVSFFFRGVRFSLAWWAYTFPVTSAAIATTVYASAVTNALTQALAVGLSAVASVTVAGVLATTVYHAFVRWDLFPNDVSIAIRRRPRAKFGKILARLRTSSADLKELVISRHGGSASETSSVVSEPPTPMVDGRGRSRAEP

SEQ ID NO: 66184 - protein, 271 aa, Zea mays
  Coding DNA Sequence Number=SeqID_24405
  Homolog annotation: Hit_ID=Q2R300; Match level="QueryCoverage=97%, HitCoverage=28%, E-value=1e-79, Identity=63%"; Hit description =Importin, putative, expressed
  Pfam annotation: Domain name=Xpo1; Domain location=109-260; Score =48.9; E_value=1.7e-11; Accession=PF08389.2; Description=Exportin 1 -like protein
MDAAEASEVQARLAAAVHALNHDARPEARLAANQWLLALQRSPQAWAVATSLLATPDPLPPADLLFFAAQMLRRKIQSPGPALLGLGLASQLLDALLLAARRFCAAPAPRQLLTQICLALAALALRAEGGVDGLFARMPHLPPPAVLELLTVLPEEAAQDQGGDTGVDAAARCRFTRELLAHAPSVLEFLHRQSEKAPADDDGVPLDERNRRILRCLLSWVRVRCFSETPAASLARHPLLTFAFNSLQVSFSFEVAIEVMTELVSQHQSNI

SEQ ID NO: 66185 - protein, 367 aa, Zea mays
  Coding DNA Sequence Number=SeqID_24406
  Homolog annotation: Hit_ID=Q2R300; Match level="QueryCoverage=83%, HitCoverage=37%, E-value=1e-122, Identity=65%"; Hit description =Importin, putative, expressed
MSPRRRMVESGGGWWWRGGLLETRKRGLNRCSLAHFILGIDVKSAKRNVVQELFVPVFSSLLDALLFRAQMDTDEHGSDGAPCIPERLTQFRMNLEELLVDICLLLGAPAYINRLFSGGWDFSSQTIPWKEVEVRMYALSMVYKSFGDVVGSYSKWLSSSQCNIKPLLLFCASGISKSVSSNACSLALRKLCEDAPSFIHEPQNLEILFWIGEIDIDRDQLLRQNPAAYTQSLDLAVRGLYRMSALFHHLATSVTSGLVDDDIIIVLLGIFWPLLESLFRSSHMENVHLSAAICRSLSSAIHSCGHHFHILLPKVMECLSANFLLFQRHDCFLRTGKELYFYAQRFFFLPKFKLKRFFFAPRHNKGQ

SEQ ID NO: 66186 - protein, 543 aa, Zea mays
  Coding DNA Sequence Number=SeqID_24407
  Homolog annotation: Hit_ID=Q2R2Z9; Match level="QueryCoverage=69%, HitCoverage=85%, E-value=1e-144, Identity=71%"; Hit description =Expressed protein
MGIGGKAPTFGTTAGIGDSVTFGMMAEIRRRRHPTALFATAPVWGDREREAAAPHKTISAAAPLHGIPCCRRLPPLQRRTPRAPPSPPPAALPLSLRVTASLLQQEPPAARVSSLSGVTVAFPATLAVAAAAAPGGTMSERAGAVASAPDHMDEQPARGRYHPFEEISEAVQLDDGEPAHLTDAESARTIVEVNNKATVMISTLVGDGVHERIILPEFPYLTDENGDIYFEVDNEDALLESIMGEDKIAHVIIGLDNTQVFADLDLVSASATEFAQEDDNGDEDDDGSDDDEESDFDEDFNDVEGVFSVDEDDEDDREEEEEEDDDDDDEDLPSWSNLETVNSCHPLYFARMIVETATKSSIDWLDRPPASLVVEGQLRPAFAEESTMVAKHISSDAPKKDTKESGATFFKVEPKVKIEEYQKAKPDIIAHSAPNVISRLRAGGDKVTQALKSLCWRSKAIQVEEAAVIGVDCLGFDLRVCSGTQVQTLRFAFPTKRSKYMSFCFLGIHIKKGNHHRPDRSPDVIRSIDVRKLSATPTDCLSK

SEQ ID NO: 66187 - protein, 230 aa, Zea mays
  Coding DNA Sequence Number=SeqID_24408
MPSILASSVSIRSHERDTNSVDKPVKRLVELRRMATESRDNGLRCLLTEKVKTVVGESKATRMNCSMFSIVVRKNLSESGRQEAEDMGSILKIIVADCTRGVWHNVFAMEAQLPCLLVSFHQSQNRAPAPERRGDEQGAPANAVPVHDRRSGICDESGSFVELLERHTWLSGEGLTTVAAGILHRTQRSTARCGWGLALLESRKTPTMAPPRFGIEGMEGDVVVDPQWDN

SEQ ID NO: 66188 - protein, 141 aa, Zea mays
  Coding DNA Sequence Number=SeqID_24409
MGKSNKRKREPTPPLEDFGDSEYSEEEFSSESEGSPAPVSPPASSDDSDDSQGIAAEVWTYIRAVERSGLEGSDESEYSSDEEDSDGGGEDEDDDDDGGDDDDGGDGDGSGSGRGSGDGGRDGDGGSSRGRGQWLDAHWSS

SEQ ID NO: 66189 - protein, 346 aa, Zea mays
  Coding DNA Sequence Number=SeqID_24410
  Gene Ontology: Mol. function=DNA binding; Biological process =regulation of transcription
  Homolog annotation: Hit_ID=Q10S98; Match level="QueryCoverage=21%, HitCoverage=18%, E-value=7e-21, Identity=65%"; Hit description=Myb -like DNA-binding domain, SHAQKYF class family protein, expressed
  Pfam annotation: Domain name=Myb_DNA-binding; Domain location=24-75; Score=39.2; E_value=1.4e-08; Accession=PF00249.21; Description=Myb -like DNA-binding domain
MGGAGGGGRNGAATRRYNRSKVPRLRWTSELHRNFVRAVDCLGGQDKATPKLILQLMDVGGLTIAHVKSHLQMYRSSGQDIRRREVQPRRLGHLVEHYSFAIDEEGGPKEFVCCPHMKRMIKIPNLWHTHRLLPARVNRAEAGPEAAATATATHESVQGNSDMGAPGTRRCGDDYTRAIPIPMGSSSSRSRRITEGLAWQWQSSGAASAARAATAASTLRELGFWVRGTEPFKVRQTGRPMANRLSPVARQLSSKSKEIKCGDDGRFLFGTATRDEAARRHSPSRRPDSIDPKAVAAVSWSSEGGACALPPPLSSTGLSARSGPSGSCVFARQRVNLDLSLSICGS

SEQ ID NO: 66190 - protein, 164 aa, Zea mays
  Coding DNA Sequence Number=SeqID_24411
MQTTDLLLAGSRIDKSHPARLVQKTHSPVSVFAFDAGLGERERHQPFCQNHTAIYHFPKSLKTDGISPQGQIITMMSGTVDHRGKSKAARPEQKPSQRLILWLTRRHRISLLFSCFCIRHQRPDTKARFGRDEFGWENRHPSHRRSKRYPGNREHLNEYRNLDI

SEQ ID NO: 66191 - protein, 345 aa, Zea mays
  Coding DNA Sequence Number=SeqID_24412
MAAPEPEAKLEAVTPSRSYELPPESESDAPASTGTQELKPWEQHAAVINLPRYDYRASGSLLLRSHSGFLITCPITAYIASCNEWFMTPKSRYCQVIKFTSVVIRQKREKSATKEAIPILEESFLQRLNSSEPCDVKNAIKKRKLCSEASGSLEEAVTNGNSSSVSESIGSTGNTSSPQSKVNDNVDRASNLSLVKLSRSGLLFFKFPSGGVHVVEMLTEILHSLRSGKLKSPQWCHRIFPIQETCILSEEDLHATVSKLFLDFSRSKTNEDKPIKFAVAYNRRGIDETEKNSNEGSNQQTLMDREQCFKVVAAAVKSVAENSVVDLRSPEGICPRVREDPFRFL

SEQ ID NO: 66192 - protein, 126 aa, Zea mays
  Coding DNA Sequence Number=SeqID_24413
  Homolog annotation: Hit_ID=Q8S348; Match level="QueryCoverage=55%, HitCoverage=48%, E-value=2e-09, Identity=36%"; Hit description=Auxin- induced SAUR-like protein
  Pfam annotation: Domain name=Auxin_inducible; Domain location=1-93; Score=24.1; E_value=1e-07; Accession=PF02519.5; Description=Auxin responsive protein
  Subcellular localization annotation: CTP_CleavageSite=61; ConfidenceScore=5.25e-01
MGSLKLTEIVSKKWGVGGSSKVTSPSAAACPRGHFAAYTREGRRFFVPIAYLASDTFRELLSMAEEEFGEPGARPIVLPCSADRLEQILDAFRSGGGAKKKSAGTAGRIVKIWRPGVAGSTIANLP

SEQ ID NO: 66193 - protein, 112 aa, Zea mays
  Coding DNA Sequence Number=SeqID_24414
  Subcellular localization annotation: CTP_CleavageSite=13; ConfidenceScore=5.19e-01
MTGAWVHKAPFPPCMTYPCCPRRTAVVGLPATVVKVANRLTPPELARGRFEEELHVIGSVEPPQGEQSVVPEGVIGDFPKQQLSEGKCPLTHDVLLTLQFIVPHTMTNLRID

SEQ ID NO: 66194 - protein, 113 aa, Zea mays
  Coding DNA Sequence Number=SeqID_24415
MENHPGKQCYHKGGMFFNNFNFEKLLSADATVTSTVNNIWQHNRPGTGKKMAGLQCEVIKWQGRQAQGTIAQGQGFRVRLWWPAVIRDFFIPITVVSRQLNRHGSNWISFTWI

SEQ ID NO: 66195 - protein, 257 aa, Zea mays
  Coding DNA Sequence Number=SeqID_24416
  Subcellular localization annotation: CTP_CleavageSite=17; ConfidenceScore=5.20e-01
MTMVAAQATTQIFWRSRSQKDGSSYPSLVTPLVVVTSMTLDILLRRAFDQLTWSIEYHCVVYQHSHGTYPDCWEATCLVHRPKDDLRGAETYLDIMPSLRGTMLRLYNTFLRQQYLQISLRCMHSNAMYSSVVNFKIRYLTNYSTKNHGILLACLTVLTSCITPSFDWHYRECVSPVGEGNPRLSSTVNLVVMLNIELDHTLDKLSKAHAETQNYGLSAWSAATRRMVRLPPLGLDTLTVRRPVVIMLMAPWIAGPR

SEQ ID NO: 66196 - protein, 94 aa, Zea mays
  Coding DNA Sequence Number=SeqID_24417
MQPSWPNPSSWQCGTWLKHGPTAYYFAIQKQKEITEAKARQSQPKQLLLLRLASHRLPGHNFHLHRHYSLPIHETHEAQKTAEAQKVIPKGMQS

SEQ ID NO: 66197 - protein, 164 aa, Zea mays
  Coding DNA Sequence Number=SeqID_24418
MAERALCPGPIDDPPAKPTTPPERYSGKRPESPKGAIREIGHGESCLTSGQSLGRLGAVFGELDAGNAGVGLRRRLAARASWPRNPATCASAHALVHGDARRGRSWQGWPTTQREKRGTLGATARQLAIWVRETEREGERAGEVTGADRLVPLGSERGRARARD

SEQ ID NO: 66198 - protein, 543 aa, Zea mays
  Coding DNA Sequence Number=SeqID_24419
  Gene Ontology: Mol. function=calcium ion binding; Cellular component =mitochondrion; Biological process=protein amino acid dephosphorylatio n
  Homolog annotation: Hit_ID=Q7XDE0; Match level="QueryCoverage=95%, HitCoverage=97%, E-value=0.0, Identity=62%"; Hit description=EF hand family protein, expressed
  Pfam annotation: Domain name=efhand; Domain location=186-214; Score =10.5; E_value=0.94; Accession=PF00036.22; Description=EF hand
  Pfam annotation: Domain name=efhand; Domain location=326-354; Score =1.8; E_value=9.6; Accession=PF00036.22; Description=EF hand
  Pfam annotation: Domain name=efhand; Domain location=399-427; Score =8.3; E_value=1.7; Accession=PF00036.22; Description=EF hand
  Pfam module annotation: Pfam domain module=efhand::efhand::efhand; Domain location=186-214::326-354::399-427
MVEAPAPSDLSAAAQVSALSLQVDLLQLPPEVPAPGAPALRGVLDHLFAHWLSLPETAALLASLVHKAKASGAAAAGASMLPSMMLQGGAAVPPLSPRSPRLSRRPSSLGSGPPHRSASPLRPPAARSAKEVIPQFYFQDGRPPPYEVRKQCISTVDQLFAGHSNGLRAPEFRMVTRELCKLPTFFTTVLFDKIDKEGTGFVTREAFIVFWVNSNLMSMDSATQVFTILKQQNRNYLAKEDFKPILKDLLDNHPGLEFLKSTPEFQERYAETVVYRIFYCLNRIGSGQLTLRELKHGNLLSALRHADDEEDINKVLRYFSYEHFYVIYCKFWELDTDHDFFIDKENLIKYGNHALTYRIVDRIFSEVPRKFTSKVEGKMGYEDFVHFILSEEDKSSAPSQEYWFKCIDLDGNGILTHIELQFFFEEQLHRMECMAQEPVLFEDILCQLIDMIGPENDSYLTLKDFRRCKLSGHFFNILFNLNKFMAFEARDPFLIRQMREEPSLTDWDRFARREYVRLAMEEDGEDASNASGDVWDESLESPF

SEQ ID NO: 66199 - protein, 139 aa, Zea mays
  Coding DNA Sequence Number=SeqID_24420
MDNGMEKKHAMLRWGMGIKEIAADQDDLALSSYRDQGVRPTQLSLASDHGQKASRPIWRAHPNHGSPRLPGASPPASPHSADDFNCIVNFGARSADESFLEVSDGDDKISLGSHMFFSHVCHLDYAHQHGQRSNRQKFW

SEQ ID NO: 66200 - protein, 613 aa, Zea mays
  Coding DNA Sequence Number=SeqID_24421
  Homolog annotation: Hit_ID=Q10B16; Match level="QueryCoverage=83%, HitCoverage=81%, E-value=1e-110, Identity=48%"; Hit description =Expressed protein
  Pfam annotation: Domain name=X8; Domain location=423-507; Score =172.5; E_value=1e-48; Accession=PF07983.3; Description=X8 domain
MAAASCPVALAFFSSSCILLLLQTICCSGVFVELSYDSTQVKVQVLSTSVVTDGYRVMVTDKQRAYLFLKPFACRDKPCGSESTAGSFISDVLGPDRRLNVSGIVVTATGTRQLGALLRTLRSLQASLGDAGLAERVKVSPELSMSSLRVVGKDLARATKKRRWGKVLEFVRRTRSLVFVRVDTEAGANGEVVAVIEEAAAQVAAVLGADVGVVLHIKSRAVPSAAAMEKLTGRGEKRSLGVLVDVSFPRRDRELGEARATAHDEFSPVSNPATTPVSNPVTVPATNPVANPMSPGFVTVPSTNPGNGFASNTNLPPLYPEPTTAPVTMPTPDPTTTMPPPVTVPSPFANPVAAPTTTMPGTVTNPATTPSQFPPVTNPVTTYPYPQQGGMPGTTPEVYQPPATTTPGTAQQSAPSVTGQGQAWCVAKSGLMDAALQDGIDYACGAGGADCSAIQPMGTCYNPNTLQAHASYAFNSYFQRNPSATSCDFGGAGMLVNVNPSSGTCVYQTSAGFGAGYSPGTTTGGGGVPSGYTPGMPGAGYGAAGGGVSGTMGGGSGSTVLNANNPGGNSMYGGYDNTAGLTAGSAPLPCGGGGWAVLCLVWMVTFAFVKEKV

SEQ ID NO: 66201 - protein, 336 aa, Zea mays
  Coding DNA Sequence Number=SeqID_24422
  Gene Ontology: Mol. function=manganese ion binding; Cellular component=nucleus; Biological process=DNA repair
  Homolog annotation: Hit_ID=Q75LI2; Match level="QueryCoverage=82%, HitCoverage=58%, E-value=3e-99, Identity=68%"; Hit description=Flap endonuclease 1b
  Pfam annotation: Domain name=XPG_I; Domain location=184-275; Score =152.9; E_value=8.2e-43; Accession=PF00867.9; Description=XPG I-region
  Pfam annotation: Domain name=XPG_N; Domain location=1-145; Score =47.9; E_value=3.4e-11; Accession=PF00752.8; Description=XPG N -terminal domain
  Pfam module annotation: Pfam domain module=XPG_I::XPG_N; Domain location=184-275::1-145
MGIKGLTKLLAQHAPTAAVQRRVEDYRGRVIAVDASVSIYQFLAVVGRKGSELLTNEAGEITRQEILLALTVSSAGYVEPDDKNARSRDKARVSFLHSCGPCQLFEVSLLLLNVLSFYARFVFDGEPPEMKKKELAKRSLKRDDAIKDLNRAMEIGDENAIEKFSKRTVKVTGRHNDDCKRLLRLMGVPVVEAPGEAEAQCAALCENHQVYAVASEDMDTLTFGARRFLRHLTDLGYKKSPVTEFDVSKVLEELGLTMDQFIDLCILSGCDYCENIRVIWKRCTINRTKLQMMIHGCANHPIISDTDTDTGNKIVYVLGPRTVVTIGILLNFKPKK

SEQ ID NO: 66202 - protein, 75 aa, Zea mays
  Coding DNA Sequence Number=SeqID_24423
MAALASSKEADWNAMRLREKELAAVKINPADVEIIATYPQVHLNITCVQLDKKIAERTLREHKGDAVAAVRFLLR

SEQ ID NO: 66203 - protein, 189 aa, Zea mays
  Coding DNA Sequence Number=SeqID_24424
  Gene Ontology: Mol. function=hydrolase activity, acting on ester bonds
  Homolog annotation: Hit_ID=O81020; Match level="QueryCoverage=80%, HitCoverage=30%, E-value=4e-43, Identity=60%"; Hit description =Putative phospholipase C
PETFSAEDALIFLEAVDDFLHVEISLIHKPNGPQDTSQYEHSSIPATVKKLFNLHSNFLTKRDAWAGTFENYFKIRRTPRTDCPEKLPEVTKSLRPFGPKEDSSLSEFQVELIQLASQLNGDHVLNTYPDIGRTMTVGEANRYAEDAVARFLEAGRIALRAGANESALVTMRPALTSRASMSSGLSSEL

SEQ ID NO: 66204 - protein, 77 aa, Zea mays
  Coding DNA Sequence Number=SeqID_24425
MESALHFLSVYPEPKAEGESSSLPHRINSHPHPLNGGPQNLRREGVFGSSAFRSLGYFFADQARYEKQSSTAKGLLL

SEQ ID NO: 66205 - protein, 99 aa, Zea mays
  Coding DNA Sequence Number=SeqID_24426
  Homolog annotation: Hit_ID=Q69II6; Match level="QueryCoverage=76%, HitCoverage=13%, E-value=2e-21, Identity=60%"; Hit description =Putative beta-glucuronidase
  Subcellular localization annotation: CTP_CleavageSite=32; ConfidenceScore=5.10e-01
MAVGLPLKMAGFCVVWALFWLAGSATVSTSTTAFAGGEAMVVDSRSAVAVTDDDFVCAILDWWPPEKCDYGTCSWGQWRRTPENLGVANATKNKIDDIV

SEQ ID NO: 66206 - protein, 189 aa, Zea mays
  Coding DNA Sequence Number=SeqID_24427
MAAVAASRGTSAGDDDRLRNCMQPCKRLAWGRGLVATEAFNAIPVKYLYYFLIYLCYLRKKQNHNLWQASHMGTTENSFFAECLKHPAKPGKYSAMALPSVTLGKEVSINYTSAMASLSSTFCLALDKDFVECHSVLDKEKSSSRRQMTTTETVPSATVTLGKPSLFAEYLLCYLIYDYDAKIEVIPRR

SEQ ID NO: 66207 - protein, 238 aa, Zea mays
  Coding DNA Sequence Number=SeqID_24428
MKDNELIRDMYSHLDLIINELNSIGINKLGEVGTLRKIISLPPQRKYGSIIILHNLEGLSQMTLMLVIEKIMSFEMSCKMGQEEATSSTPYAFACDEKKKGKKKAPSSSSSRKKEEDDDDDEDDQASTSSSEDEETIRQVGQGIVSLTLTGKRKKDDALHVGRRATSGIIAQIWPNPKGGGAITRRLQASRLGIVLQAKMNLKGPVATSLHHALHAHHTNALWQEVTQVSHPLVIAIA

SEQ ID NO: 66208 - protein, 73 aa, Zea mays
  Coding DNA Sequence Number=SeqID_24429
MQNLGAPTKLTELTGPDLRLSQKIKRTACQCQGRSARSSTPESGADEADPTGSSLSVIERQTDRERCVKFVMA

SEQ ID NO: 66209 - protein, 52 aa, Zea mays
  Coding DNA Sequence Number=SeqID_24430
MAAASLLGQWGRQCRGRWMRGSRPRLDEKVSSDLNQKGRSSKDTKVDTVPKL

SEQ ID NO: 66210 - protein, 48 aa, Zea mays
  Coding DNA Sequence Number=SeqID_24431
MAMMGSTSEKMYLYQVRKQQTFAVFALRWCPRTNLNNEVVAGGCWPPF

SEQ ID NO: 66211 - protein, 159 aa, Zea mays
  Coding DNA Sequence Number=SeqID_24432
MGKNNKRKREPTPPSEDFGDTEYSEEEFSSESEGSPAPIPLRESSDDSYDSPGGLRRRSRLTSGPSSAPGSRARMSRSTPRTRRTRSRRTAAAMARTMTTTTTTKGCGGGDSGGRGGSSGSKDGDDGSSRSGGGSSRGSNRGRQRQRQQQGQWLDATGP

SEQ ID NO: 66212 - protein, 163 aa, Zea mays
  Coding DNA Sequence Number=SeqID_24433
MGLLTQALPPGPGGRTHDERDLGLRPHSERCCFGVEVRGRDGWRRERKGLSLTETDAGEKAQRKRKARHGAAANENSTTDPGIRIRYDRASAPASVTPAHPAQVRTPLRSEPDPLTWGEDTVAWSAPIPSLTPSSVTAAPSSPTPRLRICDRRFPAVCFNLGL

SEQ ID NO: 66213 - protein, 206 aa, Zea mays
  Coding DNA Sequence Number=SeqID_24434
  Gene Ontology: Mol. function=hydrolase activity; Biological process =metabolic process
  Homolog annotation: Hit_ID=Q67J04; Match level="QueryCoverage=29%, HitCoverage=21%, E-value=5e-10, Identity=50%"; Hit description =Putative PrMC3
  Subcellular localization annotation: CTP_CleavageSite=7; ConfidenceScore=5.18e-01
MARRTQRCAHVLNLPPRRRAAPRLQSPPPPHDLNRSARVNTVQLRVTGSWEAGGGYSFGRQKRAKLEATRVQIRSPASIWGLEAPRPAGDVASQLSGFLSSIPEIVARGDLASQCPGEKQIDCVERFDDTKSVPSSPNGNSTNGVASKDFATGISSRLYLPARVDPEKKLPIVVFFHDGAFMVHNASFPLYHIYIASVNVAVPASR

SEQ ID NO: 66214 - protein, 230 aa, Zea mays
  Coding DNA Sequence Number=SeqID_24435
MAIAVAAICIGQRVAADHAKVKDGSLWSPEGPTAPRSAGPRLSTLVRVILRLDNRVEKYLCTGGIIQNRGRLMRVPETEEVVTAASGQSRSGGHRASPLSPLFSCPGEKNERWCLQDLQGGGGSLAASDSAGEKALFKSGRGLPGAWPEGRWDALTTFGNGKFWPRSTCITLFGLHPGRRDPDRAAPARGPFVGLVAHIQRTGSPREKQGDIAIFEFSFETIWFTKENAA

SEQ ID NO: 66215 - protein, 115 aa, Zea mays; identical to SEQ ID NO: 42323
  Coding DNA Sequence Number=SeqID_24436

SEQ ID NO: 66216 - protein, 188 aa, Zea mays
  Coding DNA Sequence Number=SeqID_24437
MQEFNAQALLDATQYSSKKLLPDAMQHGRYQPLHDDSVKHVDQTHDDSVKHVDHTTMAGPPQWHCITAHRAIAGQSETADEFTDQPDDDDMFPLPFLPHDVISIEEVDVRGFLNYSLEDRSSPDRQPDDIEQGKNATPDTSHAFTTLKKKKVVLKKGMLFDDVDIAQDFYKEYAHNIGFSVRIGQQKI

SEQ ID NO: 66217 - protein, 208 aa, Zea mays
  Coding DNA Sequence Number=SeqID_24438
  Homolog annotation: Hit_ID=Q6BTJ4; Match level="QueryCoverage=71%, HitCoverage=31%, E-value=2e-11, Identity=30%"; Hit description =Similar to CA1621|CaIFF6 Candida albicans CaIFF6 unknown function
MDLPFIDVRRRPSSGVEAESEPWGRARRRPSSEVEVESEPWGRARRSPSSEVEVESEPWGWARPSPSSEVEAESEPWGRARRRPSSEVEVESEPWGRARRSSSSEVEVESEPWGRARRSPSSEVEVESEPWGRARQRPSFEAETGAEPWGQARRSFLWRPRLDLAAVGLTGTAVGAGQAALFSCQVSQWSGEVTAVTSALSTEERASG

SEQ ID NO: 66218 - protein, 349 aa, Zea mays
  Coding DNA Sequence Number=SeqID_24439
  Homolog annotation: Hit_ID=Q69K57; Match level="QueryCoverage=90%, HitCoverage=66%, E-value=1e-17, Identity=26%"; Hit description=Smr domain-containing protein-like
  Pfam annotation: Domain name=PAM2; Domain location=12-29; Score=25.7; E_value=0.00017; Accession=PF07145.5; Description=Ataxin-2 C-terminal region
MSIEERKISVISKSIALNPNAEEFVPSSLRSVNDSSKRSYATTVVSGISKESSTDKPESILRSNSDEEAHQYWQQQLPDDITPDFKVMGQDESPGPDSLSLTDLSINDGIGTSIFSPNQTLSMQHRASPFIRDKLNTHPKINLSIPTYMDERSQATILSPTAGSMSPNAAPWVKTLRNGGHYNTSIRDASQYNGDSSIGASLHNLTDAYHGSRRSLSSTMDIMNQLESKVDGRRSQNLRSLSFGNSSPTSPASYAQNGLGNYAGREHVSLDVPRGRYKTTSLPVPGLGSSRGYQLLGGSYNGNHDMISTNTPQNMAGIQTGPAWLESDAEGSALELQYYYIRSRIFIVR

SEQ ID NO: 66219 - protein, 36 aa, Zea mays
  Coding DNA Sequence Number=SeqID_24440
MGAVVMGLAVARASHVIRMPRNLGANKPARARTVSA

SEQ ID NO: 66220 - protein, 187 aa, Zea mays
  Coding DNA Sequence Number=SeqID_24441
  Subcellular localization annotation: CTP_CleavageSite=74; ConfidenceScore=5.68e-01
MATLPQRFKLLATRCAAGAPSPSRSPAPAYAGAASPGYRLRRRVRGTGATTSARRRGRLRRFLCRGREAGAETLAATRQEDDRKPLFGGRPGGGGRTLRDLFVASPEAGRRHSGCRCDCGEDEDDDEDGRAGGASADPGAGVGAWRVGRRFGSGGLRSLLMRRSWRPVLVAIPEGDGNKIELGAIEE

SEQ ID NO: 66221 - protein, 266 aa, Zea mays
  Coding DNA Sequence Number=SeqID_24442
  Homolog annotation: Hit_ID=Q6YYB0; Match level="QueryCoverage=47%, HitCoverage=60%, E-value=1e-49, Identity=76%"; Hit description =Putative p23 co-chaperone
  Pfam annotation: Domain name=CS; Domain location=66-140; Score=60.9; E_value=4.1e-15; Accession=PF04969.6; Description=CS domain
MRLAEPTWNLVTHLEMKSKRTPFGRKTLSNTPYRNPCGMPFHDLGTMYLLKLFRVLFGSPNVTRHPEVKWAQRIDKVYITVQLPDAKDAKVNLDPDGVFTFSGSAGTNLYELKLDLNDKVNVEASKISVGVRSIFCIVEKAEAKWWKKLVRDDQRAPHFVKVDWDKWVDEDDDGADINMDGMDFSNFGGMGGMGGMGGMGDMAGMGGLGGMGGMGGLGGMGGMGMDDFEDESDDEEEVSKPQAADKAVEAEETESAETKIEAAQSS

SEQ ID NO: 66222 - protein, 101 aa, Zea mays
  Coding DNA Sequence Number=SeqID_24443
MRQKETSPSNGYLTRQLKPTISMSTGQSGATHRIVRCPLEAESGQSRDTRLLHCAVSGVHRTVWCTRGQKAIRALQMELQRVLGLLGKNPLGAMEKYPSTL

SEQ ID NO: 66223 - protein, 81 aa, Zea mays
  Coding DNA Sequence Number=SeqID_24444
MEVVLVDGGRGWITAQQRRWKARTGRSALEDRPVGESDGWRSRRHRRSNVHCIMVASGVYKLMAADGAYIFGFFVSGFETL

SEQ ID NO: 66224 - protein, 95 aa, Zea mays
  Coding DNA Sequence Number=SeqID_24445
MSFTGYAPAVRPIKRLNRAVQVSMHSLYSHSSYSLRYYIYGRFSRCCHTSDAQIFFRPFVGEEYHKGVHLYTHVLYKDSSSRAFAAHIHSFMFVV

SEQ ID NO: 66225 - protein, 288 aa, Zea mays
  Coding DNA Sequence Number=SeqID_24446
  Gene Ontology: Mol. function=metalloendopeptidase activity; Cellular component=extracellular space; Biological process=proteolysis
  Homolog annotation: Hit_ID=Q7XIH2; Match level="QueryCoverage=84%, HitCoverage=28%, E-value=1e-112, Identity=70%"; Hit description =Putative insulin degrading enzyme
  Pfam annotation: Domain name=Peptidase_M16; Domain location=15-128; Score=30.8; E_value=1.8e-06; Accession=PF00675.10; Description =Insulinase (Peptidase family M16)
  Pfam annotation: Domain name=Peptidase_M16_C; Domain location=133 -286; Score=26.5; E_value=9.4e-05; Accession=PF05193.11; Description =Peptidase M16 inactive domain
  Pfam module annotation: Pfam domain module=Peptidase_M16::Peptidase _M16_C; Domain location=15-128::133-286
MELIPISSFQRRKARMLPLKNTLISMPPNVPGSKNDNTTEPLSLVFMDPHGGSTNAFTSSEHTNFYFDVNSDSLHDALDRFAQFFIKPLMSPDATLREIKAVDSENQKNLLSDPWRMSQLQKHLCAENHPYHKFSTDSLDNLQNLVENKFCDIRDVGRKPFSFPGHPCTPEHLQVLVKAVPIKQGHTLRILFPITPNIRCYKEGPCKYISHLIGHEGEGSLFYVLKKLGWAMSLEAGEGDWSHDFSFFCVVIQLTDVGQEHMEDTLGLLFRYIKLLQNSGTPKWIFDE

SEQ ID NO: 66226 - protein, 144 aa, Zea mays
  Coding DNA Sequence Number=SeqID_24447
  Pfam annotation: Domain name=PMEI; Domain location=33-135; Score=4.0; E_value=0.0068; Accession=PF04043.6; Description=Plant invertasepectin methylesterase inhibitor
  Subcellular localization annotation: CTP_CleavageSite=21; ConfidenceScore=5.35e-01
MARPCSSSSAAARLLLLFVAVAAALQATVVAPPVASGFIRKSCRATQYPSVCEHSLAAPRRGAKKGSAVAGPVRDCLENLADSVGHLRDAAQEIGGAGMDAKFWSCHPISILMGIETTKAYPNGSVSGSGISAVINESISSGVG

SEQ ID NO: 66227 - protein, 281 aa, Zea mays
  Coding DNA Sequence Number=SeqID_24448
  Homolog annotation: Hit_ID=Q5VNJ1; Match level="QueryCoverage=42%, HitCoverage=64%, E-value=2e-12, Identity=34%"; Hit description=DNA binding protein-like
MPNKPLSALTLQDRNAEVQIQIHRKWEFRGAVDNGPILHIDMILTDCTGNAIHCQIPSFLAATRGDEFQVGKIYKMTRFSVARAKSTYKPVDGDLMLYVTPYTTLELCHTSQSCFPLYVYHLTSYDKIDPDGSNARNFHGEVLLSGGATCHWYFNPSIEEAEAFYSRIESEKINIELPSLDKQEITPPSFPQREHHNLKYILSLNPHDVPDQGYECTMTRKLAYSPAKNKPETNLPDANRSRAPTTTIESPTKRSIILISESKGLQLSPRSSISIFAILCS

SEQ ID NO: 66228 - protein, 125 aa, Zea mays
  Coding DNA Sequence Number=SeqID_24449
MGGGGAALLLLVMWAGVASAAVYEVGGTIGWTVMGNPDYAAWASSKQIVIGDTVAAAAASAAKSLDTKQWIPVGAALPGRAALQAPQVQVGMGSRDAFLGVTHALSPSPNRQWGHRQRSNAQCAV

SEQ ID NO: 66229 - protein, 99 aa, Zea mays
  Coding DNA Sequence Number=SeqID_24450
  Gene Ontology: Cellular component=integral to membrane; Biological process=vesicle-mediated transport
  Homolog annotation: Hit_ID=Q69WS1; Match level="QueryCoverage=91%, HitCoverage=41%, E-value=2e-44, Identity=97%"; Hit description =Synaptobrevin-like protein
  Pfam annotation: Domain name=Synaptobrevin; Domain location=46-99; Score=23.2; E_value=0.00038; Accession=PF00957.11; Description =Synaptobrevin
MDRVKEDFTKRYGGGKAATAAANSLNREFGSKLKEHMQYCVDHPEEVSKLAKVKAQVSEVKGVMMENIEKVLDRGEKIELLVDKTENLRSQVFMEFLAL

SEQ ID NO: 66230 - protein, 140 aa, Zea mays
  Coding DNA Sequence Number=SeqID_24451
MDVHSRGPDCVAVVAGHLEFEELRREHISGGALTFGPSSVRPPSYRGSIAKEGSTGGGFLKEETTSNDDAGNVGPKHHHSSYADPWHLLLVARHDMSVSGQARDPLEWFPFGSPDPLSSSTMSDPRLGAVGFAWGWVLLG

SEQ ID NO: 66231 - protein, 296 aa, Zea mays
  Coding DNA Sequence Number=SeqID_24452
  Gene Ontology: Mol. function=catalytic activity; Cellular component =peroxisome; Biological process=metabolic process
  Homolog annotation: Hit_ID=Q2I824; Match level="QueryCoverage=93%, HitCoverage=42%, E-value=1e-124, Identity=75%"; Hit description=ACS -like protein
  Pfam annotation: Domain name=AMP-binding; Domain location=29-296; Score=-99.1; E_value=0.0021; Accession=PF00501.18; Description=AMP -binding enzyme
MAVEKYPNNRMLGHREIVDGKAGAYTWKTYKEVFDIANKIGNSIRSCGLAKGSRCGIYGANCPEWIITMEACNAHGIYCVPLYDTLGAGAVEFILCHAEVEIAFAEEKKIDLLVKTLPKSNEFLKTIISFGKVTQEQKGEVQKYGLSIYSWDEFLSLAADQEFDLPVKEKADICTIMYTSGTTGDPKGVLISNASIICLIAGVDRLLNYVNEELAESDVYMSYLPLAHIFDRVVEELFIFHGASIGFWQGDVKLLVEDIGVLKPTIMCAVPRVLDRIFSEWSLNMGMGMGKLLEIA

SEQ ID NO: 66232 - protein, 55 aa, Zea mays
  Coding DNA Sequence Number=SeqID_24453
MAGGNALAGAKERGLAGEEAKPTQAADWGFATKKELELVIFLELLEVIHVASITF

SEQ ID NO: 66233 - protein, 46 aa, Zea mays
  Coding DNA Sequence Number=SeqID_24454
MAMMGSTLEKMYLYQVRKRQTFVASVQRWYPKKRTKTRAAGGKALR

SEQ ID NO: 66234 - protein, 105 aa, Zea mays
  Coding DNA Sequence Number=SeqID_24455
MADPALASIKPGAAGQIVTMREQGKWRGAPLAEAQGRAASQTPPPAEVRRKSPTAPAPGVDAPAPRAGGSVVSPGDSTVLSPCGAVDAPQGEKARKGSPTYVQCI

SEQ ID NO: 66235 - protein, 59 aa, Zea mays
  Coding DNA Sequence Number=SeqID_24456
MGRNKLGRGPRPSLSFKDVYHPCWGGGRGELRLYLPLRWQPISVSDRQYLLTTCSKNAQ

SEQ ID NO: 66236 - protein, 402 aa, Zea mays
  Coding DNA Sequence Number=SeqID_24457
  Gene Ontology: Mol. function=hydrolase activity; Cellular component =nucleus; Biological process=carbohydrate metabolic process
  Homolog annotation: Hit_ID=O82734; Match level="QueryCoverage=77%, HitCoverage=90%, E-value=1e-130, Identity=70%"; Hit description =Serine/threonine-protein phosphatase PP1 isozyme 8
  Pfam annotation: Domain name=Metallophos; Domain location=70-265; Score=143.3; E_value=6.4e-40; Accession=PF00149.18; Description =Calcineurin-like phosphoesterase
MGVMDAAAVDEVVRRLVEGGRGGRQVQMSEAEIRQLCVEAKQVLLSQPNLLRIHAPVKICGCLEWMIKNDRVHSSGDIHGQFVDLLRLFDLGGYPPTSTYIFLGDYVDRGKQSLETICLLLAYKLKYPDNIYLLRGNHEDAKINRVYGFYDECKRRFNVRLWKIFCDCFNCLPMAALIDDKILCMHGGLSPELTSLDQIKDIERPTEIPDYGLLCDLLWSDPSHDTEGWGESDRGVSSTFGADKPVEFLEKNDLDLVCRAHQVVEDGYEFFAERRLVTIFSAPNYCGEFDNAGALLSIDESLMCSFQILKPNETGAPHSRKPLPSKFILMSLAYVLKSVCFLFPCFFLRLSCWTDIKFMVLIRQGIQICIRDEVFLFPTSQTVVGPLKTFLSNTQESCASFH

SEQ ID NO: 66237 - protein, 56 aa, Zea mays
  Coding DNA Sequence Number=SeqID_24458
MAARSGLRSSVQLRERAPLARENSRGSGEQGGLATNINLLLIDGFEMLHFNDVALI

SEQ ID NO: 66238 - protein, 132 aa, Zea mays
  Coding DNA Sequence Number=SeqID_24459
MGRVLTSSANSETLGEQRGCDGTSGRRAVGLRLRKKRSGERGPGKPERGRANQRVSRVADGKAELTEATDGARARRRSQNGQQSTVGSGGALWSRAQSEREGEKVRLRAQMSRGRWESRARGSKGAGTCGGG

SEQ ID NO: 66239 - protein, 336 aa, Zea mays
  Coding DNA Sequence Number=SeqID_24460
  Gene Ontology: Mol. function=amino acid binding; Biological process =metabolic process
  Homolog annotation: Hit_ID=O80644; Match level="QueryCoverage=98%, HitCoverage=69%, E-value=1e-82, Identity=53%"; Hit description =Expressed protein
VTHILSDLELIIHRVKVSTTPDGRVVDLFFITDGMELLHKKERQEETCSTLIAALGPSISCEVLSAEGFQQGFSSLAPKIAEELFRVELAGDGEMCSSSLISAELKKVQTATINFDNSLSPAHTLVQIICADQKGLIYDILRTMKDCNIQVAAVVVYTYSSQNGRNSACLSAATSYTRCTALQIFYGRFRSDKKGGRPGSKGCREVDLFVKQVDGKKVTDPEKQDALRARLRSEMLHPLRVMVVSRGPDTELLVANPVELCGKGRPRVFYDATLALKALGVCIFSAEIGRQAASERQWEVYRFLLDDSREFPLTNSLANRNRVVDRVRKTLMGCYN

SEQ ID NO: 66240 - protein, 260 aa, Zea mays
  Coding DNA Sequence Number=SeqID_24461
  Subcellular localization annotation: CTP_CleavageSite=40; ConfidenceScore=5.30e-01
MCPLRCVLNRRGPSTPPPLSVLRPTTFNHRGFPDEGDRTAARTRRAGCAPSFASSTVAFVNPDLKTERGFAALYTNKGPTAASAAAKPLLLACTAIEWRRRDGVRPGQGGKLKLFISGISWETINDGQEAERALLCLRRGTMLVTIAGACTRGAGTSFAASGTSFSIYIWHLFQYRNFNNWLSVMNFISRLLFKGLGAFKFRLWDVKQELTFCQPFVCTISTSRQLEAKRDLVAGVVYGTDFFTKRKIQDSRGILIGQIE

SEQ ID NO: 66241 - protein, 336 aa, Zea mays
  Coding DNA Sequence Number=SeqID_24462
  Gene Ontology: Mol. function=solute:hydrogen antiporter activity; Cellular component=integral to membrane; Biological process =regulation of pH
  Homolog annotation: Hit_ID=Q75L14; Match level="QueryCoverage=24%, HitCoverage=11%, E-value=2e-33, Identity=91%"; Hit description =Putative Na+/H+ antiporter
  Pfam annotation: Domain name=Usp; Domain location=136-304; Score =14.9; E_value=0.034; Accession=PF00582.16; Description=Universal stress protein family
MELRVLACIHGGQDVPAVINLIETIRGHTQPRRLVKLYILRMVELTERTSSILMARAARRNGLPFLRPRRAGEPHDQVDVAFDTATRGGRATTSRTSGPSGAPVNRRILREAPCSVAVLVDRGFGGGEQVSSEQVAHGVCVVFFGGPDDREALELAGRMAEHPGVQVTVVRFVDGKAGSEEQSEVTLRPSHTKNADRSYTFSTAVVDAGKEKELDEAAVAEFRQRMGSLVRFEERVVVGNVIEEVVSIGKSREYGLVVVGKGRLPSAMVAQLAVVPAEHPELGPIGDALASSGHGVTSSVLVVQQHDMSNADEVPVSVVVDGRPQDGEFAKDMAEP

SEQ ID NO: 66242 - protein, 443 aa, Zea mays
  Coding DNA Sequence Number=SeqID_24463
  Gene Ontology: Mol. function=solute:hydrogen antiporter activity; Cellular component=integral to membrane; Biological process =regulation of pH
  Homolog annotation: Hit_ID=Q75L14; Match level="QueryCoverage=90%, HitCoverage=57%, E-value=1e-134, Identity=66%"; Hit description =Putative Na+/H+ antiporter
  Pfam annotation: Domain name=Na_H_Exchanger; Domain location=29-442; Score=220.0; E_value=5.4e-63; Accession=PF00999.11; Description =Sodiumhydrogen exchanger family
MAAVKTSSNGVWQGDDPLHFAFPLLILQALLILVLSRLLAFLLRPLRQPKVIAEIVAGILLGPSALGRNKAYLRALFPPWSAPVLESVASLGLLFFLFLVGLELDLRSVRRSGRRAFAIAAAGISLPFACGVGVAFVLRAAVPGADQAGYAPFLVFMGVALSITAFPVMARILAELKLLTTPIGETALAAAAFNDVAAWVLLALAVAISGSGDAAGTSQQQQHRSPVVSVWVLLCGAAFVAAWMVAVKPAMAWVARRADAAGDSSEAWVAVTLAGVLASGFATDVIGIHAIFGAFVFGLTVPKEGGFAARVTARVEDIVSELLLPLYFASSGLKTDVATVRGGEAWAMLALVIGTACAGKIVGTFGVAMACGMGAREALVLGVVMNTKGLVELIVLNIGRERKPPTLPTCMHAWSRVIRRHASAAQELASSSSAAHHGPWQLC

SEQ ID NO: 66243 - protein, 36 aa, Zea mays
  Coding DNA Sequence Number=SeqID_24464
MVRPNLQGGRSDFHGAELGPRGVASEWRRTSGFRAH

SEQ ID NO: 66244 - protein, 278 aa, Zea mays
  Coding DNA Sequence Number=SeqID_24465
  Gene Ontology: Mol. function=protein binding; Biological process =ubiquitin cycle
  Homolog annotation: Hit_ID=Q6EP91; Match level="QueryCoverage=59%, HitCoverage=57%, E-value=1e-49, Identity=57%"; Hit description=F-box protein-like
  Pfam annotation: Domain name=F-box; Domain location=69-116; Score =31.3; E_value=3.5e-06; Accession=PF00646.23; Description=F-box domain
  Subcellular localization annotation: CTP_CleavageSite=28; ConfidenceScore=5.05e-01
MRGVLPQEISAAISPLRPAAATSRNLGRDSAYPSRRRHNRPQPRERDPQIERPSPIDFCAPRARGGDGTVLSDLLENCVAEVLLRLDPLEICRMARLSRMFRGAASGDGVWESKLLTNYARLLAVAAAGDGEAGQAVGSAPKAEPLPKKELYARLCRRNRFDDGKKEFWLDKGGGGLCMSISSRALSITGIDDRRYWNFIPSDESRFRTVAYLSQIWWFEVRGEVEFFFPESTENWTVSKERNELKNECIALKKDRTKKDLEIKAKEAEIQNMKKANV

SEQ ID NO: 66245 - protein, 70 aa, Zea mays
  Coding DNA Sequence Number=SeqID_24466
MATLQRLQWARLAREAATGHGSGAARQGTQRLLQGRGQQQRGEERLPQRWRIGRAHWDPVAGGKWQRWAS

SEQ ID NO: 66246 - protein, 140 aa, Zea mays
  Coding DNA Sequence Number=SeqID_24467
MPTPLVDIPPLRMVLASKREPKTKKCHEAPNFIKKKGKAPMASSSHSSHFSKNHAYIYANVRNVRDVHHNGDDVMHHNDVYASHAMIASSSSSNAHGRSRSNVSHMLKARNASYVLYCKSGRVVAANVRLKCKNGAIIET

SEQ ID NO: 66247 - protein, 133 aa, Zea mays
  Coding DNA Sequence Number=SeqID_24468
MNTERRYPRCVVEAQVRRQILGHGLGDYESDLTEHDQGRKGGTEDMNLTGGRRVDTLAPTHGGSTRGDAWHSLSPRGMDDGVQARWRNGERLCEVVTYSHPRPRSRRGIDPPSKLRTRDPQVMLRVVIARCPR

SEQ ID NO: 66248 - protein, 123 aa, Zea mays
  Coding DNA Sequence Number=SeqID_24469
MASASMGESGEGEIDMLKLLNARWRMVGWARGFGAASWCGARTRGAVARAWGCSAARWTGRVRRWRQGLAWLRSVLPGRGERDARGRGEDEVGSGDKDIGDTRALGEDEVGSGDKDIGDDSTS

SEQ ID NO: 66249 - protein, 101 aa, Zea mays
  Coding DNA Sequence Number=SeqID_24470
  Pfam annotation: Domain name=zf-CCHC; Domain location=63-80; Score =13.2; E_value=0.0066; Accession=PF00098.13; Description=Zinc knuckle
MRTNKAQLPYDDHERALKLLHALYGFGEEQVESLGDEELALVASRFTQFHNNRLNELCGRSKDGCYNYGEPDHFIASFPKINGKPEAGKLSHPVLGAKPNA

SEQ ID NO: 66250 - protein, 231 aa, Zea mays
  Coding DNA Sequence Number=SeqID_24471
MCKYLSAEELLEAICNQRKGREAQVKRFSADEQGKQTDNSSCLVQTGSSSRSRNWMMNRIREGEIKGGEEIGRRGPGREMRGWSGGLPGGGGGRWQFVRVGGAQPLTVAAARLGLLCSCAGAGVTKYSEGHTGKLSALQSILLIPRICIRAVSLSDTDTSSLGSILVKESQNHAAPRTMDALFARMKAQRMRTAPQQQANPASGRDFNQQRRVQQQQRRGRAYGGRVVGNQ

SEQ ID NO: 66251 - protein, 84 aa, Zea mays
  Coding DNA Sequence Number=SeqID_24472
MALPAGGESPSKPCFLPSASELLELDIEDGRLASPLGLKRSGGCHGSELVSFVLTQVHGRQPWPSLSVNIVQAPGTPALSPAGR

SEQ ID NO: 66252 - protein, 88 aa, Zea mays
  Coding DNA Sequence Number=SeqID_24473
MANILKVVLKPLKVASPMAPKIIETPFSTPISESLTIGLKVDAIPKTSLDMDKASASKVYTITDAIREKEQENAEVFKAKGSIEEKTS

SEQ ID NO: 66253 - protein, 292 aa, Zea mays
  Coding DNA Sequence Number=SeqID_24474
  Pfam annotation: Domain name=zf-DNL; Domain location=1-64; Score =22.6; E_value=4.6e-06; Accession=PF05180.3; Description=DNL zinc finger
MRVAFACSVCGQRTTKAINPHAYTDGTMFVQLFNATLVLPIFLCSNVWLAKRIWQSLIFDSIPYDLEKVFQARILDAFYCYFVSVFTDFVFSYANNHLIAFCHATPVLENLKIACLTSQTCCCGEVREFIYSDNGTVTMIQSISNELKDNKGQHEICCSKIETIKAIVLCLFKFFGSKFIGPILTSESQKKCLSFGQLASDMILSVVAWSRVWKMSRRNVVAIDPIQVYYVEGILEQLAFVEESKRKEDWVVRNQERRAAKRNRIRDEHKVVVRQPKDSPPRSTTGSVTSCG

SEQ ID NO: 66254 - protein, 73 aa, Zea mays
  Coding DNA Sequence Number=SeqID_24475
MAALTTSPITASCPCNTEASGESARRDEIRENEEWALMLSIPALASTSMAYKIWTRSMEENVPIGPSPEVMSK

SEQ ID NO: 66255 - protein, 143 aa, Zea mays
  Coding DNA Sequence Number=SeqID_24476
  Gene Ontology: Mol. function=sugar binding
  Homolog annotation: Hit_ID=Q2QNA3; Match level="QueryCoverage=54%, HitCoverage=9%, E-value=3e-10, Identity=45%"; Hit description=GRAS family transcription factor containing protein, expressed
MSLDFKLILDEFNQRFDKIETRWYQRFLPSVYLDLPPTPLDVNHSSFDASASVPPTPAMVDSYAPDPATQFVGFDFDPVSFFSNGTNSDLMSPAFLKGREEANKFLPSQDKHVIDLDPPEYSNRFILPTTSTNELSICPLKVT

SEQ ID NO: 66256 - protein, 178 aa, Zea mays
  Coding DNA Sequence Number=SeqID_24477
MVKNFGSKTVQIAMNAVHLRASLQQPAPSCVISDPEEPPQEASTCGDRAVSATSSCYITCVPSEPTLSIIASYSGNTKSLASALFLVASTSTIADEIITVAKEIVNDSISTIVASLAIDVALSDLVIDAPTKCLREFLSTYVNVQASVYAAEGPLTSPPTHASPGTPTLSLHTSSLKS

SEQ ID NO: 66257 - protein, 165 aa, Zea mays
  Coding DNA Sequence Number=SeqID_24478
  Subcellular localization annotation: CTP_CleavageSite=3; ConfidenceScore=5.12e-01
MARCAQRPAAGVSRLARPTPWRGTRCPTQPALRAAGGLCPCWCGSLCGSPAATRRPKCGHGALVQQCPSEAPRSSPLHTAIRPVVAASPMVAHARAGNCRGASDPPVASASPGESKVVSPRARGQQPLPSPSHASPRLSQPGHGPKELDAKPLLSCSSLPSSSLG

SEQ ID NO: 66258 - protein, 102 aa, Zea mays
  Coding DNA Sequence Number=SeqID_24479
  Subcellular localization annotation: CTP_CleavageSite=34; ConfidenceScore=5.27e-01
MARRAQRPAAGMARLARPTPRRGPPCVRPVAYVRVGTAWWLGVVARRGSLRGSPAATQRLKRDHGALVQQCPGCLWCNLCSGKEGGVEADIQEFQDFDEFED

SEQ ID NO: 66259 - protein, 139 aa, Zea mays
  Coding DNA Sequence Number=SeqID_24480
MGKSKKGRSSSHHSGDKRKREPTPPSEDFGDSEYSEEEFSSESEGSPVHASPPASSDDADDSQGIVAEVWTYIWAVERSGLKGSNESEVSLDEENSSDSFEEGSGGDDGDKGDGDDDGDGDGGKGDGNDGNGDGKGGSG

SEQ ID NO: 66260 - protein, 188 aa, Zea mays
  Coding DNA Sequence Number=SeqID_24481
  Gene Ontology: Mol. function=phosphogluconate dehydrogenase (decarboxylating) activity; Cellular component=mitochondrion; Biological process=valine metabolic process
  Homolog annotation: Hit_ID=Q653U8; Match level="QueryCoverage=92%, HitCoverage=57%, E-value=1e-67, Identity=82%"; Hit description =Putative 3-hydroxyisobutyrate dehydrogenase, mitochondrial
  Pfam annotation: Domain name=NAD_binding_2; Domain location=15-170; Score=74.5; E_value=3.3e-19; Accession=PF03446.5; Description=NAD binding domain of 6-phosphogluconate dehydrogenase
MGPELPPGFLFCCSSVSAGGDYPYPRNENSMKKFSEDGIPTKQSPLEVSESSDVIITMLPSSTHVLEVYNGPNGLLCRGERLGPWLYIDSSTVDPQTSRKISTAISRCLLKEKKGYAESPKILDAPVSGGVPAAEAGKLTFMVGGLEEAYLAAKPLLQAMGEKTIYCGGAGNGSASFFNLHSSQKFSV

SEQ ID NO: 66261 - protein, 88 aa, Zea mays
  Coding DNA Sequence Number=SeqID_24482
MTLGWAAKRSAPRSHQRARREMHVEMGMRFVGREEMRKIVRGGGMGMAEHRMAVGNGNGLCGEGRQCGERGMGMGMAEHGMAAYPLPP

SEQ ID NO: 66262 - protein, 102 aa, Zea mays
  Coding DNA Sequence Number=SeqID_24483
MSGAQAEHPTNWPLSGFSGSHSAIIHQTVQCASDMSVEPTEQRSTAPNSRLQCQMNSDQCASQKSEQRSQNALDCPVCHQTVRCRKRTKDSNGQPLQTPMVY

SEQ ID NO: 66263 - protein, 262 aa, Zea mays
  Coding DNA Sequence Number=SeqID_24484
  Gene Ontology: Mol. function=kinase activity
  Homolog annotation: Hit_ID=Q8SA97; Match level="QueryCoverage=44%, HitCoverage=18%, E-value=8e-10, Identity=55%"; Hit description =Ornithine carbamoyltransferase
MNLFVRQITSRASVLENRSNANKSNVDMILIQGLGLGLSPGRRRTPLRPTQGSDSGSAPEDDELCAARPRARTRAQPQKTTNSAPPDPGLGLGLSPRRRRTPLRPTQGSDSGSAPEDDELRAARPRARTWAQPQKATNSAPPDPGLGLGLKSRKTANSATPDPGLGLGLSPGRRRTPLRPTQGSDSGSAPEDDELRAARPGARTWAQPQKTTNSAPPDPRAQTTPRPQPTVSASPDPGARTRPRPRKTDSTSASEELPHRPT

SEQ ID NO: 66264 - protein, 191 aa, Zea mays
  Coding DNA Sequence Number=SeqID_24485
MVPLRTASAHGALWCRLVVLALPFAVDDVGVEGLLRDVVCNGSLAFLLRQECRLRCVVDGNNGLRIWYLGGASRECFVVAQTVGAKCWNLQTHGLASSNGGRVINGLMTLNAIFWGNSVFLRPPQWHSLGHDATPVVSTGRTPGRAHMISPPVSLDLHKFSANVFPGCQQYMGIPYMAFMPKFLTDAQTHP

SEQ ID NO: 66265 - protein, 91 aa, Zea mays
  Coding DNA Sequence Number=SeqID_24486
MWQSSVVPIVPVGSVLTREHVGPTLRRREGSSAQTIKTTDQTKDGGKKSFEVPSAREKVKETRNPKPGVKKKTCKVKVDRVKSYGASRITA

SEQ ID NO: 66266 - protein, 257 aa, Zea mays
  Coding DNA Sequence Number=SeqID_24487
  Subcellular localization annotation: CTP_CleavageSite=62; ConfidenceScore=5.67e-01
MGRPGRPSRPPARAPVGPKRPSRPSPPPSPPKITLPAGPARHSLSVSPYPNHRRRRGAALPRHGEAPSPPSPFHARRRRSPASRPAPGPAPALATRPPGSPASRSAAQATRPAPTSLGPRRATPRRPRAAPAGPPPPRARPPRRARPRPRAAPASPSRRPLGELPPPRPGSAAPRHVCLRRARPRLVPDTQRPRSPRDQDVLSPTPGGSSHYSRLRRPGRCVSVATLVLRASPDYTTECLARVEDGPSASSSRPVSM

SEQ ID NO: 66267 - protein, 93 aa, Zea mays
  Coding DNA Sequence Number=SeqID_24488
MAYKMKGVFKGLKVISQIFDLDEPRDISPFGIFPESGGQETARRYPDIPKPPRKSRRKKSKNNSPRASSRSRSRSSSSSTADSFGVKDMQAEI

SEQ ID NO: 66268 - protein, 81 aa, Zea mays
  Coding DNA Sequence Number=SeqID_24489
MASVKACHWPTTEMAEWEVPKVQHKPIKGSKLGFKKKRAKETEGCPGLAHRTVFGVPGWINSNFPPSGFWKSHSAIIHQTV

SEQ ID NO: 66269 - protein, 73 aa, Zea mays
  Coding DNA Sequence Number=SeqID_24490
MTMLINNVLDQGACVKLVVHREKSGELGIGVDLNMFRREQKYLQGNIPLHYRFYWFPGGSKWMRPGLGQGGIT

SEQ ID NO: 66270 - protein, 48 aa, Zea mays
  Coding DNA Sequence Number=SeqID_24491
MALLLGWPPGCLGAGRGRLWPVPHCSNAGGGKNKMSMDAVEKSLGSRK

SEQ ID NO: 66271 - protein, 69 aa, Zea mays
  Coding DNA Sequence Number=SeqID_24492
  Subcellular localization annotation: CTP_CleavageSite=36; ConfidenceScore=5.13e-01
MVEPPRIGFEDDPTVDPSTGTFSSRFFSQALNPTIRIARVGRGGVVDGSLQRKRSRRGLSDFVSETNQQ

SEQ ID NO: 66272 - protein, 140 aa, Zea mays
  Coding DNA Sequence Number=SeqID_24493
  Subcellular localization annotation: CTP_CleavageSite=26; ConfidenceScore=5.21e-01
MAQLAREQPCGPFARLAQRRAHPSPWAAAVRPTPAVCDSVSLKRAADTFSLLSVSGSVSSNTPHPTPHAVYDTWGPPAGARARERAAERREKAWKWGVWVHAVRFTEPDTEPAGLMNSVLDSAKYGYGAACGVLLELVLV

SEQ ID NO: 66273 - protein, 95 aa, Zea mays
  Coding DNA Sequence Number=SeqID_24494
  Subcellular localization annotation: CTP_CleavageSite=5; ConfidenceScore=5.11e-01
TPRTRACMGAELPLASRPSAQPRGDRGAASRTLGVWDTVAAKAAALSPQRVTVAELRFNYRVVLYKRGPGQVVDLALESPLPSMRERGLNSCLAG

SEQ ID NO: 66274 - protein, 326 aa, Zea mays
  Coding DNA Sequence Number=SeqID_24495
  Gene Ontology: Mol. function=RNA-directed DNA polymerase activity; Cellular component=intracellular; Biological process=RNA-dependent DNA replication
  Homolog annotation: Hit_ID=UPI00004C1733; Match level="QueryCoverage =99%, HitCoverage=24%, E-value=1e-174, Identity=92%"; Hit description= UPI00004C1733 related cluster
  Pfam annotation: Domain name=RVT_1; Domain location=56-225; Score =135.9; E_value=1.1e-37; Accession=PF00078.17; Description=Reverse transcriptase (RNA-dependent
MPGIPRDVAEHSLDIRARARPVKQPLRRFDEEKRRAIGEEIHKLMAAGFIKEVFHPEWLANPVLVKKKGGKWRMCVDYTGLNKACPKVPYPLPRIDQIMDSTAGCETLSFLDAYSGYHQIRMKESDQLATSFMTPFSMYCYIIMPFGLRNAGATYQRCMNHVFGEHIARTVEAYVDDIVVKTRKAFDLLSDLETTFKCLKAKGVKLNPEKCVFGVPRGMLLGFIVSERGIEANPEKIAATTNMGPIKGLIGVQRVMGCLAALSRFISRLGERGVPLYRLLRKTERFTWTPEAEEALGNLKALLTSAPILVPPAAGEALLIYVAATT

SEQ ID NO: 66275 - protein, 590 aa, Zea mays
  Coding DNA Sequence Number=SeqID_24496
MDDAWSWLASLPPPLRDEDGPDTPLPAPWSLPLAASTDGASIVLRADTSPAASSSPADGDDGDGEPALLVAFSVAINGAGGDARALWASEGFAASSPVAPRVQLLVQLLNEVLALSPYVPCLGAGVDGLGGDASEAKVDAETVSAVVGAAEAGPSAPGAAFFSLALLLRLFWLCATDAPADAGYLYFRDLGSEIERGLGECRPALAVFLRSVGPDVEDRFMRSLGYMLAKWCLLREIQAVAGSAAKLEAPRRRRALPAACLSYATEVHGLLILKGYAPVLAMPRVTGPASTSIAASPHELPEEPALRYGLAHQQLEAVAQLEYAARVRDRRFVTVSVRVDNVRVRVAPLAFRSNDGGGNDGEEAEDDDDAGVDDIMDGESHFPSRIRLWVGPRFGASYATGPSLGRSTGNPERDVEMTRTVKGAFSGATKPANGGVVPRIKAKMRSSARTRSRSWRWEQEAEGSAGVFEGVLYDPVTGTEVSAWRPAGTGGGGGTGATDPRNGMRRRYGGPGRAFSKMRGLVVAGDELPEEMTWRVGREAEGRTLRWRLGLKAWVTYLPNEARSRHFETRCIEWAHEVDLPLLAVDGDQS

SEQ ID NO: 66276 - protein, 429 aa, Zea mays
  Coding DNA Sequence Number=SeqID_24497
  Gene Ontology: Mol. function=ATP-dependent helicase activity; Cellular component=nucleus; Biological process=rRNA processing
  Homolog annotation: Hit_ID=Q6H601; Match level="QueryCoverage=50%, HitCoverage=66%, E-value=3e-99, Identity=81%"; Hit description =Putative RNA helicase RH22
  Pfam annotation: Domain name=DEAD; Domain location=104-361; Score =93.8; E_value=5.1e-25; Accession=PF00270.19; Description=DEADDEAH box helicase
  Subcellular localization annotation: CTP_CleavageSite=59; ConfidenceScore=5.31e-01
MALHHLRLAPLALLRAASLPPLASSRIAARGHRRVLLFAPPSWPWRLLSPGARPRALATAAAEADDATSGSGNEFFAESTSWASLGVSERLASALCSAGLSRPSLVQATCIPHVLMANDVIVAAETGSGKTHGYLVPLIEKLCSKSSTTKDDNCQDTTPGAHDMVLVLCPNVMLCEQVVRMANSLLDESGKPLKRAAAVCGPNGWPAVHPDILVATPAALLNYLFDYDPEKRRRERFMRNVKFVVFDEADMLLCGSFENQVIRLINMLRFDEKLLSRAQDSGKDISLGSDDEYHEDSKFETAEFGSSDKEIEDNIVEDRLVKLENSHVGAHKDWRRVRKIYRRSKQYVFVAATLPQSGKKTAGGVLQRMFPDAVWVSGTYLHRHNPRSVKESVGSAPDSVPVDSTLTLWQIQSAEQSLARTVTTGRISG

SEQ ID NO: 66277 - protein, 49 aa, Zea mays
  Coding DNA Sequence Number=SeqID_24498
  Gene Ontology: Mol. function=ATP-dependent helicase activity
  Homolog annotation: Hit_ID=Q944S1; Match level="QueryCoverage=96%, HitCoverage=10%, E-value=3e-13, Identity=89%"; Hit description=DEAD -box ATP-dependent RNA helicase 22
MVVCLYALMLLPVGLMFQMFLMSFRVGRTARAGQSGIVTSLYTEANRDL

SEQ ID NO: 66278 - protein, 544 aa, Zea mays
  Coding DNA Sequence Number=SeqID_24499
  Gene Ontology: Mol. function=ubiquitin-protein ligase activity; Cellular component=ubiquitin ligase complex; Biological process =protein ubiquitination
  Homolog annotation: Hit_ID=Q6H593; Match level="QueryCoverage=99%, HitCoverage=100%, E-value=1e-104, Identity=71%"; Hit description=Arm repeat-containing protein-like
  Pfam annotation: Domain name=Arm; Domain location=268-308; Score =11.3; E_value=0.47; Accession=PF00514.13; Description=Armadillobeta -catenin-like repeat
  Pfam annotation: Domain name=Arm; Domain location=309-351; Score =28.2; E_value=3e-05; Accession=PF00514.13; Description=Armadillobeta- catenin-like repeat
  Pfam annotation: Domain name=U-box; Domain location=48-120; Score =43.6; E_value=6.5e-10; Accession=PF04564.6; Description=U-box domain
  Pfam module annotation: Pfam domain module=Arm::Arm::U-box; Domain location=268-308::309-351::48-120
  Subcellular localization annotation: CTP_CleavageSite=45; ConfidenceScore=5.48e-01
MGAARPRRWKLPFHRTVSAVGGGGGAPCSPSSRSSSSPARSEAWAAEAVPEEFLCPISGALMADPVILPSGKTFERACLQACAELAFLPPGVEAGDADTVIPNSALKGGHLHLVRALRTGGAGVARPPRRARQAVQRAMPPAAAKSVRTTTTRRAVVMAASTSNSSTSSYGSASEITAAEDEAKAKEEAPRRRTVKEAEVEPAAAPPADPLEDDVVGKVMDADDDGLFAAAMGALREATREGEERRRALCTPRLLGALRRVLLLPRHAAARVDAVARTVPALVEVLRSGASAPEAREHAAGALFGLALNEDNRAAIGVLGAVPPLLDLLTSPTHAPRARRDAGMALYHLTLAAVNQSKVARFPGAPKALLAVASGAAEPGPIRRLALMVACNVAACAEGRNALMDAGGVASVSGILLSPSHDTTNGGGGTADLEEWCLSAMYAMSRGSLRFRGLALASGADRALRRVVADEGGGVRREIARKTLRAMRSDLDEDGGEYNDLTGSSAECGDGEDCGGSIVSDGLMSFRRRQRELGVSSCGNTAEF

SEQ ID NO: 66279 - protein, 186 aa, Zea mays
  Coding DNA Sequence Number=SeqID_24500
MDSQAPTNSDGDQGSYPLIGDGDPLGTRNPNGDGDEMSFTPMMGMDMEGQRRLRHSDCSATRQSESDRQPGLAKGATANSAPPDPRARTRAKTRKTANSAPPDPRARTRAKTRKTANSAPPDPRARTRAKARKTANSAPPDPRARTRAKTRKTANSAPPDPRARTRANTRKTTKLRSARPQGSDSG

SEQ ID NO: 66280 - protein, 38 aa, Zea mays
  Coding DNA Sequence Number=SeqID_24501
LDHPIELKESLADAYPPSRIRRVAVDAVDATLLWYGPA

SEQ ID NO: 66281 - protein, 311 aa, Zea mays
  Coding DNA Sequence Number=SeqID_24502
  Gene Ontology: Mol. function=protein serine/threonine kinase activity; Cellular component=cell cortex; Biological process=protein amino acid phosphorylation
  Homolog annotation: Hit_ID=O22042; Match level="QueryCoverage=54%, HitCoverage=26%, E-value=1e-63, Identity=71%"; Hit description =Mitogen-activated protein kinase kinase kinase 3
  Pfam annotation: Domain name=Pkinase; Domain location=133-307; Score =79.4; E_value=1.1e-20; Accession=PF00069.15; Description=Protein kinase domain
  Pfam annotation: Domain name=Pkinase_Tyr; Domain location=133-302; Score=-15.1; E_value=1.5e-11; Accession=PF07714.7; Description =Protein tyrosine kinase
  Pfam module annotation: Pfam domain module=Pkinase::Pkinase_Tyr; Domain location=133-307::133-302
MGMRVRVGGGVCDNKIVAYARTPRTKPCDGTTPAEEPGFHDLFDSVRRSISFRPTAPAPEAPAGPFGAGAGGIGVRISSCLRKSRGMGLLGLITKSPSPPRRMLPPMPDQSDGGSGGGGANGGVGEENPLIRWRKGELIGAGAFGQVYLGMNLDSGELLAVKQVLIGTSNATREKAQAHIKELEEEVKLLKNLSHPNIVRYLGTVREEDTLNILLEFVPGGSIQSLLGKLGSFPEPVIKKYTKQILQGLEYLHSNAIIHRDIKGANILVDNKGCIKLADFGASKQVAKLARFRDVKFIQSRMKGLNFQAKA

SEQ ID NO: 66282 - protein, 94 aa, Zea mays
  Coding DNA Sequence Number=SeqID_24503
METEDWRPYLHAGCWRRRAGDGGGAEQDDAAAPEMEEVSEMEEGSAPPSPIRAERDDAAAPEMEEAPEMDEGTSTHVVGIGIWEKGSWDGPLGK

SEQ ID NO: 66283 - protein, 47 aa, Zea mays
  Coding DNA Sequence Number=SeqID_24504
MAVATPLGALLTLSVAMADLHSTLLTVDVALRAMPVRRNAKPCGQPM

SEQ ID NO: 66284 - protein, 120 aa, Zea mays
  Coding DNA Sequence Number=SeqID_24505
MGFSTMRSNRREWRKGRRGLAMGSSATTVSTPGRGWARFPYRGELGTMAALLCCEGAGARAGGRRLGGYAGEVPHEHGVAVLGSAGARVHWLPRGRASTGCRRGAFVPCLVKTTTAGGQG

SEQ ID NO: 66285 - protein, 546 aa, Zea mays
  Coding DNA Sequence Number=SeqID_24506
  Gene Ontology: Mol. function=RNA-directed DNA polymerase activity; Cellular component=nucleus; Biological process=RNA-dependent DNA replication
  Homolog annotation: Hit_ID=Q8S463; Match level="QueryCoverage=98%, HitCoverage=27%, E-value=0.0, Identity=90%"; Hit description =Putative prpol
  Subcellular localization annotation: CTP_CleavageSite=26; ConfidenceScore=5.69e-01
MPRLPDSCGKPRSTPGARSTQRLRPRVASATSTITATVGPTSTRGCTEATTPGVEDATTAGRIGVPRPNHPGTYVRPGNSWDLRSCRQQPGESLRDYIRRFSKQRTELPNITDSDVIGAFLAGTTCRDLVSKLGRKTPTRASELMDIATKFASGQEAVEAIFRKDKQPQGRPPEDAPEASTQRGAKKKGKKKSQAKRDAADTDLVAAAEYKNPRKPPGGANLFDKMLKEPCPYHQGPVKHTLEECVMLRRHFHRVGLPAEGSRARDDDKKEDHQAGEFPEVRDCFMIYGGQAANASARHRKQERREVCSVKVAAPVYLDWSNKPITFDRADHPDHVPSPGKYPLVVDPVIGDVRLTKVLMDGGSSLNIIYAETLGLLRVDLSSVRAGATPFHGIIPGKRVQPLEQLDLPVCFGTPSNFRRETLTFEVVGFRGTYHAVLGRPCYAKFMAVPNYTYLKLKMPGPNGVITVGPTYKHAFECDVECVEYAEVLAESEALIADLESLSKEVPDVKRHASNFEPAETVKSVPLDPSNDASKQIRIGSELDPK

SEQ ID NO: 66286 - protein, 94 aa, Zea mays
  Coding DNA Sequence Number=SeqID_24507
MPTPVRRIIPHHGGYCSPDWPLVHPRFSSAVCPSEPRSCDLGFAIVFTRAIDPRSSGQSAPRPQRATVPWALRVIVSPRPESHLLGIHTLAHQF

SEQ ID NO: 66287 - protein, 79 aa, Zea mays
  Coding DNA Sequence Number=SeqID_24508
MQPIRRRHRGFALLCLSAALLAAATLLPGAAVAEVHAHLSRLLVTMSVSHWLVLAIKTRISKKGYFVDLEADVGWLWWT

SEQ ID NO: 66288 - protein, 190 aa, Zea mays
  Coding DNA Sequence Number=SeqID_24509
  Gene Ontology: Mol. function=mannosyl-oligosaccharide 1,2-alpha -mannosidase activity; Cellular component=membrane; Biological process=RNA processing
  Homolog annotation: Hit_ID=Q86IK7; Match level="QueryCoverage=61%, HitCoverage=9%, E-value=3e-28, Identity=52%"; Hit description =Similar to Arabidopsis thaliana (Mouse-ear cress). Dbj|BAA91806.1
MTIRVEVQTGLWRNERPRVGSWEPLFPFSKLEGVSLGSHQVTCQDAMNGAASDATSVKDMFYHAFDGYMKYAFPLDELRPLSCQGEDSLGGYALTLIDSLDTLALLGDKEKFGAAVEWVGKNVHFDIMFEKNSLLLTGQFITLHNKTVSVFETNIRILGGLLSAHLIASDYATYCCNMKSLLKLHCKNKS

SEQ ID NO: 66289 - protein, 254 aa, Zea mays
  Coding DNA Sequence Number=SeqID_24510
  Gene Ontology: Mol. function=mannosyl-oligosaccharide 1,2-alpha -mannosidase activity; Cellular component=membrane; Biological process=RNA processing
  Homolog annotation: Hit_ID=Q00ZM2; Match level="QueryCoverage=79%, HitCoverage=40%, E-value=2e-55, Identity=49%"; Hit description=[G] KOG2431 1
  Pfam annotation: Domain name=Glyco_hydro_47; Domain location=1-253; Score=-56.1; E_value=2.9e-12; Accession=PF01532.11; Description =Glycosyl hydrolase family 47
MAAHDPAGGGDSTRPQPSPRQRVEVPDPTVFERVTKKSVRGIWSRRSKLNLVGAHINVFTGEWTQKAYLLFGDEEYLYIFQEAYKAAMHYLHHDPWYVEVNMNSGATVWPLFNSLQAFWPGLQVLAGDVDPAIRTHAAFFSVWKKYGFTPEGFNLATSTVQNGQRSYPLRPELIESTYWLFKATRDYRYLDVGRDILASLQYGARCPCGYCHISDVETHKQDDHMESFFLAETCWTEIPPQNNFVSKFQQFPAN

SEQ ID NO: 66290 - protein, 432 aa, Zea mays
  Coding DNA Sequence Number=SeqID_24511
  Gene Ontology: Mol. function=growth factor activity; Cellular component=cellular_component; Biological process=regulation of progression through cell cycle
  Homolog annotation: Hit_ID=P82859; Match level="QueryCoverage=78%, HitCoverage=97%, E-value=9e-32, Identity=30%"; Hit description =Agglutinin
  Pfam annotation: Domain name=Jacalin; Domain location=232-367; Score =106.6; E_value=7.4e-29; Accession=PF01419.7; Description=Jacalin -like lectin domain
  Pfam annotation: Domain name=Jacalin; Domain location=35-175; Score =107.2; E_value=4.8e-29; Accession=PF01419.7; Description=Jacalin -like lectin domain
  Pfam module annotation: Pfam domain module=Jacalin::Jacalin; Domain location=232-367::35-175
MMVSIPSFYADSTGTSMSMSISIPVRFGPWGGNSGTIFDDGIYTGVRQINLTRGLVGISSMKVLYDRNGQAVWGDKRGVSGGSTRAQKVVFDFPSEILTHITGYFGSTTATMKMKMGPTVIRSLTFHTTRKSHGPFGGDEQHGTFFSSCLADGRIVGFHGRAGWYIDSVGVHVLEGKVLSQQRDDETRCSLALAAREREAGDEVAPATTTTTYGVVKEPVPIGPGPWGGDGGKPWDDGVYTGVRQMYITRTDDFIGSVQMEYDRSGKSVWSTKHGNGGQQQITITHRIKLDYPHEVLTCVYGYYNACVEEGPRVLRSLTLVSSRGRYGPFGDEVGAYFTSATTEGKVVGFHGRCGLYLDAIGVHMQHWLGVGDARTARASAPSKYYISRPGHIDWGLRCSVLYRSKTQVAGRSGVVDLADFEKSKSTTQLFA

SEQ ID NO: 66291 - protein, 518 aa, Zea mays
  Coding DNA Sequence Number=SeqID_24512
  Gene Ontology: Mol. function=cytokinin dehydrogenase activity; Cellular component=vacuole; Biological process=electron transport
  Homolog annotation: Hit_ID=Q5ZAY9; Match level="QueryCoverage=99%, HitCoverage=100%, E-value=0.0, Identity=71%"; Hit description =Putative cytokinin oxidase
  Pfam annotation: Domain name=Cytokin-bind; Domain location=227-506; Score=637.4; E_value=1.2e-188; Accession=PF09265.1; Description =Cytokinin dehydrogenase 1, FAD and cy
  Pfam annotation: Domain name=FAD_binding_4; Domain location=65-195; Score=0.7; E_value=0.0023; Accession=PF01565.13; Description=FAD binding domain
  Pfam module annotation: Pfam domain module=Cytokin-bind::FAD_binding _4; Domain location=227-506::65-195
MTRCLMFMPPLFLVSSLISTVGLPVEPPAELLQLGGDVSGGRLSVDASDIAEASRDFGGLSRAEPMAVFQPRAAGDVAGLVRAAFGSARGFRVSARGHGHSISGQAQAPGGVVVDMGHGGAVARALPVHSPALGGHYVERLGRRAVGGRAQLDAVARRARAAVVDGLPAFHHGPQISNVYELDVVTGKGEVVTCSETENPDLFFGVLGGLGQFGIITRARIALERAPQRVRWIRALYSNFTEFTADQERLISLGSRRFDYVEGFVVAAEGLINNWRSSFFSPQNPVKLSSLKHHSGVLYCLEVTKNYDDATAGSVEQDVDALLGELNFIPGTVFTTDLPYVDFLDRVHKAELKLRAKGMWEVPHPWLNLFVPASRIADFDRGVFRGVLGGGTAGAGGPILIYPMNKHRWDPRSSVVTPDEDVFYLVAFLRSALPGAPESLEALARQNRRVLDFCAEAGIGAKQYLPNHKAPGEWAEHFGAARWERFARLKAQFDPRAILAAGQGIFRPPGSPPLVADS

SEQ ID NO: 66292 - protein, 219 aa, Zea mays
  Coding DNA Sequence Number=SeqID_24513
  Subcellular localization annotation: CTP_CleavageSite=58; ConfidenceScore=5.31e-01
MKPWKETSRSSKITTSSRCGLAATPSRLPVKAAVIYVSFPHFDLLVRRRPPPPVLVVRVAPTTSDADLHTDLTVVTSPTSLTTPAGSSNAACNPRRRNLCRGYCLSQPGSTDCNLADGEYVLVPEQGAAQEVAPVLAPEPAPEDLPATALEGKPRGLYPSRDLRRGLPFRLWWVQVRSLHDGSRGSLEDMVAGVTWPSILPPDWTVEWDPASAEEEHEE

SEQ ID NO: 66293 - protein, 192 aa, Zea mays
  Coding DNA Sequence Number=SeqID_24514
  Subcellular localization annotation: CTP_CleavageSite=50; ConfidenceScore=5.24e-01
MGNLLVKGLGYVTEPSSLSGNRASPPNKSQQQVQAPCSKPYRLHRLGFASSSYAANSELELEVMSLCEGTDEVFWSGFGLGIGTMLENATASALEDFEDDFGMAAKAMVDILPLKDSAARGAHNITAGFCLANRFSTRLALRNDTDPEVALAALLPPADAGLSPGRLKLAAAASSLASPRSRAARPCPCPFV

SEQ ID NO: 66294 - protein, 162 aa, Zea mays
  Coding DNA Sequence Number=SeqID_24515
MVLELALLGNGLNPTWASRRGEDVGLVDFDRAFVLPQRGRRGTAGLHPIDASGLLGRILWMWSSSVWRHRRRHRAKGSVFAFAPTHGSDSWSPEDDPKAARSKDAAQATRSEELVVEERQSHPCLTATPPLALGIATARTAEGTTAADHTSEGTAVAAKTNP

SEQ ID NO: 66295 - protein, 252 aa, Zea mays
  Coding DNA Sequence Number=SeqID_24516
  Homolog annotation: Hit_ID=Q8RVE5; Match level="QueryCoverage=50%, HitCoverage=19%, E-value=2e-41, Identity=67%"; Hit description =Pentatricopeptide (PPR) repeat-containing protein-like
  Subcellular localization annotation: CTP_CleavageSite=68; ConfidenceScore=5.03e-01
MSGDHAKKEMVTGEKPATSHGKAPSGESGNKMGWGSAARLDNPNRPNPMSLSRSQRRPRVPNPEALSLCSRSGGGAAVFSLPSLPSGLRPSLLVGRARRRRPARQSISCSPASPCSPVALLFSAFVEACKLVVEEKSPAEAAAMRPDRAACNSVLSGCYRGLGSLADAERVLETMSAVGVSPDVESFGCLAFLYAWRGVPSRVDELDTLFDALGFSKKGFFKNLVSGYLKSGDFESVSPIILRAVKERRVGG

SEQ ID NO: 66296 - protein, 245 aa, Zea mays
  Coding DNA Sequence Number=SeqID_24517
MKALDLPFIDARCRRFDPGGSLDRRVNCRRVPQPRWVGTRRSVKGGKPEGDMRKRGNLRPSCLSRAQVGAESEPWGRARRSSSSSGAEAESEPWGRARRSSSPSGAEAESEPWGRARRSSSSSGAEAEFEPWGRARRSFLWHLRPDLAAVSLTLSSGTTVGVAQAALFSCQAGQWSGEAILALNAPAIRSVVVAIWPRLLLGEDWASGEPKLCADGGYQLRLGVLGVPLIMVPDTRRGSRCTMGV

SEQ ID NO: 66297 - protein, 76 aa, Zea mays
  Coding DNA Sequence Number=SeqID_24518
  Gene Ontology: Mol. function=sequence-specific DNA binding; Cellular component=nucleus; Biological process=regulation of transcription, DNA-dependent
  Homolog annotation: Hit_ID=Q0PLM4; Match level="QueryCoverage=77%, HitCoverage=69%, E-value=5e-10, Identity=88%"; Hit description =Fruitful-like MADS-box transcription factor
MGPNPTADQFVFLVLRDKGSCPNNKYQVEHIHIALQAYNPKFIFPVAAGGRLVEGAAAQPQARVGLPPWMLSHLSS

SEQ ID NO: 66298 - protein, 143 aa, Zea mays
  Coding DNA Sequence Number=SeqID_24519
  Subcellular localization annotation: CTP_CleavageSite=69; ConfidenceScore=5.10e-01
MARRGTRSKVSSGIPGTGTGDAAGGSSDTPAAPAFRPRRLRGLRRFLPLDAGVAAGPIEATGVVTAALCGSTASTAAPTFVFVAAAARCRCRRRRRRSRRLDAARVAGGGSIRSRSPRRSRKGKGRHLGTSEKRELRNMTLSR

SEQ ID NO: 66299 - protein, 359 aa, Zea mays
  Coding DNA Sequence Number=SeqID_24520
MASRLSDNVLQTMTEKIMRSDKTSKRNFQHGNEALKDSVAEGAACSSLARREHSTRENGASRSKILKRSNVKSPVDSCTEQGTDMDYHKMKSADLLGNLEEVYQERTCLGYCSSQKLEEYWENENVSSLNSSSLQAGKKRKKRRGRKKHNRRKKANLQDSPASTAADNSGLVTFSENCTSALKLEEQRKKQDQNKTSMTNLLLINNAKRSEPFDVNLEGAIEKSCELAKNSFDNTLENRYELAKNSFDNTLENRYELAKSNSDYINMVRNGLQEQDLACLSNSHNVNYLKPSHLAEEYTEKLKHVFSLGKSLRPPKKKLLILDLNGLLVDINEDYHNAHMADAKYSEGLTAMIFSTFVL

SEQ ID NO: 66300 - protein, 57 aa, Zea mays
  Coding DNA Sequence Number=SeqID_24521
MAQDRNVKVPSIFDEFMVDENERSSTNEAGENQTDDEESGEDSEDEDRRYEVLREPS

SEQ ID NO: 66301 - protein, 221 aa, Zea mays
  Coding DNA Sequence Number=SeqID_24522
  Gene Ontology: Mol. function=ATPase activity, coupled to transmembrane movement of substances; Cellular component=integral to membrane; Biological process=transport
  Homolog annotation: Hit_ID=Q8LKU6; Match level="QueryCoverage=95%, HitCoverage=36%, E-value=8e-78, Identity=69%"; Hit description =Putative ABC-transporter-like protein
MGKNMRIKTAPQGRNRVPLLGDGETSRALSDLEEGSDVPSQRNVRLLSGSSKLPKYGGKIIDIVSRDVRRPEDKAQALEDVKGTILYIVTIVLVGSVCTALRAWLFNSASERVVARLRKDLFSHLINQASKFVLFKVYHEIAFFDVTRTGELLSRLSEDTQIIKNAATTNLSEALRNVTTTAIGLGFMFSTSWKLTYLDVFFVSFSHQTQAAAAVASSIAE

SEQ ID NO: 66302 - protein, 38 aa, Zea mays
  Coding DNA Sequence Number=SeqID_24523
MALLKGVAKANMWKVKAEADERQAGAMGAIYPALTSDA

SEQ ID NO: 66303 - protein, 150 aa, Zea mays
  Coding DNA Sequence Number=SeqID_24524
  Gene Ontology: Mol. function=transition metal ion binding; Cellular component=endoplasmic reticulum; Biological process=electron transport
  Homolog annotation: Hit_ID=Q84KI3; Match level="QueryCoverage=99%, HitCoverage=100%, E-value=4e-57, Identity=76%"; Hit description =Cytochrome b5
  Pfam annotation: Domain name=Cyt-b5; Domain location=7-96; Score =74.9; E_value=2.5e-19; Accession=PF00173.18; Description=Cytochrome b5-like HemeSteroid binding doma
MPTLTKLYSMKEAALHNTPDDCWVVVDGKIYDVTKYLEDHPGGADVLLEATGAASLVHFSCTYYPCGKDATEEFDDAGHSKSAKELMQDYFVGELDSDPTPEIPEMEVFRKEQDTGFARKLMDDVVQYWSIPAAVIGISAVVAILYARRK

SEQ ID NO: 66304 - protein, 203 aa, Zea mays
  Coding DNA Sequence Number=SeqID_24525
MAGWPVPSLLLRRRRLLSLLPLSYRAALAAPLAVPGPTTLVICGLGVRLCEAADCVGGGATLWRQRGGARGHTFVRVTPTSGLGWRKVVVAVAGCPRDSWIRWPCVLVPSVAGCGSGRRLCDTHGMEDDDDGSSWPDVSAGGFLGESLSDGKARGRRFPCWGVVFTFDGCFRLSASGIHVKMALYNVKSKLLHQGLWLSNDDS

SEQ ID NO: 66305 - protein, 39 aa, Zea mays
  Coding DNA Sequence Number=SeqID_24526
MATLVAGSSEKGGALALVDGDVVEKRERVADGRNAAAGL

SEQ ID NO: 66306 - protein, 1095 aa, Zea mays
  Coding DNA Sequence Number=SeqID_24527
  Gene Ontology: Mol. function=protein binding; Cellular component =membrane; Biological process=defense response
  Homolog annotation: Hit_ID=Q6YYL2; Match level="QueryCoverage=94%, HitCoverage=89%, E-value=1e-168, Identity=41%"; Hit description =Putative RGH1A
  Pfam annotation: Domain name=ABC_tran; Domain location=195-330; Score= -57.2; E_value=0.02; Accession=PF00005.17; Description=ABC transporter
  Pfam annotation: Domain name=LRR_1; Domain location=574-597; Score =2.8; E_value=87; Accession=PF00560.23; Description=Leucine Rich Repeat
  Pfam annotation: Domain name=LRR_1; Domain location=599-620; Score =8.1; E_value=8.8; Accession=PF00560.23; Description=Leucine Rich Repeat
  Pfam annotation: Domain name=LRR_1; Domain location=622-643; Score =7.0; E_value=14; Accession=PF00560.23; Description=Leucine Rich Repeat
  Pfam annotation: Domain name=LRR_1; Domain location=750-771; Score =3.6; E_value=60; Accession=PF00560.23; Description=Leucine Rich Repeat
  Pfam annotation: Domain name=LRR_1; Domain location=844-873; Score =1.8; E_value=1.3e+02; Accession=PF00560.23; Description=Leucine Rich Repeat
  Pfam annotation: Domain name=NACHT; Domain location=195-346; Score= -38.9; E_value=0.063; Accession=PF05729.3; Description=NACHT domain
  Pfam annotation: Domain name=NB-ARC; Domain location=155-460; Score =144.4; E_value=3e-40; Accession=PF00931.13; Description=NB-ARC domain
  Pfam module annotation: Pfam domain module=ABC_tran::LRR_1::LRR _1::LRR_1::LRR_1::LRR_1::NACHT::NB-ARC; Domain location=195-330::574 -597::599-620::622-643::750-771::844-873::195-346::155-460
MDLVTGPLAILPSKLQELLQIQDEYRLQKEVRGRVEMICRELQSMHAALRKVADVPRDQIDLQTKVWRRDVREASYDIEDAIDTFLMRIRDRAPSDPNRFRLAMKKMTKLSRKVKAIHEIGAAIGDIVRKIQELVDRRVRYKLDVAADRSISMVSVDPRLAALYKEATQLIGIDQSMSEIISMLLSDESGQQHIKKISIVGAGGLGKTTLAKETYERLRSEYEFATFVSVGQNPDLVRVFKNILVKLDIYQQVDTINRTDTRALIDEIRQRLSYVRCRYLIVIDDVWDLESWHTLELAFVENNNGSGIIITTRNFAVATIAGRVYKLRPLSYHHSKELFYRSLFGEGVCLDDQIINKASDKFLKKCDGIPLALITMASLFMGKPTQMWSELANNAFGHKGRNSHLEETTMRILSLSYSDLPLNLRTCFVYLSRYPDDYVINKSSLIWKWIAEGFIQEEQGKQLFELGEEFFNELVSRSIIQVVQSKFDNTVQGFRIHSMVLGLIRLLSSEENFVSVLDEEGQISISGKLRRLAIHNRKEEHNLGDNMDLLPWLRSFTAIECPIYMIPPVFIFKLLRVLDLESCGSMEGYDLKQLGNLHNLRFIGLCNTYVRTLPQELGHLKFLQTLELKGSGVEELPSSMGELAGLMCLNADWTTRVPKWIGMLTSLQQLVMYPCGGYSARWFVKGLGHLRELRMLRLLIKADDEKQLAQLLESVLKLPKIEALHLDYYGGVQLNRLVKLEPSDFACSGRLRSLELQLLEFSRLPVWLNAYYLPQIRDLSLLMFDVDKQDLKNLGDFKELRHLHLLIVNTERRDAITCASGGFRNLRFFSITKPFKFQQGDLPRLEILDFHFNVPLQSGANSGLDFDFGLENIPSLQQVIVQINCLDAFPLPEEVETALRHAIGVHPNRPIVDISLPRRKLDKADNDGAEGRSKLAHYSKSLSSAHDKPMDELIKRLYVVDNEAYDKKMKIVPIVRSEGLGKTTLAQKVFDKLSPHFDCAAFVLVGQNPDMRKVFTDILIGLDNQKYQDFPMTILDIIELIGLVRKSLINKSFSLSIARYLHVRVLAAPRIKTELSIIHIAQPSLKLRNLMNRHY

SEQ ID NO: 66307 - protein, 251 aa, Zea mays
  Coding DNA Sequence Number=SeqID_24528
  Homolog annotation: Hit_ID=Q5QLQ8; Match level="QueryCoverage=48%, HitCoverage=42%, E-value=9e-48, Identity=78%"; Hit description =Cytochrome B561-like
MGLPFLKGSQPCVNYLEVLWFISRIRYSSEYWNKDIPELASVEEENAPVEEPVLVPHVTEVVSPPKTEVADTGDLLGLNDPNPAVSAIEESNALALAIVPTASHSHKSFFHAFELDKLELKAVKDGSASYAALEKKAELYEKLSRGKVPDEEDKEKYYVDFFQKGFDRVYEPQIPECSHRATDGAEPVNDHEDSMPNAKPLGLGQAGTTIDRDEHKRFVREVHEEVTEARQKASKRSSLVGGWKRQIEGFT

SEQ ID NO: 66308 - protein, 232 aa, Zea mays
  Coding DNA Sequence Number=SeqID_24529
  Gene Ontology: Mol. function=protein binding; Cellular component =spliceosome; Biological process=mRNA processing
  Homolog annotation: Hit_ID=Q6QP54; Match level="QueryCoverage=43%, HitCoverage=35%, E-value=2e-17, Identity=54%"; Hit description =Putative kinase
  Subcellular localization annotation: CTP_CleavageSite=82; ConfidenceScore=5.38e-01
MAPPVTWSVRALGWARWRLLRGRGRVCLPRPRSSLSPWVGRGGDRRLRPVLNPSPGVGRSRVRRPPGLSPSPSPGVGRSGVSSSSGAEPESEPWGWAKRSSSSSGAEPESEPWGRAKRSSSSSGAEPESEPWGRAKRSSSSSGAEPESEPWGRAKRSSSSSGAEPESEPWGRAMRSFLWRLKPDLAAVSLTLSSGTAVGAAQAALSSCQAGQWSGEVTTVTSALSTGGRASG

SEQ ID NO: 66309 - protein, 142 aa, Zea mays
  Coding DNA Sequence Number=SeqID_24530
MGGSLACRSGARTAGRRRGLARRDSWRRPPGAEAQPDGRTQTAARIPGRRPVGWLRARPGAQGLDGGAESWAALGRLGGAAWRAGLLAAATRHAGAGPDSGAGGARPGAQGLRAAAAWRAGQIPTATAGETLAGAARRLEEN

SEQ ID NO: 66310 - protein, 454 aa, Zea mays
  Coding DNA Sequence Number=SeqID_24531
  Gene Ontology: Mol. function=transferase activity, transferring hexosyl groups; Cellular component=intracellular; Biological process= metabolic process
  Homolog annotation: Hit_ID=Q5Z8I3; Match level="QueryCoverage=83%, HitCoverage=78%, E-value=0.0, Identity=81%"; Hit description =Pentatricopeptide repeat-containing protein-like
  Pfam annotation: Domain name=PPR; Domain location=134-167; Score=4.0; E_value=2.5; Accession=PF01535.11; Description=PPR repeat
  Pfam annotation: Domain name=PPR; Domain location=168-202; Score=7.3; E_value=1; Accession=PF01535.11; Description=PPR repeat
  Pfam annotation: Domain name=PPR; Domain location=203-237; Score =32.8; E_value=1.2e-06; Accession=PF01535.11; Description=PPR repeat
  Pfam annotation: Domain name=PPR; Domain location=239-273; Score =25.0; E_value=0.00027; Accession=PF01535.11; Description=PPR repeat
  Pfam annotation: Domain name=PPR; Domain location=274-308; Score =24.9; E_value=0.0003; Accession=PF01535.11; Description=PPR repeat
  Pfam annotation: Domain name=PPR; Domain location=309-343; Score =22.8; E_value=0.0012; Accession=PF01535.11; Description=PPR repeat
  Pfam annotation: Domain name=PPR; Domain location=344-378; Score =19.0; E_value=0.017; Accession=PF01535.11; Description=PPR repeat
  Pfam annotation: Domain name=PPR; Domain location=379-413; Score =16.8; E_value=0.076; Accession=PF01535.11; Description=PPR repeat
  Pfam module annotation: Pfam domain module=PPR::PPR::PPR::PPR::PPR::PP R::PPR::PPR; Domain location=134-167::168-202::203-237::239-273::274 -308::309-343::344-378::379-413
  Subcellular localization annotation: CTP_CleavageSite=6; ConfidenceScore=5.27e-01
GRTHLRSSSRYSRSARALLTPLLSRLLLSHTPPLPALSLYRRLLALRHFNVPESSLPVLLRLLARSRRHAHLSFPLLESLPYTHPHLLSTPALAALLSTALSASAPGASFDAAVTCFESAARVWARAGRAFGAAELNVLLRAFCARGRVAEARALFHRYCDAYPPDTRTFNTLLLGFKEAGHVHALDLFYHDAVLRGFVADAVSYCIRMDAYCKKGRFLDALELLDEMRSKGDYKPTLQVFTTLIYGAGIVRNAARARALFDEMEKWGVTPDRGAHNALMGVYVRVRDLQSAMAVMSDMERKGIGLDDVRYNTMLCGFQRVGDLEGIWKVYSKMVSSGFMPRTRTTMLLMKVFCENGRPDLGLELWDYLMGRGCVPHQHALDILVTGLCCRGVVAEAYRCFREIIETGMAPTERAFTVLEGFLRRKREHGKVEEIRQMMKAAQLQGHQIEEEAT

SEQ ID NO: 66311 - protein, 529 aa, Zea mays
  Coding DNA Sequence Number=SeqID_24532
  Gene Ontology: Mol. function=hydrolase activity, hydrolyzing O -glycosyl compounds; Cellular component=anchored to membrane; Biological process=carbohydrate metabolic process
  Homolog annotation: Hit_ID=Q6H4Z1; Match level="QueryCoverage=83%, HitCoverage=90%, E-value=0.0, Identity=88%"; Hit description =Putative elicitor inducible beta-1,3-glucanase
  Pfam annotation: Domain name=Glyco_hydro_17; Domain location=28-348; Score=293.5; E_value=4.1e-85; Accession=PF00332.9; Description =Glycosyl hydrolases family 17
  Pfam annotation: Domain name=X8; Domain location=367-449; Score =146.8; E_value=5.8e-41; Accession=PF07983.3; Description=X8 domain
  Pfam module annotation: Pfam domain module=Glyco_hydro_17::X8; Domain location=28-348::367-449
MAAGGPALLRALLVAALCAVPWRAEAAIGVNWGTVSNHRAPPGVVVDLMRANRISKVKLFNADPGVLRALAGSGIQVMVGVTNDELASIAGSQAAADDWVAQNVSRYVGRSGVGIRYIAVGNEPFLTSYQGQFQSYIIPAMTNIQQSLVKANLASYVKLVVPCNADAYQSASVPSQGVFRTELTQLMTQLAAFLSSSGAPFVVNIYPFLSLYQNSDFPQDYAFFEGSTHPVVDGPNVYYDAFDGNFDTLVSALSKIGYGNLPIAIGEIGWPTEGAPSANLTAARAFNQGLINRITSNKGTPLRPGVPPADVYLFSLLDEEGKSILPGNFERHWGIFSFDGQAKYPLNLGLGNSVLKNAKEVPYLPSRWCVANPARDLDSVSDHMKLACSMADCTTLYYGGSCYGIGEKGNVSYAFNSYYQQQKQDPKSCDFGGLGMITYLDPSMGECRFLVGVDDSKSSAVASCGGGCCGFKNDLVVDKYSRTEIIYYIKAMRVDGGGVGGQQLSPQQAWPHVTFGCCTSQQHWHAEMK

SEQ ID NO: 66312 - protein, 150 aa, Zea mays
  Coding DNA Sequence Number=SeqID_24533
  Subcellular localization annotation: CTP_CleavageSite=78; ConfidenceScore=5.30e-01
MAGGAVSFSFFRRCWSRLRFRGSGTLNTMLSHDPSTINHTISTPSEHLVVSSGSVGCAHHRRSFGAAVGASVRVVALRLASVVTSVALVGVVEHQDRVNSSPLSHRCRGSADAVVCQTSGVYIEEPVTEDPGAQQIEVAEQELIEGKFCP

SEQ ID NO: 66313 - protein, 296 aa, Zea mays
  Coding DNA Sequence Number=SeqID_24534
MEDDDFTFPTVAAARGPTAPLGRPDDEDPVPHLLQLPPPPSPTLAGTTSPLWPFAGSTPKTTTTTAAPPSSPPVTEEDDEDRMDLLWESTLTTRPVATAPAPAPESAGSAVVSPHAGPPPERRAAAADDKQRAAALGRRGEDGQAVGELQRGPRRPAAARPRPRPPLQVRRRAPRRHQHQHQGAAGPWPTTTTTTTGTSATTRASSGADDDESDGQETSASSPAERRGYGCAPTMLRASSRAGGAGQFCGAGASHRGRRRGRGGGAAAGWALLLRLFRRLFAVDRTAQPSRSVCVP

SEQ ID NO: 66314 - protein, 270 aa, Zea mays
  Coding DNA Sequence Number=SeqID_24535
  Gene Ontology: Mol. function=RNA-directed DNA polymerase activity; Cellular component=mitochondrion; Biological process=RNA-dependent DNA replication
  Homolog annotation: Hit_ID=UPI00004C1731; Match level="QueryCoverage =65%, HitCoverage=12%, E-value=2e-93, Identity=93%"; Hit description =UPI00004C1731 related cluster
  Pfam annotation: Domain name=rve; Domain location=84-242; Score=90.4; E_value=5.3e-24; Accession=PF00665.16; Description=Integrase core domain
MPEPKEVSAQPEAPSAPEGEALRIEEQRNGVTPNRNWQTPYLQYLHRGELPLDRAEARRLARRAKSFVLLGDEKELYHRSPSGILQRCISITEDLVGPLQKAPGGFTHLLVAIDKFSKWIEVRPLNSIRSEQAVAFFTNIIHRFRVPNSIITDNDTQFTGRKFLDFCEDHHILVDWVAVAHPMTNGQVERANDMILQGLKPRIYNNLNKFGRRWMKELPSVVWSLRTTPSRATGFTPFFLVYGVEAILPTNLEYGSPRTRAYDDQSNQAS

SEQ ID NO: 66315 - protein, 151 aa, Zea mays
  Coding DNA Sequence Number=SeqID_24536
MAPLAEAESEPWGQARQSSSSSGAEAESEPWGRARRSFLWRPRPDLAAVSLSLSSGTAVGAAQAALSSCQAGQWSGEVVLALNAPAIRSVGVAIRPRLLLGEDWASSEPKLCADGGYQLRLGVLGVPLIMVPDSWAVTRSARGDLAASVPG

SEQ ID NO: 66316 - protein, 426 aa, Zea mays
  Coding DNA Sequence Number=SeqID_24537
  Gene Ontology: Mol. function=identical protein binding; Cellular component=cytoplasm; Biological process=negative regulation of enzyme activity
  Homolog annotation: Hit_ID=Q9FIF8; Match level="QueryCoverage=96%, HitCoverage=58%, E-value=1e-97, Identity=46%"; Hit description =Serine protease-like protein
  Pfam annotation: Domain name=PA; Domain location=338-423; Score=23.2; E_value=0.00093; Accession=PF02225.12; Description=PA domain
  Pfam annotation: Domain name=Peptidase_S8; Domain location=130-425; Score=-14.7; E_value=5.4e-06; Accession=PF00082.12; Description =Subtilase family
  Pfam annotation: Domain name=Subtilisin_N; Domain location=29-117; Score=81.6; E_value=2.4e-21; Accession=PF05922.7; Description =Subtilisin N-terminal Region
  Pfam module annotation: Pfam domain module=PA::Peptidase _S8::Subtilisin_N; Domain location=338-423::130-425::29-117
MPRLLLLLLVTAIAAKDLSASETVGDGDQVYIVYLGHLPSSADASEHTEGFSAVELAHHDMLDQVLDGGSSASDRILRSYKRSLNGFAAKLSKEEAHKLSGMNGVVSVFPSRTLDLLTTRSWDFLGFPQTPIQELPLEGDVIVGMLDTGVWPDSPSFSDEGFGPPPSSKIIGARAYNGGSSSSGQSPLDDDGHGSHTASTAAGRAVGNVSMYGLAGGTARGGVPGARLAIYKVCCGEADILAGFDDAIADGVDVISISIGSPFPFDYFGDVIAIGSFHAMRRGVVTSAAAGNSGLDLGNVCNVAPWMLSVAASSIDRRFVDRIVLGNGKTIVGASINTFPTLSNATLAFPVNGSCDPENLAGGSYKGKIVLCQNAAANDGSGPLLAGAAGVVIVSRIPDVAFALPLPGLTVSQDQFDQTMAYVNST

SEQ ID NO: 66317 - protein, 118 aa, Zea mays
  Coding DNA Sequence Number=SeqID_24538
  Homolog annotation: Hit_ID=Q93WW5; Match level="QueryCoverage=48%, HitCoverage=23%, E-value=3e-10, Identity=54%"; Hit description =Putative subtilisin
MDPSCNSGSGELAYGAGQLNPPRARDPGLVYDALKADYVRMLCAEGYSSTQLRVYMSNGSCRAGPARARLGPAREALVQAQHSSPIVSGRAGPWVFGLPRPGTPDIRWAGPGLKHGDN

SEQ ID NO: 66318 - protein, 240 aa, Zea mays
  Coding DNA Sequence Number=SeqID_24539
  Subcellular localization annotation: CTP_CleavageSite=88; ConfidenceScore=5.33e-01
MSLRRWVSGFILVQACTLVQCSADHSIVGSSTWQVSQGRLMVGFRDAFGTTSSFVMNLASPSRMRRYTLGVDLFAPNSWFERGFMVTRLVVVQQCRIDPSPAQVCSARDLVVHSALLDCSVENPGRPLRLARLLDSGLASYSASWGCSAEDLVVRSVSQGSSVEGWPPALPCGVVGRRSVGRLCCPAGLLSKGSASRQLGRLRSFGASFRHPILGYSTTDQSLCVTSWSCAEAFVEKLPF

SEQ ID NO: 66319 - protein, 245 aa, Zea mays
  Coding DNA Sequence Number=SeqID_24540
  Homolog annotation: Hit_ID=O22106; Match level="QueryCoverage=15%, HitCoverage=9%, E-value=2e-08, Identity=79%"; Hit description =Squalene synthase
MDAGPDTAVPRIKVATTLPLCIHHGGTFKILAVVRASLAVVQLLATVAARDLDHGVTVGAIDPRDDAGDRGAYHHHQQARQKLLKSLTFVFSLCGLDNDEPYWEEKEDTVELVQLDANRAKNVLVLMSDTGDRHRASTKAIKDRLPPPHRHRSSSLKEGRSSTRSCLRNTGPSSTPWSRRSSAASPSSFSNSGSNSAMPPVRTRFASSHFSSVQHEFAGVVNCATASIVLFLDKGPIDSILHTEM

SEQ ID NO: 66320 - protein, 113 aa, Zea mays
  Coding DNA Sequence Number=SeqID_24541
MAPTRGPPLVTDKRARDVGLYARALVRQCDPDWWSASSVALTRVMCHLCLRTRAQCCLTIHCRAQRAPQDSGATFPHVADPEWFKADASLVTLTLRPSLPSSPIPVRRVSPWP

SEQ ID NO: 66321 - protein, 67 aa, Zea mays
  Coding DNA Sequence Number=SeqID_24542
MAVAVGQGSVARRGRSELIGWIGFSQTRGRSVCHGSLIQGPGWDTGSQSNPNRILVIGRLGVHDTLP

SEQ ID NO: 66322 - protein, 125 aa, Zea mays
  Coding DNA Sequence Number=SeqID_24543
MDAAWAEASTREEQRRQGKKMAGELGTGDQRTTTSELRTDEQESIREQGDYRRWVREHRPAEEQRPSELGTGDRAPRKGRRGSRCGKGREEQRRALMVCSRCSPCIGWDKDWRPVRAGNIRENIG

SEQ ID NO: 66323 - protein, 55 aa, Zea mays
  Coding DNA Sequence Number=SeqID_24544
MGEGGTRILRSSLRAAVDGEAALRPSPQAEMAHDAEFKFESNSNCELILILNVQI

SEQ ID NO: 66324 - protein, 888 aa, Zea mays
  Coding DNA Sequence Number=SeqID_24545
  Gene Ontology: Mol. function=protein binding; Cellular component =membrane; Biological process=defense response
  Homolog annotation: Hit_ID=Q5BMB3; Match level="QueryCoverage=97%, HitCoverage=98%, E-value=0.0, Identity=81%"; Hit description=RXO1 disease resistance protein
  Pfam annotation: Domain name=LRR_1; Domain location=570-591; Score =10.9; E_value=2.6; Accession=PF00560.23; Description=Leucine Rich Repeat
  Pfam annotation: Domain name=LRR_1; Domain location=593-614; Score =9.6; E_value=4.6; Accession=PF00560.23; Description=Leucine Rich Repeat
  Pfam annotation: Domain name=LRR_1; Domain location=616-637; Score =8.8; E_value=6.6; Accession=PF00560.23; Description=Leucine Rich Repeat
  Pfam annotation: Domain name=LRR_1; Domain location=772-794; Score =4.5; E_value=41; Accession=PF00560.23; Description=Leucine Rich Repeat
  Pfam annotation: Domain name=LRR_1; Domain location=820-845; Score =1.8; E_value=1.3e+02; Accession=PF00560.23; Description=Leucine Rich Repeat
  Pfam annotation: Domain name=NB-ARC; Domain location=167-454; Score =270.9; E_value=2.5e-78; Accession=PF00931.13; Description=NB-ARC domain
  Pfam module annotation: Pfam domain module=LRR_1::LRR_1::LRR_1::LRR _1::LRR_1::NB-ARC; Domain location=570-591::593-614::616-637::772 -794::820-845::167-454
MAEIAVLLVLKKIAIALAGETLSFAKHLLAKKSELVAALPDDMKLISNELELIRAFLKKIGRTGRKDEMIETWIGQVRRLAYNMEDTVDHFIYVVGKHNQTGSPLDYLKKIAKKPQRLLSLDEIASEIKKIKQELIQLSESKDRWTKPLDGGTDVPAGSYETEKEMYLPGHDYSIRDEELAGIDKNKQTLISSLKFEDPSLQIIAVWGMGGIGKSTLANNVYKNEGFNFDCRAWVSISQSYKLEDIWKKMLTDILKKDKKEFDPGTMDSAELREKLIKTLDKKRIKKVLVDNGLGSRVIITTRTEEVASLAEDSCKIKVEPLGDHDSWLVFCRKAFPKVENHICPSELRQCGESIVEKCDGLPLALVAIGSILSLRPKNVAEWKLFYDQLIWELHNNENLNRVEKIINLSYKYLPDYLKNCFLYCAMFPEDYLIHRKRLIRLWIAEGFIEQKGACSLEDTAESYLRELIRRSMLHVAERNSFGRVRCIRMHDLVRELAIFQSKREGFSTTYDGNNEGMLVESYSRRVAVLQCSKDILSTIDPSRLRTFITFDTSMTLSLWYSSISSKPKYLAVLDLSGLPIETIPNSIGELFNLRLLCLDDTKVKELPKSIAKLQNLQALSLEQAELVKFPQGFSNLKKLRHLMVSRLRDATNNSFRCWEAVEPFKGLWSLVELQTLFAITASEVLVAKLGNLSQLRSLTIYDVRSNFCAQLFGSLSKMCQLSRLMIRACNEDEALQLDDSTFPNSLQTLTLYGRLSEGTFMSPFFLNRENGLLRLRLGYSHLSENPVPHLSELSNLTELSLIKAYTGQELYFQAGWFLNLKDLYLKDLPHVNQIHIQEGALASLKRMGMVGLLELRHVPVGFIYLKSLKTTFFHNMHPDFKSIQKEM

SEQ ID NO: 66325 - protein, 151 aa, Zea mays
  Coding DNA Sequence Number=SeqID_24546
  Homolog annotation: Hit_ID=Q10NM2; Match level="QueryCoverage=49%, HitCoverage=28%, E-value=1e-17, Identity=53%"; Hit description=RNA recognition motif family protein, expressed
MGEEQEGREEIYRSARVHYFAHLATLLCNSIGGFSHNSGDHYNEPFMNVDSSDAENPGKQPVIDASIVYDPWTREPRGFGFVTMAATKEADHCIKYLDCSVLQGQVIIVEKCISIFTDETTISVFNESVELNCKNRNCSILFECTNRTQRN

SEQ ID NO: 66326 - protein, 229 aa, Zea mays
  Coding DNA Sequence Number=SeqID_24547
  Homolog annotation: Hit_ID=Q6EPW3; Match level="QueryCoverage=75%, HitCoverage=78%, E-value=1e-16, Identity=56%"; Hit description=F-box protein-like
MVTTIEDLHADVLGCTLRRLDGQSLAVTSCATAALQALATDPEMWRALCLAEWPSLALAGERRLLLLATLPPQRLFADAPPFPSADNGCPGAGGRGALVFFLSGLVSAVDPAPVAVDRHWYTGEMLARFAVVLGGCKFKATVACPEGAGHVNKVNLTVEDTDGAAVSGEGALRLLAEPPGGEGRGNRRRPRGGVGAFLRRQSLREKRRRCSLHRRGRSAARGRTVYNLG

SEQ ID NO: 66327 - protein, 164 aa, Zea mays
  Coding DNA Sequence Number=SeqID_24548
  Homolog annotation: Hit_ID=Q2QSH6; Match level="QueryCoverage=21%, HitCoverage=3%, E-value=3e-08, Identity=88%"; Hit description=E3 ubiquitin protein ligase UPL1, putative, expressed
MKELRLYENSEKALLSSTSANGTAILRVVQALSSLRRGAVVEQLCTASHDDGEHHVDPLLPSAFQPQEPHFHLPSSSVEDPTATMGKQICVLEQHFRRGGGRGGSEGTRGAVLREEEGGLAAASAREDGGGDHDRDVGGGGFEGEGSAGGRSSRAGWAGARARA

SEQ ID NO: 66328 - protein, 161 aa, Zea mays
  Coding DNA Sequence Number=SeqID_24549
  Homolog annotation: Hit_ID=Q1SQA8; Match level="QueryCoverage=43%, HitCoverage=28%, E-value=1e-09, Identity=44%"; Hit description=Heat shock protein DnaJ, N-terminal
  Pfam annotation: Domain name=DnaJ; Domain location=63-161; Score= -6.5; E_value=0.019; Accession=PF00226.21; Description=DnaJ domain
MSKQSLTPIMSVMPLVPLVYTHIFELKIFQWREESQSAKSKEKFWNESDLDEDEESRHDDLRSYRISLGFPVLGPLKLDHINFHASALKWHPDKHQGPSTLLKLSGYFNSYFNSYLQGMDETGSDSVYISFCLICKSMAMFGYKDFKELAQAYEVLSDPEK

SEQ ID NO: 66329 - protein, 151 aa, Zea mays
  Coding DNA Sequence Number=SeqID_24550
  Homolog annotation: Hit_ID=Q6KAK1; Match level="QueryCoverage=26%, HitCoverage=2%, E-value=1e-10, Identity=78%"; Hit description =Protein kinase-like
  Subcellular localization annotation: CTP_CleavageSite=37; ConfidenceScore=5.31e-01
MATNQQPVQAVLLLLGGRELSSLGGVSSSTPYSKFCSLSTVRREFTSMHYVASLPFNDLILSAIEEHKDGDSQSRAWNDLQPLMDYLKVNLNDSHLEAVNAGLSRRSFVLIQVWLQTDKATNLLRQYFSNLHDRLSTRPFHSQVAKKWIGF

SEQ ID NO: 66330 - protein, 84 aa, Zea mays
  Coding DNA Sequence Number=SeqID_24551
MDVCHLQDILDDRSDHANPVKEVEALFGRALLKASPMAPSKNLPNDDLLCWFLHKNRKEPPLKTEQSQDPKNIFFVSLLSSPPE

SEQ ID NO: 66331 - protein, 92 aa, Zea mays
  Coding DNA Sequence Number=SeqID_24552
MDEQSANLQQREGDWTLYKLISRANFTNLANNCSTTDHPILNLVLNRRYLEFVMRKKGRKESKARREALVDLCCSAASAAVVLTCLAAVALR

SEQ ID NO: 66332 - protein, 83 aa, Zea mays
  Coding DNA Sequence Number=SeqID_24553
MRPTVAAQAAAGRVLPLAEGPSSQPTKPEIAITSPELLVASPDRRLLIATAQPGHRRVAAPANAHCCWRRGLAQPPQPGRTPL

SEQ ID NO: 66333 - protein, 426 aa, Zea mays
  Coding DNA Sequence Number=SeqID_24554
  Gene Ontology: Mol. function=RNA-directed DNA polymerase activity; Cellular component=intracellular; Biological process=RNA-dependent DNA replication
  Homolog annotation: Hit_ID=Q8S461; Match level="QueryCoverage=99%, HitCoverage=23%, E-value=0.0, Identity=94%"; Hit description =Putative prpol
MKESDQLATSFITPFGMYCYVTMPFGLKNVGATYQRCMNHVFGEHIGQTVEAYIDDIVVKTRKASDLLSDLEVTFRCLKAKGVKLNPEKCVFWVPRGMFLGFIVSERGIEANPEKIAAITSMGPIKDLKGVQRVMGCLAALSRFISRLGERGLPLYRLLRKAECFTWTPEAEEALGNLKALLTNAPILVPPAAGEALLIYVAATTQVVSAAIVVERREEGHALPVQRPVYFISEVLSETKIRYPQIQKLLYAVILTRRKLRHYFESHPVTVVSSFPLGEIIQCREASGRIAKRVVEIMGETISFAPRKAIKSQVLADFVAEWVDTQLPTVPIQLELWTMFFDGSLMKTGAGAGLLFISPLGKHLRYVLCLHFPASNNVAEYEALVNGLWIAIELGVRRLDAHGDSQLVIDQAMKNSHCRDPKMEAY

SEQ ID NO: 66334 - protein, 98 aa, Zea mays
  Coding DNA Sequence Number=SeqID_24555
  Subcellular localization annotation: CTP_CleavageSite=35; ConfidenceScore=5.04e-01
MRRLLRCVSTGACSVVPGVVADSMPALPVATSGARAGGGRRGGGDTQRLVVPVDLLCYVASRRSTAAAPPVQGYKLRNNANRSFQWLILPPFFIFVIS

SEQ ID NO: 66335 - protein, 74 aa, Zea mays
  Coding DNA Sequence Number=SeqID_24556
MADKGKGKDIIMGDPCISNISQKKITQKAPDEKAKRSGGAGRQTQLMNRTRQPGPSIADGWGTEREIGLTFSQY

SEQ ID NO: 66336 - protein, 154 aa, Zea mays
  Coding DNA Sequence Number=SeqID_24557
  Homolog annotation: Hit_ID=Q2QM17; Match level="QueryCoverage=24%, HitCoverage=18%, E-value=9e-12, Identity=84%"; Hit description=YABBY protein, expressed
  Pfam annotation: Domain name=YABBY; Domain location=50-152; Score= -56.7; E_value=1.7e-05; Accession=PF04690.4; Description=YABBY protein
MAASNPCIHLGLLCVTSAWARHTTIITRGHPWALFIHCCSGSECPGEQHAQHGDSSVWALHKSTVSESESTHALSPRTRSAPVRRRPPSGAGLFVVLKVPAADDDVVRAAERALAAGTDTEQRSSEEIRRIKANNPDISHREAFSTAAKNDLIS

SEQ ID NO: 66337 - protein, 149 aa, Zea mays
  Coding DNA Sequence Number=SeqID_24558
MEEDDEFGDLYTDILIPTHTPQSTSALSNPVLVETLHRPPPHPNPTPMAATAEEAAMKVRGGGCWRQVPLPAKTLVGWLPLLAAGGTTVGSPGGQGGSGKAGTVQSEDCRWRLRGANALTPQAGCRRRWPRAWPPGRGRVPASRREIWS

SEQ ID NO: 66338 - protein, 98 aa, Zea mays; identical to SEQ ID NO: 43322
  Coding DNA Sequence Number=SeqID_24559

SEQ ID NO: 66339 - protein, 99 aa, Zea mays
  Coding DNA Sequence Number=SeqID_24560
MGVRCLRDGNWNKDEGVVPCVKRLNVLNTCREICRLCPSLDLRRGLPIPVMGGYKCGNCTTGSRGSLEDMVAGVTWPSILPPGWTVEWDPTSAEEEHEE

SEQ ID NO: 66340 - protein, 94 aa, Zea mays
  Coding DNA Sequence Number=SeqID_24561
MVKVDPNYGIKHSDPLLNISATKGARWGMGGAEAGAGAVEAGVVAVVVAVDVVEGSRAAGPSKVGGGVVIGSDGVDRAVEERARDERRQTWKAI

SEQ ID NO: 66341 - protein, 87 aa, Zea mays
  Coding DNA Sequence Number=SeqID_24562
  Subcellular localization annotation: CTP_CleavageSite=50; ConfidenceScore=5.30e-01
MEKAPNASVENLGRCACPNPTGLYTVLQGISRQTSLPTSFRPVLRPTSPTDSTLGASTADRQGERSDAAFGLRKTTSDRRCVMGGLD

SEQ ID NO: 66342 - protein, 102 aa, Zea mays
  Coding DNA Sequence Number=SeqID_24563
MRQRREGGCAQGSKQSWGSWGATWVNSLGGWARRATSSCGEDRADKRDQGVSGSAHEPQPPKWPFGRLSVDGRIGQSGASPDTVRCASHVTQPLGFDRWSSD

SEQ ID NO: 66343 - protein, 465 aa, Zea mays
  Coding DNA Sequence Number=SeqID_24564
  Gene Ontology: Mol. function=RNA-directed DNA polymerase activity; Cellular component=mitochondrion; Biological process=RNA-dependent DNA replication
  Homolog annotation: Hit_ID=UPI00004C1731; Match level="QueryCoverage =99%, HitCoverage=40%, E-value=1e-130, Identity=70%"; Hit description= UPI00004C1731 related cluster
  Pfam annotation: Domain name=RnaseH; Domain location=131-247; Score= -15.3; E_value=0.0015; Accession=PF00075.14; Description=RNase H
  Pfam annotation: Domain name=rve; Domain location=249-431; Score =72.9; E_value=1e-18; Accession=PF00665.16; Description=Integrase core domain
  Pfam module annotation: Pfam domain module=RnaseH::rve; Domain location=131-247::249-431
MGCLAALSRFISRLGERGLPLYRLLRKTECFTWTPEVEEALRNLKALLTNAPILVPPAAGEALLIYVAATTQVRPVYFISEVLSETKIRYPQIQKLLYAVILKRRKLRHYFESHPVTVVSFFPLGEIIQCREASGAGAGLLFFSPLGKHLRYVLRLYFSASNNVAEYEALVNGLRIAIELGVRRLDAHGDSQLVIDQVMKNSHCRDPKMEAYCDEVRSLEDKFYGLELNHIARRYNETADELAKIASGRTTVPPDVFSRDLHQPSVKTNDTPEPEKVSALPEAPSAPEGEALRVEEERNGKAPGGYTHLLVAIDKFSKWIEAVAFFTNIIHRFGVPNSIITDNGTQFTGRKFLDFCEDHHIRVDWAAVAHPMMNGQVERANGIILQGLKLRIYNDLNKFGRRWMKELSFVVWSLRTTPSRATGFTLFFLVYGAEAILPTDLEYGSPRTRAYDDQSNQTNREDSLD

SEQ ID NO: 66344 - protein, 188 aa, Zea mays
  Coding DNA Sequence Number=SeqID_24565
MGREKAQTSSGHVPPLHVVVRSAKFVTDHLLAIRFAGQGRDEERKKQREVGGGKEKMPLPYRTCALVELNQTDPPATTLSQNSEQTLLTAEPWSHAQTFLATTHTKFRLQWRPTACDQQPSTKILRIAIMALVLFIYARDCLGDQGTVGAGKTEGVDVLFFVDWASIGKSEKHKSEFGSDKIGGNWRG

SEQ ID NO: 66345 - protein, 583 aa, Zea mays
  Coding DNA Sequence Number=SeqID_24566
  Gene Ontology: Mol. function=transmembrane receptor activity; Cellular component=integral to membrane; Biological process=defense response to bacterium
  Homolog annotation: Hit_ID=Q6Z656; Match level="QueryCoverage=92%, HitCoverage=100%, E-value=0.0, Identity=85%"; Hit description =Putative endomembrane protein
  Pfam annotation: Domain name=DUF1109; Domain location=372-575; Score=- 133.7; E_value=0.068; Accession=PF06532.2; Description=Protein of unknown function (DUF1109)
  Pfam annotation: Domain name=EMP70; Domain location=95-541; Score =471.7; E_value=9.3e-139; Accession=PF02990.7; Description =Endomembrane protein 70
  Pfam module annotation: Pfam domain module=DUF1109::EMP70; Domain location=372-575::95-541
MTLVLSVIQFLCTRVYLEILNVDGTVIFFQVIGKVCPELFIMVEGWVFSALLVVFLAFTTPCESFYLPGSYMHTYQQGEVIRAKVNSLTSIETELPFSYYSLPYCRPRDGVKKSAENLGELLMGDQIDNSPYRFRVNVNESLYLCTTTPLDEANVKLLKQRSHDLYQVNMILDNLPVRRFTEQNGITIQWTGYPVGYIPEGTSDVYIINHLKFKVLVHKYEGGEVKVVGTGEGMEVISETDKDANSGYEIVGFEVVPCSVKRDPESILKLNMYDKVDPVNCPVELEKSQLVREKEKITFTYEVEFVNSDIRWPSRWDAYLKMEGSKIHWFSIMNSLMVILFLAGIVFVIFLRTVRRDLTRYEELDKEAQAQMNEELSGWKLVVGDVFREPTSPKLLCVMIGDGVQILGMAIVTIFFAAFGFMSPASRGMLLTGMIVFYMLLGIVSGYAAVRLWRTLKGTSEGWSIWLGRFYYVFGFLLVVLLLLIVVCAEVSVVLTYMHLCAEDWRWWWKAFFASGTVALYVFLYSINYLVFDLRSLSGPVSAILYIGYSFVVSLAIMLATGTVGFLTSFSFVHYLFSSVKID

SEQ ID NO: 66346 - protein, 123 aa, Zea mays
  Coding DNA Sequence Number=SeqID_24567
  Subcellular localization annotation: CTP_CleavageSite=67; ConfidenceScore=5.27e-01
MKKSSVKKPLVLLLRPPLHGKWRRLSSFVSSLRQTGSPQKLHVPDKRPIALVAPWSARIPCTPNRRRAGHTVAVLNIKALIPVVLDNISPNYTRWKALLNNTDKYELSDHVVEDIRPEVVVDP

SEQ ID NO: 66347 - protein, 373 aa, Zea mays
  Coding DNA Sequence Number=SeqID_24568
  Gene Ontology: Mol. function=kinase activity; Cellular component =membrane; Biological process=protein amino acid phosphorylation
  Homolog annotation: Hit_ID=O24571; Match level="QueryCoverage=71%, HitCoverage=64%, E-value=1e-145, Identity=91%"; Hit description =Ser/Thr protein kinase
  Pfam annotation: Domain name=B_lectin; Domain location=48-157; Score =107.7; E_value=3.3e-29; Accession=PF01453.15; Description=D-mannose binding lectin
  Pfam annotation: Domain name=S_locus_glycop; Domain location=171-286; Score=-4.6; E_value=8e-05; Accession=PF00954.11; Description=S-locus glycoprotein family
  Pfam module annotation: Pfam domain module=B_lectin::S_locus_glycop; Domain location=48-157::171-286
MADVHFTINAHKRLTNLQSSDGTFSSGFYEVYTHAFTFSVWYSKAAANKTIVWSANPDHPVHARRSALTLQKDDNMVLTDYDGAAVWRADGNNFTGVQRARLLNTGNLVIEDSGGNTVWQSFDSPTDTFLLTQLITAATRLVPTTQSRSPSNYIFRFSDLPQVSDIYWPDPDQNIYQDGRNQYNRTRLGMLTDSGVLDSSDFADDQALVASDVGPGVKRRLTLDPDGNLRLYSLNDSDGSWSVSMVAMTQPCNIHGLCGPNGICHYSPRPTCSCPPGYATRNPGATGSSASPDLGPRPEEEVSASPDPRAWPHPQPRKMASASPDPRARPSPSASEGGLRLARPQGSASTSTSGGIASSPDLGLKRSLCLARP

SEQ ID NO: 66348 - protein, 65 aa, Zea mays
  Coding DNA Sequence Number=SeqID_24569
  Subcellular localization annotation: CTP_CleavageSite=20; ConfidenceScore=5.02e-01
MPPPLLYSTTTAATIFLPLVASTSLCCVAAIYGITSSTTRPPRYPDYPTSSTMDSWKIWICSGAF

SEQ ID NO: 66349 - protein, 102 aa, Zea mays
  Coding DNA Sequence Number=SeqID_24570
  Subcellular localization annotation: CTP_CleavageSite=85; ConfidenceScore=5.73e-01
MVLAPASSTPQSGALFFFPCPCARADSACRSSTAPRRSLLGLRRLSSLATPWPHRWLPSVPAISCRGILSVLGTLINRVMRKRTQADSKRGAICKLKLMNQP

SEQ ID NO: 66350 - protein, 70 aa, Zea mays
  Coding DNA Sequence Number=SeqID_24571
MAGRGQRPIERWPSARPPLPAVKPVSGEAAMRVSVPLHELVWQKWTALALCPACVPGLLREREEEETAVA

SEQ ID NO: 66351 - protein, 682 aa, Zea mays
  Coding DNA Sequence Number=SeqID_24572
  Gene Ontology: Mol. function=RNA-directed DNA polymerase activity; Cellular component=nucleus; Biological process=RNA-dependent DNA replication
  Homolog annotation: Hit_ID=Q8S472; Match level="QueryCoverage=99%, HitCoverage=63%, E-value=0.0, Identity=81%"; Hit description =Putative gypsy-type retrotransposon RIRE2
  Pfam annotation: Domain name=Retrotrans_gag; Domain location=170-261; Score=61.7; E_value=2.4e-15; Accession=PF03732.7; Description =Retrotransposon gag protein
MPEPSTTEGRRIQGELKNLLEDAAVRRAESSAFRRQGYPSEHRATTSRFMREASVHTRLTRNTAPAAPGRLGNEHHHRNRRAHLDEKVHRGYHPRRGGRYDSGEDRSPSPEPPGPQAFSRAIRRAPFPTRFRTPTTITKYSGETRPELWLADYRLACHLGGTDDDNLIICNLPLFLSDTARAWLENLPPGQISNWYDLVQAFAGNFQGTYVRPGNYWDLQSCRQQSGESLRDFIRRFSKQRTELPNVTDSDVIGSFLAGTTSRDLVSKLGRKTPTRASELMDIATKFASGQEAVEAIFRKDKQPQGRQPEDVPEASTQRGTKKKGMKKSQEKRDAADADLVATAEYKNPRKPPGGANLFDKMLKEPCPYHQGPVKHTLEECAMLRRHFHKAGPPAEGGRARDDDKKEDHKAGEFPEVHDCFMIYGGQVANALARHCKQERREVCSVKVAAPVYLDWSDKPITFDQGDHPDRVPSLGKYPLVVDPVVGNIRLTKVLMDGGSSLNIIYAETLGLLRINLSSVRAGVAPFHGIIPKKRVQPLGQLDLPVCFGTPSNFRRETLTFEVVGFRGTYHALLGRPCYAKFMVVPNYTYLKLKMPGPNGVITVGPTYRHAYECDVECVEYAEALAESEALIADLESLSKEAPDVKRRAGNFEPAETVKSVPLDPSNNASKQIRIGSELDPK

SEQ ID NO: 66352 - protein, 105 aa, Zea mays
  Coding DNA Sequence Number=SeqID_24573
  Pfam annotation: Domain name=zf-CCHC; Domain location=68-85; Score =17.1; E_value=0.0015; Accession=PF00098.13; Description=Zinc knuckle
MDEDGEEVVFDGTLVPSTVGFVDTGHAQRRMTLGVELVAMHMDRWLRASVTSTSVDGPVSAYPPRSKKVRYKCGKPGHFIAKCPISSDSDRGDDKKGKRKEKKKY

SEQ ID NO: 66353 - protein, 210 aa, Zea mays
  Coding DNA Sequence Number=SeqID_24574
  Gene Ontology: Mol. function=binding; Cellular component=thylakoid; Biological process=photosynthesis
  Homolog annotation: Hit_ID=Q7XD86; Match level="QueryCoverage=68%, HitCoverage=77%, E-value=2e-63, Identity=71%"; Hit description=TPR Domain containing protein, expressed
  Pfam annotation: Domain name=TPR_1; Domain location=117-150; Score =40.0; E_value=8.3e-09; Accession=PF00515.18; Description =Tetratricopeptide repeat
  Pfam annotation: Domain name=TPR_1; Domain location=76-109; Score =6.7; E_value=0.84; Accession=PF00515.18; Description=Tetratricopeptid e repeat
  Pfam annotation: Domain name=TPR_2; Domain location=117-150; Score =26.1; E_value=0.00012; Accession=PF07719.7; Description =Tetratricopeptide repeat
  Pfam annotation: Domain name=TPR_2; Domain location=151-182; Score =0.6; E_value=28; Accession=PF07719.7; Description=Tetratricopeptide repeat
  Pfam annotation: Domain name=TPR_2; Domain location=76-109; Score =14.3; E_value=0.46; Accession=PF07719.7; Description=Tetratricopeptid e repeat
  Pfam module annotation: Pfam domain module=TPR_1::TPR_1::TPR_2::TPR _2::TPR_2; Domain location=117-150::76-109::117-150::151-182::76-109
MVLIELEPEEATRPSLPVAEEQAVAGDAARPSSSAAPEEEEAAAGGKASRAPEEEEDAFEDALTDEQLREKARIQANDAKAEGNKLFGAGQYEEALSQYEISLQIAAELESAEDIRAACHSNRAVCFLKLGKHDETIKECSKALELNPTYLKALLRRAEAHEKLEHYDEAIAAKLKDLGNSVLGRFGMSVDNFKAVKDPNTGSYSIQFQK

SEQ ID NO: 66354 - protein, 38 aa, Zea mays
  Coding DNA Sequence Number=SeqID_24575
MREKTGGDDLVSLSKTSAGLDVYNIVFSTILEFSRRLS

SEQ ID NO: 66355 - protein, 61 aa, Zea mays
  Coding DNA Sequence Number=SeqID_24576
MPSYFYFFPNLLPDRGALVERLGQEPYQSGLATDELFLAARRTELGENGVAVALFEIGVGD

SEQ ID NO: 66356 - protein, 322 aa, Zea mays
  Coding DNA Sequence Number=SeqID_24577
  Subcellular localization annotation: CTP_CleavageSite=32; ConfidenceScore=5.56e-01
MASSGVSPRRRCSFLPQRLLRARQDAPARGALCSSSSSCAVSRPCREALAARISLPSRGPSSLVSHGHRSSVELLSAEGSGPCRARLELPPTLCPAPAPSPCVWCFYLLRFGDRVPWFFKFVAVPACLGTVGSDHHPHVDGALDSSVPRRASSAPAILAQIHPCTWSSSRIRRPPLGSWRSASSSRSFPGGRFLVVFYSRARPRFLPACASSVASADPYPQSLVGAQLARTLCSDLSSVALSSARCDLALALCPYCARQSDSWPSSTNLAITALCCSTGDSLLVLLQPPDPQLSIIDSDRRTFAVMKTWSLPYTEQSSEDEG

SEQ ID NO: 66357 - protein, 660 aa, Zea mays
  Coding DNA Sequence Number=SeqID_24578
  Gene Ontology: Mol. function=5-formyltetrahydrofolate transporter activity; Cellular component=membrane
  Homolog annotation: Hit_ID=Q6ZA55; Match level="QueryCoverage=72%, HitCoverage=96%, E-value=0.0, Identity=70%"; Hit description =Putative integral membrane protein
  Pfam annotation: Domain name=BT1; Domain location=236-656; Score =574.5; E_value=1e-169; Accession=PF03092.7; Description=BT1 family
  Pfam annotation: Domain name=MFS_1; Domain location=232-612; Score =41.5; E_value=2.9e-09; Accession=PF07690.6; Description=Major Facilitator Superfamily
  Pfam annotation: Domain name=PUCC; Domain location=256-642; Score= -227.2; E_value=0.05; Accession=PF03209.6; Description=PUCC protein
  Pfam module annotation: Pfam domain module=BT1::MFS_1::PUCC; Domain location=236-656::232-612::256-642
MAGLFLRERQRRWRGAARLLSPRKREERRKAKRSSEPRDDGEDGLQRPALTAAPSAPERHRCGRLVPNIRRPRSPPPPPAGTRAARCGRPPETALGGSSGRRGSYDDDGTAPGSLGLDGSSTSSSVRRTGEPRWLISYIVIVKQFCVVTDCCRNFLWSSRKHSGDPFFLSLDYQGSAKPRYQVTSKEEDTQNADREGWQYSTEGLSKSMSKSRYIKVFGVDLSPDNVAVAIVYFVQGVLGLSRLAVSFYLKDNLHLEPAETAVISGFSALPWLVKPLYGFISDSIPLFGYRRRSYLFLSGILGALSWSLMAAVVDDKYSAALSIILGSLAVAISDVVVDSMVVERARGESQSTSGSLQSLCWGSSAFGGVVSAYFSGSLVDTYGFTDHVSHECRFVFGVTALLPLMTSAVAVLVNEERLPLGKSSVSLSVSGSELIESSKQRIMQIWDSVKQPSILLPTLFIFLWQATPQSDSAMFFFITNKLGFTPEFLGRVTLVTSVASLLGIGVYNLFLKEVPLRKIFLVTTVLGSALGMTQVLLVTGLNRKLGISDEWFSIGDSLIITVLGQASFMPVLVLAAKLCPVGAEATLFATLMSISNAGGVAGGLVGAGLTQLLGVSRDNFENLALLIAICNLSSLLPLPLLGLLPDESRNADGAQTKND

SEQ ID NO: 66358 - protein, 152 aa, Zea mays
  Coding DNA Sequence Number=SeqID_24579
MGKNNKRKREPTPPSDDFGDSEYSEEEFSSESEGSPAPIPLRESSDDSDDSQGLAAEVWTYIRAVECSGLEGSDESEYSSGEEDSSEEDGGGDGGDDDDDNDDDDGGGGGDDDGGGRGGSSGSKDGDGRSSRGGGGSSRGGPPVARCHWSLD

SEQ ID NO: 66359 - protein, 53 aa, Zea mays
  Coding DNA Sequence Number=SeqID_24580
MVVTSAVTARRQPRSVEHCLPCKDKNLIRIICFSQLMRLLDPLYYIKYASEYG

SEQ ID NO: 66360 - protein, 96 aa, Zea mays
  Coding DNA Sequence Number=SeqID_24581
MLTARGDDGGTQDFRGGWRRVVSMRGEGWEIRVAFKGGLIPSVRLGLNAGAIEQQTSGLHMSARCNERRRTQVWRSGPTCQRQGERARDAELGWAR

SEQ ID NO: 66361 - protein, 146 aa, Zea mays
  Coding DNA Sequence Number=SeqID_24582
MAPRDWLKSCHTPVHKSGPAHSDQAGSSLPTGARPGPTQYRNDDEHQGQNLTGVSSIGRAAHGDADPRRGRLVILATRTNEGQDDPSPTEQRLEPTTKHQSTKFFPPFSLSLTVGGNGEDFGGSTVMEANTEATIHPVFIARARSK

SEQ ID NO: 66362 - protein, 1025 aa, Zea mays
  Coding DNA Sequence Number=SeqID_24583
  Gene Ontology: Mol. function=phosphoribosylformylglycinamidine synthase activity; Cellular component=chloroplast; Biological process='de novo' IMP biosynthetic process
  Homolog annotation: Hit_ID=Q5N821; Match level="QueryCoverage=99%, HitCoverage=72%, E-value=0.0, Identity=85%"; Hit description =Putative formylglycineamide ribotide amidotransferase
  Pfam annotation: Domain name=AIRS; Domain location=1-136; Score=-2.1; E_value=0.00018; Accession=PF00586.14; Description=AIR synthase related protein, N-terminal domain
  Pfam annotation: Domain name=AIRS_C; Domain location=146-304; Score =97.5; E_value=3.9e-26; Accession=PF02769.12; Description=AIR synthase related protein, C-terminal domain
  Pfam annotation: Domain name=AIRS_C; Domain location=542-688; Score =96.6; E_value=7.4e-26; Accession=PF02769.12; Description=AIR synthase related protein, C-terminal domain
  Pfam module annotation: Pfam domain module=AIRS::AIRS_C::AIRS_C; Domain location=1-136::146-304::542-688
MRELDILFTAETHNFPCAVAPYPGAETGAGGRIRDTHATGKGSFVVASTAGYCVGNLRIDNSNAPWEDPSFSYPVNLASPLQILVDASDGASDYGNKFGEPLIQGYTRTFGMRLLNGERREWLKPIMFSGAIGQIDHAHISKGDPEIGMLVVKIGGPAYRIGMGGGAASSMVSGQNDAELDFNAVQRGDAEMAQKLYRVVRACAEMGESNPIISIHDQGAGGNCNVVKEIIYPKGAEIDIRSIVVGDHTLSVLEIWGAEYQEQDALLVKLESRSLLESLCERERVSMAVIGKIDGSGKIVLIDSAAVEYSKLNDLPPPTPVEELELEKVLGDMPQKTFEFRRVSQVTEPLDIAPGVTLLDALKRVLRLPSVCSKRFLTTKVDRCVTGLVAQQQTVGPLQLPLADVAVIAQTYTDLTGGACSIGEQPIKGLLNPKAMARLAVGEALTNLVWAKVTSLADVKASGNWMYAAKLDGEGADMYDAAVALADCMIELGIAIDGGKDSLSMAAQCDGEVIKAPGNLVISTYVTCPDITLTVTPDLKLGEDGILLHIDLAKGNRRLGGSALAQAFDQIGNDCPDIDDVLYLKKVFEAIQELLSQRLISAGHDISDGGLIVCVLEMAFAGNCGFKLDIDLEDRSLIEGLFAEELGLIIEVHSKYLNIVKQKLEIAGISANVIGEVTNSPEIEVFIDGNLHLKEKTSDLRDLWEETSFQLEELQRLKSCVKLEKEGLKCRTSPSWSLSFTPKFTDGKLLTASLKPKVAIIREEGSNGDREMAAAFHAAGFEPWDITMSDLLAGKSSLKEFRGIAFVGGFSYADVLDSAKGWAASIRFNQPLIQQFQDFYHRPDTFSLGVCNGCQLMALLGWVPGSGVGGSLGTGGDMSQPRFIHNESGRFECRFTSVSIGDSPAIMFKGMEGSTLGVWSAHGEGRAFFPDENVLATVVKSNLAPVRYCDDSNNITETYPFNPNGSPLGIAALCSPDGRHLAMMPHPERCFMMWQYPWYPKEWQVEKSGPSPWLRMFQNAREWCS

SEQ ID NO: 66363 - protein, 78 aa, Zea mays
  Coding DNA Sequence Number=SeqID_24584
MAEPSDAPVTKSWSRLAAPRAIETPAPLLRHCGSAAQLVLGCRWSISDWKIPKRTSSQPVTEQQQTDAFRFKTFEIVS

SEQ ID NO: 66364 - protein, 139 aa, Zea mays
  Coding DNA Sequence Number=SeqID_24585
  Subcellular localization annotation: CTP_CleavageSite=40; ConfidenceScore=5.09e-01
MHRLRLRGRKQPMVFPSAAQRHGASADVRLPSNMHTMMVVGDVVVGRASDAAGRPAPSSLDSDDATSVQGKDKEEGVGSGPRQQQSTGALRRAAQLLRLPRRFLAVEAGVVEEGSGTDGAGLSCRSHDVHINCPPPSKR

SEQ ID NO: 66365 - protein, 71 aa, Zea mays
  Coding DNA Sequence Number=SeqID_24586
MSRPVHGLLLPLLFAVCLMIPLKVSECSRPPPSPSSGDDHVHVGRPHHQRQRLLLDAEARTARPPTCRTDV

SEQ ID NO: 66366 - protein, 199 aa, Zea mays
  Coding DNA Sequence Number=SeqID_24587
MARPVRAMLPCILVVVVLLFQTAASSRPLLSTEERRRRPRVDPTASPAPAHRAESRSHHHRAAAETGTGRVAAVETTTTEDDDGSRTTSSSTRAEEGGGAAAAALSSATTTTSARGKQQDDDVVGVGLRNGRPAAALLRSVLARRFLAGVVGGADSAARASCRSSDDPAAGAAEDSTRSRFARRLRAQQQQVRQKTPRA

SEQ ID NO: 66367 - protein, 131 aa, Zea mays
  Coding DNA Sequence Number=SeqID_24588
MTTGSGSACLGVASKSAMRLAMLEARYAYNAYIMCRPANGVVINAVSPMGPHPSDTDHVTESEESHSDCPHPPPPRSASRQSTRCERLPIVPRLSSSVWFVVVPPPGSLWLRLRASCINLCQGRGADVKRV

SEQ ID NO: 66368 - protein, 306 aa, Zea mays
  Coding DNA Sequence Number=SeqID_24589
MGSGEAEVVRPRPGRSPSPGVGRGGVRSAEARAESEPWGRARRSFVVLRVLARVRALGSGGAEFAVFRPESEPWGRAERSSPSSGSLARVRALGLGGVEFAVFRVLARVRALGSGEAEFAVFRVLARVRALGSGGAEFAVAPSARPDCLSDSLCRVAPQSEWRRRRCPSVRLLYADGGYELRIRRLEGKPHAHRPTPTPTPTPTDTSRSRGSVTQLANVFNINGCSYARGLASASGEVVFGGRRIEAVQNQRREAGRGPNSTTRPSHSSLFYRAATATARQLPSAAGWFLFNLDSMMTLSAKNLTA

SEQ ID NO: 66369 - protein, 298 aa, Zea mays
  Coding DNA Sequence Number=SeqID_24590
  Gene Ontology: Mol. function=metal ion binding; Cellular component =cytoplasm; Biological process=ubiquitin cycle
  Homolog annotation: Hit_ID=Q6PVY8; Match level="QueryCoverage=99%, HitCoverage=100%, E-value=1e-120, Identity=68%"; Hit description =Zinc finger protein
  Pfam annotation: Domain name=zf-C3HC4; Domain location=201-235; Score= 10.9; E_value=0.012; Accession=PF00097.15; Description=Zinc finger, C3HC4 type (RING finger)
  Pfam annotation: Domain name=zf-CHY; Domain location=59-142; Score =141.2; E_value=2.8e-39; Accession=PF05495.3; Description=CHY zinc finger
  Pfam module annotation: Pfam domain module=zf-C3HC4::zf-CHY; Domain location=201-235::59-142
MGALDLHLDFASAQHGQAKLKEYAKSSLLSDGNYNTDKINGSNPDDYEKFEKGIMHYGCPHYRRRCRIRAPCCNEIFDCRHCHNETKNSIKIDKMKRHELPRHEVQQVVCSLCGTEQEVRQVCINCGVCMGKYFCGLCKLFDDDVSNRELAIVSPVFAFLKRRMKCIVNMAQALVHELSGSSGSQFSYFPTDLFREFQYLFDSTNDVSVLPCGHTIHVKCLKEMEEHCQFACPLCSKSVCDMSKAWERLDMELATLSDSCDHKMVRILCNDCGAISDVQFHLIAHKCQNCKSYNTRQI

SEQ ID NO: 66370 - protein, 665 aa, Zea mays
  Coding DNA Sequence Number=SeqID_24591
  Gene Ontology: Mol. function=sulfate porter activity; Cellular component=integral to membrane; Biological process=sulfate transport
  Homolog annotation: Hit_ID=Q942E2; Match level="QueryCoverage=97%, HitCoverage=94%, E-value=0.0, Identity=75%"; Hit description =Putative plasma membrane sulphate transporter
  Pfam annotation: Domain name=Ribonuclease_BN; Domain location=278 -506; Score=-94.4; E_value=0.056; Accession=PF03631.5; Description =Ribonuclease BN-like family
  Pfam annotation: Domain name=STAS; Domain location=528-646; Score =114.9; E_value=2.4e-31; Accession=PF01740.11; Description=STAS domain
  Pfam annotation: Domain name=Sulfate_transp; Domain location=179-505; Score=430.2; E_value=2.7e-126; Accession=PF00916.10; Description =Sulfate transporter family
  Pfam annotation: Domain name=Xan_ur_permease; Domain location=127 -498; Score=-157.3; E_value=0.03; Accession=PF00860.11; Description =Permease family
  Pfam module annotation: Pfam domain module=Ribonuclease _BN::STAS::Sulfate_transp::Xan_ur_permease; Domain location=278 -506::528-646::179-505::127-498
MGPAAGDGDRGPGAAAEHKVNLSARQPFVESVRTCLAETFFPDDPFRGLGSRPPAARAWGALKYFVPALEWAPRYTAGKFKYDLLAGVTIASLAIPQGISYAKLANLPPIIGLYSSFVPPLLYAVFGSSNNLAVGTVAAASLLLASIIETEVPPEENPQLYLQLFYTAAFFTGVFQTALGVFRLGLIVDFLSRSTITGFMGGTATIIILQQLKGMLGMKHFTPKTDLVSVMRSIFYYRHEIYLGVMTMATPSQIYKWRWQSLVLGICFLLLLLLSKHLRKKKPNLFWVSAIAPFLIVVIGGVFAFLVKGDEHGIPIVGDLKKGINPLSISQLTFTDKHVNTAMKAGFLSGILALAEGIAVGRSLALVKNEQIDGNKEMIAFGIMNIAGSFTSCYLTTGPFSKSAVNFHAGCRTPMSNVVMSVCILLVLLFLAPLFKYTPLVALSSIIVVAMIGLIKVREFCHLYRVDKFDFCICMVAFIGVVFFTMVIGLSASVGLSVVRALLHVARPSTCKLGSVAGGDIFRDVRHYPHARSVPNVLVLQLGSPIYFVNAGYLRERILRWAEEEENGSKIDGQDLQYVVLDLAGVTSIDNTGIGMLVEVHKSLDRKGIRIALTNPRLEVTEKLVLSGYIKDIIGEEWVFLTVKDAITACRYALQRSRSKDDGEV

SEQ ID NO: 66371 - protein, 196 aa, Zea mays
  Coding DNA Sequence Number=SeqID_24592
MDDDEEEARTMAWERRKAERSGGGEQSGGMAVAKGSQGKGMAVAEEVVVPYASGGETGHEAETVAEWRRDGDTEMQGRVERVREVVITQSWIGKRFQVRTPRIGTPGVPPYDVISVYLASGVFLIKNLTSLAYGVRALKNVVGQPNRATMIASTMKNVVGTTTANATPPSLRALPPSSNHRHTNPVGPNHQSSYTS

SEQ ID NO: 66372 - protein, 87 aa, Zea mays
  Coding DNA Sequence Number=SeqID_24593
  Gene Ontology: Mol. function=glutamate-cysteine ligase activity; Cellular component=chloroplast; Biological process=glutathione biosynthetic process
  Homolog annotation: Hit_ID=Q5G1T9; Match level="QueryCoverage=97%, HitCoverage=22%, E-value=1e-33, Identity=80%"; Hit description=Gamma- glutamylcysteine synthetase
MQGRYEIMRNYMPKVGTLDLDMMFRTCTVQVNLDFSSEHDMIRKFRVGLTLQPIATAIFANSPFKEGKPNGFLSFKRHLLDSPSGHR

SEQ ID NO: 66373 - protein, 125 aa, Zea mays
  Coding DNA Sequence Number=SeqID_24594
MADVAACTVASARVSSRLPADMEGSPVNDIMGHSWDEAWMIPFDGNQVCLAISTRESQMTGLKRDPMPPLPWIKCIGVSVVVCSHLLGLWKVYAVGAIFIMVWAERPYFQPSAAYTPGTIDDKNS

SEQ ID NO: 66374 - protein, 109 aa, Zea mays
  Coding DNA Sequence Number=SeqID_24595
  Subcellular localization annotation: CTP_CleavageSite=35; ConfidenceScore=5.10e-01
MGITPAQKYQKALHMARRANGGREATPANNHALTRAVMAKSRARVGCSPQGEALESRGNDGGTGTRRGNGGKAPATQEPLWVFNSNSNQVSNSNQIKYVQQFKEYLGSI

SEQ ID NO: 66375 - protein, 1038 aa, Zea mays
  Coding DNA Sequence Number=SeqID_24596
  Gene Ontology: Mol. function=RNA-directed DNA polymerase activity; Cellular component=intracellular; Biological process=RNA-dependent DNA replication
  Homolog annotation: Hit_ID=UPI00005A975E; Match level="QueryCoverage =98%, HitCoverage=59%, E-value=0.0, Identity=87%"; Hit description =PREDICTED: similar to Retrovirus-related Pol polyprotein from transposon 297
  Pfam annotation: Domain name=RVT_1; Domain location=56-225; Score =134.4; E_value=3.1e-37; Accession=PF00078.17; Description=Reverse transcriptase (RNA-dependent
  Pfam annotation: Domain name=RnaseH; Domain location=455-582; Score =12.1; E_value=4.3e-06; Accession=PF00075.14; Description=RNase H
  Pfam annotation: Domain name=rve; Domain location=780-939; Score =119.1; E_value=1.2e-32; Accession=PF00665.16; Description=Integrase core domain
  Pfam module annotation: Pfam domain module=RVT_1::RnaseH::rve; Domain location=56-225::455-582::780-939
MPGIPRDVAEHSLDIRAGAQPVRQPLRRFDEEKRRVIGEEIHKLMAAGFIKEVFHPEWLANPVLVRKKGGKWWMCVDYTGLNKACPKVPYPLPRIDQIVDSTAGCETLSFLDAYSGYHQIRMKESDQLATSFITPFGMYCYVTMPFGLRNAGATYQRCMNHVFGEHIGRTVEAYVDDIVVKTRKVSDLLSDLEVRFRCLKAKGVKLNPEKCVFGVPRGMLLGFIVSERGIEANPKKIAAITSMGPIKDLKGVQRVMGCLAALSRFISRLGERGLPLYRLLRKAECFAWTPEAEEALENLKALLTRAPILVPPADGEALLVYVAATTQVVSAAIVVERQEEGHALPVQRPVYFVSEVLSETKIRYPQVQKLLYAVILTRRKLRHYFESHPVTVVSSFPLGEIIQCREASGRIAKWAVEIMGETISFAPRKAIKSQVLADFVAEWVDTQLPTAPIQPELWTMFFDGSLMKTGAGAGLLFILPLGKHLRYVLRLHFPASNNVAEYEALVNGLRIAIELGVRRLNARGDSQLVIDQVMKNSHCRDPKMEAYCDEVRRLEDKFYGLELNHIARCFNETADELAKIASGRTTVPPDVFSRDLLQPSVKIDDTPEPEAPLAQPEAPSAQPEASSVQPEVPSAPEGEALDVEEEQSGATPDRNWQAPYLQYLRQGELPLDQAEARRVARRAKSFVLLGDEEELYHRSPSGILKRCISIAEGQELLQEIHSGACGHHAAPRALVGNAFRQGFYWPTAVADATRIVRTCEGCQFYEKQTHLPARALQTIPITWPFAVWGLDLVGPLQKAPGGYTHLLVAIDKFSKWIEVRPLNNIRSEQAMAFFTNIIHRFGVPNSIITDNGTQFAGKKFLDFCEDHHIWVDWAAVAHPMSNGQVERANGMILQGLKPRIYNDLNKFGKRWMKELPSVIWSLRTTPSRATGFTPFFLVYGAEAILPTDLEYGSPRARAYNDQSNQASREDSLDQLEEARDKALLHSARYQQSLRRYHARGVRSRDLQVGDLVLRLQQDAQGRHKLTPPGRGHSSSPKF

SEQ ID NO: 66376 - protein, 80 aa, Zea mays
  Coding DNA Sequence Number=SeqID_24597
MAALCFGARWCRGPHRAGAKDCLDMDRVIGVLAALIGCARPPLSGATAGFAHVVTGAPTGGDTQNRARPSRLSLRLWSRP

SEQ ID NO: 66377 - protein, 180 aa, Zea mays
  Coding DNA Sequence Number=SeqID_24598
  Subcellular localization annotation: CTP_CleavageSite=38; ConfidenceScore=5.25e-01
MAMPSSSTYGSASDDTAPALGPRPEPKRQPRRASAILRIAAGGCPSNDVGKARGGARKRRPRTSDEGSKNPDDYNPAQQGEIGKQVRSHGCLTAIHVETVLRSRTVRPAAPAAPKHKAAIIFRPSRSLPAHPSLSYYLTAMAKKNSSWGLPSSAGGGSQHIRLLRPRRTDQRWRQSTRAR

SEQ ID NO: 66378 - protein, 36 aa, Zea mays
  Coding DNA Sequence Number=SeqID_24599
MTKSNILKPLMGSWNQITAAMLIRGTLTAFSTPAGH

SEQ ID NO: 66379 - protein, 108 aa, Zea mays
  Coding DNA Sequence Number=SeqID_24600
MAVAGGRAQQSRRQPGSRLILGQQESLLPRREDGTGKGGIPRKGSFSAKEPGSEPPLLIRDLKTGPPEGSTVASDRVGPTPTTGQGFEGQPPEGFHGRLRLLGLRAHY

SEQ ID NO: 66380 - protein, 591 aa, Zea mays
  Coding DNA Sequence Number=SeqID_24601
  Gene Ontology: Mol. function=RNA-directed DNA polymerase activity; Cellular component=mitochondrion; Biological process=RNA-dependent DNA replication
  Homolog annotation: Hit_ID=UPI00004C1731; Match level="QueryCoverage =99%, HitCoverage=43%, E-value=0.0, Identity=79%"; Hit description =UPI00004C1731 related cluster
  Pfam annotation: Domain name=RnaseH; Domain location=213-340; Score =9.2; E_value=8e-06; Accession=PF00075.14; Description=RNase H
  Pfam annotation: Domain name=rve; Domain location=366-524; Score =86.0; E_value=1.1e-22; Accession=PF00665.16; Description=Integrase core domain
  Pfam module annotation: Pfam domain module=RnaseH::rve; Domain location=213-340::366-524
MGPIKDLKGVQRVMGCLAALSRFISRLGERGLPLYRLLRKAECFTWTPEAEEALGNLKALLTKAPILVPPAAGEALLVYVTVTTQVVSVAIVVERQEEGHALPVQRSVYFVSEVLSETEIRYPQVQKLLYAVILTWRKLRHYFESHPVTVVSSFPLGEIIQCREASGRIAKWAVEIMGETISFAPRKAIKSQVLADFVAEWVDTQLPTAPIQPELWTMFFDGSLMKTGADAGLLFISPLGKHIRYVLRLHFPASNNVAEYEALVNGLRIAIELGVRRLDARGDSQLVIDQVMKNSHYRDPKMEAYCDEVRRLEDKFYGLELNHIARRYNETADELAKIASGRMTVPPDVFSRDLHQPSIKIDDTPEPEAPSAQPEAPSAQPEKAPGGYTHLLVAIDKFSKWIEVRPLNSIRSEQAVAFFTNIIHRFGVPNSIITDNGTQFTGRKFLDFCEDHHIRVDWAAVAHPMSNGQVEHANDMILQGLKPRIYNDLNKFGKRWMKELPSVVWSLRTTPSRATGFTPFFLVYGAEAVLLTDLEYGSSRTRAYTDQSNQASREDSLDQLEEARDKALLHSARYEQSLRRYHARGVRSRDL

SEQ ID NO: 66381 - protein, 106 aa, Zea mays
  Coding DNA Sequence Number=SeqID_24602
MGHKYTPTYYWGLQDTIASLCKSILPSFRVGRRLTSDQAAARRHAEQLKWQQESFHRILHLAALHREGIVPAHDVAAFRGTMLAALVPPPPQHPEQPAGSGNEFKA

SEQ ID NO: 66382 - protein, 219 aa, Zea mays
  Coding DNA Sequence Number=SeqID_24603
  Gene Ontology: Cellular component=mitochondrial matrix
  Pfam annotation: Domain name=MAM33; Domain location=52-217; Score= -31.8; E_value=0.0063; Accession=PF02330.6; Description=Mitochondrial glycoprotein
  Subcellular localization annotation: CTP_CleavageSite=73; ConfidenceScore=5.73e-01
MACTFLRRAFSLTAAGTHATPRVAAAFASTSSSSSVVVPLRSPLDHRLLRHLRSEITYLAERRPPHVPPSSFKSFAVEDRPGEQWPVPDDAPLFRRVESLERGPRLHLSLIVEVARGDRVLGFVCSAWPDDLAVRPRAHARSWRWQQWWSSWWARFRVWITVWRCELKLGGEEREAVTKFLKEREVDAELAGFLHDYMANKEKMELLRWLKTVESFLNK

SEQ ID NO: 66383 - protein, 664 aa, Zea mays
  Coding DNA Sequence Number=SeqID_24604
  Gene Ontology: Mol. function=transporter activity; Cellular component= integral to membrane; Biological process=oligopeptide transport
  Homolog annotation: Hit_ID=Q5JLL0; Match level="QueryCoverage=86%, HitCoverage=97%, E-value=0.0, Identity=71%"; Hit description =Putative dicarboxylate transporter
  Pfam annotation: Domain name=C4dic_mal_tran; Domain location=169-455; Score=-87.0; E_value=0.056; Accession=PF03595.8; Description=C4 -dicarboxylate transportermalic acid transport protein
  Pfam annotation: Domain name=MFS_1; Domain location=55-539; Score =18.1; E_value=4.7e-05; Accession=PF07690.6; Description=Major Facilitator Superfamily
  Pfam annotation: Domain name=PTR2; Domain location=117-523; Score =349.5; E_value=5.6e-102; Accession=PF00854.12; Description=POT family
  Pfam module annotation: Pfam domain module=C4dic_mal_tran::MFS _1::PTR2; Domain location=169-455::55-539::117-523
MENVSGAKEDGKKVQERAAWCVSDGGGNLVQDAVDYRGCRADKSSTGGWASAALAVGIELCERLSTMGIAVNLVTYLTATMHLPSAAAANVVTDFMGTSFLLCLLGGFLADSFLGRYLTIAIFAVVQAIGTGLLAVSTEVRQLRPPPCGPGAAGPCEQATGLQMGVLYVCLYLIALGTGGLKSSVSGFGTDQFDERDARERAAMGLFFDRFFFFVTFGTLLAVTVLVYVQDHVGRSCAYGICAGAMLVAVAVFLSGTRRYRYKRSSGSPIVHILQVLVAATRKRNIVMQPLTAAALYEDHPEHARIPHTAQFPCLDRAAVMAGDDDNEVGHDGRPTMNPWKLRSVSRVEEVKMVARLMPVWATTILFWTMYAQMITFSVEQATTMDRRMGGFEIPAASLTVFFVGAIMLTLAFYDRVFVPLCRSLMTGRQGFTNLEKIGIGLVLSTFGMAAAAICEKKRLAVAATSVAVGHGSLPISVFMLTPQFLLVGSGEAFIYTGQLDFFIMRSPKSMKTMSTGLFLTTLSLGFFLSSALVSLVKSCTRWLGDTINHSRLDYFYWLLARARRCQSRRLHRLCHVGRSTGQQSGGAAAARDGRGREMLARSINYQSTSAAVLHPSLNNYQRHTYTLTNLEDFIVLMRGCSDDMISLHTKTSSPLVIEKDEKS

SEQ ID NO: 66384 - protein, 97 aa, Zea mays
  Coding DNA Sequence Number=SeqID_24605
  Subcellular localization annotation: CTP_CleavageSite=55; ConfidenceScore=5.37e-01
MEDRNARSMDLRLGVAVIPATQATHPSNLGKVTLKVTNISVKTSIITSTRGNFLSSNSSSTVRTPNLEEISTNVRITRQLAFLPQHPTRMAKQLQRK

SEQ ID NO: 66385 - protein, 312 aa, Zea mays
  Coding DNA Sequence Number=SeqID_24606
  Gene Ontology: Biological process=cell adhesion
  Homolog annotation: Hit_ID=Q06I72; Match level="QueryCoverage=82%, HitCoverage=85%, E-value=1e-39, Identity=40%"; Hit description =Fasciclin-like protein FLA34
  Pfam annotation: Domain name=Fasciclin; Domain location=61-187; Score= 10.4; E_value=0.00049; Accession=PF02469.12; Description=Fasciclin domain
  Subcellular localization annotation: CTP_CleavageSite=41; ConfidenceScore=5.18e-01
MTFKRLKIKACDIEENNTTAWRPSSSCCSPSSSPRRPASAPASGRARGTIDITKILAGFPEFSAFSTMLTETNVALAINSRDKATVLAPNNTAVAAAFGGQPRIPRSFMADLLALHVVLDYIDEPRLGALKRGHMGQGSVVTTLLQAMRGRGTGFLRVYSGHDGRATISSAAPARLQSATVDKVVAAQPYSLAVLQVSGFVVPPGIRVPQPFPVPPPRARHMAAPPGQAPAAAPESHQEPFIGSGPLVPSPIRPVPTPNLTNTPPPAPGQTGVHGGMAAKLPSAAGRSAASWWTGAGVAVALSIMTCLNLHL

SEQ ID NO: 66386 - protein, 198 aa, Zea mays
  Coding DNA Sequence Number=SeqID_24607
  Homolog annotation: Hit_ID=Q1STY0; Match level="QueryCoverage=41%, HitCoverage=94%, E-value=5e-39, Identity=90%"; Hit description=Like -Sm ribonucleoprotein-related, core
  Pfam annotation: Domain name=LSM; Domain location=122-187; Score =91.8; E_value=2.1e-24; Accession=PF01423.12; Description=LSM domain
  Subcellular localization annotation: CTP_CleavageSite=39; ConfidenceScore=5.43e-01
MAAFLSLFMDVTASDLSHTYQKFRPVVSPLPVPLKYHIIAAVVSANLIQRSFVSLQNAGVRLASVIPYPNPTGSVLPFQLMAESYHLVDQWTSVIISYRDPKNEMSLVISRFVQTVPVNPKPFLNNLTGKPVIVKLKWGMEYKGYLASVDSYMNLQLANTEEYIDGQFSGNLGEILIRCNNVMYLRGVPEDAEIEDAE

SEQ ID NO: 66387 - protein, 580 aa, Zea mays
  Coding DNA Sequence Number=SeqID_24608
  Gene Ontology: Mol. function=hydrolase activity, acting on acid anhydrides, catalyzing transmembrane movement of substances; Cellular component=integral to membrane; Biological process =metabolic process
  Homolog annotation: Hit_ID=Q9LT02; Match level="QueryCoverage=90%, HitCoverage=44%, E-value=0.0, Identity=71%"; Hit description =Putative cation-transporting ATPase
MVANTARHPAFHHIPSALFHNPIYCYAPLCNLPEDHALLRFVHIFLFVFLRKIYQVSEARSLERDQVESDLTFAGFAVFNCPIRGDSGAVLQELGQSSHDLVMITGDQALTACHVASQVHISSKPVLILTRIKTGGFEWVSPDETDRAPYSAVEVAVLSESHDLCINGDCFEMLQSTEAVLQVIPYVKVFSRVAPEQKELVLTTFKSVGRVTLMCGDGTNDVGALKQAHVGIALLNAEPVQKVNSKSKAENKSGKLKKQKPGNEASSRVTPATNSSAKASSSRPLTAAERQQEKLQKLLDEMNDESDGRSAPIVKLGDASMASPFTAKHASVAPTLDIIRQGRSTLVTTLQMFKILGLNCLATAYVLSVMYLDGVKLGDVQATISGVFTAAFFLFISHARPLQTLSAERPHPNIFCAYVLLSILGQFAMHILFLITAVNEASKHMPEECIEPDSDFHPNLVNTVSYMVNMMIQVATFAVNYMGHPFNQSISENKPFKYALYGAVAFFTVITSDMFRDLNDYMKLEPLPEGMRGKLMLWAILMFCGCYGWEWLLRWVFPGKMPAWEKRQKQAVANLEKKRD

SEQ ID NO: 66388 - protein, 560 aa, Zea mays
  Coding DNA Sequence Number=SeqID_24609
  Gene Ontology: Mol. function=hydrolase activity, acting on acid anhydrides, catalyzing transmembrane movement of substances; Cellular component=integral to membrane; Biological process =metabolic process
  Homolog annotation: Hit_ID=Q9LT02; Match level="QueryCoverage=99%, HitCoverage=51%, E-value=0.0, Identity=57%"; Hit description =Putative cation-transporting ATPase
  Pfam annotation: Domain name=E1-E2_ATPase; Domain location=210-452; Score=-78.3; E_value=6.2e-05; Accession=PF00122.10; Description=E1 -E2 ATPase
MARFEVNGKSVQGVDLLRRRHWASRLDFWPFLALYALWLLLAVPALDFTDALIVLAALSAAHILAFLFTAWFVDFRAFIGYSKASRLSILNPSNFRAEKLELGNITGETAEIYFDFRKQRFIYSAEKDNFLKLRYPTKELISHYAKGTGYGTEAKISTAVDKWGRNVFEYPQPTFQKLMKEQIMEPFFVFQVFCVVLWCLDEYWYYSLFTLFMLFLFESTMAKNRLKTLTELRRVKVDSQIVLTYRCGKWVKIPGTELLPGDIVSIGRSTSGEDRSVPADMLLLAGSAIVNEAILTGESTPQWKVSIAGRSPDDMLSIKRDKNHILFGGTKVLQHTADKSVNLRAPDGGCLAFVLRTGFETSQGKLMRTILFSTERVTANNKESGLFILFLLFFAIIASGYVLVKSHSEYRSLGSFLRVLFYQVDICCFDKTGTLTSDDMGEHGMTNPAFQEFQGIVTLEDDTELISDANKLPLRTQEVLSSCHALVFVDNKLVGDPLEKAAIKGIDWIYTSDEKAMSKRPGGQPVQIVHRYHFASHLKRMSVIVRIQERFYAFIKHNET

SEQ ID NO: 66389 - protein, 143 aa, Zea mays
  Coding DNA Sequence Number=SeqID_24610
MKLAEKIFLKMKDDEAKKNAEEEEARRKVKEEDKGKKKIDYNDDLVELLVSKVMRKMNVNNEDSPNSIFLLKSVPFSATEPKLPCAQLRRWFSLRSEPALHIVYSFVPSPKVTVHILCLGNIVNYVFEDLRKMKVPNSSLSQY

SEQ ID NO: 66390 - protein, 72 aa, Zea mays
  Coding DNA Sequence Number=SeqID_24611
MSEHDAFAGDSIVIGDLDGESFGRGDQQAELAGHLLLYEYLQLHGCANVNPSERVQRDSQRLNGFFQILIFI

SEQ ID NO: 66391 - protein, 191 aa, Zea mays
  Coding DNA Sequence Number=SeqID_24612
  Gene Ontology: Mol. function=transporter activity; Cellular component= integral to membrane; Biological process=transport
  Homolog annotation: Hit_ID=Q9ATM2; Match level="QueryCoverage=83%, HitCoverage=65%, E-value=1e-58, Identity=76%"; Hit description=Small basic membrane integral protein ZmSIP1-2
  Subcellular localization annotation: CTP_CleavageSite=62; ConfidenceScore=5.11e-01
MGEALRAAAADAVVTFLWVLCVSTLGASTTAVTSYLRLQGVHFALLVTVSLLSVLLFVFNILCDALGGASFNPTGVAAFYAAGVTSPSLFSIALRLPAQAAGAVGGALAISELMPAQYRHMLGGPSLKVDPHTGAGAELVLTFVITLAVLLIIVKGPPQPHHQDMDDLHLHSVPRPLWNLTYVDSLIYSIL

SEQ ID NO: 66392 - protein, 42 aa, Zea mays
  Coding DNA Sequence Number=SeqID_24613
MLLLLSHAVLAMVFKAVTIYSNTGYRSVSLDHGHVDFGYLGI

SEQ ID NO: 66393 - protein, 99 aa, Zea mays
  Coding DNA Sequence Number=SeqID_24614
MASPGPGHSRVAAESARSRSPEADLEFMLIDENAKPKPLPYSLLEKITNGFSGAHIIGYGGSADVYEGFIGNHKIAVKRLRIPYQHEKEFSQEIECLMK

SEQ ID NO: 66394 - protein, 209 aa, Zea mays
  Coding DNA Sequence Number=SeqID_24615
MTLGERCCYRARMCGGRNWFAARPAQAVPMSRKPGEASPRRLTGRREMVVVRAMGRAARTTDGLLDGDAVDAGQGAALEVLEGDEAGGLGRGGEVVEDVLEEALVAGEHEADEGRGAGRCGAGRGDGRVALGSGGNGGAGEEEVEAGGAEGGRAVEDDAGGAEEAENALMTEVVERPGVADGAELTAARQWTGARRWRGGERTGERLRP

SEQ ID NO: 66395 - protein, 122 aa, Zea mays
  Coding DNA Sequence Number=SeqID_24616
MAGRTAMAWSNSDDDVGDPEHKGYRCYDPLAHHIPISRHINDGSQFVDALPNHQGYHLRDRSTIEPPDRYGSSTSTLSLKGSIKAYVAHISFSYIFYQVLKTNHSFLNPRLVTVVTQLPKSN

SEQ ID NO: 66396 - protein, 108 aa, Zea mays
  Coding DNA Sequence Number=SeqID_24617
MTTPPRRSPPLRGRGHAGLRALAPMVNIHERSPVPACVPAHPDPSSSISPDDWRRLEGATFSVMCKIHPTVSSQHLRARVIDYVQRLFRLHHDGYQVKLVKENYASLY

SEQ ID NO: 66397 - protein, 135 aa, Zea mays
  Coding DNA Sequence Number=SeqID_24618
MEKEGLTFERQRSVGRRNKKKSSIRLRTFLLLMLFGLRGAPLGRLAAAHAFASVRVATLAKGTEGGRHPTGKATTATDPAMKTRFGQRDVGSSQEGHDGGGSGWESRCSDESSCGGNEEGVGGGSGPAGRSLPRA

SEQ ID NO: 66398 - protein, 204 aa, Zea mays
  Coding DNA Sequence Number=SeqID_24619
  Subcellular localization annotation: CTP_CleavageSite=85; ConfidenceScore=5.11e-01
MASCPSCFSVEDARTSPCVAIASGAAADVRPTLEPPPRAAPPSAAASCCCSSRRICASSALVCSGATTSEHAGAGRRRRAGVQARAADAQVGVRCVHDPPSPAQAPSSTPRTLLCGHAGCCATARTCRQATAASRTCRQIAATSRARMQSGSAPASPGSPLTDRHERLYGSFAGQRLSFSGRNPPIMVSATYSVPAPMPINANL

SEQ ID NO: 66399 - protein, 209 aa, Zea mays
  Coding DNA Sequence Number=SeqID_24620
  Gene Ontology: Mol. function=protein transporter activity; Cellular component=endoplasmic reticulum; Biological process=ER to Golgi vesicle-mediated transport
  Homolog annotation: Hit_ID=Q9C827; Match level="QueryCoverage=86%, HitCoverage=18%, E-value=7e-33, Identity=46%"; Hit description =Coatomer complex subunit, putative; 33791-27676
  Pfam annotation: Domain name=WD40; Domain location=138-176; Score =2.7; E_value=18; Accession=PF00400.22; Description=WD domain, G-beta repeat
  Pfam annotation: Domain name=WD40; Domain location=50-87; Score=16.3; E_value=0.11; Accession=PF00400.22; Description=WD domain, G-beta repeat
  Pfam annotation: Domain name=WD40; Domain location=91-132; Score =19.3; E_value=0.014; Accession=PF00400.22; Description=WD domain, G -beta repeat
  Pfam module annotation: Pfam domain module=WD40::WD40::WD40; Domain location=138-176::50-87::91-132
MQKVKSYRAHDGVSISLAVHPTLPYVLSWPCSGPHEKKLWNWEKGWDCTQTFEREYVARNFVCQVAFDPKETNRFASASNYRVKVWSVDLPKCNYNLPGFFNEVNFLEFFTRDDQQYLIITVSHDKTAKIWDMRNKKYVYDSMEQNLMSPVSSVFSHPNLPILLTRSIDGTSHFWSPKDFRRIGPKLIQDQQLIRLHQRDEQTSKTKQQ

SEQ ID NO: 66400 - protein, 104 aa, Zea mays
  Coding DNA Sequence Number=SeqID_24621
MEGVALDFLSWMKAQLARLQHRWRAGGPLPQGQRRIVLDIGGGNSTVPLATGMTDTATVLLKGKSKDSSVWEHRTVRWCTGQCPVRQVGSGEKAALGKSSAAYS

SEQ ID NO: 66401 - protein, 76 aa, Zea mays
  Coding DNA Sequence Number=SeqID_24622
MGEQVAFVSSWLAFAWIDRAPTGYWGSDIGYEYEMTDIRRILDIRISSRIPVQISDFGYPDIFLDILPYFKFRILR

SEQ ID NO: 66402 - protein, 93 aa, Zea mays
  Coding DNA Sequence Number=SeqID_24623
MADMRSERERGRERALTSGPGRSATGDEDRLTGRAQRQGTQATNGWGPGAERAHVKRGVARDKADTAYGGLGSPGLARTDEEGSTNSLAGLWP

SEQ ID NO: 66403 - protein, 39 aa, Zea mays
  Coding DNA Sequence Number=SeqID_24624
MAPMRVRRRTRGGLGGLCRYPKYGVSTPAMSKGQVLMHG

SEQ ID NO: 66404 - protein, 626 aa, Zea mays
  Coding DNA Sequence Number=SeqID_24625
  Gene Ontology: Mol. function=protein kinase activity; Cellular component=membrane; Biological process=protein amino acid phosphorylation
  Homolog annotation: Hit_ID=Q1S0Z5; Match level="QueryCoverage=71%, HitCoverage=87%, E-value=2e-49, Identity=32%"; Hit description =Protein kinase
  Pfam annotation: Domain name=APH; Domain location=82-300; Score= -14.1; E_value=0.058; Accession=PF01636.13; Description =Phosphotransferase enzyme family
  Pfam annotation: Domain name=Pkinase; Domain location=90-590; Score =58.8; E_value=1.8e-14; Accession=PF00069.15; Description=Protein kinase domain
  Pfam annotation: Domain name=Pkinase_Tyr; Domain location=90-590; Score=-35.4; E_value=2.7e-10; Accession=PF07714.7; Description =Protein tyrosine kinase
  Pfam module annotation: Pfam domain module=APH::Pkinase::Pkinase_Tyr; Domain location=82-300::90-590::90-590
  Subcellular localization annotation: CTP_CleavageSite=84; ConfidenceScore=5.56e-01
MPSRLLQQPLPPAAPPPPPLLAHSQHRRHALLTATIASAVAAVALLLLLVVLLRRRRLRIPTLPCSPLLDSGRPLRRYSRRTLRRATGGFHPSRLLGSGAASPVYLATFPDASLAAVKTCASAHELHLLASLPESPRLVSLHGYSPGPGSGGGAAERPLLLVFEYMPQGSLQGALFGGGDAAARDGQFLDWQKRLAIIRDVARALAFLHVECQPPVVHGDLKPSNVLLDANFRAKVADFGLARFKTPDAIAASGAAGDDFMSQELGEAGDHLSTTASAAGGAKTDTKDDSGPAGAWGKEWWWKQDGSGELDSRDYVAEWIGSQICPERNPDWVNENEDAANERKNSPSGTHENAVSASPPEDKNNTDCNGNVDVARKEGTKMREWWKEEFFEEMSKKGGSFEKRRSGGKPWIRSISMNTGHGDTNGGESNSVDLSFRRSRKRSRRRGRSVGSDVHSGCGGDFLSRELSSTTSMRGTVCYVAPECGGGPFEHGSDLLEKADVYSFGVLVLVILSGRRPLHILSSPMKLEKANLVSWCRQLARAGNVLELMDERLAGGYDKDQATKCVQLALLCLQRQPELRPDSKDIVKILDGDMELPPAPVEFSPSPRLRPFPRSSRRPAQPDAAE

SEQ ID NO: 66405 - protein, 52 aa, Zea mays
  Coding DNA Sequence Number=SeqID_24626
MRETPAAPPQFLTEVMTAPWSPLYRGRAFGFELGALAHDVDNASDGLRRGPV

SEQ ID NO: 66406 - protein, 83 aa, Zea mays
  Coding DNA Sequence Number=SeqID_24627
MNDSAIFLNVNIVAILGWIHGADFVLRGSSLYYCIQWRLDEVGLRLKQHIKKLRLLQRTFVLPCIKEPKGIEIKYQQQCIGIA

SEQ ID NO: 66407 - protein, 140 aa, Zea mays
  Coding DNA Sequence Number=SeqID_24628
  Subcellular localization annotation: CTP_CleavageSite=46; ConfidenceScore=5.33e-01
MHSQGTSTTSSFTRPFIATGLGSIYALDTTPSKSNVHTTKPVTTPLAAKPSNETQDGAKEHVYGASNNAGSLINAQNSPTNIEIQQRTTKKRKTAKRLFTKELGSGDIADEARRQKEVEVRLLEEETTKRVEQAIRKKVE

SEQ ID NO: 66408 - protein, 102 aa, Zea mays
  Coding DNA Sequence Number=SeqID_24629
MARNREKEALCGTAAAKGWRGTRHDGVEAADVATGGKGADAMLWDSRGGGEAKRMLSSREAEAQGRGRPGKGVRWRRRWCPERWWDNDEAGLHEAADADGET

SEQ ID NO: 66409 - protein, 139 aa, Zea mays
  Coding DNA Sequence Number=SeqID_24630
MALLVALTEGNTGKGSVPGITGADELSTGRGSSAPDSHSGEEFTSIRNSRLDSGARTDFTSAGETHPTTRRGRNTGADGFHWRRDCGDSTSPRFHGNEAGLRGIEETGPSSTSYSLGESVPGARNVLHDRRRELRVPRI

SEQ ID NO: 66410 - protein, 147 aa, Zea mays
  Coding DNA Sequence Number=SeqID_24631
MVDPYPDSMALLVALTEVNTGKGSVPGITGAGELSTGRGSSAPDSHSGEEFTSIRNSRLDSGARTDFTSASETHPTTRRGRNTGADGFHWRRDCGDSTSPRFHGNEAGLRGIEETGPSSTSYSLGESVPGARNVLHDRRRELRVPRI

SEQ ID NO: 66411 - protein, 187 aa, Zea mays
  Coding DNA Sequence Number=SeqID_24632
MESGDRGLASPVMQTSIPRSGSFTEEALKQTQVVTKVYERQMPKQSKKIVKKKGKSTRKRSVRQPYPPQVRKSGRINAKTKGLKVSFDLGSSSGSLEVPSQHMSHELGDLHDLNAFLGPVKFTSLQKPLDFDGFYPAITVATLQKVAIERHDVPPCGSIYGGAALSGPQSGGQCWGAFNYRKSSRYT

SEQ ID NO: 66412 - protein, 176 aa, Zea mays
  Coding DNA Sequence Number=SeqID_24633
  Homolog annotation: Hit_ID=Q6QP51; Match level="QueryCoverage=64%, HitCoverage=48%, E-value=2e-09, Identity=43%"; Hit description =Putative growth-regulating factor 1
MARSVRAQRRTRRRLLLRPRPGSGEDAIPPRSRLRPSPRVGRGGDHLPRPRLRSSPGVGRGGDHLPRPRLRPSPEVGRGRDHLLRPRLRPSPGVGLTLAGWHNSRSGAGVAVFLSEEDNDEDFVQVEGDFMDHAANHNLGGVQGPALGDPVWENTVLNMGIATDWQPWPQQPHIPP

SEQ ID NO: 66413 - protein, 87 aa, Zea mays
  Coding DNA Sequence Number=SeqID_24634
MAHDSTARCDSRENTGTEEGKRGRNSWEGDLYGWGKRGLGVLVCVSFPALLLCFYCDQHCKGERLQLVEIPRKREKTAKEENCGTQG

SEQ ID NO: 66414 - protein, 219 aa, Zea mays
  Coding DNA Sequence Number=SeqID_24635
MAPKLPAFSAAESCEIMSLKAIESGEVKIMSPKRTEEVEKKGVNETPIQDEVSIYDTEPKVQEQSKGIILSKILKAQKDVEDEINKLKESQAELAKFSEQGSRISKLEDEKKADAKRIAHLESMLKAQVESHKSEVEKAKREIAKAERDRVRRDVEELRTSKEQCFSVAGHCCGRLDNMFANIAHDIEEPWGKVVALGGKFYSETHRAVAEDRKVEEAL

SEQ ID NO: 66415 - protein, 130 aa, Zea mays
  Coding DNA Sequence Number=SeqID_24636
MGKSNKGGSSSHHSGDKRKREPTPPSEDFGDSEYSEEEFSSESEGSLGIAAEVWTYIRAVERARLEGSDESEVSSDEEDSSDSSEEGGGGGDGKGDGDDGDGGEGGDGDGEGGGDGGSKGSSRGSNKASG

SEQ ID NO: 66416 - protein, 290 aa, Zea mays
  Coding DNA Sequence Number=SeqID_24637
  Pfam annotation: Domain name=NC; Domain location=108-190; Score=3.8; E_value=0.014; Accession=PF04970.4; Description=NC domain
MGLLSQRVELSDMKPGDHIYTWRAGYTYSHHGIYVGGSKVVHFTRKKEAGNAGLDSAVVAASSSLLLSQQGPDGAACPASLPDCGFQLPDSGVVLTCLDCFLRGGAAHRFEYGAAAAAFLARLRGGTCTTARADAGAAAVRRAMHLLRHGCFGDYDVFGNNCEDFALYCRTALLPAAATGIGRSGQAASAVGVPLAALLSTPLNLLAAAGPLGVAAVTAGVYCAGRYVTDIGVRKDVVKVEAEDLAAHLGCCRRRAEEQEEAAALNNKKEQPAKAKQSLLPLKRKREVCV

SEQ ID NO: 66417 - protein, 129 aa, Zea mays
  Coding DNA Sequence Number=SeqID_24638
MVLDLWSRRRCRTLVAVVPCGRGGGVQERSLRLRLPHPTAPSDGKPTMSKTMWPSTVAHATVLTRNSVGRKETYSRWHEQRLGRGVVAAAGEEMRVSVVFGVVRDMVRALPGAEIEAWRGGVDVFFRVV

SEQ ID NO: 66418 - protein, 552 aa, Zea mays
  Coding DNA Sequence Number=SeqID_24639
  Gene Ontology: Mol. function=ATP-dependent helicase activity; Cellular component=intracellular; Biological process=multicellular organismal development
  Homolog annotation: Hit_ID=Q5ZAP0; Match level="QueryCoverage=94%, HitCoverage=45%, E-value=0.0, Identity=76%"; Hit description =Putative DEIH-box RNA/DNA helicase
  Pfam annotation: Domain name=Ank; Domain location=136-168; Score =20.7; E_value=0.0053; Accession=PF00023.20; Description=Ankyrin repeat
  Pfam annotation: Domain name=Ank; Domain location=169-201; Score=0.0; E_value=31; Accession=PF00023.20; Description=Ankyrin repeat
  Pfam annotation: Domain name=Helicase_C; Domain location=263-357; Score=58.6; E_value=2.1e-14; Accession=PF00271.21; Description =Helicase conserved C-terminal domain
  Pfam module annotation: Pfam domain module=Ank::Ank::Helicase_C; Domain location=136-168::169-201::263-357
MEERIQTGGNLQDEEDWRRVLMSATIDAERFSQYFNGCSVIQVPGFTYPVSKLSQIEYIKRSEIIFGSYNFFPPQSAGDNHLTSHKTEGSVLTHDFKSSMDDSINLALVNDEFDPLLELISAEQNTEVYNYQHSETGITPLMVFAMKGQLGDVCMLLSFGVDCSAQDHDGKSALDWAQQENQQEVCEVIKKHMECSSEKSTEDNELLNKYLASINPEHIDTLLIERLLRKICVDSNEGAILVFLPGWEDISQTRERLFASPFFQDSSRFLVLSLHSMIPSSEQKKVFKRPPVGVRKIILSTNIAETAVTIDDVVFVIDSGRMKEKSYDPYNNVSTLHASWVSKASARQREGRAGRCQPGTCYHLYSRFRASSLPDYQIPEIKRMPIEELCLQVKLLDSNCRIADFLKKTLDPPIPETMLLFAILMNCLDPALTLACAADYRDPFVLPVAPDERKRAAAAKVELASLYGGFSDQLAVVAAFDFWRHAKDRGQDSQFCAKYFVSSNIMNMLSSMRKQLQNELSQRGFVPADASACSLNSKDPGTQVSMKMDFFL

SEQ ID NO: 66419 - protein, 367 aa, Zea mays
  Coding DNA Sequence Number=SeqID_24640
  Gene Ontology: Mol. function=ATP-dependent helicase activity; Cellular component=intracellular; Biological process=multicellular organismal development
  Homolog annotation: Hit_ID=Q5ZAP0; Match level="QueryCoverage=72%, HitCoverage=20%, E-value=1e-108, Identity=74%"; Hit description =Putative DEIH-box RNA/DNA helicase
  Pfam annotation: Domain name=R3H; Domain location=128-183; Score =30.9; E_value=4.4e-06; Accession=PF01424.13; Description=R3H domain
  Subcellular localization annotation: CTP_CleavageSite=38; ConfidenceScore=5.51e-01
MVHLSGVPVRPNPLRYPLAVSTSSRFSFGAPEQRTIKRATAAQARHRRPPVQPNRARRIEGASRPPSVLLDDDNEHEELMGRKGRKGKGAAAGGSAGMKEATLVRVSKALEDFRASNAEGSHHSPPFILAPVFELRSGKFVYTFEPDISKQERAAIHEMCRKMGMISKSSGNGERRRLSVYKRKQKRGPELEQGPSYLGFSEEARHVLQDLFMHYPPGDADLSGDVDQSSSDKAANIKWRTDNAFCRPAMSKLDITKKVEMLASKINGSEQLRKVMEDRTKLPISSFKDVITSTLENHQVVLISGQTGCGKTTQVPQYILDHMWGKGESCKIICTQPRRISAISVAERISAERGEAVGDTVGYKVSI

SEQ ID NO: 66420 - protein, 190 aa, Zea mays
  Coding DNA Sequence Number=SeqID_24641
  Subcellular localization annotation: CTP_CleavageSite=69; ConfidenceScore=5.40e-01
MAHLTTNSLLSNPASRSSDQVSVEQLSKAEHTTKSLLSNSARRSGGPTPYRVTLRGGATDQPSVEQPCEAEVLVQYYRPTSTTTRCVITKPRPDCGRGISKGRRKVTVNTTARHHVRSQAYPHCLVGPVNPGHEELSTGVSIVTRIPVKDMTIRYTMCIPTQARVHDDRRTRAMHDYAVRLPQGTHHTPL

SEQ ID NO: 66421 - protein, 349 aa, Zea mays
  Coding DNA Sequence Number=SeqID_24642
  Homolog annotation: Hit_ID=Q5ZAP0; Match level="QueryCoverage=47%, HitCoverage=13%, E-value=2e-58, Identity=71%"; Hit description =Putative DEIH-box RNA/DNA helicase
  Pfam annotation: Domain name=DUF1605; Domain location=1-116; Score =55.2; E_value=2.1e-13; Accession=PF07717.6; Description=Domain of unknown function (DUF1605)
MELRLTVTGCHLLTVRRRLARVQNGIMRAVLMAGAYPMVGKMLPPRKNARKSVLETASGAKVRLHPHSCNFNLSFSKSSGNPLLIYDEITRGDGGMYIKNSSVVGSYPLLLIAAEMVVAPPDDDSDEDEEDSSEDEAEESTLVQHKEEIMSSPDSIVSVVVDRWLRFDATALDVAQIYCLRERLASAILFKGEEVGLLQQLSRRIKFHRISLYADDVYRIQCSEDDLMVVHNLLPCERSDFPCRYLGIPLSLRKSTKEQLQPIIDRIVDRLPSWKANLMTKSGREDMVQHVLTRMIVYLAMAIDLPHWALDAFDKIRRGFLWRGRKDAKGGHCLIAWGRVCRPRRSWNI

SEQ ID NO: 66422 - protein, 418 aa, Zea mays
  Coding DNA Sequence Number=SeqID_24643
  Gene Ontology: Mol. function=poly(A)-specific ribonuclease activity; Cellular component=nucleus; Biological process=meiosis
  Homolog annotation: Hit_ID=Q9LG26; Match level="QueryCoverage=89%, HitCoverage=54%, E-value=3e-91, Identity=47%"; Hit description =Poly(A)-specific ribonuclease PARN
  Pfam annotation: Domain name=CAF1; Domain location=1-194; Score= -64.0; E_value=4.4e-05; Accession=PF04857.10; Description=CAF1 family ribonuclease
VLRKNFRDLIFVCTFGEDDTSEKKVVYSDTDEDRILLMKDVQEDLLKNREERIKSAIGIRHVIDLLSSERKLIVGHSCFLDIAQVYSKFVRPLPSSIKEFALSFHKFFPHIADTRHLMSVNQAVQKLMKHKSKSLSSAFLLLCPASYSSVEKPSSHSPVTIEVEGDETMSSRFISGAKHEAGYDAYMTGCIFAQLCAYLGIQFEQFSPLDNLATNTKLQKHINFLSPSWNSGTVLDLSTGMETPDPGYTRRYPAAVYDNIVVIWGFLSKVRPKEIKDCICKVFGSGSVTTVFSIDSTAALVQFKKQESVNDFLDLKAVLERADSAISILHPLSTILEGGQTRAAKYDTYRDICSSSESKYLFADQAEAVCATSKNQLIENVDGNLISDVLDGVALASVTEEDGIIPSSKNQNVAEATC

SEQ ID NO: 66423 - protein, 63 aa, Zea mays
  Coding DNA Sequence Number=SeqID_24644
INKKTHDVVESSPTGDESEAHGQQQGDNAKEVDDHVTQSELRDSLMKGVKYPNIEVVNETVKQ

SEQ ID NO: 66424 - protein, 284 aa, Zea mays
  Coding DNA Sequence Number=SeqID_24645
  Gene Ontology: Mol. function=poly(A)-specific ribonuclease activity; Cellular component=nucleus; Biological process=mRNA catabolic process, nonsense-mediated decay
  Homolog annotation: Hit_ID=Q9LG26; Match level="QueryCoverage=84%, HitCoverage=34%, E-value=9e-68, Identity=54%"; Hit description =Poly(A)-specific ribonuclease PARN
  Pfam annotation: Domain name=CAF1; Domain location=38-255; Score= -1.6; E_value=1.2e-08; Accession=PF04857.10; Description=CAF1 family ribonuclease
MQVPGRLRRVLRAPPPRILLYRAISSPPPGGGSGVAVKQVTRGNMEEALEKLRGRVREAAFVGLDLEMSGVTSAPWRDTFELDRADVRYLKLRDSAERFAALQLGVCPFRWDPAKSAFVAHPHNFFIFPRKELPSDCSSHEFLCQTTSIEFLAKYQFDFNTCFREGISYLSRAQEEEALQKFNMLHHGRTVTSSTNSEEDGDMPLKSASDILFTERMKMNFKEWRDAIASKPMVDNHLSGNIKCGSGQFQTVFFKMRPAIILNGFSSHQLKLIQQVEHSIYLEI

SEQ ID NO: 66425 - protein, 208 aa, Zea mays
  Coding DNA Sequence Number=SeqID_24646
  Homolog annotation: Hit_ID=Q9ZRE6; Match level="QueryCoverage=35%, HitCoverage=41%, E-value=2e-10, Identity=47%"; Hit description=ATFP4
  Subcellular localization annotation: CTP_CleavageSite=78; ConfidenceScore=5.03e-01
MADPLSAGGVVVDSSSPGTTCCCQCQLARGLLLLRRQRQAAAQNIKPSFAAAAAAGDAMSKQKSVIRLGVPNDKNRSKAMQMASKFVGVNSVGIAGDAKDRLEVVGESVDITCMINLLRKKVCRADIVVVEEVKDKKKEEEEKKKKEEEEKKKKAEEEAKKKKEEEELKKKLCPYLYPPPPCSGACCRGPSPPMFLCEPEQPAGCHIM

SEQ ID NO: 66426 - protein, 381 aa, Zea mays
  Coding DNA Sequence Number=SeqID_24647
  Gene Ontology: Mol. function=indole-3-glycerol-phosphate synthase activity; Cellular component=chloroplast; Biological process =tryptophan metabolic process
  Homolog annotation: Hit_ID=Q9LUB2; Match level="QueryCoverage=56%, HitCoverage=60%, E-value=2e-92, Identity=72%"; Hit description =Indole-3-glycerol phosphate synthase
  Pfam annotation: Domain name=IGPS; Domain location=112-345; Score =150.4; E_value=4.9e-42; Accession=PF00218.12; Description=Indole-3 -glycerol phosphate synthase
MDAAVGRPSRAPIRCTSAETVRFPVSIWVRLEFRVVRFRVATSSHAAEANAGGTTEQEGNGSPVAAAAAYSPVVAGVDGIRIRRRPVTGPAVHYVGPFQFRLENEGNTPRNILEKIIWNKDVEVSQARLMKERRPLYMLKGPLEAAPPARDFVGALKASYDRTGLPALIAEVKKASPSRGVIRENFDPVQIAQAYEKNGAACLSVLTDEKYFQCPLLCKEFIIDAWQLYYARSKGADAVLLIAAVLPDRDIKYMLKICKILGMAALVEVHDEREMDRVLGIDGVQLIGINNRNLGMGGQGDMCCHSHIAPIYAYLDWPTVLTIGLGISNVTNHDVMIYEHSIARLNESLIPSLFLFIEVDLQTEVLLEGERGQVIAQKDVI

SEQ ID NO: 66427 - protein, 43 aa, Zea mays
  Coding DNA Sequence Number=SeqID_24648
MGRFAVEWIYRQEGLQRPTRREEEFLGDGGGGCADAAAGGERD

SEQ ID NO: 66428 - protein, 261 aa, Zea mays
  Coding DNA Sequence Number=SeqID_24649
  Gene Ontology: Mol. function=binding
  Homolog annotation: Hit_ID=Q6AVK0; Match level="QueryCoverage=100%, HitCoverage=57%, E-value=1e-96, Identity=67%"; Hit description =Expressed protein, having alternative splicing products
LCHVFQQECRFREATEFMESCSPSWEACTSFLLTHNWWHVAVCYLEAESPLCKVLEIYDHNIMKELEKSDCETAEVYLNGLGLLLRLFIRGHIDSAKERLTTLLDALKNESIWHVEWLLDLLILWALSSMGELKSAHNMLESLKSRNTRRFINSTKSEKQPDCRVRLMDRNRQQAMQKAIKLAEAAYEYGKGDHMKVYDTLGPDFDALGYKMIGASDEQVDVFNEVWYTVLINAGETSKAIEILGKQIRKREGAPFLWRLL

SEQ ID NO: 66429 - protein, 71 aa, Zea mays
  Coding DNA Sequence Number=SeqID_24650
MERHLTLAGKHLTLTNRPLQSDGRSMVGEESVPDGGGGSATADAFHLDENLLLKVLLYPLEVLLKVAATLL

SEQ ID NO: 66430 - protein, 148 aa, Zea mays
  Coding DNA Sequence Number=SeqID_24651
  Subcellular localization annotation: CTP_CleavageSite=41; ConfidenceScore=5.17e-01
MASGSSNGEPSTAPQANRWYDLRLGSSCRDPSPTAKFCTLRSQTISSQLLEEQESHTLENLVHALNIAGGATSLQTACFSLDHLISLTDIIKTQEKIHLPFCTLSIVKYKYFLKIWHLHPQNSKDSSPFQSLAWFSSNLVVDGDRLGK

SEQ ID NO: 66431 - protein, 153 aa, Zea mays
  Coding DNA Sequence Number=SeqID_24652
  Gene Ontology: Mol. function=binding
  Homolog annotation: Hit_ID=Q10EY3; Match level="QueryCoverage=65%, HitCoverage=20%, E-value=7e-10, Identity=39%"; Hit description =Expressed protein
MSFGRGRVAAVLRAAAADPTCALAAAHAAQSVAPRDPAGAAAFLNAAADNLGKATEYERAVFRDALRAGGREEGRGGGDRAALRGLTYLNLLILGTGRLLEQFPRDLLSLKRAQLICFYMGKPDLSLKFVQQLVSVVKSISYRICSVEIEMKE

SEQ ID NO: 66432 - protein, 96 aa, Zea mays
  Coding DNA Sequence Number=SeqID_24653
MEARAAIRGVGRSPSIEAGASMRLVPFPGQRGCISRGSRGGWGDDSGERMGHADRQEAGATILESGWGSGIMESVDVTRLVFQKIRRVIVEQTSRT

SEQ ID NO: 66433 - protein, 192 aa, Zea mays
  Coding DNA Sequence Number=SeqID_24654
  Homolog annotation: Hit_ID=Q10MM4; Match level="QueryCoverage=79%, HitCoverage=41%, E-value=8e-17, Identity=41%"; Hit description =Expressed protein
  Subcellular localization annotation: CTP_CleavageSite=22; ConfidenceScore=5.16e-01
MAFLPRPLTCPHGRPSSPLGPQAFSVAGGAQEGQSLMASLSLVTQDGEENGQARSGLLAAGALGASCAWAPLPGSLLLRWRSMSLMNTQHRDPWADDVPDEDKEDVEEDEDEWDEAVTGGTASPCVPVASGSGPRFGAGTTSTLISLSRGDALRSGGHGPRAAVHRHASAHGRPRSPRRRRFRGRDPGVGAG

SEQ ID NO: 66434 - protein, 86 aa, Zea mays
  Coding DNA Sequence Number=SeqID_24655
MGLGEAAGRLLAAVDWEREAYPAYDDFLALPVFVLFFPTVRYLLDRFVFEQNFPLLDLCSLKYAYRMGTMFLNEKWWSRNPGLVQC

SEQ ID NO: 66435 - protein, 78 aa, Zea mays
  Coding DNA Sequence Number=SeqID_24656
MPMPRARESSMETGTRVEDPGHRSNDADEEDTNRSPRRRGSEALIPLVTPLATGRSPATFQYIFAWSIVSGPLTDSLA

SEQ ID NO: 66436 - protein, 215 aa, Zea mays
  Coding DNA Sequence Number=SeqID_24657
MGRIGHGKSSLGEGDAAAGRRQEVEERGAVQGGMRASRGFLLSENRGRTHGYQYVKICPWMDKLQITSKGSREGSSLVEYPAPWKERETPGSSTNEVAGRPQIHPAAERHGTGRARLEEMGAESWAAMGGREEAPCALGKKAPCYSRSLGGGAGRAPLENREGHRQEGARAWAPWLGHDGEGSSLVAVGAVKKKRQGRKKVAARGSELEFGRTDD

SEQ ID NO: 66437 - protein, 161 aa, Zea mays
  Coding DNA Sequence Number=SeqID_24658
  Pfam annotation: Domain name=Auxin_resp; Domain location=3-68; Score=- 14.4; E_value=0.0051; Accession=PF06507.4; Description=Auxin response factor
MEAVRLAAAGRPFTVTYFPRQAAVEFIVPRSEVDDALATSWEPGCPADPGQGLGPLLPDVVPPRSEIQAPPANSAAPAHARTIQPPCADRPARQAGNQPLRQVVYRPAPGRGLSVPPQRALSPILNTVIDAQIGANTLFGDSAGDIAYRPIRSALNGRFKR

SEQ ID NO: 66438 - protein, 135 aa, Zea mays
  Coding DNA Sequence Number=SeqID_24659
  Homolog annotation: Hit_ID=Q84NC2; Match level="QueryCoverage=32%, HitCoverage=24%, E-value=9e-09, Identity=68%"; Hit description=MADS -box transcription factor 31
  Pfam annotation: Domain name=SRF-TF; Domain location=9-63; Score =12.1; E_value=0.017; Accession=PF00319.9; Description=SRF-type transcription factor (DNA-binding and dimerisation domain)
MGRGKVEPKKIENPTNRQVTFSKRRMGLFKQAIRRRCTCQPEQGGYLCLMNLAAAIASGQHQQAGEMVGINPRLFLWWDVGASGSGSQSQQLLHGRDAAESSMTTLGLSPQMHRYRLQPRQPNLRQDADVHGGLW

SEQ ID NO: 66439 - protein, 309 aa, Zea mays
  Coding DNA Sequence Number=SeqID_24660
MCSLAPRRAWATEVSTTPVRKRSRHHDASDYVVDTASSALRVRLHTELAAIQGIRKKAKLVALSAPPTEKKQHGPPAPRRSEAPSSSAASRHHDASDYVVDTASSALRVRLHTELAAIQGIRKKAKLVALSAPPTEKKQHGPPAPRRSEAPSSSAARRASPAPSKAAHVAAKQQQCQVTQRGAAKNDPIAPNNMQRAAEAPAAAKQQGLVVAWCSAQRPRTRSLRRFPTTIGDQRRSPADNPVAAKAEAPKKRLSKEELARAAAREESRRMLLEMEKAAPPDQTIYPEELGIISRDYSSMHAWNSEDLD

SEQ ID NO: 66440 - protein, 93 aa, Zea mays
  Coding DNA Sequence Number=SeqID_24661
MVRTVTLVFDKDRVGTCPHYRNLRLCRVSEALGKALKTLSKGFAECRTRQRGLGIQCIGKAIFAEYFFSSTRQRKATVTAMGDGDGAFAECPR

SEQ ID NO: 66441 - protein, 121 aa, Zea mays
  Coding DNA Sequence Number=SeqID_24662
  Gene Ontology: Mol. function=metal ion binding; Biological process =metal ion transport
MEMEQYGALTIRPYDRGPCIFPRFTAYATMYNPTGSSRYLLSGCFAATEEIQEVESAPAVDVKPKREEASEAADAKSAQAQEQAQEQVVVLKVSLHCKACAGKVKKHLSKMEGSETSVRSS

SEQ ID NO: 66442 - protein, 95 aa, Zea mays
  Coding DNA Sequence Number=SeqID_24663
MAKAFKMSHLTIVQPCFRRLPIVQSAKIQIPPDSRNVAALKVGYIRLFVRGSANILVCSRLHQIFFPCVIGICPCVTTAQNLYSHETKINNTIRS

SEQ ID NO: 66443 - protein, 78 aa, Zea mays
  Coding DNA Sequence Number=SeqID_24664
MARWLRRRPQPPCGQPPHLAHVLKQPLDESSMGDSWDTGPVARCRTRIGYRPRKHEGGLSSQRLLRLQWGVCLRNRFI

SEQ ID NO: 66444 - protein, 65 aa, Zea mays
  Coding DNA Sequence Number=SeqID_24665
MAVYILARMLRDFGGLARVLFRENKFGGLPGQGVWFLFHAGPSGSVTFVFLAPTLFLCSPACASV

SEQ ID NO: 66445 - protein, 248 aa, Zea mays
  Coding DNA Sequence Number=SeqID_24666
MVEPSKVRRHPPVPHSAGSLPPPMPIDRPYYYKAALLPFPAQTAETSTDAANASASALGQQLRVHLPSQRRKGAITSIVTETDPVLRTHITNNSPSQPGHGVVAVCASDKPARAPAAAPRVVRPGRRRLPPPSSSHQSAKRAAGSGRRGPGGVSPPAALARSVTERAPRSPEAGERRASPPRSSGDGDDSKRSYAAHERPDGGDHARGDARTRPAWSPGTRRRWQNAWRTGGGESARGYARTCSAGPP

SEQ ID NO: 66446 - protein, 37 aa, Zea mays
  Coding DNA Sequence Number=SeqID_24667
MGNAPTNARRIENNLSKCIKECSLNGWGKRCVVKSEK

SEQ ID NO: 66447 - protein, 68 aa, Zea mays
  Coding DNA Sequence Number=SeqID_24668
MVDMAKSGPTVMAAAGRRKQRTGGTFWQAKQATLHLRLNDRVKKGTGKGDTPKGILSPRSKRAPSPSY

SEQ ID NO: 66448 - protein, 162 aa, Zea mays
  Coding DNA Sequence Number=SeqID_24669
MGLCRLPRWICLSALRRQRQPARHFLRLDLCSIPLFPPSIINDVSKKKDGANKEATAAKPKKAAALPLPEMMQEEIIPPLKAALGGGGGRVPGPARLRKQHGPKGFALSSYSNEVSTIEPFLIDEKRVTAKYVVFWVYKRLAGQGILPVWKEEEGEDHQDAK

SEQ ID NO: 66449 - protein, 134 aa, Zea mays
  Coding DNA Sequence Number=SeqID_24670
  Subcellular localization annotation: CTP_CleavageSite=64; ConfidenceScore=5.14e-01
MATADGALALVLFPEQELAASAGPSSVSMHWIRSAQLSCTAVCRSRRQRGQGRARGTACIHATRGSSEFEPSSLPVPQAQGSHSKEKAATGHGRERQQRQSACLVLSVSVCMLWRFVDNLESVEDKKFVKNEKI

SEQ ID NO: 66450 - protein, 289 aa, Zea mays
  Coding DNA Sequence Number=SeqID_24671
  Gene Ontology: Mol. function=catalytic activity
  Homolog annotation: Hit_ID=UPI000034F3E8; Match level="QueryCoverage =56%, HitCoverage=36%, E-value=3e-57, Identity=62%"; Hit description =catalytic/ hydrolase
  Subcellular localization annotation: CTP_CleavageSite=39; ConfidenceScore=5.60e-01
MGSLMSCLSDPIPSGNRSPPPQPKRRSSTSSRGRGGGGRDSAKASVSIDEEALTAAAALVLGQRGASGGPGRVRAVRVGAKLLCIGAVETDWLLLLALDLNTKDLETNVIVLVHGGGFGAWCWYKTISLLEDSGFKVNAIDLTGSGIHHYDTNKISSLSEYAEPLTSYLKGLGDAEKVILVAHDLGGACVSYAMEMFPSRVAKAVFLCAAMLANGNSALDMFQKQMDTNGTLQKAQEFVYSNGKDRPPTAINIDRASLRDLLFNQSPSKVGRTLEYNVTATDNHLHSHH

SEQ ID NO: 66451 - protein, 955 aa, Zea mays
  Coding DNA Sequence Number=SeqID_24672
  Gene Ontology: Cellular component=cytosol
  Homolog annotation: Hit_ID=Q10JI7; Match level="QueryCoverage=97%, HitCoverage=97%, E-value=0.0, Identity=44%"; Hit description =Expressed protein
MPPARVRGAAAGLADDARDLQRQMGCMAGILQIFDRQRLIAGAAGRQAARQRQAHKRLPPPSAPPPGNTHSNSSSNVPVQSSSTSKIVLEKTFSKCMTENSSLSIESSRASSSSSSCSSFSSLDGNKSVQQELPYINEELFVQRSLKTSPSLKESDMNTKSGHPNVGFRDIVKDSINRDPGGLTVKTSVQEARRNGQYKDSPRPLLLSKSMDGTCIIGIDRTTKVPANVTESGRCLQERSRFSCDDRRLLRPAETQECKRPSSRLKELPRLSLDSRKESLSPGSRQKSISYKRTDDILLDTLRPQDSPSNRRANSVIAKLMGLEEATNATGVLTADSCEPTRSPRPAQATQHERPSRSPKNTCQDSCSMQPKNQLKAKPSQRIATEAAPWRQQDRSANNTKAEQCREAEGRARTASVYADIERSGGFNFLECNNKDFRALRILGALNAKDAKSKNDSSGGSVAIHRTGYDLTTSSGSFQAPIVVMKPARTTEKHGVSLASVAPIAGLRSLRKLPAGRYSSFTGTNDKMQLRMSRDQSKSEETVSSASSPRPTSSSSPRNVLKKSEPERRSRPPVSPKSPSKKSNEAVSPKGRTRSKPSQVKCHRDEVLQITGNRISLAKQVDVSIMDCPKPLGGNSTFVPEGNTAATASQKAASILGSDQNIHSLDNIPSPVSVLDASFYHKRISDSFKDGETHSSEECWNPNSLPDTPQSKANSEVNQIKPENLEVLIQKLEQLQSMSEEDASIKEVMASVAANKDHQYIYEIMLASGLLHKEHSVTALPGQLQPSNYPINPELFLILEQTRPVSVSAFQTVGGAKRSCKPCAGKLHRRLVFDLVNETIAQKMSICRSGSQPVKFLRSRKLSGWQLFKDLCAVVDRLTKCSEEEENENMVLDEDAINGTKDWMSFDTVLHGMVWEIERSIFKGLIDEVVSGETTEKMRFGQRKLQRQLSFGSTN

SEQ ID NO: 66452 - protein, 91 aa, Zea mays
  Coding DNA Sequence Number=SeqID_24673
MAKVMFSEDVQKLKKWKFRQVILNRFLPIAISIRAATEQASSHQVAARLRLFKETKDSQQAGMRCGDGDTEGLGTDVDSMGHARPGGDSVA

SEQ ID NO: 66453 - protein, 62 aa, Zea mays
  Coding DNA Sequence Number=SeqID_24674
MGIDMTVIGRLCASTHDAEDEVYANSASETDLLLTDCSGDFDIGVEDTAFGTANAEVDAGSA

SEQ ID NO: 66454 - protein, 152 aa, Zea mays
  Coding DNA Sequence Number=SeqID_24675
  Gene Ontology: Mol. function=nucleic acid binding; Biological process= DNA integration
  Homolog annotation: Hit_ID=Q8H6I0; Match level="QueryCoverage=99%, HitCoverage=10%, E-value=9e-41, Identity=52%"; Hit description =Putative gag-pol polyprotein
MVTGEKPATSHGKAPSEESDNKKREESPPRVKSHRSGDKKKKMKKVVYYETDSSSPSTSSSDTPSVTSKRHECKKFSKIPLRYPHISKRTPLLSVPLGKPPIFYGEDYCMWSDKMRHHLTSLHASIWDIVEFGAQEPSIGDEGYDSDEVARI

SEQ ID NO: 66455 - protein, 272 aa, Zea mays
  Coding DNA Sequence Number=SeqID_24676
  Gene Ontology: Mol. function=protein binding; Biological process =defense response
  Homolog annotation: Hit_ID=Q2R1W2; Match level="QueryCoverage=67%, HitCoverage=16%, E-value=4e-13, Identity=30%"; Hit description=NB -ARC domain containing protein, expressed
  Pfam annotation: Domain name=PAH; Domain location=215-262; Score =45.0; E_value=2.6e-10; Accession=PF02671.11; Description=Paired amphipathic helix repeat
MLCGIHLPRRPSWIDPSCVPLLSYLSLTVQAVQVQDLEILGRLPLLSYLYIWSEGINCLSYTATSRDEFQNLRHLDTNLEIMCGQQGALPMVEKLTCRASMGKYVAFARSSMPFDDGSVVNPATVAEAELPVILPLDIGWPVNMPCLRGITYLLDYQDCSAKEWAHVETLLLHVRKIHPNCPPFRIKKNCRDKKITLIDAFSYLEAVKDVFKGNPSKYSEFFDLMIDYKRDRIKIKDVIIRLKTLFTGHDPNLILDFSVFLPREWAITLGDL

SEQ ID NO: 66456 - protein, 40 aa, Zea mays
  Coding DNA Sequence Number=SeqID_24677
MEDDSWAWASMSRTGLLVSEVKRLYGPFNTPKVSRQGLTT

SEQ ID NO: 66457 - protein, 119 aa, Zea mays
  Coding DNA Sequence Number=SeqID_24678
MENKTAKKTVPDKSEVHPLNVIKVTIEDLTEADRKVLAPIWAPIITLRTCGGALCTGTNGPRLGAGWSATWRRARVPCLTGRMVRAYRPDGPRVRRGGGVHRRHLNLALGRDPVEEERF

SEQ ID NO: 66458 - protein, 157 aa, Zea mays
  Coding DNA Sequence Number=SeqID_24679
MRWGRGNDSGGQEDNAGNWTKTRLDEECEVDGAYNFVGNMVKPQLVEEYEETGNDKDGLNDDGEHDLGEWGMTQLVEDPDEGISDDELSGGTVVLIDNEILTEDERGAKSGMDKRDTKLGLEESIEGLNGWIKQHDDNNNLVDYGASTDEDGDTSSG

SEQ ID NO: 66459 - protein, 164 aa, Zea mays
  Coding DNA Sequence Number=SeqID_24680
  Homolog annotation: Hit_ID=P12783; Match level="QueryCoverage=32%, HitCoverage=13%, E-value=1e-12, Identity=69%"; Hit description =Phosphoglycerate kinase, cytosolic
MCTPAEHMCTNKAFDPNQRGKLIVNAFVAFDSLPNLTAFVSTVLVKVAEQVDANVEEADLDGEAGVKQDVDCPVVHCSWADSRRPNSRGRASLCAVTSTCHSTGTSAALTTPAFGPPSPPSSTSSARMPRWDAVSHRQSWPAPVKCVILGDGVQVRLLPGSPPV

SEQ ID NO: 66460 - protein, 328 aa, Zea mays
  Coding DNA Sequence Number=SeqID_24681
  Gene Ontology: Mol. function=sulfotransferase activity; Cellular component=integral to membrane; Biological process=catecholamine metabolic process
  Homolog annotation: Hit_ID=Q6K424; Match level="QueryCoverage=79%, HitCoverage=97%, E-value=3e-63, Identity=48%"; Hit description =Putative flavonol 4'-sulfotransferase
  Pfam annotation: Domain name=Sulfotransfer_1; Domain location=76-325; Score=175.1; E_value=1.7e-49; Accession=PF00685.17; Description =Sulfotransferase domain
MAQVPSESSKSDAETSPPADKAPPEISSPECYSDLVSTRPARGGWVQPLVLYQNYWLTPGRLQHIIPVKELYKPRADDIVLVTYPKCGTTWLKALAFAITTRSRHAFAAHPLLARHPQELVPHLELPALAGDLADVEKLAALPEASRDSPTPFPAPAGRDAFVSWWFFANGMLRRGSSSSSVDLDDALSMFCEGFSPLGPFWEHYLEYWKASLERPQHILFLRYEEIVADPVKVVKTLAGFFSDPFTEAEERGGVPEQVARLCSFEVLSGLEKNQTGGVAFGNDLVIGKSTFFREGKVGDWENHMTKEQGQRLDDVLEDKLKGSGLVF

SEQ ID NO: 66461 - protein, 237 aa, Zea mays
  Coding DNA Sequence Number=SeqID_24682
  Gene Ontology: Mol. function=RNA-directed DNA polymerase activity; Biological process=RNA-dependent DNA replication
  Homolog annotation: Hit_ID=Q7FS87; Match level="QueryCoverage=25%, HitCoverage=4%, E-value=4e-17, Identity=70%"; Hit description =Putative glycerol 3-phosphate permease
  Subcellular localization annotation: CTP_CleavageSite=25; ConfidenceScore=5.18e-01
MSRVLRLKIRGRFLMRKMTQGLTPRQGYKASSSLLSLPGFAVLWFSPSFGLLMYYNKTSLSVIGPVVPVLTTAPNLTQDYVFWVNDKFSHGPSIGASGGFITIWKGSLFEAEPDPAKWLMAKFKRARKVIHGWQKSLPNLVKLIDKVELIIQFMDFIEESIDLTIQEWNFKDVLVHHLQPVISLSTLETPFSRSEIDQIIRNLPANKSPGPDGFNTDFVRKCWPVIASDFYELCDKF

SEQ ID NO: 66462 - protein, 733 aa, Zea mays
  Coding DNA Sequence Number=SeqID_24683
  Homolog annotation: Hit_ID=Q10F41; Match level="QueryCoverage=79%, HitCoverage=89%, E-value=0.0, Identity=70%"; Hit description=Nodulin family protein, putative
  Pfam annotation: Domain name=C4dic_mal_tran; Domain location=227-526; Score=-85.3; E_value=0.043; Accession=PF03595.8; Description=C4 -dicarboxylate transportermalic acid transport protein
  Pfam annotation: Domain name=MFS_1; Domain location=138-617; Score =16.1; E_value=5.8e-05; Accession=PF07690.6; Description=Major Facilitator Superfamily
  Pfam annotation: Domain name=Nodulin-like; Domain location=133-382; Score=451.6; E_value=1e-132; Accession=PF06813.4; Description =Nodulin-like
  Pfam annotation: Domain name=TatC; Domain location=227-404; Score= -80.8; E_value=0.044; Accession=PF00902.8; Description=Sec -independent protein translocase protein (TatC)
  Pfam module annotation: Pfam domain module=C4dic_mal_tran::MFS _1::Nodulin-like::TatC; Domain location=227-526::138-617::133 -382::227-404
MEPRCLNGGAGVSMARGAARCNHDLVAGASGGCHGATTIEFGDFFCREVLKWALSLRWASCKVASRSTGAHTSGTPTYLAQETSCVRASVVASSLRTNQTVDMVFGGDRAMGAAPGADAASTMRFALHVVRGRWFMFFASILIMAAAGGTYIFAIYSKAIKTSLGYDQQTLNTLSFFKDVGANVGILPGLINEVTPPWVVLACGAGMNLVGYLMIYLAISGRTARPPVWLMCVYIAVGANSQSFANTGSLVTAVKNFPEDRGVVLGLLKGFVGLSGAIFTQLYRAIYGTDNDGTDLVLLMAWLPAAISLVFIPTIRIMPRNTAARGERKAFFLFLYASIVLAVYLLVMNVVELEVIHFPKPAYYVTAVVLLLLIFFPIVIVVKQELKTYLAPPEPATAAATSAAIVTITVNEKTRASSNNVAPESTDHRHQATAAAAANDDADSSPSCFQDVFRPPARGQDYTILQALFSVDMLVLFVATICGIGGTLTAVDNMGQIGQSLGYPQRSITTFVSLVSIWNYAGRVVAGFASEYVLARYKVPRPLALTVVLLLACVGHALIAFGVNNGLYAASVILGFCFGAQWPLLFAIISEVFGLKYYSTLYNFGAVASPVGSYILNVRIAGRMYDREALRQGGQRGKDLTCIGVRCFRESFLIITGVTLLGALVSLLLAWRTRNFYRGDLYGRFREVGMVGATAGGANDRKVHEAEASTSGGASDSDTKDTSSSETVNGSKG

SEQ ID NO: 66463 - protein, 174 aa, Zea mays
  Coding DNA Sequence Number=SeqID_24684
  Gene Ontology: Mol. function=zinc ion binding; Biological process =superoxide metabolic process
  Homolog annotation: Hit_ID=Q10R22; Match level="QueryCoverage=73%, HitCoverage=48%, E-value=4e-26, Identity=48%"; Hit description=Zinc finger, C3HC4 type family protein, expressed
  Pfam annotation: Domain name=zf-C3HC4; Domain location=130-167; Score= 21.3; E_value=0.00099; Accession=PF00097.15; Description=Zinc finger, C3HC4 type (RING finger)
MAHDRTSNAQKLSGDVNCECELQLAVDEALARELHEMESKLANTSLNDNNGRKTTSSSAFDRGNNSASRPPQVLEEDVIDPDNMTYEELQQLGEAIGTQSKGLPESVIALLPTSTYKTGIFSRKEKHDECVICCMAYKNRDRLTKLPCGHHYHQACVAKWLQINKESHIVISLR

SEQ ID NO: 66464 - protein, 629 aa, Zea mays
  Coding DNA Sequence Number=SeqID_24685
  Gene Ontology: Mol. function=methyltransferase activity; Cellular component=cellulose and pectin-containing cell wall; Biological process=metabolic process
  Homolog annotation: Hit_ID=Q6EP94; Match level="QueryCoverage=99%, HitCoverage=96%, E-value=0.0, Identity=75%"; Hit description =Dehydration-responsive family protein-like
  Pfam annotation: Domain name=DUF248; Domain location=94-619; Score =1197.9; E_value=0; Accession=PF03141.7; Description=Putative methyltransferase
  Subcellular localization annotation: CTP_CleavageSite=45; ConfidenceScore=5.20e-01
MLHLAAVAVLCSLSYLLGIWHHGGFSAGPAAGDSSSSVSIATAVSCATPAPTTASSSPPAGPLDFAAHHTAEGVEAEGALRHRNYEACPAKYSEYTPCEDVERSLRFPRDRLVYRERHCPAAGERLRCLVPAPKGYRNPFPWPASRDVAWFANVPHKELSVEKAVQNWIRVDGDKFRFPGGGTMFPRGAGAYIDDIGKLIPLHDGSIRTALDTGCGQYPMHSKSNFSENVASWGAYLLSRNILAMSFAPRDSHEAQVQFALERGVPAMIGVLASNQLTYPARSFDMAHCSRCLIPWQLYDGLYLIEVDRILRPGGYWILSGPPINWKKHWKGWDRTKEDLDAEQKAIEAVARSLCWKKIKEEGDIAIWQKPTNHIHCKAIHKVIKSPPFCSNKNPDAAWYDKMEACITPLPEVSDLKEVAGGSLKKWPERLTAVPPRIASGSIEGVTEEMFVEDTELWKKRVGHYKSVIAQLGQKGRYRNLLDMNAKFGGFAAALVNDPLWVMNMVPTVGNSTTLGVIYERGLIGSYQDWCEGMSTYPRTYDLIHADTVFTLYNGRCEAENILLEMDRILRPEGTVIIRDDVDLLVKIKSMADGMRWNSQIVDHEDGPLVREKLLLVVKTYWTLDGSEQ

SEQ ID NO: 66465 - protein, 104 aa, Zea mays
  Coding DNA Sequence Number=SeqID_24686
MPLGMHMIENEAGLQAKVQLFFFDNKCSVDCPMLSLILRLLGFIAWMRGGQESVGVGTKRMASQPGQGRAGMMRKRSFCNDTVFGLESLLTKLEKGFEEVKIVL

SEQ ID NO: 66466 - protein, 94 aa, Zea mays
  Coding DNA Sequence Number=SeqID_24687
MVSAKPLVACMTLQVMRRIAQGPYHGQISDISSESNKISAFELFDIQSFRLGATLQSFLSSPVYYSFQYLVSSPFSILSGMLQTCIETARNVEI

SEQ ID NO: 66467 - protein, 300 aa, Zea mays
  Coding DNA Sequence Number=SeqID_24688
  Gene Ontology: Mol. function=protein binding; Biological process =ubiquitin cycle
  Homolog annotation: Hit_ID=Q6EP91; Match level="QueryCoverage=80%, HitCoverage=82%, E-value=7e-90, Identity=65%"; Hit description=F-box protein-like
MPESCIAAVLLYLGPAEICQVACLNRTFRDAASADCIWAAKLPSNYRYLAALAAAADDDCACDDAAEGSGRCCSSAAIKKEVYARLCRPTRFDGGTKNKGGFCMSICSKAMSITGRDDRRYWSHLSTEESRFHGVAYLQQIWWLEVGGEIDFCFPAGSYSLFFRLRLGRPHKRMGRRCHGSENIHGWDIKPTRFQLSTSDDQHTTSESHLVNPGRWTLYHVGDFIVSSSDEVTGLKFSMMQIDLFEFEAVCRYARGISSIACRMVPVQAWRIQAPPKRQADKAKRRLWIAERSQIHDSRY

SEQ ID NO: 66468 - protein, 110 aa, Zea mays
  Coding DNA Sequence Number=SeqID_24689
MEIDFQTLTAITRCPPPSDGHWTIVLGEDHAGAEGNSAPWPHTGPQGCSSMQAVRVDRAVLIISHHGMVFGRSQLGTNPGRVPSGSNLGEFLFLSEFHWRPGFSEPTGFT

SEQ ID NO: 66469 - protein, 240 aa, Zea mays
  Coding DNA Sequence Number=SeqID_24690
MGVVVVVPLCASLRPERAEGVIGQKELQGSGIVLPWLGCMCVGDGARGRGAAAAGAEAPLARPAECKTKEADIGIKTKAVLFELFRRNFAGNPTEMYGSNYVPPKRTAFQAWGSWGIISTKEKKRKMGENIWHCSRQVAFCLCRRCYLNSRRTIAAKIEKSVSLARESQKRDKRVPERGCRDKRCDKADALDHFIMRSDKWTVVKIGIKYRQKSIVTRASGLSKDTYRSSKKIYDEKLPH

SEQ ID NO: 66470 - protein, 119 aa, Zea mays
  Coding DNA Sequence Number=SeqID_24691
  Subcellular localization annotation: CTP_CleavageSite=16; ConfidenceScore=5.26e-01
MQYRARMIGPGRKRMTAAAAQRGPGPRSQPQRAVARLGSPPVARAADAIGVGGTGTATVRIKNDSPAQLHSLEPREDGHCFDAPKARTGGLKMNGVIACRCFIVDGYVAYYSKKNVDKP

SEQ ID NO: 66471 - protein, 48 aa, Zea mays
  Coding DNA Sequence Number=SeqID_24692
MAGATTSKSQTHARYDFFLCTLGHAQDDFFYCTGGSTPKNCNAAPKIP

SEQ ID NO: 66472 - protein, 86 aa, Zea mays
  Coding DNA Sequence Number=SeqID_24693
  Subcellular localization annotation: CTP_CleavageSite=64; ConfidenceScore=5.65e-01
MGLAIHPSGSCSSETSELWLKLPPSSSSSSSSSRSPPAAGMPYGGGRATSQTPPPVEATGKSLVASAPGVDAPASRAGDDAVPLGD

SEQ ID NO: 66473 - protein, 179 aa, Zea mays
  Coding DNA Sequence Number=SeqID_24694
  Gene Ontology: Mol. function=nucleoside-triphosphatase activity; Cellular component=membrane; Biological process=peroxisome organization and biogenesis
  Homolog annotation: Hit_ID=Q93X55; Match level="QueryCoverage=98%, HitCoverage=23%, E-value=2e-35, Identity=43%"; Hit description =Peroxin 6
MYVGESEKNGRDIFEKFSTVNLRLGLHAHVSFSLMSLIPSLLHEDPQQILAVSWTGLFPRPDLLDSALLRLGRFDKLLYVGVNTEASYRERILKAQTRKYKLHKNVSLLSVAQEWFHAAKRSVETFETDPSRSNDASAEEVIVEIDDFITVLGDIAPSLSLDELQNYEQLRQKVEGPSR

SEQ ID NO: 66474 - protein, 1290 aa, Zea mays
  Coding DNA Sequence Number=SeqID_24695
  Gene Ontology: Mol. function=nucleoside-triphosphatase activity; Cellular component=membrane; Biological process=peroxisome organization and biogenesis
  Homolog annotation: Hit_ID=Q93X55; Match level="QueryCoverage=67%, HitCoverage=95%, E-value=0.0, Identity=47%"; Hit description=Peroxin 6
  Pfam annotation: Domain name=AAA; Domain location=363-578; Score =34.2; E_value=4.4e-07; Accession=PF00004.19; Description=ATPase family associated with various cellular activities (AAA)
  Pfam annotation: Domain name=AAA; Domain location=676-852; Score =253.2; E_value=5.5e-73; Accession=PF00004.19; Description=ATPase family associated with various cellular activities (AAA)
  Pfam annotation: Domain name=AAA_2; Domain location=672-792; Score= -42.9; E_value=0.017; Accession=PF07724.4; Description=ATPase family associated with various
  Pfam annotation: Domain name=AAA_3; Domain location=676-794; Score= -22.0; E_value=0.084; Accession=PF07726.2; Description=ATPase family associated with various
  Pfam annotation: Domain name=AAA_5; Domain location=676-800; Score= -8.5; E_value=0.0079; Accession=PF07728.4; Description=ATPase family associated with various cel
  Pfam annotation: Domain name=Ribosomal_L3; Domain location=996-1244; Score=476.7; E_value=2.8e-140; Accession=PF00297.12; Description =Ribosomal protein L3
  Pfam module annotation: Pfam domain module=AAA::AAA::AAA_2::AAA _3::AAA_5::Ribosomal_L3; Domain location=363-578::676-852::672 -792::676-794::676-800::996-1244
MVEMRQRRKPLVLASTQALLDSLPGDRPPPPPQEPVRLKAGVLRFPSGGGGAEFGELASFVGIPAPTLRRLAVVTGTPVLVKNTDNNVGRIVKAVLFGNPSLDKSCSEHTDQVVSGHAMGFLPCRTFPATGFTSMDEDVGYVSPLLAFNLGLPVSCLKLLIQREGQPFKFCSRAEEMDATASSGSDLSLHLDLLPCPQVPKYALHLRVSVVRIPDCGVLASLKINSSFGGSEYQDMVDQALNEYFKFDRFLARGDVFGIQNSWKCGSSCCLACNKQDNKLNPRNMIYFKVTGMEPSDEPILRVNCNETALVLGGAASAAIPPYSFFASSGNSVPLHSEVVEHLASVIAPALCPSDILPKIKFSTFLYGPPGCGKRTVVRHVANHLGLHVVECSCHDLMTSSESGAPTALATTFKEAQKYSPCIILLRHFDAIGNASSNEGPQSEQSGIASNIESVIKQYIGQRWVAKDSLPGKDVNGSSYLVEPECVSSLQIILVATADSSEGMQQSIRRCFRYEIDMKTMNEEQRNKLISETLQGIPKVADESICDKFLKDLAAQTSGFMPRDILALVADAGVSFAHKIAAGNDSKAISKHTEVLPESSSATQNEEHHFSKEDIMSSLERAKKRNRAALGTPKVPNVKWEDVGGLEDVKKVILDTIQLPLMYKHLFSSKLRKRSGVLLYGPPGTGKTLLAKAVATECSLNFLSVKGPELINMYVGESEKNVRDIFEKARSARPCVIFFDELDSLAPARGSSADSGGVMDRVVSQDLFIIGATNRPDLLDSALLRPGRFDKLLYVGVNTEASYRERILKAQTRKYKLHKNVSLLSVAQRCPPNFTGADIYALCADAWFHAAKRSVETFETDPSRSNDASAEEVIVEIDDFITCQQRCLLVRARQVGRCEQNPYVIVSSGAILRGSAHGRGLGGLAGSFVPPNGFTCSASAQPAPPPLPLALPSDSRNRRVLILDLIVLSEMIASVKSFPRDDPKKPCHLTAFLGYKAGMTHIVVRSRSLAPTPRGLRTLNSVWAQHLSEEVRRRFYKNWCKSKKKAFSKYALKYDSDAGKKEIQLQLEKIRKMKGLKQKKAHLMEIQVNGGTIADKVDYGYKFFEEVPVDAVFQKDEMIDIIGVTKGKGYEGVVTRWGVTRLPRKTHRGLRKVACIGAWHPARVSYTVARAGQNGYHHRTEMNKKVYKIGKAGQESHDASTEFDRTEKDITPMGGFPHYGIIKGDYLMIKGCCVGPKKRVVTLRQSLLKQTSRLALEEIKLKFIDTSSKFGHGRFQTTDEKQRFFGKLKA

SEQ ID NO: 66475 - protein, 56 aa, Zea mays
  Coding DNA Sequence Number=SeqID_24696
MAGDGADDRDGGDIFFEGRNFAGSRNSDPSASSFFERSDGLAGSFVPPNEFDTGSR

SEQ ID NO: 66476 - protein, 102 aa, Zea mays
  Coding DNA Sequence Number=SeqID_24697
  Subcellular localization annotation: CTP_CleavageSite=22; ConfidenceScore=5.31e-01
MSHLTVASAVGAVATQVRLVLRCLRGSDAHRGPRRRRTQPWTAPPLAVQSMLIPTDLARALKAWIITCSSASSSVKGSSRIGVRIYSGGELSTCEAVGMHAS

SEQ ID NO: 66477 - protein, 171 aa, Zea mays
  Coding DNA Sequence Number=SeqID_24698
  Gene Ontology: Mol. function=intracellular transporter activity; Cellular component=endoplasmic reticulum; Biological process =intracellular protein transport
  Homolog annotation: Hit_ID=Q9SPE5; Match level="QueryCoverage=99%, HitCoverage=49%, E-value=1e-47, Identity=53%"; Hit description=Gamma- soluble NSF attachment protein
MYDEACSVLEEDGKEHMAFDLYRVAAALYIKMENLTFSSMCYLIHDFLGTFFVHSSLFLHVKYSDVAALFLRLGSAADKCNAINSQCKAYLSAIIIYLYAHDFQQAQKCYNDCSEVQAFLNSGQNRCTTKLLSAYEEGDAEEIKRIAQSSAFNHLDHVVIRLSWKLPTGDL

SEQ ID NO: 66478 - protein, 757 aa, Zea mays
  Coding DNA Sequence Number=SeqID_24699
  Gene Ontology: Mol. function=nucleic acid binding; Cellular component= intracellular; Biological process=DNA integration
  Homolog annotation: Hit_ID=Q8W0X4; Match level="QueryCoverage=99%, HitCoverage=65%, E-value=0.0, Identity=91%"; Hit description =Putative pol protein
  Pfam annotation: Domain name=RVT_2; Domain location=494-749; Score =540.0; E_value=2.5e-159; Accession=PF07727.4; Description=Reverse transcriptase (RNA-dependent
  Pfam annotation: Domain name=rve; Domain location=130-281; Score =108.0; E_value=2.8e-29; Accession=PF00665.16; Description=Integrase core domain
  Pfam annotation: Domain name=zf-CCHC; Domain location=28-45; Score =29.9; E_value=9.2e-06; Accession=PF00098.13; Description=Zinc knuckle
  Pfam module annotation: Pfam domain module=RVT_2::rve::zf-CCHC; Domain location=494-749::130-281::28-45
MALIIKRFKTVLKGRNGQPSKTKTKGKRSCFKCGKLGHFIANCPDNDSDQEKGNKREKKKHYKKAKGEAHLGKEWDSDCSSSDSDNEGLAATAFNKSTLFPNERHTCLMAREKKVYASGGSSWIIDSGCTNHMTGEKKMFTSYVKNKDSQDSIIFGDGNQGKDKSETQGTLKRFLRRAQNEFELKVKKIRSDNGSEFKNLQVEEFLEEEGIKHEFSAPYTPQQNGVVERKNRTLIDMARTMLGEFKTPECFWTEAVNTACHAINRVYLHRLLKKTSYELLTGNKPNVSYFRVFGSKCYILVKKGRNSKFAPKAVEGFLLGYDSNTKAYRVFNKSSGLVEVSSDVVFDETNGSPREQVVDCDDVDEEDVPTAAIRTMAIGEVRPQEQDERDQPSSSTMVHPPTKDDEQVPQVEALDQGGAQDNQVMEEEVQPAPPTQVRAMIQRDHPVDQILGDISKGVTTRSRLVNFCEHYSFVSSIEPFRVEEALLDPDWVLAMQEELNNFKRNEVWTLVPRPKQNVVGTKWVFRNKQDEHGVVTRNKARLVAKGYAQVAGLDFEETFAPVARLESIRILLAYAAHHSFRLFQMDVKSAFLNGPIKEEVYVEQPPGFEDERYPDHVCKLSKALYGLKQAPRAWYECLRDFLLANAFKVGKADPTLFTKTCDGDLFVCQIYVDDIIFGSTNQKSCEEFSRVMTQKFEMSMMGELNYFLGFQVKQLKDGTFISQTKYTQDLLKRFGMKDAKPAKTPMGTDGHTDLNKG

SEQ ID NO: 66479 - protein, 190 aa, Zea mays
  Coding DNA Sequence Number=SeqID_24700
  Gene Ontology: Mol. function=structural constituent of ribosome; Cellular component=ribonucleoprotein complex; Biological process =translation
  Homolog annotation: Hit_ID=P31674; Match level="QueryCoverage=99%, HitCoverage=100%, E-value=5e-74, Identity=78%"; Hit description=40S ribosomal protein S15
  Pfam annotation: Domain name=Ribosomal_S19; Domain location=100-173; Score=126.9; E_value=5.6e-35; Accession=PF00203.11; Description =Ribosomal protein S19
MADVDVEPEVAAGAPKKRTFRKYSYRGVDLDALLDMSTDDLVQLFPARARRRFQRGLKRKPMALIKKLRKAVDAVNARLCLSVIICGTLFTYTCYTISSRAISHCPEQKKDAPAGEKPEPVKTHLRNMIIVPEMIGSIVGVYNGKTFNQVEIKPEMIGHYLAEFSISYKPVKHGRPGIGATHSSRFIPLK

SEQ ID NO: 66480 - protein, 200 aa, Zea mays
  Coding DNA Sequence Number=SeqID_24701
  Homolog annotation: Hit_ID=UPI00005BFC28; Match level="QueryCoverage =31%, HitCoverage=49%, E-value=1e-16, Identity=73%"; Hit description =PREDICTED: similar to germinal histone H4 gene
MSGRDKGGKGLGKGGALRHRKVLRDNIPGITNLTIRRLARRGGVKRISGLIYEETRGVLKIFLEQCCWFRGSSRAHPVRPPRSVAMAQCRHHLLLMVIAAPNCHFILLGTLSIEPKPQKPTDQHTQKMNLSVLASRILLEAHCLEERTAESISMLVVSTKQAAVGDPAAPLAQGGMPLLYAPVDPAESLKFRRLQIVSSQ

SEQ ID NO: 66481 - protein, 524 aa, Zea mays
  Coding DNA Sequence Number=SeqID_24702
  Gene Ontology: Mol. function=nucleic acid binding; Cellular component= oxygen evolving complex; Biological process=DNA integration
  Homolog annotation: Hit_ID=Q8H6I0; Match level="QueryCoverage=99%, HitCoverage=34%, E-value=0.0, Identity=76%"; Hit description =Putative gag-pol polyprotein
  Pfam annotation: Domain name=RVT_2; Domain location=345-524; Score =248.6; E_value=1.3e-71; Accession=PF07727.4; Description=Reverse transcriptase (RNA-dependent
  Pfam annotation: Domain name=rve; Domain location=2-117; Score=76.1; E_value=1.1e-19; Accession=PF00665.16; Description=Integrase core domain
  Pfam module annotation: Pfam domain module=RVT_2::rve; Domain location=345-524::2-117
MTTDRPLELLHMDLFGPIAYISIARESDNGTKFKNSQIEGFLEEEGIKHEFSSPYTPQQNGVVERKNKTLLDMARTMLDEYKTSDRFWAEAVNTACYAINRLYLHQILKKTSYELLTGKKPNISYFRVFGSKCFILVKRGRKSKFAPKTVEGFLLGYDSNTRAYRVFNKSSGLVEVSCDVVFDETNGSQVDQVDLDEIGDEEAPCIALRNMSIGDVCPKEPEEPSNAQDQPSSSTQASPPTQNEDEAQVDEGEDQQDEPPQDDDNDQGGDANDQDKEDEEPRPPHPRVHQAIQRDHPVDTILGDIHNEVTTRSRVAHFCEHYSFDSSIEPHRVEEALQDSDWVVAMQEELNNFTRNEQDEHGVVTRNKARLVAKGYSQVEGLDFGETYAPVARLESIRILLAYATYHGFKLYQMDVKSAFLNGPIKEEVYVEQSPGFEDSEYPNHVYKLSKALYGLKQAPRVWYECLRDFLITNGFKVGKADPTLFTKTLYNDLFVCQIYVDDIIFGSTNESTCEEFSRIMTQN

SEQ ID NO: 66482 - protein, 321 aa, Zea mays
  Coding DNA Sequence Number=SeqID_24703
  Gene Ontology: Mol. function=structural constituent of ribosome; Cellular component=ribonucleoprotein complex; Biological process =translation
  Homolog annotation: Hit_ID=P31674; Match level="QueryCoverage=58%, HitCoverage=99%, E-value=5e-73, Identity=78%"; Hit description=40S ribosomal protein S15
  Pfam annotation: Domain name=MatE; Domain location=1-133; Score= -29.9; E_value=0.074; Accession=PF01554.9; Description=MatE
  Pfam annotation: Domain name=Ribosomal_S19; Domain location=227-304; Score=128.4; E_value=2e-35; Accession=PF00203.11; Description =Ribosomal protein S19
  Pfam module annotation: Pfam domain module=MatE::Ribosomal_S19; Domain location=1-133::227-304
MAAQLGSTPMAAFQICLQTWLAYSLLADGLAFAGQAILASAFARKDHPKATATASRILQLALVLGLLLSILLGVGLRIGSRLFTSDQGVLHHIYIGIPPSTLDNLLLNSNQELHVHRMRQTPRYPAHNEPGRADVDVEPEVAAGAPKKRTFRKYSYRGVDLDALLDMSTDDLVQLFPARARRRFQRGLKRKPMALIKKLRKAVDAVNARLCLSVIICGSLFSYTCYSISSRAISHCPEQKKDAPAGEKPEPVKTHLRNMIIVPEMIGSIVGVYNGKTFNQVEIKPEMIGHYLAEFSISYKPVKHGRPGIGATHSSRFIPLK

SEQ ID NO: 66483 - protein, 169 aa, Zea mays
  Coding DNA Sequence Number=SeqID_24704
  Gene Ontology: Mol. function=triacylglycerol lipase activity; Biological process=lipid metabolic process
  Homolog annotation: Hit_ID=Q6I5X8; Match level="QueryCoverage=62%, HitCoverage=25%, E-value=3e-22, Identity=49%"; Hit description ='putative lipase class 3 family protein, PF01764'
MEETASTGELAMMAGMALTLMRWLGNLERNREDRAVAAYSVGVGAEELHRPLHEIGSTPSSCSNRVWKATFPMSGPAKENTHTGATLSSPGDTLACVSTSSKAHNIASVLPRLWPLTVTLTYPPRMWYSSTSLRTSANTCYCVEYLHKRQNPLSAFMSGSGHDTLVSCR

SEQ ID NO: 66484 - protein, 84 aa, Zea mays
  Coding DNA Sequence Number=SeqID_24705
MQPVEGSARIRGHASFARKFAENRNVCLLGSELSVYLGTQNKNPEKHVMLHNLRCTLIAIGGGRLGYPKISGVIRVFKISGFEN

SEQ ID NO: 66485 - protein, 194 aa, Zea mays
  Coding DNA Sequence Number=SeqID_24706
MEREIDRAPVMPLPHPTDVARAGGADEGSALRGYGAGFGQGEAEPPRDASRRCPSAAADPDIEVIALFAQLSRIWGDCYRKFTRGVISLRQPEGANQDSDGGVYLRGDLRNLLACFANNVLSDAFYKVGVFTATETPLAPSPIFENTPMQRHFAMFCATFSTFFLQLGGDAPLEHVLHSVVYVHSSIFLQLATG

SEQ ID NO: 66486 - protein, 344 aa, Zea mays
  Coding DNA Sequence Number=SeqID_24707
  Subcellular localization annotation: CTP_CleavageSite=43; ConfidenceScore=5.15e-01
MYLAPGLRDPRSCIVTAPDSAGRQTSAVLVPACANPSLAGRATAATTPSTWAAGQPRQKPAALLANSVFFPLPNSKIGVVKVSATTAMNHMSAATRAQPWRPSAVIVVGPLHLTPHLTPIPYAAFPIVPAPPLHILKRTTISKPHKAAEVEDFLDRSQNFARSVGKVQMQKICKCLRECALNLLDFMRGKMDTTKLKTLLFGRLSPDELVSKPRLKHVKRKRNWERTPQGGRCVLQKSAKHAGSATGSDSLPTPNKVLHHALHYRVAGHQSSIHQFVPIIRWPRIIPSGFGYGLSLGIPSVAPHLGKGILGKPPIIPSGFGYGLSLEIPSVAPHLGNGILGKPP

SEQ ID NO: 66487 - protein, 105 aa, Zea mays
  Coding DNA Sequence Number=SeqID_24708
  Subcellular localization annotation: CTP_CleavageSite=29; ConfidenceScore=5.17e-01
MAERRQARGLAATALISLLTWRRRFTRLRSSTRGIGRGRTTTWKERKANGWVPHDSETESRLTRNLSRAGVNRGLTVGPQVSAGDTGARARKEYRCDAKVNAKSA

SEQ ID NO: 66488 - protein, 81 aa, Zea mays
  Coding DNA Sequence Number=SeqID_24709
MSGGSPRLVFEGTGWPICLFTLDGAAPLLSVLRQREERYCWGSSFPLKVLKAKTPSSKYYKGIRDMKIQSEDDANRIRSYD

SEQ ID NO: 66489 - protein, 228 aa, Zea mays
  Coding DNA Sequence Number=SeqID_24710
MDLFTPHSDLDLSINFSANTDEQYTRKQMISIIKKFSKVLFSYQRSGIFCGVLPIVSARVPILKVIDRGTGVECDISVENKDGMTRLSSGLRPLHVLPLNLELVPWVTVPSHLRVVRASAAVCACLVCALSALFLVHRASSARLPPAVGVTTIFYVDSAPPVLFATPSVRLTRDLSTVVAFFSVAVHEVCHICDLLCRIAVRAAICVHFFAPRISPWSVAIHAVYPIR

SEQ ID NO: 66490 - protein, 49 aa, Zea mays
  Coding DNA Sequence Number=SeqID_24711
METTMMVATGMVEVMMEHMVLEVEHMVLELEHMEYVNEIGPHPDASKHA

SEQ ID NO: 66491 - protein, 71 aa, Zea mays
  Coding DNA Sequence Number=SeqID_24712
  Subcellular localization annotation: CTP_CleavageSite=37; ConfidenceScore=5.36e-01
MAPPVVAAPLLFSLSLSSHVHVKLLPWKPSSSTTHAKCSMESLNQYSSSICDYQIVLVVVLDKMPELRNPR

SEQ ID NO: 66492 - protein, 253 aa, Zea mays
  Coding DNA Sequence Number=SeqID_24713
  Subcellular localization annotation: CTP_CleavageSite=38; ConfidenceScore=5.01e-01
MNIGSDFPSNTWQGLCSKTTSTGGARRGLGTTTGDECRAIIGSTPDGSSALVLEDHDRRRKDLDTVRRASMSDVHGFEAVTAMASRDARDQRECRAMDGGAERKAGGEQGEDSATSITRGCGRVKSMQRARLHAPWEERERKAGGRRDHRGASTGGTMGKTPWGNSIRGAVLQEKSRAVEILDACSEQRKGAAWGNARERDAPPWASAGARRPSRERGYEEHDWARKGSSSTARGGSSGRWDTQELQGTITRR

SEQ ID NO: 66493 - protein, 56 aa, Zea mays
  Coding DNA Sequence Number=SeqID_24714
MLTRCLTKCLSYETLADFVVLAIIKSDSVMVNNYVLTVSRAPTSPLVNAELFNEFR

SEQ ID NO: 66494 - protein, 101 aa, Zea mays
  Coding DNA Sequence Number=SeqID_24715
MFPYCRLGRNRTWELYALRGWLPDFLEFFVDARMAPPQSPRPLVAVGSFTTATISGMDCAPRFTNSSASSRIYQSRESCIGVLAEVITDVLRRGAERRRVR

SEQ ID NO: 66495 - protein, 201 aa, Zea mays
  Coding DNA Sequence Number=SeqID_24716
  Gene Ontology: Mol. function=transcription regulator activity; Cellular component=nucleus; Biological process=regulation of transcription
  Homolog annotation: Hit_ID=Q8S490; Match level="QueryCoverage=61%, HitCoverage=84%, E-value=8e-52, Identity=81%"; Hit description =Transcription factor RAU1
  Pfam annotation: Domain name=HLH; Domain location=135-183; Score =39.8; E_value=9.1e-09; Accession=PF00010.16; Description=Helix-loop -helix DNA-binding domain
MATADSLAGSGSRLKGQLSFSSRQGSLMSQISEMDSEEVGGSSPEAAGGGRGYIPGYPMGSGSGWEDSSALMSDNLSGLKRPRDSSEPGQSVQSRITHQFSLPKTSSEMASIDKFLQFQDAVPCKIRAKRGCATHPRSIAERVRRTKISERIRKLQELVPNMDKQTNTSDMLDLAVDYIKELQKQVKNSKASSLGIEKDIN

SEQ ID NO: 66496 - protein, 102 aa, Zea mays
  Coding DNA Sequence Number=SeqID_24717
  Gene Ontology: Mol. function=zinc ion binding
MSDNTPEDKFKNRLIQQESVHEDGSITCPSIELGGCGDAMLNLIYSSPSSQSEELSSECELDAAGNHSGVKDAQAHGSPVGAQADMFTSMKPEDVYDTVRIR

SEQ ID NO: 66497 - protein, 144 aa, Zea mays
  Coding DNA Sequence Number=SeqID_24718
  Gene Ontology: Mol. function=electron carrier activity; Cellular component=anchored to membrane; Biological process=electron transport
  Homolog annotation: Hit_ID=O82576; Match level="QueryCoverage=48%, HitCoverage=78%, E-value=5e-32, Identity=80%"; Hit description=Blue copper protein
  Pfam annotation: Domain name=Cu_bind_like; Domain location=34-102; Score=83.2; E_value=8e-22; Accession=PF02298.8; Description =Plastocyanin-like domain
MANALPLIVALVAAAGCAALASATSYTVGDSQGWTTTGVDYSSWASRNTFVVGDTLARPGYDACSGANALSDDDTGSTTITLQTPGTHYFICNVPGHCASGMKLAVAVSASPSGTAPSAGALQVPAMASVVAAAAGAAIKLALF

SEQ ID NO: 66498 - protein, 123 aa, Zea mays
  Coding DNA Sequence Number=SeqID_24719
  Subcellular localization annotation: CTP_CleavageSite=53; ConfidenceScore=5.05e-01
MSCSMVFEDAIVGHRQALPFAIVRVEQAVAFPSSLTFNVARGVRSSMYLLSISGDRVSPGRPQGMDVVGAELMHRINMSRERRRNGPTCGFATSPKVGLGASVSTLNMGYLLLLGQAGSNKSR

SEQ ID NO: 66499 - protein, 192 aa, Zea mays
  Coding DNA Sequence Number=SeqID_24720
  Gene Ontology: Mol. function=electron carrier activity; Cellular component=anchored to membrane; Biological process=electron transport
  Homolog annotation: Hit_ID=Q949E8; Match level="QueryCoverage=62%, HitCoverage=47%, E-value=2e-20, Identity=44%"; Hit description =Uclacyanin 3-like protein
  Pfam annotation: Domain name=Cu_bind_like; Domain location=38-143; Score=81.6; E_value=2.5e-21; Accession=PF02298.8; Description =Plastocyanin-like domain
MAKNSYVVYVLVLLVAGYTAALASATTTTFIVGDDQGWMTGVDYVAWVKGKTFAIGDKLGEWVHRIALRCSCTRTGTSWQIIAVFNYPSEEHTVTEVSRTDYFACAGGNALSNDRSGSTNITLTGPGTRYFLCNIPGHCTIGMRLAVTVAGGGSPPGATPAGGAAGATARPAMGSFIVKTTAWLAVIKLTLS

SEQ ID NO: 66500 - protein, 70 aa, Zea mays
  Coding DNA Sequence Number=SeqID_24721
MGTRLIGTTATRPREFEICCGSSGVFLIMDQRSFCFHTVDVEVKVVLHRMILSLGDNFFLYYRFFLVFYT

SEQ ID NO: 66501 - protein, 68 aa, Zea mays
  Coding DNA Sequence Number=SeqID_24722
MGQGERAGASDAQKELGRLGKRRGQCSRHACTRGLAAVRKKGGADKGIKIKSNHNSTSNISNMCINQK

SEQ ID NO: 66502 - protein, 81 aa, Zea mays
  Coding DNA Sequence Number=SeqID_24723
MENASSPNRAVRASDEDHHENEEEVVVEEETAPQAEIPRVENSFYFDICGIDPESPTTQGKPRCIYPFLVILKSLSLEMMH

SEQ ID NO: 66503 - protein, 232 aa, Zea mays
  Coding DNA Sequence Number=SeqID_24724
  Gene Ontology: Mol. function=protein dimerization activity
  Homolog annotation: Hit_ID=Q2R3V9; Match level="QueryCoverage=43%, HitCoverage=12%, E-value=5e-12, Identity=34%"; Hit description=HAT family dimerisation domain containing protein
  Pfam annotation: Domain name=DUF659; Domain location=4-121; Score= -16.3; E_value=4.8e-06; Accession=PF04937.6; Description=Protein of unknown function (DUF 659)
MALGDLLGDAGIGYFYIIPSVLPLGPCVGAQHPLDASSESHDAMMLAKLLDKRTEKIGRDKIIRFVTNIGANYKVVGHILVQNTPTLFWTRCAVHFLDLMLVDIGKFKDFKKPIAHARHVKTFICRHGKILSDMRVHTKALYLNLGKFYSMKQSDDEGYAGEIRSCFNVVLVKMVLDENIINTIDAQAILYENQIEAICWGNDPWAPRAHKSVGGQRKSLPQIVPRHRAQDQ

SEQ ID NO: 66504 - protein, 151 aa, Zea mays
  Coding DNA Sequence Number=SeqID_24725
MEKQAPPETKRGPSGLRHGPSGRCKTRKTPKSLIQPLLLTVAISAVTTVLGEGEARKTCVEEDRGGLAVRWSACAGAARTEYDWAKVAHGPGAEARAEASRTGVTRVDGRGGGAKSRAARCGRARRGKGRVDGRWDSARPAPKPRGTRMPQ

SEQ ID NO: 66505 - protein, 294 aa, Zea mays
  Coding DNA Sequence Number=SeqID_24726
  Homolog annotation: Hit_ID=Q5QM84; Match level="QueryCoverage=40%, HitCoverage=18%, E-value=1e-46, Identity=69%"; Hit description =Probable voltage-dependent calcium channel protein TPC1
  Pfam annotation: Domain name=efhand; Domain location=189-217; Score =21.3; E_value=0.0036; Accession=PF00036.22; Description=EF hand
MMQWVRRSRHCYHEEKAANGSGRKFVGDRVEGVRIAGTTKGIEMRIGWAMPKRAKEWGRPKTGGANEVGDAVNHALDLAVLRGGGCPKVTVDEIKGPSGVGHGRCEGVGCDDMVNEERDGRHPHRATESGVGAISGEHADGEHEWGRVGAAWGTATEQGEPKEGGAHVIAVAAELAKQLAQMDSIRKSILQKAFDLIDTNGQGYLNKEQCISLLDELNKYRSLPKTSREDFELIFSELDRSGDFKPSYLEKYPSFYHSPQCERLKSFVRSRLFEYIVVFVLLVNLIAVVIETTA

SEQ ID NO: 66506 - protein, 152 aa, Zea mays
  Coding DNA Sequence Number=SeqID_24727
VQIDVHTKSLESQFCSGTGRETCSQFHAEAYLREMRMGELRRSSCGIDLDTPGIPGNQRSPQGGAMTEVEAPLITEVEGVEGRGFCGSASTGGGSSGLGSGVRGTRQYHRRSDALAYGDRYQKAAALVDLVGSLSASHCSPTPRFASLSEML

SEQ ID NO: 66507 - protein, 93 aa, Zea mays
  Coding DNA Sequence Number=SeqID_24728
  Gene Ontology: Mol. function=voltage-gated ion channel activity; Cellular component=integral to membrane; Biological process=calcium ion transport
  Homolog annotation: Hit_ID=Q6S5H8; Match level="QueryCoverage=94%, HitCoverage=11%, E-value=4e-24, Identity=62%"; Hit description=Two -pore calcium channel
MNYLLFNFNDYPSGMVTLFNLLVMGNWQVWMESYAHLTGSSWSLVYFISFYLISVLLLLNLIVAFVLEAFFAEMELEKAGEADTQCEDEGYYG

SEQ ID NO: 66508 - protein, 164 aa, Zea mays
  Coding DNA Sequence Number=SeqID_24729
  Subcellular localization annotation: CTP_CleavageSite=22; ConfidenceScore=5.19e-01
MSGSNFGDSMGWSSSGRSSGPRRGKRGGGGGGGTDKPKQPQRGLGVAQLEKIRLQSEMAEYFHPLGGQAPSLIHRTGSLSLMPYGETDVRYSEFQAHPIIRSPVSSSAVYGTPHYGQHPNITLPLFESQVSSRLKGRHHDRSQSADSTSLNSDDPQDVDLELKL

SEQ ID NO: 66509 - protein, 67 aa, Zea mays
  Coding DNA Sequence Number=SeqID_24730
MVEVASSSCAPLVITWYGNPRESMVAEKVVTSMMGMALEGGVGDEARVIVGGQGYAEHTGKSCGQHV

SEQ ID NO: 66510 - protein, 180 aa, Zea mays
  Coding DNA Sequence Number=SeqID_24731
MDSKGKGKVSNCAKLFSYGGEIFFGVREPIKKSQKEVKEFGSKDPNMGQSGSPAIIHRTVRCAMCPTATRSCNDQLAGHVNAPTARRGHRTVQYAIEQSAAHPKGRRPITGYDKRCSRGCPVHPRIENNFQFPNKGAMTPWPLGVIKEAPRCLYQDTKHSKSTLQLRDSATMLSKCLREI

SEQ ID NO: 66511 - protein, 42 aa, Zea mays
  Coding DNA Sequence Number=SeqID_24732
MAGGQRVRPTRRKNINANQARILARETALRQQQGELDTHVRV

SEQ ID NO: 66512 - protein, 138 aa, Zea mays
  Coding DNA Sequence Number=SeqID_24733
  Subcellular localization annotation: CTP_CleavageSite=47; ConfidenceScore=5.44e-01
GAVNPMKHDSTSSASSSSSVCGLSMIAPSALVLRRKPLYLLPMPCLYLSAPASDACIVECWHVHHLRALASAPCCISSRLPLCSRERMDVLGASSPSHGGSHRAIPPRWTAPKFGSSARPGSECRSGTVPGHSAPSLL

SEQ ID NO: 66513 - protein, 78 aa, Zea mays
  Coding DNA Sequence Number=SeqID_24734
MQAKLSAGGAPINDPTTYHSLVDALQYLTFTIFDIMEIDSELATFGNPGSRSAIIHRTVRYASGATATSRQRSSAEEQ

SEQ ID NO: 66514 - protein, 68 aa, Zea mays
  Coding DNA Sequence Number=SeqID_24735
MVKRNQILHVKLMLKSDDDPVQEARRTDSEHNVINIEESCHSKEKYMGKTFRVEPHERSYQTHDHCHT

SEQ ID NO: 66515 - protein, 115 aa, Zea mays
  Coding DNA Sequence Number=SeqID_24736
MEPELRPYFERKKKELVDGGASGSGIVTAALGLGDSALGEGDGGRSGSVKGTATLGLGEGDGGARALGDGGARARGRGRWRSGSGTGTAALGLVLGDGDTAAAWRRNCVSSGGKS

SEQ ID NO: 66516 - protein, 105 aa, Zea mays
  Coding DNA Sequence Number=SeqID_24737
MFDDIPYAWRNTFTWNSLLSMYTKSDRLPDTHVVVCVVAAHAHERAFIVRFVVKLGLSSYVPVARGQLRALHSHSVRKVRQRATGQKAYVHAGFVDKGKRYYEQM

SEQ ID NO: 66517 - protein, 145 aa, Zea mays
  Coding DNA Sequence Number=SeqID_24738
MANSTVGITPARGHQRVRNTERLEDDGEAVKSQVDDDGLRLHKKCSGRESSVEGASEQGECASKARALKGRGRAVVAGEHIDVGASTPRTWARGIAVSVQHRGRARVWQRVAEVSIAWRQRCLWRVVEEAPRTGTSPLWMPPLAP

SEQ ID NO: 66518 - protein, 109 aa, Zea mays
  Coding DNA Sequence Number=SeqID_24739
MYPPSYQVKLVGYSSFGYPLPSLDGAVSGRAGLHPIHRADRARGIRRLGGGELLEDSEEEGDGGGDDGSGYEGSDEGGGGGNGGNTDDSGVGGDDESGVDKGGGDDNVG

SEQ ID NO: 66519 - protein, 79 aa, Zea mays
  Coding DNA Sequence Number=SeqID_24740
MAVIDNEVLCGGGGISYYKKLRLQDASLFLMMKKYEMKTDQKMIRVNVEAIVKWTALAHGRDEACLHDLRPMIIIPMER

SEQ ID NO: 66520 - protein, 495 aa, Zea mays
  Coding DNA Sequence Number=SeqID_24741
  Gene Ontology: Mol. function=protein serine/threonine kinase activity; Cellular component=ubiquitin ligase complex; Biological process=protein amino acid phosphorylation
  Homolog annotation: Hit_ID=Q9SW11; Match level="QueryCoverage=97%, HitCoverage=59%, E-value=1e-123, Identity=46%"; Hit description =Putative Ser/Thr protein kinase
  Pfam annotation: Domain name=Pkinase; Domain location=134-395; Score =132.1; E_value=1.6e-36; Accession=PF00069.15; Description=Protein kinase domain
  Pfam annotation: Domain name=Pkinase_Tyr; Domain location=134-397; Score=86.3; E_value=9.6e-23; Accession=PF07714.7; Description =Protein tyrosine kinase
  Pfam annotation: Domain name=U-box; Domain location=420-491; Score =44.6; E_value=3.3e-10; Accession=PF04564.6; Description=U-box domain
  Pfam module annotation: Pfam domain module=Pkinase::Pkinase_Tyr::U -box; Domain location=134-395::134-397::420-491
DNANFELEKLRIKLEHMKGVCKLVQDESTSASQQMIDLVERRAQEEARLAEVRQRINITTEAARKEREQRYAIEAQARHVRDLAKEEALKKQNLQLRLSREADNVQKLEKLLELGGKSYTVFTWEEMESATSSFSEALKIGSGAFGTVYKGKVHHKTVAIKVLKSDDSHIAKHFEKELEILGKTRHRHLLLLLGACLDRACLVYEYMENGSLEDRLQCKGDTAPLPWYHRFRIAWEITLALIFLHSSKPKPIIHRDLKPANILLDRNFTSKIGDAGLATFLPLRDTSSTHTIRKSTDLVGTLFYLDPEYQRTGQVSAKSDVYALGMVFLQLLTAKSPIGLADTAERAMEEDHLIDILDQRAGNWPVREAHELTQLGLRCLEMRSKDRPDLKSKVLVVLERLNNLASTVYHSVQPIPTAPPSHFICPILKRVMQDPCIASDGYSYERVAIEMWLNENDVSPLTKARLPDKNLVPNLALICLINSWKGEVGATGPIR

SEQ ID NO: 66521 - protein, 117 aa, Zea mays
  Coding DNA Sequence Number=SeqID_24742
SVGVRYGEKGVTDRGGPSVSGKSKAHGRASTTLLADQEAPPASGTAWSWAWSWAGETFGPYGVLGRGKVRKEEIALQRQRDDGRIMNMDLSCMLDEKKTYYMRLRAKIMSQHLLLRY

SEQ ID NO: 66522 - protein, 127 aa, Zea mays
  Coding DNA Sequence Number=SeqID_24743
  Subcellular localization annotation: CTP_CleavageSite=25; ConfidenceScore=5.05e-01
MDYSHHQHIAPSQLRGRSTNFVAVKVAHTGSSRPTSNDKVWSDNSKDKDKVIQHQAPLSTTLQQQVINKDKITSAPDTKNSLPLVVDLEHRFQKDWFLTDQYNSRGRLSKKKDEGNKHIMSQGRHPQ

SEQ ID NO: 66523 - protein, 151 aa, Zea mays
  Coding DNA Sequence Number=SeqID_24744
MVWVAWVAGTIIQAMPTSSLRSLGLDAAHHVAPSHRPAHSGLVVIGHECTVIPKIVLVSSSLRSWVISIGQRKHFGVSFCQGRIPILSSQTSLDLWESLTATHMALEATDVGEVVSLRARMVEPDRRVVELELEVAGLREGTDEVIVFIWA

SEQ ID NO: 66524 - protein, 253 aa, Zea mays
  Coding DNA Sequence Number=SeqID_24745
METAPGEGRARLHGTNGLLAAPWGLVGGLSHGDVVVAHWRCSPELCAAVARRAGREPRWLRATGREPPRPMPSAAQAGRWGWPPRWASRGLATPSSRAAAPGSHTRGRRAGYWGSSPGFVQGVGGAGAGRIIGQCSGALWLLGEDGRATTASQLGKGGQNTAEAARPTETQGASAWGKGTHMRAGARAAAAARVQGVCEGHAAMPGERDERRTHGEGEEEGSRAHLVTVETRQPYMIWIWGTQEVMQRQGGFI

SEQ ID NO: 66525 - protein, 103 aa, Zea mays
  Coding DNA Sequence Number=SeqID_24746
MEGLSPWFTATAGLATGNGGAAMDPEPRRRIPSAPSCRTPIRLPQEPPPSASEAPEHKPEPRWRCRRELRVAALNPVVGGGLSRWWLVCAERGESRRATNFIV

SEQ ID NO: 66526 - protein, 109 aa, Zea mays
  Coding DNA Sequence Number=SeqID_24747
MEGLSPWFTTTAGLATGNGGAAMDPEPRRRIPSAPSCRTPIRLPQEPPPSASEAPKHKPEPRWRCRRELRVAALNPVVGGGLSRWWLILNFEFNFVMNLSSVLSVPLKY

SEQ ID NO: 66527 - protein, 363 aa, Zea mays
  Coding DNA Sequence Number=SeqID_24748
  Homolog annotation: Hit_ID=Q8S7Q9; Match level="QueryCoverage=42%, HitCoverage=28%, E-value=2e-18, Identity=40%"; Hit description =Putative F-box domain containing protein
  Pfam annotation: Domain name=DUF828; Domain location=34-254; Score =29.1; E_value=1.3e-10; Accession=PF05703.2; Description=Plant protein of unknown function (DUF828)
  Pfam annotation: Domain name=PH_2; Domain location=274-359; Score =53.7; E_value=5.9e-13; Accession=PF08458.1; Description=Plant pleckstrin homology-like region
  Pfam module annotation: Pfam domain module=DUF828::PH_2; Domain location=34-254::274-359
AESAPVDAQKADNTRCKEKSRHSKRCHCHLEEMPVIPEQAMEFLSRTWSPSSTDLFQILSPSDPEQDEARGDGGDDDDKEKHLGTRLVAGGRPNCGQRRHKLVQPAWLRVGNMKAMLRGFLLDSVPVTGSRRRRRRDELRLHSAQAHAAVSVAQLAAAVAGIVSACDLRPAASAGAGGDRRLGTVLASAAALVATVCAEAAETTGANRGRVTSAVRTGLESRTSADLLTLTATAATCLRGAAALKQRTADLRGISTSSSDAMAMSVSAGIHKGTTLAVCLPCGRVRVRTVSVFPRRGDGGAAVLRLGKKRLRGAFATFNDLSVVTSEGSTVQLLFEHQTHCKVWKAAIEGMLAEQKLRRGTTN

SEQ ID NO: 66528 - protein, 59 aa, Zea mays
  Coding DNA Sequence Number=SeqID_24749
MAGTDHVRDDLRARRGQGHSRGRDRRWRAFMQFVSGTEEHSGNPKFLEFREGKLYSRLR

SEQ ID NO: 66529 - protein, 47 aa, Zea mays
  Coding DNA Sequence Number=SeqID_24750
  Gene Ontology: Cellular component=coated vesicle membrane; Biological process=intracellular protein transport
  Homolog annotation: Hit_ID=Q1SEA1; Match level="QueryCoverage=97%, HitCoverage=32%, E-value=2e-15, Identity=78%"; Hit description =Longin-like
MDRHFGNVCELDIMFHLEKVHFMLEEMVMNGCIVETNNLNSMIKVKV

SEQ ID NO: 66530 - protein, 74 aa, Zea mays
  Coding DNA Sequence Number=SeqID_24751
MAPKRATSKAAASIDDTAKAALLAEKKGKALVDNDPRRPSKMTLSTSRDSAGITPPSTALCALAVPRAHRKHHH

SEQ ID NO: 66531 - protein, 143 aa, Zea mays
  Coding DNA Sequence Number=SeqID_24752
METKVDTRGSEDPWARFCASDEIASAAAATGNTRPPLQNGATDKESELKSLCGYCEKTEAPTGAGVERAHTLFVEAYRELGTQTAPFDKSGAEMMNGEEVDDLAGLESSMNQMGGAKEVGVEGHSSPQAGYDEDPAAASAPAG

SEQ ID NO: 66532 - protein, 167 aa, Zea mays
  Coding DNA Sequence Number=SeqID_24753
  Gene Ontology: Mol. function=protein-tyrosine kinase activity; Cellular component=integral to membrane; Biological process=protein amino acid phosphorylation
  Homolog annotation: Hit_ID=Q9LDG0; Match level="QueryCoverage=59%, HitCoverage=15%, E-value=8e-40, Identity=83%"; Hit description =Putative receptor-like kinase
MARVSCVKRLRRRGMVDPWPQDRIAMVQIKLHISANRREGRDDETTGGSTVVGKGGEKKGRESLESKAVIGKDGDDNRMVFFEAPSLAFDLEDLLRASVKVLGKGAFGTAYRAVLEDTTTVVIKRLKEVNVGRHDFEQQMELLRRIRYDNVVELRAYYYSKDEKLLV

SEQ ID NO: 66533 - protein, 50 aa, Zea mays
  Coding DNA Sequence Number=SeqID_24754
MEKDRQDAQRKKHRAPVRLVDPRQEVKVARPSAKSIASGTGAESGVTPGF

SEQ ID NO: 66534 - protein, 693 aa, Zea mays
  Coding DNA Sequence Number=SeqID_24755
  Gene Ontology: Mol. function=RNA binding; Cellular component=voltage -gated potassium channel complex; Biological process=regulation of translation
  Homolog annotation: Hit_ID=Q9M6S0; Match level="QueryCoverage=93%, HitCoverage=62%, E-value=1e-154, Identity=44%"; Hit description =Pumilio domain-containing protein PPD1
  Pfam annotation: Domain name=PUF; Domain location=312-346; Score =29.5; E_value=1.2e-05; Accession=PF00806.9; Description=Pumilio -family RNA binding repeat
  Pfam annotation: Domain name=PUF; Domain location=348-382; Score =43.4; E_value=7.7e-10; Accession=PF00806.9; Description=Pumilio -family RNA binding repeat
  Pfam annotation: Domain name=PUF; Domain location=384-418; Score =15.4; E_value=0.063; Accession=PF00806.9; Description=Pumilio-family RNA binding repeat
  Pfam annotation: Domain name=PUF; Domain location=439-473; Score =32.5; E_value=1.5e-06; Accession=PF00806.9; Description=Pumilio -family RNA binding repeat
  Pfam annotation: Domain name=PUF; Domain location=475-509; Score =30.1; E_value=7.8e-06; Accession=PF00806.9; Description=Pumilio -family RNA binding repeat
  Pfam annotation: Domain name=PUF; Domain location=512-546; Score =31.4; E_value=3.2e-06; Accession=PF00806.9; Description=Pumilio -family RNA binding repeat
  Pfam annotation: Domain name=PUF; Domain location=548-582; Score =32.8; E_value=1.2e-06; Accession=PF00806.9; Description=Pumilio -family RNA binding repeat
  Pfam annotation: Domain name=PUF; Domain location=590-624; Score =40.8; E_value=4.8e-09; Accession=PF00806.9; Description=Pumilio -family RNA binding repeat
  Pfam module annotation: Pfam domain module=PUF::PUF::PUF::PUF::PUF::PU F::PUF::PUF; Domain location=312-346::348-382::384-418::439-473::475 -509::512-546::548-582::590-624
MAPFSQPKVILLKESIFPMYLSIDNLSHAQLKLPAGDMHQFLPQPSMTTPFYTPNSFGNPYYPNLHPGNAFPTSIGTGGYAVSGSILPPFVAGFAPQGPLATPLDSPMTPSFSGRPSGFSPAGNLTGGTEFMQSYKVYGQPGAGMQPSIPDSNFIHFFQHPSLFQYTGGNQYNTMGPRFTVVNPTESFDPQKMIHQAAYPSDQRLPLPRTGFPNSPTSRRGGTVPNYQGISSYVGGPMTYPTSPVFQGQTLPGVLPPDRRNDPVGFQSPSRNITDSPGIQRQRDRQKFDESKTCSFLEELKSNRARRVELSDITGRIIEYSADQHGSRFIQQKLENCTAEEKAYVFAEVLPHASSLMTDVFGNYVIQKFFEHGTREQRRDLATKLVGHVLPLSLQMYGCRVIQKVECFRSLEHFKLFTPNEKQALEVMELDQKIDLVHELDGHVMRCVRDQNGNHVIQKCIECVPTEHIGFVVSAFQGQVASLSMHPYGCRVIQRVLEHCGGTSQSQCIVDEILQSACVLAQDQYGNYVTQHVLERGNAHERSQIIIKLAGQVVTMSQNKFASNVIEKCFQHGDMAERDLLIRQIVEQTEGNDNLLAMMKDQYANYVVQKILETCNENQRELLVSRVKGHMQALRKYTYGKHIVSRVEQLCGDGQGCEGVLFFCSVHQWRKQNRSSPPLVLPNRLTKLSSKIV

SEQ ID NO: 66535 - protein, 87 aa, Zea mays
  Coding DNA Sequence Number=SeqID_24756
MAIWPRLFLSEDWASGEPKFLIIALSAFRDRGVPKPTSECRRVPQPRWVDARPSAKGGSEVAGDRRERGGNPAAFVFVPRLGRVQLQ

SEQ ID NO: 66536 - protein, 325 aa, Zea mays
  Coding DNA Sequence Number=SeqID_24757
  Homolog annotation: Hit_ID=Q6H4Z9; Match level="QueryCoverage=39%, HitCoverage=20%, E-value=2e-12, Identity=36%"; Hit description =Leucine zipper protein-like
  Pfam annotation: Domain name=DUF630; Domain location=1-60; Score =105.0; E_value=2.2e-28; Accession=PF04783.3; Description=Protein of unknown function (DUF630)
MGCAASRLEDEEAIKMCRDRRDFIKQALEQRNRFASSHIAYIESLKRVSMALQRFVAGDDHHELIFDTFISPVKQQKPETLSLPYGSYEKRTIHVSRYLRSGPNPSVSVEEHPRPVETVRVESHYPMDNHSGMDRFLQSHSSPVVSSSYYPPPYTRPSYPSPSSQEPVMNTSTYYMPYDRPRYAPPSPQEAMRTSYYASYDRPSYRPPSSQEPPRNSYHVPYDRPSFPPPSPQEQESSPWDSFWNPFSSLDSFGYPRPRSSYDNVTNDDELARLQRVREEEGIPELEEEDDECQEHVQMHRKEEQEDHDNADDDDEDDEEDDDDE

SEQ ID NO: 66537 - protein, 72 aa, Zea mays
  Coding DNA Sequence Number=SeqID_24758
MQRRSHTAQQVGPRVLEATTDRYGRTHPFNRPSPIVFSTESPKEKRVKAFVAERWRKSNEAKAHRVKNCCPK

SEQ ID NO: 66538 - protein, 52 aa, Zea mays
  Coding DNA Sequence Number=SeqID_24759
MEEGKGKGKVKGRESAFCATAWPAARRYGLWRKRQANALYVAGQADCLPIHV

SEQ ID NO: 66539 - protein, 96 aa, Zea mays
  Coding DNA Sequence Number=SeqID_24760
  Subcellular localization annotation: CTP_CleavageSite=60; ConfidenceScore=5.06e-01
MALAPAPCGPHGSQALDPWPPAFTGRLPPCSLKQQQWWLSPLPPLRLKHAQPSAAQLLCSSSPPQSMSCLVHRVLDKNPKPVDSTCKSPIRPGCSL

SEQ ID NO: 66540 - protein, 143 aa, Zea mays
  Coding DNA Sequence Number=SeqID_24761
MAMGAGRSLASSTLVGKKCLCLGMEERGISMCHGRAPSGEEKGAPAMGTTPAHAAGIQGKTGNRPARELAGAPWEELGADAPTGVDCRGGTTRDVSWPWRAPAQAWTRGGSRALEAGREPEGAGAPRGRGGRMGAPWGRPCLP

SEQ ID NO: 66541 - protein, 180 aa, Zea mays
  Coding DNA Sequence Number=SeqID_24762
MVAPLNAIDSIPGVRSRRSERMWRTRRYLWFGRRWSESCWPRAGEDEVVGGEGLGLYMAAEFDWIVRGASQGGVALSLRAQEVSPDSGEAGLAAGLDGDGPNHLSGPALALTSAQNLFTTLQATDFVWWSWDFAYWNQRYVTLKWGSLEDMVAGVTWPSILPPGWTVEWDPTSAEEEHEE

SEQ ID NO: 66542 - protein, 105 aa, Zea mays
  Coding DNA Sequence Number=SeqID_24763
MEIVTGDKVVGSGRTLSRESSDKYKEESSSSIKSHRKGDKKKKKMKKVVYYKTDSSSPSTSGAESTTSKRHEREKYRTHMARKRMRSVGTISGRQGLRLGRDRPN

SEQ ID NO: 66543 - protein, 53 aa, Zea mays
  Coding DNA Sequence Number=SeqID_24764
MSISSEARSRLWRRSYYHQEPTQNDQDAAEKLIDDEEESGVAGDQFKLDDDLI

SEQ ID NO: 66544 - protein, 435 aa, Zea mays
  Coding DNA Sequence Number=SeqID_24765
  Gene Ontology: Mol. function=aminoacyl-tRNA ligase activity; Cellular component=cytosol; Biological process=tRNA aminoacylation for protein translation
  Homolog annotation: Hit_ID=O82108; Match level="QueryCoverage=99%, HitCoverage=100%, E-value=0.0, Identity=86%"; Hit description=Seryl -tRNA synthetase
  Pfam annotation: Domain name=Seryl_tRNA_N; Domain location=1-114; Score=159.5; E_value=8.9e-45; Accession=PF02403.12; Description =Seryl-tRNA synthetase N-terminal domain
  Pfam annotation: Domain name=tRNA-synt_2b; Domain location=178-329; Score=161.1; E_value=2.9e-45; Accession=PF00587.15; Description=tRNA synthetase class II core domain (G, H, P, S and T)
  Pfam module annotation: Pfam domain module=Seryl_tRNA_N::tRNA-synt _2b; Domain location=1-114::178-329
MLDINLFRTDKGGNPELIRESQRSRFASVELVDEVIALDKAWRERQFELDKIRQELNATSKKIGKLKASKQEEEAKKLMESTDEIKKRLAAKEVEVQEAKSTLDAKLTTIGNIVHESVPVSEDEANNKIVRTFGEKRVEENLKNHVDLCRMLDIVALEKGADVAGGRGFYLKDEGVLLNLALINFGLAFLRKRGFKPMQTPFFMRKETMAKCAQLAQFDEELYKVIEYTLLNFPIKYAGYSTCFRKEAGSHGRDTAGIFRVHQFEKIEQFCITSPNDNDSWEMHEEMLKNSEDYYKEIGLPYQVVSIVSGALNDAAAKKYDLEAWFPASKTFRELVSCSNCTDFQSRRLGIGYGQKKNDEQSKQFVHMLNSTLTATERTLCCILENFQKEDGVEVPKALQPYMGGIEFLPFKQPLDVKQASDSKSNKSKSKGNAA

SEQ ID NO: 66545 - protein, 90 aa, Zea mays
  Coding DNA Sequence Number=SeqID_24766
MGRRSLRAAAGQRARRWWQWQAEAERESQRERHREHDGGEAAAGACGRRDGVERWRFDTIPSVLSGRFPCTRGDLEADVAGFWFHAFCGR

SEQ ID NO: 66546 - protein, 545 aa, Zea mays
  Coding DNA Sequence Number=SeqID_24767
  Gene Ontology: Mol. function=nucleic acid binding; Cellular component= chromatin; Biological process=DNA integration
  Homolog annotation: Hit_ID=Q8H6I0; Match level="QueryCoverage=99%, HitCoverage=32%, E-value=0.0, Identity=89%"; Hit description =Putative gag-pol polyprotein
  Pfam annotation: Domain name=rve; Domain location=264-427; Score =178.8; E_value=1.3e-50; Accession=PF00665.16; Description=Integrase core domain
MALASNREAMSNLTPLLRNCLILIRVRLPCLRITRVTFCTPAGYPESKNRRIHSRKSHSGPNHAFMYKGETSSSRQPTCAKLPKRKTPSASNDHDISFKTFDASYVLINKSGKVYASGGSSWIIDSGCTNHMTGEKKMFSSYEKNQDPQRAITFGDGNQGLVKGVTVFRRSDDSIAFKGVLEGQLYLVDFDRAELDTCLIAKTNMGWLWHRRLAHVGMKNLHKLLKGEHILGLTNVHFEKDRICSACQAGKQVGVHHPHKNIMTTDRPLELLHMDIFGPIAYISIGGSKYCLVIVDDYSRFTWVFFLQEKSHTQETLKGFFRRAQNEFGLRVKKIRSDNGTEFKNSQIEGFLEEEGIKHEFSSPYTPQQNSVVERKDRTLLDMARTMLDEYKTSDWFRAEAVNTACYAINRLYLHRILKKTSYELLTGKKPNISYFRVFGSKCFILVKRGRKSKFAPKTVEGFLLGYDSNTRAYRVFNKSSGQVEVSCDVVFDETNDSQVEQVDLDEIGDEEASCIALRNMSIGDVCPKESEEPPNAQDQPSSST

SEQ ID NO: 66547 - protein, 285 aa, Zea mays
  Coding DNA Sequence Number=SeqID_24768
  Gene Ontology: Mol. function=serine carboxypeptidase activity; Cellular component=cellulose and pectin-containing cell wall; Biological process=proteolysis
  Homolog annotation: Hit_ID=Q2R3G8; Match level="QueryCoverage=99%, HitCoverage=66%, E-value=1e-136, Identity=76%"; Hit description =Serine carboxypeptidase family protein, expressed
  Pfam annotation: Domain name=Peptidase_S10; Domain location=1-277; Score=141.7; E_value=2e-39; Accession=PF00450.12; Description=Serine carboxypeptidase
MDNMVFLQRWLQKFPQYRGRDLYIAGESYAGHYIPQLAEAMVEFNNKEERIFNLKGVALGNPVLEFATDFNSRAEYFWSHGLISDATFRAFTSACNYSRYVAEYYGGALSPLCARVMNRVTRETSRFVDKYDVTLDVFLSSVLSQSKTLSPHEQVGQRVDVCVEDETVRYLNRRDVQAALHARLVGVDKWAVCSSGDQDSVIPLTGSRTLVQSLARGMGLKTTTPYRVWFEGQQVGGWTQVYGGGALSFATVRGASHEAPFSQPGRSLVLFRAFLQGQPLPETFS

SEQ ID NO: 66548 - protein, 141 aa, Zea mays
  Coding DNA Sequence Number=SeqID_24769
MGKNNKRKREPTPPSEEFGDSEYSEEEFSSESEGCPAPIPLRESSDDSDDSQGLAVEVWTYIRAVERSGLEGSDESEFSSDEEDSDGDEDEDDDDDDGDDDDGGDGDGDGGNGGGGSGGKGSTRGGSSTGSTKGGGGKASG

SEQ ID NO: 66549 - protein, 89 aa, Zea mays
  Coding DNA Sequence Number=SeqID_24770
  Subcellular localization annotation: CTP_CleavageSite=50; ConfidenceScore=5.49e-01
MTTSLSPGQGTSPSLSNLHSDASLEGMNPFFSRQRRRLSRIRETGNDTIRAVGKVDGHKEARRHDEKAQATRGLLGEKGSKGSSARIWG

SEQ ID NO: 66550 - protein, 737 aa, Zea mays
  Coding DNA Sequence Number=SeqID_24771
  Gene Ontology: Mol. function=nuclease activity; Cellular component =proton-transporting two-sector ATPase complex; Biological process =response to DNA damage stimulus
  Homolog annotation: Hit_ID=A0D0E9; Match level="QueryCoverage=50%, HitCoverage=38%, E-value=2e-11, Identity=17%"; Hit description =Chromosome undetermined scaffold_33, whole genome shotgun sequence
  Pfam annotation: Domain name=Tektin; Domain location=321-692; Score= -199.0; E_value=0.055; Accession=PF03148.5; Description=Tektin family
  Pfam annotation: Domain name=UVR; Domain location=271-306; Score =20.9; E_value=0.0021; Accession=PF02151.9; Description=UvrBuvrC motif
  Pfam module annotation: Pfam domain module=Tektin::UVR; Domain location=321-692::271-306
MASQDDGWGGGEDGSSLFEGMVLFAPEPAAAEDSVPTPAPVPELTSAARPDADAASSAPPPLDEDLFSDLTLLAPQEPLSLEQPPPPPQGEDRSHAALAPAPPAAAAELSRQPSSSSLRKKKRAVRIGYGRLPQPAPPSPPASAAAAAISASSISFLDASPHAAVTRILDQLPDRQVDVYANGYEAHAEAVAVDTSSPRVEAVATEDDGGGKEDEDAAVVALGVEERLALLRSQISSKLDSIQQTAAAVAAKRRLLAGRRRKVAEEAASVASGHKDLERELEEACEAEDFERAERISDSLATLEKEKDRLSTALRGAELDYDSVDSELQEVLESRIAAEEEAAALMEQFAKDATEHANSASEHAQELSSKEIEEWQTSLELLETKKLEMEVETRLVLEARSGLEGSIEHLVEEDKLEKDMLSKKGEILTKELAELLELVRLKEAEIAENNARIHEVQERISAVVSRFHGSQSDIDLKLSSLKEDQSKVDLETEALLLKKNEIDKFITLTDQKDSELRDIIGACSSEAKACRQSVEIRRKLASSILKSREDRIGLLKMEEEILQVIQMQRQKITDARSTLQEVSSRRTSIQQETEALKQKLSFIDKRGPELEAEKKVAAASRNFKEAGRIAAEAKALNSEKDELYGKLEKAATDLETIEKDIVATTNKIQECEGLIELKGRESALTSYRRLRLDCAAARAELTAAAETDDNEEAEILRKEAEAAESKAMELKTCYDLQ

SEQ ID NO: 66551 - protein, 94 aa, Zea mays
  Coding DNA Sequence Number=SeqID_24772
  Homolog annotation: Hit_ID=Q8RUA3; Match level="QueryCoverage=71%, HitCoverage=6%, E-value=4e-20, Identity=67%"; Hit description =Putative disease resistance protein
MAETYGDLSGSVQARGASETNEATILLEVGDNMAQLRDRLEWLQAFVRDADRKRRAGTDQLTRVWVRQTRDVAFEAEDALDDFFYEANRTRGFT

SEQ ID NO: 66552 - protein, 1379 aa, Zea mays
  Coding DNA Sequence Number=SeqID_24773
  Gene Ontology: Mol. function=nucleotide binding
  Homolog annotation: Hit_ID=Q2QQZ4; Match level="QueryCoverage=98%, HitCoverage=99%, E-value=0.0, Identity=48%"; Hit description =Expressed protein
MASSSSAARAHVERIRRERFYIGREERNPLAEDIHQAVSYLSEELYSKDVHFLMELIQNAEDNEYPLDVSPALEFVITEKDITGTGADSTLVVFNNERGFSAANIESICRIGRSTKKGNRHLGYIGEKVSSQPHIFSNGYQIKFSEKPSAVCDIGYIVPEWVDGKPNIDDIRTVYGPSRSLPTTVIILPLKTDKILAVKKELSSTHPEILLFLSKIRQLSVKEMNNDPKASKISQISISSEVDYWSSKDIDAESYTLHLAMQENSKGETEECTYYMWRQKFAVQPDCRIQKRMEVDQWVVTLAFPHGQRLSRGAKSPGVYAFLPTEMVTNLPFIIQADFLLASSRESILFDSQWNRGILECVPSAFINAFGALLKSSRDAPHFALPPIFRFLPIQESSISLFDSIRLSIKTKVQAEDIMPCEPCTAQKVFCKPAEVSRLDSAFCRILNLAQKQGIGLQNLSSYGTFVLSSYLDNLEYDDVLEFLGVGYANREWYSKCIDGLNLVKEASEEVYLQILYFVAGNWKVFSGTSMMLISLIKYVDASGQLSCSSVLAAQRSLRFLNENNKTPHVIEQMKNGCWVKTLIGRRSPLNAILFNSEWENASAISILPFIDTAFYGVDITDFRSELRLFGVVVDFKRNYQLVVDNFRFSIDTITPGATILMLNCIRYVEECHDFVERLKDLRWVKTNVGFRAPHETFLIDDDWKCLLEVIDKTPLLDLEFYGDEIKLYKEELCKTGIIAGFKEASKKIVCHVKKLVNTSITKELAFALLKCYSDLTTRHGRLPVALANFMQHERWLHTTFGFRSPKEAILFSSEWESIALVSCLPFVDDSDAQYGLGKEIYCYSNELKALGAKTRLEQGAAFVISGLRIPTDPSAVTPQAVISLLKCIRIWRQNGSDLPKSFMSAINLKWVKTTAGYRHPNGCVLFGSVCSSHVYRDDGPFVDEVFYGQELVSYESELQKIGVNVDPRAGCACALMAQHLKGLSNADAISRIYSYLEVYRWKPRFTSDDWIWIPHAANQGQWVNPASCVLYDTHGLFGSQLYVLVKWYSSKLLRYFNTAFGVKHRPTVSDYCKLWSMWQGSNSTLTQKECVAFWEFFGKNWSTDMGKFIAGCVDKVPVSSGDQILLLEKQDVFIPDDLLLEDLFKKQAQKPLFVWYPSTSLPCLSPARLNDIYSSIGVQKISKSVVSNQYDHLEIESVTLVHKGTVIKLGLLKIVLAFLTDPILDISVEKRYEMVTSLTNVAVYETRGPLNVSYQVGLSSGRSLHVTCARFFRWERESSRLFVTEADEPGSMTYAMKMEYASCFAEEISKGLLSENKEQIPALAELVRTGFLLEFDVPAVQILLNLKNLRLFEQDEQFLLKLSQHCDDGLGGPSPSYV

SEQ ID NO: 66553 - protein, 665 aa, Zea mays
  Coding DNA Sequence Number=SeqID_24774
  Gene Ontology: Mol. function=ATP binding; Biological process=defense response
  Homolog annotation: Hit_ID=Q8RUA3; Match level="QueryCoverage=64%, HitCoverage=54%, E-value=2e-21, Identity=37%"; Hit description =Putative disease resistance protein
  Pfam annotation: Domain name=NB-ARC; Domain location=15-364; Score= -46.8; E_value=2.7e-07; Accession=PF00931.13; Description=NB-ARC domain
MGRLDSLVRVLLQHFLPHCLHATPLRWDDAVGFEEDVEALKKMLLHREDGNWQNLMFISILGESGVGKYTLVDKIFFDLAEDDTTKKREIFVGERNNFAVKVWYMMPPGSSTEHLLRIIYVRVEKQLLKWRAKGDAAIATEDIPDRIRDLLANKRYILVISGVSSKAMLNRLRACLPDDACNGSRVVLVLDIESEVVAQRANTMNAGGISGIHLLRRLDQERSGRLFCARAFAKQVRLSPDYPDEEKKLTKMYSRAVHAITGGHPLAIVLLAGLLRFKERPGQWEAVLQVQQLMVSSSSSGPAAVEDEEAAAGSSDQMFSKLRSFLCWASDDYSATAGGSINTDKNLDDLKFLLRSKFLRVIEIKGLRIKELPAEICDMFHLRYLGVHSPGLKKLPPAIAKLINLQTLDIRGTAVKKIDPSFWNIKTLRHVLAQDLELPASSSIVQQLDGLQTLQGVRPAAEEEGRPAAEEEGDGLQTLQDVRPAAEEEGRPAAEEEGDGLQTLQGVRPAAEEGGDGLQTLQGVRPAAEKGWNQENCPLHKMTQLRTLCLHGIKGDTHGAELGAALLKMHLLRHLELYSSAPHDQFPPCIFKDRGLQNLESVKLLGRDAYYFPDDAAPNLRVLRPNLAWVDLKIVVPQPIEDEFKKLGVRGQWLKINTSYNSRKQ

SEQ ID NO: 66554 - protein, 1263 aa, Zea mays
  Coding DNA Sequence Number=SeqID_24775
  Gene Ontology: Mol. function=actin binding; Cellular component =cytoskeleton
  Homolog annotation: Hit_ID=Q5QNA6; Match level="QueryCoverage=99%, HitCoverage=87%, E-value=0.0, Identity=51%"; Hit description=SCAR -like protein 2
MPRSATALPSDKFDNAGAGACVKRYSDPSYFKKAWDTMRADKNANVQREKRSQKIKRKGSRLREPYHGQAMPRHRGTEFQRSLTAGQLVNRCCSSHTLRYNNFVSVIIFYGCSLLIFEWHIQNSIFNSVFSSRQFASPSNDGQGISEHKSTPDARSNPDNMSRSSSLSSKTQLSSVEQAIDTKPSAVSHENGHGKSLDTKLHKPGGLPSPVLLNSTTVDDHSDHLKQGSPPDGMVARSPYVKWDEKTAIIMSTSSIYCDDVVMDEVEDAEPTCISSVQKETDHKVMDTLHQQDALLKKTKSLLVPSVLNHHDDIPGEADNYMDALNTLESETETESEFQTKNRVPAPSFKAEAPQVGAIDNIVPQCLDSSAADFIDTCQESDIICTSERAIDFPSLSNADSLEVSQLELSDYTSVSPYKESSVITNIHESGAEGARGDPCEIIEPLQVHSAILANDGSPVCNEIPKSKPDDDLGYFQEIPQPGFSTCMVIPSNKESAVANKNLEGDAKSDDDLIDGTADNVVSGPKIANMVVDEVGFKMAPANRSSPGDPSDDSCVIPESRPQDYAVKSYEGVGDCGVTEVSKLCSEPLNKPSDNICATQDVPTNTSTMSAGASEVSSSWSEPVTELIDDRCATQGVPANASTTSTVVPSVKLWTNAGLFGLEPSKPPVFGNGPREDTPPGFKEAQPVHSTEFTEVHCSKPTESAAVDVPNGNTSITSSFVEKLVGIRPGSANLNSSGANQSAARIPDPIHSHTDGHSDFSSSFEHNNMTGKHTSISELLEFEGSADTGTKIYSTDMRNNAVSASSFSSIAQRFLANTLQRRTSKYTDLPMSSERANADTSAKSESTLNPVVEPSEAVFAEETKFENKTENGMDGLSKTSIFSSRHYSEKSSPPLEYMKISFHPMSAFEMSKLNLDFCDGNIHEISDDMMLPTFQLLSESSIPQPGSGSESEDDTFGRSYSYSSYDDLSPRLYSNSEAWDQDDGTGLEEHELYDDSNQIGSSTAPLSSYMGFEQMNLSDMKSDISLANIGDQNVIGTLQSCTVEELPNFDTLMSRSDDQNGETPIPHNLGNMTPDEDQLPPPPPLPPMQWRMTRQTTSLEEETCITTKDMLRKTSSLPHIHTSAQEEHCPPTAPLDLQGHAGEVGVQKTGGVREITNPPSIIDIKSSLLQQIRDKSEQLKLNGHERSKKAVGGDIKSLDEREELLQQIRSKTFNLRRTNASKADGSSQSTASSNVAAILEKANAIRQAVASDEGGDDDTWSDI

SEQ ID NO: 66555 - protein, 192 aa, Zea mays
  Coding DNA Sequence Number=SeqID_24776
  Gene Ontology: Mol. function=peptide-N4-(N-acetyl-beta-glucosaminyl)as paragine amidase activity
  Homolog annotation: Hit_ID=P81898; Match level="QueryCoverage=50%, HitCoverage=16%, E-value=3e-17, Identity=50%"; Hit description =Peptide-N4-(N-acetyl-beta-glucosaminyl)asparagine amidase A (EC 3.5.1.52) (PNGase A) ...
  Homolog annotation: Hit description=(Glycopeptide N-glycosidase) (N -glycanase) [Contains: Peptide-N4-(N-acetyl-beta-glucosaminyl)asparagi ne amidase A light chain (PNGase A small chain) (PNGase A subunit B);
  Homolog annotation: Hit description=(N-acetyl-beta-glucosaminyl)aspara gine amidase A heavy chain (PNGase A large chain) (PNGase A subunit A)]
  Subcellular localization annotation: CTP_CleavageSite=24; ConfidenceScore=5.27e-01
MPTASSAHRSLLLCLCLALLSNPVAASPSPRGLRFSAKDIAAVEAALPRHGSRASSSSKTTFFEVDRPLRPPRGSSGPCSTLLLSHSFAFTLTKPPVTAAYSPPPCLSGSDAPPVSLAVLEWRAECRGAQYDRTFGVWLGGAELLRGSTAEPRPGGGGLNDTDVQSARVSVPRNAYRAVLEVYVSSHDADDF

SEQ ID NO: 66556 - protein, 41 aa, Zea mays
  Coding DNA Sequence Number=SeqID_24777
MAGVMHPGGSAREWEMIRQAAAMHRDDDDEDLIPDYPTHTS

SEQ ID NO: 66557 - protein, 63 aa, Zea mays
  Coding DNA Sequence Number=SeqID_24778
MEDCRAAVTQCGIGRRPPGRWIGLGRLELDRDGELLLYSKDVTFDPVPLCMWWNWPNYSNLSA

SEQ ID NO: 66558 - protein, 120 aa, Zea mays
  Coding DNA Sequence Number=SeqID_24779
MELSKKTSKWLYQSVRKGYSVGMDEFYGGVKRSWGRVNQGSGQAHLSCPLAHMRDRREQPAATRHLRFADGSILGKALRESPIDRGSVFKNHRAWGVLSLSETLVEAGLVPSSASHHGWG

SEQ ID NO: 66559 - protein, 215 aa, Zea mays
  Coding DNA Sequence Number=SeqID_24780
  Subcellular localization annotation: CTP_CleavageSite=93; ConfidenceScore=5.47e-01
NARHAVERRCPPARAARPCAHRQPARRCAARPPSRRAARHSESPSPPTTTPPSSSSRHVKSLTEGQRRLRHSDCSTTRQSESNRQSGLDKGATANSAPPDPRARTRAKTRKTANSAPPDPRARTRAKTRKTANSAPPDPRARARAKTRKTANSAPPDPRARTRAKTRKTANSAPPDPRARTRAKTRKTANSAPPDPRARTRAKTRKTTKLRLARP

SEQ ID NO: 66560 - protein, 76 aa, Zea mays
  Coding DNA Sequence Number=SeqID_24781
MAETQGRLGLTVVELRLHRENSGECGLGEPEGLGANRGVSGATDDEAELTEAADTAGAQRQPQNGHETTASGGRTS

SEQ ID NO: 66561 - protein, 1566 aa, Zea mays
  Coding DNA Sequence Number=SeqID_24782
  Gene Ontology: Mol. function=helicase activity; Biological process =viral genome replication
  Homolog annotation: Hit_ID=Q5VR06; Match level="QueryCoverage=81%, HitCoverage=92%, E-value=0.0, Identity=50%"; Hit description =Helicase-like protein
  Pfam annotation: Domain name=DUF889; Domain location=1307-1564; Score= 357.5; E_value=2.2e-104; Accession=PF05970.5; Description=Eukaryotic protein of unknown function (DUF889)
MGLSLQSPDCYTFGDSRAFQSPERNEWMQKNTIHNRCQTLRLSYFSVSASRYQRLPLCLPPRALISLYPLAATRGFQTANKSAGSRLQKLSNHAAAPSLAVAVSVAAHPSWFWLPAPPLRPSSLAVFATEILFFGLEKGRASLSSTYLAREKTCFIKVWKPYLWFGKRKGFINFYISGQGENLLHQENPYLWFGKRKGFINFYISGQGKNLLHQVSKNATLARQNRKRALEQKRLLTRGPKHSINTPMTSVYFSSEYINALKDRSHLGTPDYECQHCHALFWHAERNSSNRYGIVQYYNCCKGGKLSIPSYTPRPEPLASLSKFHGDSISKRFMRSIRQYNCLFAFTSMGAQIDNTMNDGRGPPLFKICGQVHHRIGSLLPSDGSSPKYLQLYIYDTANEVQNRLKCLNSNNMTTEVLDPSIIEELIKMLDECNPFAKTFRMARDRMAEYGDENFIIRIIGAKEGDSVQYNLPTTDELALLVVRDFSLDTFKRDIIIETHSRELKRISSLHPAYMALQYPLLFPFGERGFQVGVLYNGVNLANKPKRCHMTMQEYYCYQFHYRRNQPNPFLCYGLLSSQAKVDVRPAIDESRLQYIVQNQTKLRMESIQGISDAVSRGCINGEEMGKRVILPASHVGGRQYMLQNYHDGLAICKLYGPPNFFVTFTCNPNWIEITKSLEPGQAPTDRSDVIVRVFNLKLNELLQDIRSGSIFGLFVAEIPDPEIDPLGYILVAEHMIHGPCGDYNKNAPCMKDGRCTKKFPKNFQEETTIDGNGFVLYRRRNTGRYVTKSGIRLDNKYVVPSNLLLLKKYMGHINVEWCNKTIFIKYLFKYVTKGPDRSKVFLQRVQNGEDTPYNDETETRDEVKEYLDSRYICDKDSCWRVFGYDIHRHYPSVERMPVHLPNENYITYSAGANMVDVLSQTYLRRTMLTEWFATNLQNSDARNLTYPDFPTKWRWDDKSRSWLPRKSREKRIGRLYYVHPLAGDRYYLRMLLLIVKGAFSYECLRTYNNIVYSSFKEACKARGLLDDDKEWLSAFDEAASWASPNQLRQLFVTLLLYCQVSNEYEFFQKVWRLLADDIEYNFRKALNCPNYQMPDNELKEHLLDKLTTLFNKSGGNIEDFNLPQRFSGAQTWTPNRLIEEEMPNNIDNLLDESEFLISQLNIQQRNVFDTIVQTIFSNKSGFYFVSGYGSTGKTFLWNAIVSHLRAREKIVLTVASSGVASLLLPGGCTAHSRFKIPCELHETITCNIKRGTMLAELIKSTSLIIWDEALMTHRFAFEALDKTFRDLLAPHFEQAKKTPFGGKVVVLGGDARQILPVIEGGTRSQIIDATVSNSYLWGSVTVISLTQNMRLLSSSTSIETKKEIAEFSKWLLDIGEGNVPATKRNAETESSWIQLPKDILLLPQTGNIECIVDSTYPDLQQRYTDIEYLKERAILSTTNETVDALNEFIVSSIPGNTHEYFSCDKIGKTPYSHESYDLLYPIEFLNSINGNNFPQHRLCLKKGIPIMLLRNMNQSEGLCNGTRLMITSLGNMIVEAEIMVGQHKGKNYYSMCYSLLKDSKTAIHP

SEQ ID NO: 66562 - protein, 82 aa, Zea mays
  Coding DNA Sequence Number=SeqID_24783
MRVEYFGYFYDDASTAPHDDRTVEPPGEATVPLARGAGTPMLGAGAAGLFPLATIGGGVWEAALPCASARGAPYTTIGHPGC

SEQ ID NO: 66563 - protein, 133 aa, Zea mays
  Coding DNA Sequence Number=SeqID_24784
MAAAPSLRSTDLALPVFHILALPLSHYGSINQMLKGILPSLLSSNLQAHGTGGVVSELLPGDSFKVGVGGEVEAAAPIAWLLESGQSLGLPEFASETSALFSLGVGVATRAGVPHPRVHVALARHAFHLDACC

SEQ ID NO: 66564 - protein, 135 aa, Zea mays
  Coding DNA Sequence Number=SeqID_24785
MDHVCRSKARHNKGVEIVVEMTTTSGVMSDGLGDPSLRLLLLQKPRVMAQTVTVVVVSVRGAPLAEAQGRAASQTPPPIVARGKSPAAPAPSIGVPAPRASGTVASPGGSTVLSSCGAVDAVQDERARKGSPTYV

SEQ ID NO: 66565 - protein, 217 aa, Zea mays
  Coding DNA Sequence Number=SeqID_24786
  Gene Ontology: Mol. function=RNA-directed DNA polymerase activity; Cellular component=mitochondrion; Biological process=RNA-dependent DNA replication
  Homolog annotation: Hit_ID=UPI00004C1731; Match level="QueryCoverage =88%, HitCoverage=13%, E-value=4e-98, Identity=90%"; Hit description =UPI00004C1731 related cluster
  Pfam annotation: Domain name=rve; Domain location=2-158; Score=84.9; E_value=2.5e-22; Accession=PF00665.16; Description=Integrase core domain
MQHLEPSWGTPSDKVSTGRPRWPTPLVTIDKFSKWIKVRPLTSIRSEQAVAFFTNIIHRFGVPNSIITDNGTQFTGKKFLDFCKDHHIRVDWAAVAHPMTNGQVERANGTILQGLKSRIYNDLNKFGKRWMKELPSVVRSLRTAPSRATGFSPFFLVYGAEAVLPTDLEYGSPRTKAYDDRSNQTSREDSLDQLEEARDVALLHSVRYQQSLRRYHS

SEQ ID NO: 66566 - protein, 70 aa, Zea mays
  Coding DNA Sequence Number=SeqID_24787
MGRARPWQEQGRGCASGCRRVGEGRCVEEVSQRWKKGVEHRGLWTPWLLEAPPPRELGHGSSSAERFFAP

SEQ ID NO: 66567 - protein, 73 aa, Zea mays
  Coding DNA Sequence Number=SeqID_24788
  Subcellular localization annotation: CTP_CleavageSite=48; ConfidenceScore=5.51e-01
MVCALSARPTPTSARPAHVARTLGKAAHTPSPRPYLTFVFPPPSHSPSCEAVSPSSLLHYSTVTAGLMPALWP

SEQ ID NO: 66568 - protein, 125 aa, Zea mays
  Coding DNA Sequence Number=SeqID_24789
PLNRPRPWIRWKKTIMPADAEDTTRAEVNNLATTMSKIDILISDVVLEIDVAEASPDKGKRIEKTSSEDKNFDHRHLGGQQLSEEDIAALWSLPYPAATSPDPSSLAASTKRFWDALVTVPELKS

SEQ ID NO: 66569 - protein, 1125 aa, Zea mays
  Coding DNA Sequence Number=SeqID_24790
  Homolog annotation: Hit_ID=Q5Z9U9; Match level="QueryCoverage=33%, HitCoverage=99%, E-value=1e-151, Identity=73%"; Hit description =Potential autophagy related protein-like
  Pfam annotation: Domain name=ATG_C; Domain location=1022-1120; Score =112.4; E_value=1.3e-30; Accession=PF09333.1; Description=ATG C terminal domain
MKILSVTGTSYNDSGITLIRRKFAVTGPEILNNAWSLPKLHDEKISKKQNSKWAGISPSSTHDLVETGSSTRQELLKSTEVLFHVQLSCVSVQISKKDCELLNKLLDHVIEGISNQQTSISGNSKDQSVLINDICIQTSVLFECSILEICTELNETVEVGPLLQSELKGSWNSLKLKVSKFSLFSCSNVGGISSASFLWVNHGEGELWGSVSAKNDKVSGESKDFLIVACKDSACRRGDGEGTNALSIGAAGCSVTHIRNPKLKENYTYVDVRSGTIVAPGGRMDWINVICLLFSSGSNGTEKSVDNNTVNSYQLNDPYSSSLFLEFSDVAVSYEPHFKNFTLSAAPTDPKFFSCLLAASSFKLHNKSASASAAADFDIQLRDLGILISQSSGSTNATCSYSVGYLHQAGYTKVAQNTFIEASLRLDSTFWKLEIFDSQFDIGTCHDTTYGLIGLGSQLQQLYGPDMQDALDHLQSRWNSVQQANRQNMAADESDTSESSLEILADSGNYQSDGLLDDIIENAFYTEDCMDNHFWERNCHHLFNNSEMDDGFELNAATSSHEFLRSIPEGNVTQISLERNAWPDQIDSYYMPEFHQSLSTLCDEEHKCTFGDNSHRTLESEDAGWYKNVPLTIVENHVLKQENKQVLQHEVASVCSLNPDEYSNLKGKIHIHDIDVKWRMYAGDEWLLLQKDSTSLTFTDGKDRSSSLEFTLRGLSIQVDMYPDGDVSISKLSIAAEDLTLCDQSIHAPWKLVLGCYNSKDYPRESWSSAFRLELESVRPEPQAPLEDYRLHLEILPLQLHLDQEQLNFLINFFKNDSCNNDPHSHCENETVDVKNTSNGSNTVVDEALLPFFQKFDVKPLVLHINYIPRQFDPIALGKGNYAELLNILPWKGIDLKLKHVSAMGVYGWSSIGDTVAAEWLEDISKNQVHKLLKGLAPIRSLAAVGSGTRKLVSLPIKSYKKDRKLLKGVQRGTVAFIRSVSIEAVGLGVHLAAGAHDILMKTEHALTTVPPPLASCEAKRTKHNIRANQPESAQQGMKQAYESLTVGFGRTASALIGNPIKVYNRGAGVGSVLATAICGAPAAAVAPVSASARALHYALLGLRNSLDPEHKKESMYKYQGPSQA

SEQ ID NO: 66570 - protein, 117 aa, Zea mays
  Coding DNA Sequence Number=SeqID_24791
MGLRMSTRIPTGIKSSLELGTGKNLPCGSSRGQGIPAPSWGRVWGIKPQWVIPRSHLYMSHEGEKMFYTHPMEPAQINAPKGMKAKFIVYLPRALHDIPSIYDQQPTYILEGIKCKL

SEQ ID NO: 66571 - protein, 149 aa, Zea mays
  Coding DNA Sequence Number=SeqID_24792
MQVRLGSTVVELRLHWENSERERGRECSAEGANEQGKWASGVRALKGQGRAEVAGDCASTAGAGRGREVSDGGWLIGGVRGAERGNERERAVNADRKVPRDNERKNARVRTVRRRQVWPTGQREREGGKENARARTQAVAGRVFNSNSN

SEQ ID NO: 66572 - protein, 114 aa, Zea mays
  Coding DNA Sequence Number=SeqID_24793
MGSKTLSTECTFTSLTRQNKKTLKDMLAFGNQGLEYNFPSWDSREIGFWESEVQFIGQKFSNLGRKRKRKRNWPKPAQLRQNAPVCQLCKEDPDLLKSSKESATLFVSVADVCK

SEQ ID NO: 66573 - protein, 241 aa, Zea mays
  Coding DNA Sequence Number=SeqID_24794
  Gene Ontology: Mol. function=metal ion binding
  Homolog annotation: Hit_ID=Q23V41; Match level="QueryCoverage=36%, HitCoverage=13%, E-value=8e-11, Identity=37%"; Hit description=FHA domain containing protein
MPAQLLAILQAFSSLQRSDEEIALLESYASVKSNMVLGQQKNQSRKRRFSRSSDDTDNSDLPCPQCHLALSKCFLKSLVHLSFFIQLNDKNIAGLGCDKAFCGAYWYSQGVSSSHCNLICNQDTLKSITERCIQQSGKTLQVVISEWISKFDNMEIDRSRLQLNNVDAITSRTYICNHCYSKFVDFLLYWFRVSLPQNLLPRDAAERESCWYGFMCRTQHHRPDHAKKLNHVCRPTRGNQP

SEQ ID NO: 66574 - protein, 224 aa, Zea mays
  Coding DNA Sequence Number=SeqID_24795
MDPSPQRRRIEHLRFRIVADDASPAFRLISHHATSSPPQGGATREQTTESSSATSTVGHAESAGTANEWDNQTREENQEAVQMKEPVENREGVGAAALPSLAHTRRGPWGPLGTSWFPTISMGPQIDIVAQTLLQEKKKWYLAPPDLIVAKTNNLLAQQLSSSTICCPQVSTIRTGIRSTSLLLRSQMGITSKALTYLAVREEINWPPGSFANRHSKPFVSIAP

SEQ ID NO: 66575 - protein, 101 aa, Zea mays
  Coding DNA Sequence Number=SeqID_24796
MDERISTCQTTGGHHRPPRTPSGSCGVFWLGGRIIAGEEGGRNQGSQVLDPFAGCAIESVGADAAIGRAGGVERPYRVLARPRRDSRKETLLRPVIWKWSV

SEQ ID NO: 66576 - protein, 593 aa, Zea mays
  Coding DNA Sequence Number=SeqID_24797
  Gene Ontology: Mol. function=transferase activity
  Homolog annotation: Hit_ID=Q6K8R6; Match level="QueryCoverage=58%, HitCoverage=98%, E-value=1e-140, Identity=67%"; Hit description=UbiA prenyltransferase-like protein
  Pfam annotation: Domain name=zf-TRAF; Domain location=446-502; Score =43.4; E_value=7.8e-10; Accession=PF02176.8; Description=TRAF-type zinc finger
MAWMVRVVEEDGGADQRVPERSETESHATRATRLTSLGHGGDDMATGSPDTGMGGQSAPNLLSWTTRFDARRGGEPQNSGGYGDDDDRPLSSPWKERSDRDTSVPASEKPPLWWHRSGAAGHRGLGQKSGLLASAAATRPQNCFGLASVRLPDWARQPNISILVEGSRPRHYAGPNGPSQAVQATGSSVVASRVSTALPPALRVITSRRRNQASESRRRPALSSGLESAVLQFDPRGSIQIQCPLEEDGCSLRCDLCDTEIVHSMAELLLRGLATASVDSTTGDIFKSASSVAAAVKTELENYMLVRTESLIREFVDGAQDHSDQLMKASTRPTEFLSDLIGDFVASKRNLLSHVSGFLSSESRLNRIKDFMQKMEMENVWTLDVRQATSETILESIDMKCIFHCPEKFVEQDKLVDHRSRCKFRVVGCENDGCSVSLSAIHSEEHDSICPFKALPCEQLCEQHVMRSEMDKHCATVCAMKLINCPFYHVGCETAFPQGNLENHCSKLLQTHMLYVLQASTRQNAAVNDMNQRLQLLEKAQSLNEISGALDVRSLTLIIKEQEAKIKDLESGIKAQEAKVKKLENELRSKNAR

SEQ ID NO: 66577 - protein, 482 aa, Zea mays
  Coding DNA Sequence Number=SeqID_24798
  Gene Ontology: Biological process=pollen maturation
  Homolog annotation: Hit_ID=Q5Z6I4; Match level="QueryCoverage=58%, HitCoverage=28%, E-value=1e-16, Identity=25%"; Hit description =Putative Osnop
  Pfam annotation: Domain name=C2; Domain location=97-177; Score=65.4; E_value=1.9e-16; Accession=PF00168.20; Description=C2 domain
  Pfam annotation: Domain name=GRAM; Domain location=243-309; Score =67.5; E_value=4.2e-17; Accession=PF02893.10; Description=GRAM domain
  Pfam module annotation: Pfam domain module=C2::GRAM; Domain location =97-177::243-309
MGPCLPWALGLLLPSLWEAKVAFSATALLIAALILFLLTTDQHAKSTATGGNRPASSARSSATAAYHRVAGRRRTRARGEAASDDITCAQGGGGYVVKLELLSAKYLIGANLDGSSDPFAVISCADQKRFSSMVPSQRNPLWGEDFNFLVEQLPVEVTITIYDWDTVCKCKVIGSVTIVVLTENESGASWYELDSKFGQICLRLRSTKAFPDSDSSFEECNGAESPRKMILNKQRQAMIEGIGPLQIIYKLPHDEIVHQSYSCALDRCFLLHGRMYISQWHLCFHSNVFSKQLNVIIPLQDIDEIKRSQHSLINPAITIFLNAGAGGHGTPRACSQNGRIRYTFASFWSRNRTFRALEAALQSYEATLEAEKQKFFPGTPEKFFSTILGDSSMFFQQYRDARKDTNLKLSRWCASEEYGGKIYETKHQAHDVPFGSYFEVVAKNNLQFNMSSVNMKKWCILQSRIKSGATDEVCNDTCDTVS

SEQ ID NO: 66578 - protein, 121 aa, Zea mays
  Coding DNA Sequence Number=SeqID_24799
MTIDQMSRNGTAEQLAATNETPSAGHRSECVRGRSYHSEQQMQASVALVSRIHVAKSGLNLGGSWKRLDSIKALYGSFIFSLSPPFTTSQPSETKMVSSGAYMRHYILKRQPLMQCLVILS

SEQ ID NO: 66579 - protein, 101 aa, Zea mays; identical to SEQ ID NO: 66575
  Coding DNA Sequence Number=SeqID_24800

SEQ ID NO: 66580 - protein, 387 aa, Zea mays
  Coding DNA Sequence Number=SeqID_24801
  Homolog annotation: Hit_ID=Q6K8R1; Match level="QueryCoverage=43%, HitCoverage=68%, E-value=4e-70, Identity=77%"; Hit description =Putative glycine-rich protein
MARPRRLKITGQSGQSVEQSDVIGDQWLVVPRWQSQLSDGSPNSPVPTREEKWPINDFVTIAQELSGDGGGGGAQARARALSDGVSGFPSRLSLVDSRPRIRSSAHRPVTLRACLFLSSRLRCIDNGARSRWRRRARPEGGGSQQPLLHQGGRAALGALMPQSEALPDLLALQRAEAAGSRWVVVLVCAVSKLVQVNVYKSGDQLVELVNVNVALFQPLMESLKKAVADAKKPRSIQDLLKEQVAKLREQASGGGRGNGNRRGGSGGSGGPDDESFKETLDEVVQVILATVAFILVYIHIIRGEELYRLARDYTRYLVTGKRTARLKRAMQRWRNFSESFMQKAGSEDDQYERPAVSKPAWWQQPQKFVHFVEDLCRGNWRPHAQES

SEQ ID NO: 66581 - protein, 64 aa, Zea mays
  Coding DNA Sequence Number=SeqID_24802
MATRILEKSLDHPLRWRKHVDRNKNEEADALAKAAAKGEALPFDVFYHVIGTPAVRNPEGLQIT

SEQ ID NO: 66582 - protein, 141 aa, Zea mays
  Coding DNA Sequence Number=SeqID_24803
  Subcellular localization annotation: CTP_CleavageSite=34; ConfidenceScore=5.09e-01
MATHCPTTTWVVWRWSCTSGGSCSRSGGNILHLRAAESSRTRTAHADALTRLGWGFMLLTEIFGAEDKHVISRPTTFALVHADGTTKFLGKALKFIKDYVHGWDLDFALWKCVVVHTSKHSYNIEENRDYNEWNCTITIDL

SEQ ID NO: 66583 - protein, 211 aa, Zea mays
  Coding DNA Sequence Number=SeqID_24804
  Homolog annotation: Hit_ID=Q10SU1; Match level="QueryCoverage=29%, HitCoverage=11%, E-value=3e-25, Identity=88%"; Hit description=FolC bifunctional protein, expressed
MPAYFRFLALLAFKIFSAEQVDVAILEVGLGGKFDATNVVKAPVVCGISSLGYDHMEILGDQILFLVINLVSINGLLVLVNVLLSRNTKLLFAPNRLKWKCLTHCLIRGEAEGGLIRDDVSESQFNQAGLPENKELLESLKVLFVCTGLMERFWVQSDRNEQGLTRNKKTVDVTFMKNAPFIFLQGNKFNRLKRLEENVPCFVGFSVGTRN

SEQ ID NO: 66584 - protein, 96 aa, Zea mays
  Coding DNA Sequence Number=SeqID_24805
MWGPHGRDTIRERSDRALEQMANDEEVDDFGGLESSVTRAEAVRTEAGEQPAPLTSPCEDPAAPAVLVGEDPPAMAASAAEDPAAPTAPSQVAGSC

SEQ ID NO: 66585 - protein, 269 aa, Zea mays
  Coding DNA Sequence Number=SeqID_24806
MSSSSSAASASLVASSSEDTLSDLAVMELQPGHIVEFSTSRISSVHMLEMQRLGYFGDGVGWVPGAEEISEPEGELVVFEAFFVVGLRLSAHRFVAEVLRRFEVQVAEDYKDEGALRYAARLSSGRDLVEEFIGYGVWPLAHGWVLGENLATFVRKVEAEAVKIVGRYVPRMETLRSWYICGSNIRLNRVFKLNHLSYAGYPWDTTADVATVRQGKTVVTTVDEGPSWGAAPSTAAKKRKLGTTIYWRHARFPRRRCLCPSSGNLLREC

SEQ ID NO: 66586 - protein, 105 aa, Zea mays
  Coding DNA Sequence Number=SeqID_24807
MACRGAAWLGQGALVRRPARLGKQRIGTGFIGQWWLAGQITRPGRLRAAALGNSSGRRDRGGSAAPRLQGSCRGTGGGIEARVELDGEHSSCSTMALGGDIYGLG

SEQ ID NO: 66587 - protein, 81 aa, Zea mays
  Coding DNA Sequence Number=SeqID_24808
MWEEAVAGEKVVARWLAKPGCRGGTIRGRAPQSDVFDPPGQWTGQWGIPPPILLALAQGWDQQALAANFQTTTLKQPPQQE

SEQ ID NO: 66588 - protein, 1063 aa, Zea mays
  Coding DNA Sequence Number=SeqID_24809
  Gene Ontology: Mol. function=peptidase activity; Cellular component =nucleus; Biological process=cell division
  Homolog annotation: Hit_ID=Q6ZHH8; Match level="QueryCoverage=61%, HitCoverage=72%, E-value=0.0, Identity=60%"; Hit description=Cell division-associated protein BIMB-like
  Pfam annotation: Domain name=Peptidase_C50; Domain location=639-1063; Score=142.2; E_value=1.4e-39; Accession=PF03568.7; Description =Peptidase family C50
MQIRIIDVLLHKIYCTKEHFLERSRVLIRKAGALRASGVENIKNCLESLRDAISLLLAIAYCLYAQCAQEDKLGGEVIFDSAEKALNLWLDMEAFDHSSSDMVLQQPSKTIVPLICFLVDLLSMKGCFELQFKLCKVMIMIWKQEKLPIEKLLSLLFTSGRLSHACCYLPLDERFLSIAKEHLGRTLPSALFIPQSCKHPFGRQFSFVTSVDEVSKVASSLVSGDTSNEQSTFLAGCLYYDLSEKVFSRGQLFQAFSYGNKALHLRKKLLKKKFKINSGISGNMERQHCGQDISLEVCGPTIVEIWPNSSSSVNTKDFFLTPWNVLRCYLESTLQVAMMHELIGNGAEAEVLLQTGKEISNFHGLSVFCIVFTSFLGQLYCKRQLWDEAEDVCMVIQVRRKNSGNAEAGPPLDAKARRSSRNSSRLAKGQNVETLAKTRTRSSKRNACMKSEKVLTELNSKNNVTGSKELAADASVCGEAECFPDGIDHSKDDLCNMFGCWSCLFIKSLNSGCIQNILQLRLDYVHRHYLVSLLLKKARALGSHSNGDCEVHSVYWKCISLLFFRSLPQDCCRTYGPYLIGLIMDRSIGDFLPLECAEILFNMSFFLLKSPLSEQSRDICCIFSSVTMADVVPWLLKAFVLSRESPSLVQEVCKLLACIFLLSTTDSSIQLPLGSHKESLSLNHWATYFHQVSVGTNLNCHYFASLQASSEEKVPKDTYKDFRNETDDNVSKFLRLSSRDIKYIEKHMTEFFQKLPDVPVLCISMLGEMQFEDSCTKDLGNPTRVLDKWQCPWGYGITDYVAPVFRNILEENFMSLSSATLTIDDVNADRVRWWSHRMKLNNYLANTLKDIEDSWFGPWKCLLLGHQLSDEHIETASSMIITGLDTEFEFEVNPMLIKAILGGAVSVDEVQECFLQLILYKGYFGRGGCCGKDRLKAFSSCQMDDGSMETLKRIITDASYELPQPADRDPVILVLDVNVQMLPWENLPVLRNQEIYRMPSMGSIFLALSRTNNDYKDHSSPFPVIDPFNTYYLLNPSGDLSSTQEEFVQLFRNYEWKTINCQI

SEQ ID NO: 66589 - protein, 135 aa, Zea mays
  Coding DNA Sequence Number=SeqID_24810
MAVMGSTSEKMYLGQTCSSHVLDARETYPSGIVPIMDILGVINVARIYDKPVGFERNFRGITSLFSTTPYLACSWSNEGSWVMGHNTLPLVIPTPVGASGGKGATTKETPNQTDNFVNNFFAFRGSGYNSNDPDI

SEQ ID NO: 66590 - protein, 73 aa, Zea mays
  Coding DNA Sequence Number=SeqID_24811
MVVAVEAEARKLVNGLPKQQKLQDDCPHTLGLSDDFIGHRGRLCPQTQEPSDICLKDFTMTAVLPPYEDIIAS

SEQ ID NO: 66591 - protein, 811 aa, Zea mays
  Coding DNA Sequence Number=SeqID_24812
  Gene Ontology: Mol. function=RNA-directed DNA polymerase activity; Cellular component=nucleus; Biological process=RNA-dependent DNA replication
  Homolog annotation: Hit_ID=Q8S472; Match level="QueryCoverage=99%, HitCoverage=77%, E-value=0.0, Identity=83%"; Hit description =Putative gypsy-type retrotransposon RIRE2
  Pfam annotation: Domain name=Retrotrans_gag; Domain location=299-390; Score=73.7; E_value=5.8e-19; Accession=PF03732.7; Description =Retrotransposon gag protein
MRDFMTACDYCLSDCSDGSRSLDDEDCGPSRECFHVELGDPSEGNHLGMPEDGDFPRPVPRADIPRELAVVPVPAGGHDPQLEQVRGAQARLDEGTGALETIRRDIGQVWAGQPPAGEIRHLPQGLQHRVANDVRLRPPPASSGVGQNLAAAAMLLRTMLEPSTTEGRRIQGELKNLLEGATARRAESTASRRQGYPSEPHAATSRFMRESSVYTGPTRNTAPAAPGHLGNEHHRHDRRAHLDERAFSRAIRRAPFPTRFRPPTTITKYSGETRPELWLADYRLACQLGGTDDDNLIIRNLPLFLSDTARAWLEHLPPRQISNWDDLVQAFAGNFQGTYVRPGNSWDLRSCRQQPGESLRDYIRRFSKQRTELPNITDSDVIGEFLAGTTCRDLVSKLGRKTPTRASELMDIATKFASGQEAVEAIFRKDRQPQGRPSEEAPEASTPRGAKKKGKKKSQSKRDAADADLVAAAEYKNPRKPPGGANLFDKMLKEPCPYHQGPVKHTLEECVMLRRHFHRAGPPAEGGRAHDDDKKEDHQAGEFPEVRDCFMIYGGHAANTSARHRKQERREVCSVKVAAPVYLDWSDKPITFDQADHPDHVPSPGKYPLVVDPIVGNVRLTKVLMDGGSCLNIIYAETLKLLRVDMSSVRAGAAPFHGIIPGKRVQPLGRLDLPVCFGTPSNFRRETLTFEVVGFRGTYHAVLGRPCYAKFMAVPNYTYLKLKMPGPNGVITVGPTYKHAFECDVECVEYAEALAESEALIADLENLSKEVPDVKRHAGNFEPAETVKAVPLDPCGDTSKQIRIGSGLDPK

SEQ ID NO: 66592 - protein, 539 aa, Zea mays
  Coding DNA Sequence Number=SeqID_24813
  Gene Ontology: Cellular component=nucleus; Biological process =regulation of progression through cell cycle
  Homolog annotation: Hit_ID=Q6YXW5; Match level="QueryCoverage=98%, HitCoverage=57%, E-value=1e-148, Identity=53%"; Hit description =Cyclin-like protein
MGCNRPSCSALVGDAGPVLDMMSVMLENISHTPLIAIATTSAVYRTAQIIASIPNLSYKNKVFPEALFHQLLLAMVHPDHETRVGAHRIFSVVLVPSSVSPFPNLKSLDQCRKHDVQRTLSRVVSVFSSSAALFDKLRRDRNSFREYLHEGSMNRILHGIDDEIATPNDLPGSQSLRQSLRLSSVSHKHSYTSLKEGQSPLTESINEMETIVLRLSSQQATLLLSSIWRQALSPKNAPQNYEAIAHTYSLLLLFLGSKTPIFEVLAPSFQIAFSLMSHSLGGTDSLPPSRRRSLFTLATSMIVFASRAFNVAPLLPICKLMLNDGTAVKDYTEDPSTSYGSPEDNQNALKSLSVVELTNSCSRESMILTIMNSIRDLPDVIFDPFFLELENIRSQLLRDFSPDDVCPSSAHFLESPGKIAPPCSDDDTDYDYQEVVNDVSSQTGGQCLVSMAGDIPFQEMTSHCEAFSMGKHHKMSLLMSFKQNKQAAMVVVPDNQSTNPFLLQSISAGEAQVAGDVQQPFLRLPPSSPYDNFLKAAGC

SEQ ID NO: 66593 - protein, 1280 aa, Zea mays
  Coding DNA Sequence Number=SeqID_24814
  Gene Ontology: Mol. function=binding; Cellular component=spliceosome; Biological process=nuclear mRNA splicing, via spliceosome
  Homolog annotation: Hit_ID=Q9FMF9; Match level="QueryCoverage=99%, HitCoverage=100%, E-value=0.0, Identity=75%"; Hit description =Nuclear protein-like
  Pfam annotation: Domain name=HEAT; Domain location=1033-1064; Score =1.1; E_value=31; Accession=PF02985.12; Description=HEAT repeat
  Pfam annotation: Domain name=HEAT; Domain location=1140-1175; Score =14.2; E_value=0.47; Accession=PF02985.12; Description=HEAT repeat
  Pfam annotation: Domain name=HEAT; Domain location=543-579; Score =5.3; E_value=9.6; Accession=PF02985.12; Description=HEAT repeat
  Pfam annotation: Domain name=HEAT; Domain location=614-650; Score =4.5; E_value=12; Accession=PF02985.12; Description=HEAT repeat
  Pfam annotation: Domain name=HEAT; Domain location=655-691; Score =25.9; E_value=0.00015; Accession=PF02985.12; Description=HEAT repeat
  Pfam annotation: Domain name=HEAT; Domain location=697-732; Score =4.8; E_value=11; Accession=PF02985.12; Description=HEAT repeat
  Pfam annotation: Domain name=HEAT; Domain location=738-774; Score =4.7; E_value=11; Accession=PF02985.12; Description=HEAT repeat
  Pfam annotation: Domain name=HEAT; Domain location=819-854; Score =4.5; E_value=12; Accession=PF02985.12; Description=HEAT repeat
  Pfam annotation: Domain name=HEAT; Domain location=902-938; Score =20.6; E_value=0.0057; Accession=PF02985.12; Description=HEAT repeat
  Pfam annotation: Domain name=HEAT; Domain location=944-980; Score =2.8; E_value=20; Accession=PF02985.12; Description=HEAT repeat
  Pfam annotation: Domain name=HEAT; Domain location=987-1022; Score =12.5; E_value=1.3; Accession=PF02985.12; Description=HEAT repeat
  Pfam annotation: Domain name=SF3b1; Domain location=294-431; Score =216.9; E_value=4.6e-62; Accession=PF08920.1; Description=Splicing factor 3B subunit 1
  Pfam module annotation: Pfam domain module=HEAT::HEAT::HEAT::HEAT::HEA T::HEAT::HEAT::HEAT::HEAT::HEAT::HEAT::SF3b1; Domain location=1033
  Pfam module annotation: Domain location=944-980::987-1022::294-431
MDSIDADLARTQEERRRMEEALAAGAPMAVSSVTFDTDLYGGGGADPNRFAGYDTSIPASEDDAAEDDAEAANPAPRRLAAYTGHAIAAADIPRSADDDDGLPKRSQRIIDREDDYRRRRLNQIISPERHDPFAAGEATPDPSVRTYADVMRDAALQKKKEDLLREIAKKKKEEEEKEKERKAAAPEQPAATTKRRNRWDQSQDGDAGAGAKKVKTSSDWDAPDATPGIGRWDATPGRVGDATPSVRRNRWDETPTPGRMADADATPAAGGATPGATPSGAWDATPKLPGGVTPTPGKKQRSRWDETPASMGSATPGSLGAATPAGYTPGPTPFGAENLATPTPSQIARGPITPEQYQLMRWERDIEERNRPLTDEELDAMFPQEGYKILEPPASYQPIRTPARKLLATPTPLGTPLYAIPEENRGQHFDVPKELPGGLPLMKPEDYQYFGTLLNEEEEEQLSPEEQKERKIMKLLLKVKNGTPPQRKTALRQLTDKAREFGAGPLFNKILPLLMQPTLEDQERHLLVKVIDRVLYKLDELVRPFVHKILVVIEPLLIDEDYYARVEGREIISNLSKAAGLATMIAAMRPDIDNIDEYVRNTTARAFSVVASALGIPALLPFLKAVCQSKKSWQARHTGIKIVQQIAILMGCAVLPHLKSLVEIIEHGLSDENQKVRTITALSLAALAEAAAPYGIESFDTVLKPLWKGIRSHRGKVLAAFLKAIGFIIPLMDALYASYYTKEVMQVLIREFQSPDEEMKKIVLKVVKQCVSTEGVEADYIRNDILPDFFKHFWVRRMALDRRNYKQLVETTVEMANKVGVADIVGRVVEDLKDESEPYRRMVMETIEKVVANLGASDIDARLEELLIDGILYAFQEQTSDDANVMLNGFGAVVNALGQRVKPYLPQICGTIKWRLNNKSAKVRQQAADLISRIAIVMKQCQEEQLMGHLGVVLYEYLGEEYPEVLGSILGALKAIVNVIGMTKMTPPIKDLLPRLTPILKNRHEKVQENCIDLVGRIADRGAEFVPAREWMRICFELLEMLKAHKKGIRRATVNTFGYIAKAIGPQDVLATLLNNLKVQERQNRVCTTVAIAIVAETCSPFTVLPALMNEYRVPELNVQNGVLKSLSFLFEYIGEMGKDYIYAVTPLLEDALMDRDLVHRQTAASAVKHMALGVAGLGCEDALVHLLNYVWPNIFETSPHVINAVMEAIEGMRVALGAAVILNYCLQGLFHPARKVREVYWKIYNSLYIGAQDALVASYPALEDDGDNIFSRPELAMFV

SEQ ID NO: 66594 - protein, 521 aa, Zea mays
  Coding DNA Sequence Number=SeqID_24815
  Gene Ontology: Mol. function=porin activity; Cellular component =integral to membrane
  Homolog annotation: Hit_ID=Q6YWF9; Match level="QueryCoverage=98%, HitCoverage=28%, E-value=1e-110, Identity=61%"; Hit description =Nucleoporin-like protein
MAAPAARRIVGAEVPIPGSDKLRWIDLTIPSSSAAAPASPSDPFVCVPPRAASGCHIIPSGDSQYYLSWRIHEEHPNVLEVIELSPSKEFPSFGLRLAFQEALSPFAFLCEREGRRQGELVYMLYVLTVSGVALLCHLRSPFSYVSGSVLHQDDIAEFNLQTQAQSAKVTAVTAKPGCFSNELRDDAGIGRLWTLMSRTKTVGPVQDIVATVVNERDLLFVLHLDGHLRIWDNHMKLLNYNVHSNDIEGHPSRLWVGKADDDQELISLAILHQNTVVQGCDYVAVYGFGFSAAERFMFSSEPSISTIPLLEGKLADLKIATYKLWILKEFGSMLYEILQYDIDTETAKCCSEKVCCYVLQEDAISEQLFQSSDNALDDLVWTADSMFSSLKEQAFTLISSMFLRRLLQPGVNHCSALRETLLEHKRFLSDSEFQSLTANGLRKEILSIIEQEGSSQTASATAYHWKQFSARYLHNWCWHNKPYGLFLDTTNEVFGLVRKGSFSLFRCLEGLEMLIYGVILS

SEQ ID NO: 66595 - protein, 652 aa, Zea mays
  Coding DNA Sequence Number=SeqID_24816
  Gene Ontology: Mol. function=protein binding; Cellular component =nucleus; Biological process=regulation of transcription, DNA -dependent
  Homolog annotation: Hit_ID=Q2QN51; Match level="QueryCoverage=80%, HitCoverage=82%, E-value=1e-177, Identity=61%"; Hit description=Leo1, expressed
  Pfam annotation: Domain name=Leo1; Domain location=236-571; Score =190.3; E_value=4.6e-54; Accession=PF04004.4; Description=Leo1-like protein
MAGGDRERDADEETRNQMMQNLFGDQSEDEDDADDDDVAEMVDEDDGHQPQSPPQSPPQRHQELDDDAYDDEEEDARSHAPARASGYHSEEVDGEAENGGEGEGESEGQVVIEEESEGEAHGADLDQGESDGDKVQSSPERELDDQRMEPDARGMDSEDEGYQQRTVSGRRRGVIASESEGSEDSYYAAGAQEDEEPRQTRKQSSPLEEERDHEVVRDVFGDSDEDEPAPYRVRHEIDEDSHRSHMEDEGHYEKDMQPDDVVADEDMRYESDDNRELKPKEKPVGPPLDLVVPFKQPPARPDKMNVIKVSNIMGIDPKPFDPKTYVEEDVFVTDESGTKKRIRLEDNIVRWRTIRNADGTTSCESNARFVKWKDGTMQLLIGNEVLDISVHEAHHDQSHLFLRHGKNKKTVKMQKWFETKDPEKAKMEKERLLELRSLVQVLGQNIRAHSILQRKREKVNRKYTQPARPRRQLSPGFLEDALDEDDEPGYDSRRMPGRRRFEDELEAEALAERRIINAKKSNMSRNVPHKPPYPPARPPRRQADEYSGSEREESEYETDGEDIEHSLPRGRREDELDEEEEYEEDVEEEEAPLSDEEMEAPKRKRESGGGGQRREELVSEEDDEDHDDSPPRKQPAVSHRRKAVVFDDSDED

SEQ ID NO: 66596 - protein, 132 aa, Zea mays
  Coding DNA Sequence Number=SeqID_24817
  Homolog annotation: Hit_ID=Q6QP51; Match level="QueryCoverage=63%, HitCoverage=39%, E-value=4e-07, Identity=45%"; Hit description =Putative growth-regulating factor 1
MGAARIFATFVVFTHLGEVAHDAGHDPYLNAGAAGKQRYSPRSDYCANHQGKTDDSRSRPPPSSASGATMSSASPDPRPRPQPRPWKKVSASASGGVTTSPDLSLGLRRSLRLARPRPRTDYAIGDTSLPYH

SEQ ID NO: 66597 - protein, 380 aa, Zea mays
  Coding DNA Sequence Number=SeqID_24818
  Homolog annotation: Hit_ID=Q10CM8; Match level="QueryCoverage=33%, HitCoverage=25%, E-value=3e-43, Identity=67%"; Hit description =Expressed protein
  Pfam annotation: Domain name=NIF; Domain location=155-352; Score= -46.4; E_value=0.00036; Accession=PF03031.8; Description=NLI interacting factor-like phosphatase
MATNTESGFIKNLFEGGCTRFEGPCQNACLGACIGDRSLRLLGSRSRRLSFSAAFRLRLLIYGFVRSITSPLFIFQQPSRMTGHEVDDEPEARARMERRQVLTATAAAAEAGTLLGKSVAADARLSCPASSTAVEAGESSGVVVQAKGSATGLPSPLTKQMKKKLLILDLNGLLADINQDRHNAHLSHGTIRGKLVFKRPYCDDFLRFCMHHFELGIWSSRLRANVDAAVDILMEDDVKQRLLFCWDLSKCTGTGFYTLENKTKPLVLKELKKLWDDLPWRQQGEFSPSNTLLLDDSPYKALRNPPHTAIFPCPYSYKDDKDDALGPGGDLRLYLESLATTADDVQRYVRDHPFGQPPITEAHKHWEFYRRILRTTTQVE

SEQ ID NO: 66598 - protein, 404 aa, Zea mays
  Coding DNA Sequence Number=SeqID_24819
  Homolog annotation: Hit_ID=Q67UF2; Match level="QueryCoverage=62%, HitCoverage=73%, E-value=3e-58, Identity=45%"; Hit description =Putative storekeeper protein
  Pfam annotation: Domain name=DUF573; Domain location=190-255; Score =18.5; E_value=3.1e-06; Accession=PF04504.5; Description=Protein of unknown function, DUF573
MAPKRPAAASGSASEASDAEADAGHHQPSSPSPSKTPPPPNPNPKSTAAGPTSAAEDSTAAGSGSEAAYDSDADHRTAPRNAASPSSKPRSTRPRSRSRSRSPDAASYSDGVASDADADPAAVDGADSADDGNASPLAPPRPSRAEAAAVKPISSRPMDPPRRSMVPSFSEQRSKRPRSVAVPSSVEHLKRPTRLWSLHDEIVILRGLGHLGDKVRRLKQKYNLLASRGKSGRDPDLPSQHEQSVYEIGKKVWGGSANGGGSTGGDGYEIGGDSEEEHEFRESDEDVENGRDERARKNRRVMPIAMANGNGAGLGAVKANSRGKFDTEKGKDAYPYLWETVEDLSKEHPNGVAFKKAFESIEGPKARGMEEKLRKFRLTEIRHQLRRMELMKETVKMVLDALEG

SEQ ID NO: 66599 - protein, 50 aa, Zea mays
  Coding DNA Sequence Number=SeqID_24820
MRLVWFVANCAPLCLRWGGTGLLGVYRWFGTPTPGISFSQSAIDAANRCL

SEQ ID NO: 66600 - protein, 483 aa, Zea mays
  Coding DNA Sequence Number=SeqID_24821
  Gene Ontology: Mol. function=nucleic acid binding; Cellular component= chromatin; Biological process=chromatin assembly or disassembly
  Homolog annotation: Hit_ID=Q60DN3; Match level="QueryCoverage=55%, HitCoverage=29%, E-value=7e-52, Identity=37%"; Hit description =Integrase core domain containing protein
  Subcellular localization annotation: CTP_CleavageSite=53; ConfidenceScore=5.43e-01
MDQLIVIGSATMITTLSQSSHNLFNLQHSSLYVPMYEQPSSMQLLLLRFSCFRAGSTKTTLQCPSPSSPPLVDTPETESDAGLPGAPRLVLAPAEVAEPEVDGDSRRDRERFPRATAGQAQVPRVVAAPALHLDTVTGELVLVQASPSPATMASGAARAAARPTCGLTHAMTSLAVQADDGGESEGARARAASRSGKVKPLAHSDMAHELATTIPSSFSIPITGKLIRTNYMLWRAQIMLSIRAAQLEGVLTGADPEPPTTITNKPGDTLSTVPNPEYARWIARDQAVLGYLLSSLTREVLTNVATLSSSAEVWSTLVATYASHTRARSVNMRIALATTKKGAATTTKFYTKMKGYVDDMSTAGQPLNDEDFVSYLLTGLDEECYNPLVSSILGRVEPITPSELLSQMLSYELRTNWQSGGTYQSSVNSASRGRGTPWNRNGNKGPQCQVCFKTGDIANICWYRFDEDYVPDSRLAASATYSQ

SEQ ID NO: 66601 - protein, 185 aa, Zea mays
  Coding DNA Sequence Number=SeqID_24822
  Gene Ontology: Mol. function=nucleic acid binding; Cellular component= intracellular
  Homolog annotation: Hit_ID=Q2Z1Y7; Match level="QueryCoverage=46%, HitCoverage=24%, E-value=7e-22, Identity=51%"; Hit description=Pm27 protein
  Pfam annotation: Domain name=DUF1644; Domain location=9-138; Score =106.8; E_value=6.6e-29; Accession=PF07800.3; Description=Protein of unknown function (DUF1644)
  Subcellular localization annotation: CTP_CleavageSite=44; ConfidenceScore=5.35e-01
MAKGIVASSAAACAKGSTKIVHVPAPRRPLRLSATVTKAKLDVRSKEASEDPDAIELMCPLCRGEVKGYTLVEPARKQLNRKRRSCMEDGCSYMGTYRELCKHVQKKHPTANPRAVDPLHAYRWKRLLFRSSLHDMICSTTSEAMRRFCSHMLQIEEVVAALREGGDHRGATNDDQLIHDLLTSR

SEQ ID NO: 66602 - protein, 143 aa, Zea mays
  Coding DNA Sequence Number=SeqID_24823
  Subcellular localization annotation: CTP_CleavageSite=44; ConfidenceScore=5.28e-01
MALGFSSCRCLPSAWATPSLARIPGRALHSRAPSTLPLPPLSVDAAHGRSPAALLPHGGCLASAPCRALLCASPVLARRAGAPVTARTFFSGGRAPFQLTTALDPAQCSFARLDSPLSWPCVAGSLLDRVPCASLDRPASRVV

SEQ ID NO: 66603 - protein, 514 aa, Zea mays
  Coding DNA Sequence Number=SeqID_24824
  Gene Ontology: Mol. function=isomerase activity; Cellular component =cellulose and pectin-containing cell wall; Biological process=cell redox homeostasis
  Homolog annotation: Hit_ID=Q5EUD5; Match level="QueryCoverage=81%, HitCoverage=94%, E-value=0.0, Identity=83%"; Hit description=Protein disulfide isomerase
  Pfam annotation: Domain name=Thioredoxin; Domain location=131-204; Score=31.5; E_value=4.5e-07; Accession=PF00085.10; Description =Thioredoxin
  Pfam annotation: Domain name=Thioredoxin; Domain location=237-341; Score=145.9; E_value=1.1e-40; Accession=PF00085.10; Description =Thioredoxin
  Pfam module annotation: Pfam domain module=Thioredoxin::Thioredoxin; Domain location=131-204::237-341
MVQRPRESRSRQEEKPLLRGRTSNVEIIDRSSHASVSSRGPSPGFKSQHHGETRWLVATRHCRLIPPAPPLRHASRRPRCPPSSGSGRLHGRRTLLIRLPRPPAQLQQLQIEGAELEPAWCWLSSSRRGAGTASSLAPTWEKAAGVLKGVATVAALDADAQQALAQEYGIKGFPTIKVFSPGKSPVDYQGARDVKPIVEFALSQVKALLRDRLSGKASAGSNGKTSGGSSEKNEPSASVELNSRNFDELVVKSKDIWIVEFFAPWCGHCKKLAPEWKKAAKNLKGQVKLGHVDCDAEKSLMSKYKVEGFPTILVFGADKESPFPYQGARVASAIESFALEQLEANSGPVEVSELTGPDVMEEKCASAAICFVSFLPDILDSKAEGRNKYLELLLSVAEKYKKSPYRQVFVWTAAGKQANLENQVGVGGYGYPAMVALNVKKGAYAPLRNAFQRDEIIEFVKEAGRGGKGNLPLNVAPTVVTSEPWDGKDGEVIEEDEFSLDELMGDSSSVNDEL

SEQ ID NO: 66604 - protein, 39 aa, Zea mays
  Coding DNA Sequence Number=SeqID_24825
MATNKGMYSGCLKLCLRVCLGGCVLYLEYRAAVSRLYMP

SEQ ID NO: 66605 - protein, 65 aa, Zea mays
  Coding DNA Sequence Number=SeqID_24826
  Gene Ontology: Mol. function=transcription regulator activity; Cellular component=nucleus; Biological process=regulation of transcription, DNA-dependent
  Homolog annotation: Hit_ID=Q10FX7; Match level="QueryCoverage=92%, HitCoverage=9%, E-value=2e-24, Identity=81%"; Hit description=Not1 N- terminal domain, CCR4-Not complex component family protein, expressed
  Pfam annotation: Domain name=Not3; Domain location=2-65; Score= -105.8; E_value=0.00087; Accession=PF04065.5; Description=Not1 N -terminal domain, CCR4-Not complex component
MGASRKLQGEIDRVLKKVYDTENANQKEKFEADLKKEIKKLQRYRDQIKTWIQSSEIKDKKWSAR

SEQ ID NO: 66606 - protein, 105 aa, Zea mays
  Coding DNA Sequence Number=SeqID_24827
MAGVEQKGEERWEKMMMAVERLTDKMEAMEVGQKKVDEDRTLMARQLQETEKAVSLLQLELLAKELEVGTVVEAPPKIDNEHLEALPFHLLPNVSESTSPELIGG

SEQ ID NO: 66607 - protein, 88 aa, Zea mays
  Coding DNA Sequence Number=SeqID_24828
MASSAGRSSSYPRYGVASYLFAIQAYAWYGVLPHPFWRMGHYRDPNAEVPAAGVEWSYRSTGILSRTYSASCLTEALRYCSHGSDMAW

SEQ ID NO: 66608 - protein, 190 aa, Zea mays
  Coding DNA Sequence Number=SeqID_24829
  Subcellular localization annotation: CTP_CleavageSite=20; ConfidenceScore=5.17e-01
MRLKSAKPGDDTAASLGFSRAHRARHHHHRRRPFRCVVLLQSCCWVAGGTFFDFHMGWVVLAPCAPHGLTKPGEIQGIRTRAVSISCCTASNKKQGMAVETLGNAGAVMKGCGAAHGAEAGALTSLGGAAELRARHECYGCRLQSSVSAGPSMETCGASVAELKSETAAWTDGRWSELDRKQVQTLSARQ

SEQ ID NO: 66609 - protein, 980 aa, Zea mays
  Coding DNA Sequence Number=SeqID_24830
  Homolog annotation: Hit_ID=Q6H6D6; Match level="QueryCoverage=48%, HitCoverage=50%, E-value=4e-35, Identity=26%"; Hit description =Transducin-like
MPTAPAAVLPRTCMDSLIAFLHHHLRALLADPAALHATRRRCLALLTPPRRHHCRKNLSGAQEEEENEDDAVLAALHGSIDALLPSPVDGAAAVCLAGVEEALQAPALLPEHGETAGLDNRRVAACAYFYLALVRCAQGDAWQMSMDLLQAVAVCPAAVAAGREDGARRAGLAPRALWEGLFDDGVLARAGGAGEEDAARRAARRYKDWLMYYKVVAAAPEQNGGHIEKKGTQLCDSKNSEDIYFHEQDRTNHSVDPEGITTVSASEFGAHDGFTELKDFLSIADQDFQEDTKGSSDSRCLHEMLEESQSDSPVSFYSHLDSSEQSDSEAAPYDKGRSAKIMPIDADFLAAKLHERSNHNKNLTWCTSPENAMIYAPESSMYQVDDRETKPNCLQSNRSHGSLNNLSNSVLELKNADSYSTSNYSAKDAMFTQCSPRHDLRCFNAFSAKFIKKSSLSDLVSRGSMSRKFKTSTASDDWSDVSSRWAKDSQVDFLERFEKAVSKLLISDGLESCLDAGSEVTTIWQLLNNTCEARHMSSVRQDILDRLLDSISTSKKDKVVRASVYVLLLMISEDRNVMRGIKRKDFHLSNLAVALKRDVHEAAILIYLLDPTPLEIKNLDLLPSLLHVACSSGTQKWPSMLPLTPTSASIALIEILVTAFDYVTNNVHLASLSSPPILSKLVDVAKNHNLEEGVALAAILIRCVRLNGNCKKFLSQATPVDPFLHLLRRKEHRAKCAALEYFHEILQIPRSSANSLLEEIRRQGGIAIMHTLMVSLHQTGPEHRVLGASLLLQLDMMERSDGRSVFQDEAMEVLLDSLSSQENSRVQALSACFLSNLGGTYSWSGESYTAAWLTKKAGLTSTSQRNTIRNIDWLDSCLQDTEISTWSNKSARAIIKIGVPFISALAKGMQSKVKGTSQNCLLCTAWLGSELAALGENAIRYSACEILLHDIASHLHPGNELDERVLACMCLYNYTSGKGK

SEQ ID NO: 66610 - protein, 199 aa, Zea mays
  Coding DNA Sequence Number=SeqID_24831
  Gene Ontology: Mol. function=catalytic activity; Biological process =cellular metabolic process
  Homolog annotation: Hit_ID=Q6I683; Match level="QueryCoverage=89%, HitCoverage=47%, E-value=6e-65, Identity=63%"; Hit description=UDP -glucuronic acid decarboxylase
MASELTYRGGGTSTAAGAGAGGYSPKPSKPLAWLPRAARYAVAEHRPLFALAGMLIARRRHLHRLPPAHHRDVATRHFVGGKVPLGLKRKALRVLVTGGAGFVGSHLVDRLLERGDSVIVVDNFFTGRKDNVLHHLNDPNFEMIRHDVVEPILLEVDQIYHLACPASPVHYKYNPIKTIISFLYEFLQFSSVAFISFPP

SEQ ID NO: 66611 - protein, 289 aa, Zea mays
  Coding DNA Sequence Number=SeqID_24832
  Gene Ontology: Mol. function=ubiquitin-protein ligase activity; Cellular component=ubiquitin ligase complex; Biological process =protein ubiquitination
  Homolog annotation: Hit_ID=Q9FE91; Match level="QueryCoverage=34%, HitCoverage=23%, E-value=1e-06, Identity=30%"; Hit description=Zfwd4 protein
  Pfam annotation: Domain name=WD40; Domain location=40-76; Score=11.4; E_value=1.7; Accession=PF00400.22; Description=WD domain, G-beta repeat
  Pfam annotation: Domain name=WD40; Domain location=82-120; Score =34.8; E_value=3e-07; Accession=PF00400.22; Description=WD domain, G -beta repeat
  Pfam module annotation: Pfam domain module=WD40::WD40; Domain location=40-76::82-120
  Subcellular localization annotation: CTP_CleavageSite=31; ConfidenceScore=5.39e-01
MSSFTSLVRFILPLFQQTRHAMLSNSKNRPSVQRVSCVHTQILEIGQPGNGAATAIAFFRGQLFAGYSNGTIRAWDIKGQRAVIIREVKEHKKAVTCFSLSETGENLLSGSADKSIRVWEMAQRKLECVEMIQTREAVQKLDICGDKILVLTQNSVLKFSCASRSTQTFYRSKHVKSLAVYQGKAYLGCKDASIQELDVSVESNSAMIRIPRGGWMVRKQSISSIVVYRDWMYCAGAQVEGSALKDWKKRCKPNMTMPIPKGTSVEAMAVVEDFIYLNCSRSPSIIQLH

SEQ ID NO: 66612 - protein, 319 aa, Zea mays
  Coding DNA Sequence Number=SeqID_24833
  Gene Ontology: Mol. function=transferase activity, transferring glycosyl groups; Cellular component=cytoplasm; Biological process =metabolic process
  Homolog annotation: Hit_ID=Q67W01; Match level="QueryCoverage=95%, HitCoverage=62%, E-value=1e-123, Identity=71%"; Hit description =Putative glucosyltransferase-10
MADESYLTNGYLDTPIDWIAGMPTLRLGDISSFVRTLDPQCFALRVEEDEANSCARARGVILNTFEDLEHDVLAALRDEFPRVYTIGPLAAAAAGALSLWEEDSECVAWLDAQADGSVLYVSFGSLAVLSLEQVAELAWGLAASDRPFLWAVRPGLVAGDRGADALPEGFLAATGGRCFIAEWCAQEQVLRHRAVGGFLTHSGWNSTAESIWAGVPMVCWPGFADQYINCRYACEEWGIGLRLDEALRREQVAAHVEELMAGGTDRAREMRRCAAKWKAAAWKATAPGGSSCESLDRLVDDLRLWEEDAELATATPLIR

SEQ ID NO: 66613 - protein, 82 aa, Zea mays
  Coding DNA Sequence Number=SeqID_24834
MRRGTSKIQLGNDVSSRKSLRTIMLMQLAPAASNQNINQNNRNCFHPQSEQSENTADINDKCMSVIFNSASYTDNDNCEGST

SEQ ID NO: 66614 - protein, 70 aa, Zea mays
  Coding DNA Sequence Number=SeqID_24835
  Subcellular localization annotation: CTP_CleavageSite=50; ConfidenceScore=5.28e-01
MGYVPTLRMTMTKKTERNDRSSPTSRPRTSPTPRQVFDRFRQNGCENYPFLEMDREHDNIINCTTPNFTR

SEQ ID NO: 66615 - protein, 320 aa, Zea mays
  Coding DNA Sequence Number=SeqID_24836
  Gene Ontology: Cellular component=cellulose and pectin-containing cell wall
  Homolog annotation: Hit_ID=Q67X78; Match level="QueryCoverage=89%, HitCoverage=91%, E-value=6e-83, Identity=55%"; Hit description =Putative phi-1
  Pfam annotation: Domain name=Phi_1; Domain location=50-318; Score =284.5; E_value=2e-82; Accession=PF04674.3; Description=Phosphate -induced protein 1 conserved region
MGGRKMRASMTTLLIRLVLTVALLGGEAARRCAAFNPRVLFTVKPDPIVLRDHRGALLTGNHTVNLLFYGRFTAAQRAIVVDFVRSLSDASAPRPEPPGAPPSVAAWWCTIRLYRGGGARLRLGRQIIDERMSLGRGPLSPGNVTALARAAGHHRGAITAVLTAADVPVASFCVSRCGAHGHDRGGAHSRARYAYLWAGNPAQQCPGQCAWPFHLPTYGPPDPAAGAAQRRRRRRRHGHQPRRPPRRHGHQPGDAGAGLEAATVCAGIFGTGSYPGYPGKLLTDPATGASYNAVGLGGRKYLLPALWDPATSQCKTLVQT

SEQ ID NO: 66616 - protein, 471 aa, Zea mays
  Coding DNA Sequence Number=SeqID_24837
  Gene Ontology: Mol. function=hydrogen ion transporting ATP synthase activity, rotational mechanism; Cellular component=proton -transporting two-sector ATPase complex; Biological process=ATP synthesis coupled proton transport
  Homolog annotation: Hit_ID=O80919; Match level="QueryCoverage=76%, HitCoverage=84%, E-value=1e-106, Identity=50%"; Hit description =Expressed protein
  Pfam annotation: Domain name=DUF231; Domain location=282-467; Score =192.6; E_value=9.7e-55; Accession=PF03005.6; Description=Arabidopsis proteins of unknown function
MAGCTPPRKGRSTAGDGGLEEAWLVAEAPAPAKKLHARAAAWGVVTVSFGTRGHGHFNSFVLLLLVLFVVLAISVTTTTTTTKQRETTTTTAAPPPADGARARAGGQGECNMSSGRWVYDGAAYPLYEESACKFMSDQSACGKFGRTNRKYQHWRWQPHGCDLPRFDAVKLLERLRGKRLAFVGDSLNRNQWISMVCLIDTATPMLHKSMAGGNDSSLVSFRIHEYNASVDFYWSPLLVESNSDHPVHHRVADRVVRAGSIDKHARHWGDADVLVFNSYLWWRRPSMKVLRGSFEAAAAAAYEVTDSLRAFEMSMKTWSEWLERHVDRARTGLFFTSISPTHLHSDEWEEAAGSGSGAGNHRCYGEMEPITAEGHRGRDTDPAFARAVEAQVARLGARGVAVRVLNVTQLSEHRKDAHPSVHRRQWSPPTAAELEARARDPSSGADCIHWCLPGVPDVWNQMLYAHLVSSS

SEQ ID NO: 66617 - protein, 137 aa, Zea mays
  Coding DNA Sequence Number=SeqID_24838
  Gene Ontology: Cellular component=integral to membrane
  Homolog annotation: Hit_ID=Q84TX7; Match level="QueryCoverage=77%, HitCoverage=32%, E-value=3e-19, Identity=81%"; Hit description =Putative amino acid transporter
MADRSRFRPVLVQAIAGVTVVYICFGACGYLAYGDATKDIITLNLPSTWSAAAVKHRAVDRAALHASPRGGAGGAVRCGVLRAGVRVVRVLRREHGVRAALLRAARVLFHLRVVDWGILLFGLAFAAHGLYAVLSRH

SEQ ID NO: 66618 - protein, 229 aa, Zea mays
  Coding DNA Sequence Number=SeqID_24839
  Homolog annotation: Hit_ID=Q6YUS0; Match level="QueryCoverage=20%, HitCoverage=8%, E-value=1e-12, Identity=75%"; Hit description =Putative glutamate-tRNA ligase
  Subcellular localization annotation: CTP_CleavageSite=74; ConfidenceScore=5.70e-01
MEDLRTSCKGLGSGRSSPSPVTRRSSMEGTTRRRGPWGGRGRWRSSTRRGTSCARNHLASQPTRRRRSTSMPPVEATDAGKPDHFASACLERTLFGFKDPVPDAEPASTGVEVAVAPFWNREKYMLSLLPHAEKDIKVEPKQNKGNAANELIQLPFLRDKKRCTSSPSRGDIVNKNYGETRIMVPMSVGSLGLIASQNGIHFKKYAEKLLDSGAVYRCFCSNEEFEQMK

SEQ ID NO: 66619 - protein, 387 aa, Zea mays
  Coding DNA Sequence Number=SeqID_24840
  Homolog annotation: Hit_ID=Q4FX62; Match level="QueryCoverage=65%, HitCoverage=39%, E-value=4e-07, Identity=22%"; Hit description =Proteophosphoglycan 5
MGQDELELPDLPEGKDKEQGGGAPVQSRVAGAGHGLARGEASSEQEGDSGAGDAGSYAAAGLGNDEEEDAKEALTEELENVAPPAGDSGRGDAPESGRNEHIYFERQGFRPARPAIAHATPPSSYRRLPFRSRKQYYPTRFIVAGDTASSIANAHDPGTGSRTSEAASGPQPTASLGSPSGTSRSAGDSAATNAGHGGKSEAMVLTAGRSERQGFRPARPAIAHATPPSSYRRLPFRSRKQYYPTRFIAAGDTASSIANAHDPGTGTRTSEAASGPQPTASLGSPSGTSRSAGDSAATNAGHGGKSEAMVLTAGRSDSPAPPETLRRRLQSARPSATWCPRSRVSKELVPAPPSEERELPEPPSASRAAVWLLVLEIDWGAIQIDDR

SEQ ID NO: 66620 - protein, 275 aa, Zea mays
  Coding DNA Sequence Number=SeqID_24841
MEEAPELISPRISFSHDLAAATPPPAPAPALLAGRRSDASLLGSRPRLPEPDFDFDFDFANATAAADVAPADRLFAGGKLLPLPPLPPAPKPNNPCKPQACSSSSTSVKQAQQQACQQRRPGSWASSFSRSSSANSATTGAPRSAGRFGCPPFPLMRSWSVGSAASVARGAAAATLGDDGAAPDAAAASHRPHHHQYHKKFGIVAGAATSNNGGSSRTYYYGGSRKGGGGGGSSGSHGVRVRPVLNVPFIGTSVSNVLSYLLCDCSHGTKKSRGL

SEQ ID NO: 66621 - protein, 145 aa, Zea mays
  Coding DNA Sequence Number=SeqID_24842
  Gene Ontology: Cellular component=membrane
  Homolog annotation: Hit_ID=P08452; Match level="QueryCoverage=56%, HitCoverage=23%, E-value=9e-22, Identity=57%"; Hit description =Hypothetical lipoprotein syc1174_c precursor
  Subcellular localization annotation: CTP_CleavageSite=34; ConfidenceScore=5.67e-01
MALRLSAPFLTSRFTPSQALAPRRRTRARSFSPSADARAACFKRPYTSVLIIPTGVGAAVGGFAGDALPVARAVAGVADCVISHPNVLNAAMLYWPMPNTLYVEGYALDRFAEGSWALQPVHQNKLHAFQMMTQKIQIVTGKERY

SEQ ID NO: 66622 - protein, 116 aa, Zea mays
  Coding DNA Sequence Number=SeqID_24843
  Subcellular localization annotation: CTP_CleavageSite=35; ConfidenceScore=5.11e-01
MAKENSDVHSTPTTVPAARERLTTASHDLPRVRPRAQQGAPPRPTPGLGLSFGLGGRSPPRPTLGLGLNLGLGRRSPPRPTLGLGLSLGLGGVVASPDLGLVSATLLGIDHYPTPS

SEQ ID NO: 66623 - protein, 108 aa, Zea mays
  Coding DNA Sequence Number=SeqID_24844
  Subcellular localization annotation: CTP_CleavageSite=84; ConfidenceScore=5.10e-01
MGLDRGGGPSSIASRAGRRCRGFDFGRVASQRRLVDVRALTWRNLWLGQANFLAVVNTPPRSALHRGQPAWTSTPGLGVGHALRAGDVAPPLPVARPAVAVNQDWKIG

SEQ ID NO: 66624 - protein, 91 aa, Zea mays
  Coding DNA Sequence Number=SeqID_24845
  Homolog annotation: Hit_ID=Q8RUD4; Match level="QueryCoverage=34%, HitCoverage=56%, E-value=8e-10, Identity=93%"; Hit description =Acetyl-CoA C-acyltransferase-like protein
  Pfam annotation: Domain name=Thiolase_C; Domain location=1-58; Score=- 50.9; E_value=0.055; Accession=PF02803.8; Description=Thiolase, C -terminal domain
  Subcellular localization annotation: CTP_CleavageSite=60; ConfidenceScore=5.25e-01
MDLNSYLSVFKKHGTTTAGARRVATLLNEMKRRGRDCRFGVVTMCIGSRMGAAAMFELCSARLEVSTITQHCNPMVIDAPVDIFVMLWNVV

SEQ ID NO: 66625 - protein, 54 aa, Zea mays
  Coding DNA Sequence Number=SeqID_24846
MAAPLSPASRGKGGGRTPMHRPSLSYSSLSSKGKDISEANGINYAKKIFRLLQN

SEQ ID NO: 66626 - protein, 66 aa, Zea mays
  Coding DNA Sequence Number=SeqID_24847
MADRNNEAARRAQLPWEIRPAARQEISQAEEINEERDTNEEEDKEENCARRSNQNKFDKILEKDLI

SEQ ID NO: 66627 - protein, 562 aa, Zea mays
  Coding DNA Sequence Number=SeqID_24848
  Homolog annotation: Hit_ID=Q6YZD2; Match level="QueryCoverage=37%, HitCoverage=99%, E-value=1e-111, Identity=93%"; Hit description =Coated vesicle membrane protein-like
  Pfam annotation: Domain name=EMP24_GP25L; Domain location=59-122; Score=49.4; E_value=1.2e-11; Accession=PF01105.14; Description =emp24gp25Lp24 family
  Pfam annotation: Domain name=Tryp_alpha_amyl; Domain location=418 -499; Score=29.6; E_value=1.1e-05; Accession=PF00234.12; Description =Protease inhibitorseed storageLTP f
  Pfam module annotation: Pfam domain module=EMP24_GP25L::Tryp_alpha _amyl; Domain location=59-122::418-499
GMEGLSWRTVCCLSVLCAVLFLRPAEGIRFVIDREECFSHNVEYEGDTVHVSFVVIKADTPWHYSEEGVDLVVKDPNGAQVRDSRDKTSDKFEFIVQKRGVHRFCFTNKSPYHETIDFDVHVGHFSYFEQHAKDEHFAPLFEQIGKLDEALYNIQFEQHWLEAQTDRQAILNENMSRRAVHKALFESAALIAASVIQVYLLRRLFERKLGTSRRINGCAELKAARRISSFSCRLSRWSAFEAAGVRVYFASRLENNTGSMKAGNGFVDDSNEKTADAIREMPLAALCKCKVQRMMGSHAQLRAPSSPPSCLAFKSQAGLDLKLRPRCVSGQRRRRDGPAATAAQDSQPEASSANAIRMSNGRCNNQSRSSRAADVDGEAGTRRHWALWWWWCLLLLAAWCCAAAAQSPPAADPLQSKCQGDFGKLTDCMDYATGHAASPSSTCCGDAGDTEKARPECLCYIIQQTHTGRNQVQSLGLRFDRLMALPAACNLPNSNVSLCITLLNLKPGSADYALFANASKITPSAGGNPASDSAAGSGVKLRAGVSGGVALAVVSAIASSLF

SEQ ID NO: 66628 - protein, 337 aa, Zea mays
  Coding DNA Sequence Number=SeqID_24849
  Gene Ontology: Mol. function=peroxidase activity; Cellular component =vacuole; Biological process=response to oxidative stress
  Homolog annotation: Hit_ID=Q5U1H0; Match level="QueryCoverage=89%, HitCoverage=91%, E-value=1e-118, Identity=69%"; Hit description =Class III peroxidase 123 precursor
  Pfam annotation: Domain name=peroxidase; Domain location=54-300; Score=396.7; E_value=3.5e-116; Accession=PF00141.13; Description =Peroxidase
MEKRRRGSGGVPSLAVAVLAALLAAASMPSPPRVAAALSPDYYKDSCPGLESIVRYEVARKKNETVVTIPATLRLVFHDCMVGGCDAAVLIASKNNDAEKDAPDNESLAGDGFDTINRVKAAVEKRCPGVVSCADIIALAARDVVYLADGPYWRVELGRLDGLDSRASDVKGKLPDPDMHVKDLTPVFQRNGFTEVDMVALSGAHTVGFAHCSRFTDRLYSYGGARTDPSFNPAYAYQLKQACPIDVGPTIAVNMDPVSPIRFDNAYYANLQDGLGLFTSDQVLYADEATRPIVDMFAASQKDFFDAFVAAMLKLGRLGVKTGKDGEIRRVCTAFNH

SEQ ID NO: 66629 - protein, 273 aa, Zea mays
  Coding DNA Sequence Number=SeqID_24850
MGVWRMLEDSISSKISTYARLEMPEGRKKTLWKKDGDKNCGRQTHGEKQETVRRVDARRRDPSFSLGSRGVTSSTRLHHHTALLCCAVLQFGFGALAQRQRYATAYCSGRRVFGLLVLWSLALCCDCSARTRPADVSARVLRGLWMATAVPCRLLDHATLTLIRGSCVTSGIAVYRGRNCVQCKLSEAGIRSRYAPRPPLCLSAVVITRSRAVTLIIAVWWWSIGPMMMISAQELGSVGAAAHGPGSESQLLLLHGQLPMHQRPRLSGGQLAR

SEQ ID NO: 66630 - protein, 168 aa, Zea mays
  Coding DNA Sequence Number=SeqID_24851
  Homolog annotation: Hit_ID=Q6KAF1; Match level="QueryCoverage=42%, HitCoverage=17%, E-value=1e-13, Identity=64%"; Hit description =Putative RING finger 1
  Subcellular localization annotation: CTP_CleavageSite=34; ConfidenceScore=5.49e-01
MDPPRGGQRPLSPTTSTVSPRTSPRDRWFIPWVSARRGKADWAAAEQDSPSASPTRRGSMALSVLRPPLPRAKEGLGLGQRRCHSMGSYEYVMDDRASLRVAIKPPKKKPAASKSRRRGAMSECEFGASTREETSLRLPFPATALDHDGIWARGLAGRGGLCRRFPSA

SEQ ID NO: 66631 - protein, 426 aa, Zea mays
  Coding DNA Sequence Number=SeqID_24852
  Gene Ontology: Mol. function=amino acid binding; Biological process =metabolic process
  Homolog annotation: Hit_ID=Q75IY1; Match level="QueryCoverage=94%, HitCoverage=90%, E-value=4e-75, Identity=43%"; Hit description =Putative ACT domain containing protein, ACR4, with alternative splicing forms
  Pfam annotation: Domain name=ACT; Domain location=16-75; Score=5.0; E_ value=0.95; Accession=PF01842.15; Description=ACT domain
  Pfam annotation: Domain name=ACT; Domain location=228-295; Score =10.5; E_value=0.18; Accession=PF01842.15; Description=ACT domain
  Pfam annotation: Domain name=ACT; Domain location=306-373; Score =45.3; E_value=2.1e-10; Accession=PF01842.15; Description=ACT domain
  Pfam annotation: Domain name=ACT; Domain location=92-158; Score=12.4; E_value=0.1; Accession=PF01842.15; Description=ACT domain
  Pfam module annotation: Pfam domain module=ACT::ACT::ACT::ACT; Domain location=16-75::228-295::306-373::92-158
MACGSRSRTNEMVDEYEKLVDSANKYGTLLEVVQVLTDLKLTIKRAYISSDGEWFMDVSGSGIAQLPRAAGAGGGRGGGGGGGARPPSSWWGETGPGLLSEVFAVLADLRCNVVASEVWTHDGRVAALVHVTDADTLGAIEDPARLDTARRLLRHVLRGSSRDKKAARAAVSARVVEHAPRRLHQMMRADRSARRDGEGEGEGDGERERGGAGMPVVAVEDCAERGYTLVNVRCRDRAKLLFDTVCTLTDMQYVVFHGTVIAEGSEAYQEYYIRHLDDRAASSGEERERLRRGLEAAIQRRYTEGLRLELCCEDRVGLLSDVTRVFREHGLSVTHAEVGTRGARAANVFYVVDASSGEPVQAQAVAAVRAEIGEQLLFVREHQDAAAAAANGTRSTVAGGRRSLGNMIRSRSEKFLYNLGLIRSCS

SEQ ID NO: 66632 - protein, 78 aa, Zea mays
  Coding DNA Sequence Number=SeqID_24853
MRSPEPLYSALLLLVGAGCLLLALGRLSMASVDYLLAPEHRLPATFEDAADAVIRGSETRVMRDRGATTTDRRDRGRD

SEQ ID NO: 66633 - protein, 118 aa, Zea mays
  Coding DNA Sequence Number=SeqID_24854
  Homolog annotation: Hit_ID=Q6YZD9; Match level="QueryCoverage=98%, HitCoverage=19%, E-value=2e-54, Identity=86%"; Hit description =Nodulin-related protein-like
  Pfam annotation: Domain name=Nodulin-like; Domain location=15-118; Score=3.2; E_value=7.2e-11; Accession=PF06813.4; Description=Nodulin- like
MVEIGSRVRGFLRNRWLVFVAAMWMQSCAGVGYLFGSLSPVIKASLGYNQRQVAGLGVAKDLGDSVGFLAGTLCSVLPLWAALLVGAAQNLVGYGWVWLAVTRRVPVPPLWALYLTII

SEQ ID NO: 66634 - protein, 145 aa, Zea mays
  Coding DNA Sequence Number=SeqID_24855
  Subcellular localization annotation: CTP_CleavageSite=41; ConfidenceScore=5.29e-01
MEWKTPTTSPVKCAARGDAPTESSPVRYRRSPRSALALPARAPPVDGRAPNAKGAAHTMLLYPAPHPNCLSIPKRIQLVSASVQSVQSLREGEERAVCARVRKPRRGVALTGKWSLLVTWAHTVVTQGACVRPSWAGQGEIRPRQ

SEQ ID NO: 66635 - protein, 185 aa, Zea mays
  Coding DNA Sequence Number=SeqID_24856
  Gene Ontology: Mol. function=protein serine/threonine kinase activity; Biological process=protein amino acid phosphorylation
  Homolog annotation: Hit_ID=Q1SJP6; Match level="QueryCoverage=42%, HitCoverage=19%, E-value=3e-18, Identity=58%"; Hit description =Protein kinase
RSPATSEPLGPQALTLNGICRTPALYLSLCNDWVTDAAALSQDADGMLSEDLLKRQSAEDPDGSFYTGDDPDVSFYNGDDLDRSFYNGDDPDRSFYDRDDTDYIEGSDDGPPRKSSEDIVQLRTQNGFACREISVKETKKVFRSEDENGNKMVNQYVHLGKIGSGSYGKVVLYRNIKDGKLYAIK

SEQ ID NO: 66636 - protein, 145 aa, Zea mays
  Coding DNA Sequence Number=SeqID_24857
MNRLNASRTTKNRIREDMNIKQRTGQLTQTKETDDEAEKCQWSRNQEPQPLPAARPRATKRRTHIRNHQASRDDSAKMTSQPPLQERPHMTKHGHPSFASNKVDGTEAPSKPGLTESQERLSPITNVVVAARPSEPLDTSVGTEV

SEQ ID NO: 66637 - protein, 108 aa, Zea mays
  Coding DNA Sequence Number=SeqID_24858
MAAGGARLGREHGDGAGFHGEEGEDAIAAGRAPCWPPSGRRQGVSWSRPARGRRRKRVAAEKFRAVGVQNNQVQRERVRIYRHEVGLWFLSGPIGLGWAGPKRQIGPR

SEQ ID NO: 66638 - protein, 146 aa, Zea mays
  Coding DNA Sequence Number=SeqID_24859
MAMEEMELLRRPWTWSSSRSAQGARARKGTSGGKRSSTIAAGGARLGREHGDGADFHGEVGEDAMAAGRAPCWPLSGRRQGVGWSRPARGRRRKRVAAQKFRGVGVQNNQVQRERVRIYRHEVGLWFLSGPIGLGWAGPKRQIGPR

SEQ ID NO: 66639 - protein, 110 aa, Zea mays
  Coding DNA Sequence Number=SeqID_24860
MRVVWDALGQVRASFPRLFLRAKGVGLDDDDDDDDGSINDVSNYGFWYFLYEEIVSLHIWGLYRPAAQVIAECIALRAGINLLNMFNYIVTQLITRGDMVLRLQDCSILI

SEQ ID NO: 66640 - protein, 75 aa, Zea mays
  Coding DNA Sequence Number=SeqID_24861
MAITFNTMITFNAGEIFHFVSIPCIADQGENYSEKSENIPETSTRCINMFQTTFALRNTMQRKKRRKVKKGEGNT

SEQ ID NO: 66641 - protein, 118 aa, Zea mays
  Coding DNA Sequence Number=SeqID_24862
  Subcellular localization annotation: CTP_CleavageSite=56; ConfidenceScore=5.55e-01
MLPVHLLQARFSPLLSQKARRPTMNRQASRRGHRVRHVRLGSLLRLRVRLFGLLVRCLEDFNWYPRGRSRPHNKMMLSHADTGPAERENSLQADAIADCLEFIKRSYLPAGDQQPDCC

SEQ ID NO: 66642 - protein, 164 aa, Zea mays
  Coding DNA Sequence Number=SeqID_24863
  Homolog annotation: Hit_ID=Q658I1; Match level="QueryCoverage=38%, HitCoverage=45%, E-value=1e-24, Identity=81%"; Hit description =Ribosomal protein L29 protein-like
MASTWFCCVRKCAVVGSQIPWKFVLDLGTSCSLNAAFDAVSLACSFPLEEHTTISEGHPKILVAVQKPSSCDLTIDATKKRGTQLPSSNPNPFDRRQSPHPSSPLPTRPHQCSTPQPGGGSSTTSSRAEPQRANRRDGIARQEERWATSAIGAKFSEQYNGAYN

SEQ ID NO: 66643 - protein, 96 aa, Zea mays
  Coding DNA Sequence Number=SeqID_24864
MLSLSRAIGRRLFSSAEAASTAAVRTAQNPLEEFFEVERSTEEGKPPPHYDGRRSQPIEAMFGQFLIRGDWKGSKEVEGDFYLYDVDLSALLPPDV

SEQ ID NO: 66644 - protein, 328 aa, Zea mays
  Coding DNA Sequence Number=SeqID_24865
  Gene Ontology: Mol. function=nucleic acid binding; Cellular component= intracellular; Biological process=DNA integration
  Homolog annotation: Hit_ID=Q7XBC6; Match level="QueryCoverage=100%, HitCoverage=18%, E-value=1e-132, Identity=76%"; Hit description =Putative copia-type pol polyprotein
MSGDHAKKEMETGEKPTTSHGSTSSEESRTKRREKKKSSSNKGKEKKSSSHEKKEKSSSHKPHRSEDKPKRMRKVVYYETDTSSTSTSGSDAPSVTSKRQERDKDYDEDEVAQIEHFNSQATTILLASLSREEYNKVQGLKSAKEVWDVLKTAHEGDELTKITKRETIEGELGRFRLRKGEQPQHMYNRLKTLVNQVRNLGSKKWDDHEVVKVILRSLIFLNPTQVQLIRGNPRYTKMTPEEVIGNFVSFECMIEGSRKINELDDPSTSEAQPVAFKATEERKEESTPSRQPIDASKLDNEEMALVIKSFRQILKQRRGKDYKSRSKK

SEQ ID NO: 66645 - protein, 629 aa, Zea mays
  Coding DNA Sequence Number=SeqID_24866
  Gene Ontology: Mol. function=RNA-directed DNA polymerase activity; Cellular component=intracellular; Biological process=RNA-dependent DNA replication
  Homolog annotation: Hit_ID=UPI00004C1733; Match level="QueryCoverage =99%, HitCoverage=42%, E-value=0.0, Identity=78%"; Hit description =UPI00004C1733 related cluster
  Pfam annotation: Domain name=RnaseH; Domain location=312-439; Score =2.1; E_value=3.7e-05; Accession=PF00075.14; Description=RNase H
MPFGLRNAGATYQRCMNHVFGEHICRTVEAYVDDIVVKMRKASDLLSDLGVTFRCLKAKGVKLNPEKCVFGVPRGMLLGFIVSERGIEANPEKITAITSMGPIKDLKGVQRVMGCLAALRRFISRLGERGLPLYRLLRKAERFTCTPEAEEALGNLKALLTKAPILVPPAVGEALLVYVAATTQVVSAAIVVERQEEGHALPVQRPVYFVSEVLSETKIRYPQVQKLLYAVILTRRKLRHYFESHPVTVVSSFPLGEIIQCREASSRIAKWAVEIMGETISFAPRKAIKSQVLANFVAEWVDTQLPTAPIQPELCTMFFDGSLMKTGAGAGLLFISPLGKHLRYVLRLHFPASNNAAEYEALVNGLRIAIELGVRRLDARGDSQLVIDQVMKNSHCRDPKMEAYCDEVRRLEDKFYGLELNHIARRYNETADELAKIASGRTTVPPDVFSRDLHQPSVKIDDTPEPEAPSAQSEVPSVQPEVPSAQPEAPSARPEAPSARPETPSVQPEVPSASEGEGTAHRGGAKRGPRLIETGRPRTCNISTKESYPSTEPRLGGWRDAPSRSSCWAMRRSSTTAAPQASSSDASPSPKKAPGGYTHLLVAIDKFSKWIEVRPLNSIRSEQAVVIVA

SEQ ID NO: 66646 - protein, 91 aa, Zea mays
  Coding DNA Sequence Number=SeqID_24867
MARGTRRLQGAASVELGRSLGADVEPGALRLARRSRGRGGSLGGCVDAQGARSAAGHRARLGRAAARGCALGWGTLGWGRGQYLFLKWIDI

SEQ ID NO: 66647 - protein, 376 aa, Zea mays
  Coding DNA Sequence Number=SeqID_24868
  Gene Ontology: Mol. function=metal ion binding; Cellular component =integral to membrane
  Homolog annotation: Hit_ID=Q4JHE0; Match level="QueryCoverage=81%, HitCoverage=68%, E-value=1e-98, Identity=60%"; Hit description=XB3 -related protein
  Pfam annotation: Domain name=Ank; Domain location=120-152; Score =37.2; E_value=5.8e-08; Accession=PF00023.20; Description=Ankyrin repeat
  Pfam annotation: Domain name=Ank; Domain location=164-196; Score =27.3; E_value=5.3e-05; Accession=PF00023.20; Description=Ankyrin repeat
  Pfam annotation: Domain name=Ank; Domain location=28-62; Score=1.5; E_ value=19; Accession=PF00023.20; Description=Ankyrin repeat
  Pfam annotation: Domain name=Ank; Domain location=79-112; Score=21.3; E_value=0.0034; Accession=PF00023.20; Description=Ankyrin repeat
  Pfam annotation: Domain name=zf-C3HC4; Domain location=272-320; Score= 10.1; E_value=0.014; Accession=PF00097.15; Description=Zinc finger, C3HC4 type (RING finger)
  Pfam module annotation: Pfam domain module=Ank::Ank::Ank::Ank::zf -C3HC4; Domain location=120-152::164-196::28-62::79-112::272-320
MPFVCSGIDSSTCVEIAALLLENGADVNGRNIYGQACRFGHWEVVQTLLLFRCNCKCNRPTGDGGYLFRFKVSKADSLSGRTALHVAAAGGHVRCARLLLAGAGSGRSKLVNRAASGGGGGVTALHLAALHGHADCVHLLVDERADVAARTLPCAAPPMASVGAGSAPLHYAAAGGEVKCCQILVSRGADRAAVNCNGWLPVDVARTWGCHWLEHVLSPKSLLPIPRFPPSAYLSSPLASVITLARDCGLALNMSSLPMDTMDGGADDGDACAVCLERPCNVAAEVCGHELCVKCALDLCSVIRSYDAPGIAGTIPCPLCRSGIASFRRRAAAAEAEPGANAGDRQASSSPHKKRSTESDQDGLPLVCAPPAVMSS

SEQ ID NO: 66648 - protein, 712 aa, Zea mays
  Coding DNA Sequence Number=SeqID_24869
  Gene Ontology: Mol. function=RNA-directed DNA polymerase activity; Cellular component=intracellular; Biological process=RNA-dependent DNA replication
  Homolog annotation: Hit_ID=UPI00004C1731; Match level="QueryCoverage =94%, HitCoverage=52%, E-value=0.0, Identity=78%"; Hit description =UPI00004C1731 related cluster
  Pfam annotation: Domain name=RnaseH; Domain location=301-407; Score= -28.4; E_value=0.026; Accession=PF00075.14; Description=RNase H
  Pfam annotation: Domain name=rve; Domain location=408-583; Score =89.8; E_value=8.3e-24; Accession=PF00665.16; Description=Integrase core domain
  Pfam module annotation: Pfam domain module=RnaseH::rve; Domain location=301-407::408-583
MPFGLRNAGATYQRCMNHVFGEHIGRTVEAYVDDIVVKTRKASDLLSDLEVTFRCLKAKGVKLNPEKCVFGVPRGMLLGFIVSERGIEANPEKIAAITSMGPIKDLKGVQRVMGCLAALSRFISRLGERGLPLYRLLRKAECFAWTPEAEEALGNLKALLTNVPILVPPAAGEALLIYVAATTQVVSAAIVVERREEGHALPVQRPVYFISEVLSETKIRYPQIQKLLYAVILTRQKLRQYFESHPIIQSREASGRIAKWAVEIMGETISFAPRKAIKSQVLADFVAEWVDTQLPTTPIQPELWTMFFDGLLMKTGAGAGLLFISPLRKHLRYVLRLHFPASNNVAEYEALLVIDQVMKNSHCRDPKMEAYCDEVRRLEDKFYGLELNHIARRYNETADELAKIASRRTTVPLDVFSRDLHQPSVKTDDTPEPEAPSAQSEKAPGGYTHLLVTIDKFSKWIEVRPLNSIRSEQAVAFFTNIIHRFRVPNSIITDNGTQFTGRKFLDFCEDHHIRVDWAAVAHPMTNGQVERANGMILQGLKPQIYNDLNKFGKWWMKELPSVVWSLRTTPNRATGFTPFFLVYGAEAILPTDFEYGSPRTRAYADQSNRANREDSLDQLEEARDMALLHSARYQQSLRRYHARGVRSRDLQVGDLVLRLRQDARGRHKLTPPWEGPFVIAKILKPGTYKLANSQGEVYSNAWNIQQLRRFYP

SEQ ID NO: 66649 - protein, 57 aa, Zea mays
  Coding DNA Sequence Number=SeqID_24870
MVSGALYAKAMSPGRERGIDGDGTLQDMVDGVTWPTTLPPGWTVEWDAAPTGEEQEE

SEQ ID NO: 66650 - protein, 134 aa, Zea mays
  Coding DNA Sequence Number=SeqID_24871
MGTLCMLGTEVAEPIIRRMPPPCSSGLAKIDLLPLLLWFEQTTPELTLFYNRDGEDIDKIRLPIAIPFDCLESNIEGHLTGDLGGNGEFMWPSSLGMEDLIYLGKDVLKELRHKKNFVMNIFFPAEGPRYEDIV

SEQ ID NO: 66651 - protein, 116 aa, Zea mays
  Coding DNA Sequence Number=SeqID_24872
MADHAAPMRRCSLRRAWSFLVRKLLPASRGAPLHHALLLPIPDLARALALVGSCTSQAWMPSDLVSRRSLTRVSVGVVEFWFDRLVVDLAGVVEPVEPRSSLLDLVEPRIPDVGQI

SEQ ID NO: 66652 - protein, 235 aa, Zea mays
  Coding DNA Sequence Number=SeqID_24873
  Homolog annotation: Hit_ID=Q6QP51; Match level="QueryCoverage=78%, HitCoverage=98%, E-value=1e-19, Identity=43%"; Hit description =Putative growth-regulating factor 1
MQVACNRTKGAHPFDFDASSMEAQAHTSWTGKGDTPKGILLREGSGPRAPLLIRGSKAGPSEGFNSRLRALGLRAHYWSEVRRLAHRKGSTAASGHSGSTPTTDQGFVGWPPKGSDSRLRARRARDDPGYVRYITKAQATLPRVRLTAAKSSLGRHRKLRLAQPLGSAPISASEDGLRLARPQGSDSAMTQKTTDSASPDHRARTQPRPQKTVSASPDLGLEPTASQGGPSLPYP

SEQ ID NO: 66653 - protein, 47 aa, Zea mays
  Coding DNA Sequence Number=SeqID_24874
MNRLSSFGDQEIKLFEFYEAEDSEHLFGKEGVEADLQEFQDFDEFED

SEQ ID NO: 66654 - protein, 119 aa, Zea mays
  Coding DNA Sequence Number=SeqID_24875
MDLAILSGHHVFSTPLSLSAQGQLASLPVVTYADVGVAGHAGGPHLRGEAECVVLSAGPRQRIDEHGLRELGPAGRFVEHLQHQLDAVGLGLGIRERHGDKHGPTLEEDATTGRCEGFG

SEQ ID NO: 66655 - protein, 451 aa, Zea mays
  Coding DNA Sequence Number=SeqID_24876
  Homolog annotation: Hit_ID=Q2R244; Match level="QueryCoverage=89%, HitCoverage=98%, E-value=1e-133, Identity=58%"; Hit description=F -box domain containing protein, expressed
  Pfam annotation: Domain name=DUF295; Domain location=358-415; Score =63.8; E_value=5.6e-16; Accession=PF03478.8; Description=Protein of unknown function (DUF295)
  Pfam annotation: Domain name=F-box; Domain location=40-86; Score =22.1; E_value=0.002; Accession=PF00646.23; Description=F-box domain
  Pfam module annotation: Pfam domain module=DUF295::F-box; Domain location=358-415::40-86
MEKLRFILSKFSSNPSDLKLMDKYEASEFNTLFDPNTMEKTAEDLSFDVLWLIFANLELPDLVRAGSVCSIWRDIYTSLCNSGSYNPQHTPCLLYTSESAGTKAACLYSLAEKKTYTLTLPDPPLCSRYIFGSSYGWIVTADERSELHIVNPITGDQIALPSVTTIDQVKPIFSDIGVVCGYEHSGYSGVWEVSDIPSIFDLSELRDHLFHKVFLSSDPSAGDYFMVLIHNPHCQLSFARAGDDKWTWLPQGDSYDDCLFNGQLLYACTQLGEIHEFDLGTPTITHKIFLGRVKDLYDEKIYMVQASCGQMLQIWRSDDTIEEGDNEDEYDPDFGPDLPWHSTSMIKVYKLEPTSKKLVEISSLGANVLFLGHNLSLCLHAEEHPQLKANHIYFADDEPYTYFKSKRRDIGVFDLERNCSEKIVSPQLWSNWPAPVWLVPNPRRIGLSLCK

SEQ ID NO: 66656 - protein, 53 aa, Zea mays
  Coding DNA Sequence Number=SeqID_24877
MEKPRQWYYLADLQRESRGIVQVRVDVHGSVENHRVCGRTVPNNRRRKGEVRV

SEQ ID NO: 66657 - protein, 237 aa, Zea mays
  Coding DNA Sequence Number=SeqID_24878
  Gene Ontology: Mol. function=transferase activity; Biological process= biosynthetic process
  Homolog annotation: Hit_ID=Q10QW6; Match level="QueryCoverage=71%, HitCoverage=41%, E-value=2e-67, Identity=69%"; Hit description =Glycosyl transferase, group 1 family protein, expressed
  Subcellular localization annotation: CTP_CleavageSite=49; ConfidenceScore=5.14e-01
MDKLTKLVLRPQYLVQTVADRQFPSQTLSQLLVSRRHTGRQPFVSIQIKCNKEVLQSDRNTFVRRCLIFLRFEKYFRQMADGAFCVTKAMQHELDQNWGIRLGNSICSAMGNAKCILVEEVWEDMNITVFASKIEGEVFLKSNRPSLVSSTSRTPDEDFSILLEAVLMYDRRVAAALGEDDSTDEEQLWIDIKNAKQFVYPRLLFIVTGKGPDRKKYEDQIKRLKLRRVALRTMWLA

SEQ ID NO: 66658 - protein, 73 aa, Zea mays
  Coding DNA Sequence Number=SeqID_24879
  Homolog annotation: Hit_ID=Q9LSZ7; Match level="QueryCoverage=54%, HitCoverage=8%, E-value=9e-09, Identity=77%"; Hit description =Similarity to polyA polymerase
MAHRTVWCATGQCPGRILMEMNYMLAYGSTEASLRLLWRFVHLEHLLPFQVIALDINLPMKQSFHILHEQSLQ

SEQ ID NO: 66659 - protein, 58 aa, Zea mays
  Coding DNA Sequence Number=SeqID_24880
MVEAHRQFRVRAYPFMLVDLDRRIEIVRARGNQGHFESGTQVVDPAVVIAYRFAMSRI

SEQ ID NO: 66660 - protein, 418 aa, Zea mays
  Coding DNA Sequence Number=SeqID_24881
  Homolog annotation: Hit_ID=Q2R244; Match level="QueryCoverage=97%, HitCoverage=98%, E-value=1e-127, Identity=58%"; Hit description=F -box domain containing protein, expressed
  Pfam annotation: Domain name=DUF295; Domain location=325-382; Score =73.0; E_value=9.6e-19; Accession=PF03478.8; Description=Protein of unknown function (DUF295)
  Pfam annotation: Domain name=F-box; Domain location=3-49; Score=22.1; E_value=0.002; Accession=PF00646.23; Description=F-box domain
  Pfam module annotation: Pfam domain module=DUF295::F-box; Domain location=325-382::3-49
MEKTAEDLSFDVLWLIFANLELPDLVRAGSVCSIWRDIYTSLCNSGSYNPQHTPCLLYTSESASARAACLYSLAEKKTYTLTLPDPPLRSRYIFGSSYGWIATADERSELHIVNPITGDQIALPSVITIEWVKPIFSDTGAICGYEHSGYFGVWITSGIPSIFDLSELRDYLFYKVFLSSDPSAGEYFVVLIHNPHCQLSFARAGDDRWTLLPHGDSYEDCLFNGRLLYACTRFGEIHEFDLGTPAMTHKILLDRVKDIYDEKIYIVQASCGELLQIWRYDDTLEEGDGEEEYHSDSELALDRELPWYSTSMIKVHKVEPASKKLVEISSLGANALFLGHNQSLCLHAEEHPQLKANHVYFADDEPYIAFKNKRRDIGVFDLEHNRSEKIVSPQLWSNWPAPVWLVPNLKRISLSLCK

SEQ ID NO: 66661 - protein, 60 aa, Zea mays
  Coding DNA Sequence Number=SeqID_24882
MDFVAEVFGGEGSYKHVVVKRGRETPELIGSLRWSMHGCIAAVFVRNYQNVRYQQNTQGN

SEQ ID NO: 66662 - protein, 36 aa, Zea mays
  Coding DNA Sequence Number=SeqID_24883
MAAVDDMAVGMTRSIGGRSRDVNCNVIETNETLTML

SEQ ID NO: 66663 - protein, 105 aa, Zea mays
  Coding DNA Sequence Number=SeqID_24884
MGELVFGRNPCAQIRGGRARAGRRHGEGQGAGNRKQGDRSDHGQESTPVRLGGGASGAQGRRGGASMSLTTRSDVGRSRQEGDRDRRRQVRKLGKNPFEGFRPQA

SEQ ID NO: 66664 - protein, 73 aa, Zea mays
  Coding DNA Sequence Number=SeqID_24885
MFGLHVVMRMMVLVLTLVMVVRIATTAQEKMKLWKETCRSSKITTSSRRGLAATPSRLPMKAACIYISFPHFD

SEQ ID NO: 66665 - protein, 135 aa, Zea mays
  Coding DNA Sequence Number=SeqID_24886
MDYKAILGQCCEMTVRDMLLPVGGVAGSLLLDEKLFLLVWDDKHATMMSWWEEEEQDREKQDPQALALTRARHNHGCHIACAGCFYLSYSSFLSNVRIIKFVELHAHLNGGAECFLNVKESPIGNGSCKELHVPN

SEQ ID NO: 66666 - protein, 73 aa, Zea mays
  Coding DNA Sequence Number=SeqID_24887
  Subcellular localization annotation: CTP_CleavageSite=5; ConfidenceScore=5.11e-01
MSHPVGSHSTTSLGALTVTETLYSIEKVFSFLPFFYFGSLGFLPPASVAPFVVTQQLPIPSRRGDPAAPEKAN

SEQ ID NO: 66667 - protein, 99 aa, Zea mays
  Coding DNA Sequence Number=SeqID_24888
MGRRQVCIVRTHGPGRQCVSSPIYGLSNEGTSEPPSTTMGPERRDPVGLRDRSGTPEPHASGGKGGNPLTLASAGPCAAAAGSGWSTCIWSDGWAGGAS

SEQ ID NO: 66668 - protein, 391 aa, Zea mays
  Coding DNA Sequence Number=SeqID_24889
  Gene Ontology: Mol. function=protein binding; Cellular component =nucleus; Biological process=inner cell mass cell differentiation
  Homolog annotation: Hit_ID=Q2R1T0; Match level="QueryCoverage=68%, HitCoverage=96%, E-value=1e-132, Identity=53%"; Hit description =Notchless, putative, expressed
  Pfam annotation: Domain name=NLE; Domain location=127-188; Score =78.5; E_value=2.2e-20; Accession=PF08154.2; Description=NLE (NUC135) domain
  Pfam annotation: Domain name=WD40; Domain location=215-253; Score =48.7; E_value=2e-11; Accession=PF00400.22; Description=WD domain, G -beta repeat
  Pfam annotation: Domain name=WD40; Domain location=274-312; Score =37.8; E_value=3.8e-08; Accession=PF00400.22; Description=WD domain, G-beta repeat
  Pfam annotation: Domain name=WD40; Domain location=317-360; Score =33.3; E_value=8.6e-07; Accession=PF00400.22; Description=WD domain, G-beta repeat
  Pfam module annotation: Pfam domain module=NLE::WD40::WD40::WD40; Domain location=127-188::215-253::274-312::317-360
MEAGWRESRAVYRCAGGVFGDLCGGGGRRASVGVRRNAAATKTEVGWGRDENGCRGDGGGMARIAGVRGVRVWLSASFAEGAGRGEGSSAEAACTAAAALFLFYCLILDFASGSAKFRRMDIDASASVMCQLLSPEGDPLGSALYLPQNVGPPQLQEIVNQLLHNEEKLPYAFYVGDEELSVHLGAYMRQKNANVEVTLRIVCQPQALFRIRPVNRCSATIAGHTEAVIAVSFSPDGKSLASGSGDTTVRFWDLSTQTPLFTCKGSNLSLAMNIEHTIRDERHKNWVLCIAWSPDGKHLVSGSKSGELILWDPKTGNQLGTPLMGHRKWITAVSWEPVHLQSPCRRFVSASKDGDARIWDITTRKCVISLTGHTSSVTCVKWGGDGLIYTG

SEQ ID NO: 66669 - protein, 117 aa, Zea mays
  Coding DNA Sequence Number=SeqID_24890
  Gene Ontology: Mol. function=kinase activity; Cellular component =cellulose and pectin-containing cell wall; Biological process =metabolic process
  Homolog annotation: Hit_ID=Q5QLT2; Match level="QueryCoverage=77%, HitCoverage=13%, E-value=4e-41, Identity=84%"; Hit description =Putative early-responsive to dehydration stress protein
  Pfam annotation: Domain name=DUF248; Domain location=2-117; Score= -324.6; E_value=3.3e-06; Accession=PF03141.7; Description=Putative methyltransferase
MALTLQRNFVKYFDRQIMPTIQWGRRTRTVLDVGCGVASFGGYLLDRNAITMSFAPKDEHEAQIQFALERGIPAFIAVIGTQKLLFPDNVFDVVHCARCRVHWWKTIVRIKLDSSDI

SEQ ID NO: 66670 - protein, 91 aa, Zea mays
  Coding DNA Sequence Number=SeqID_24891
MAGSKYSSDGSTSNIIETWETLSAEEQLKFEEHQEQLIKEAKTKFLANFKVDRNNKVVQQQATNLASLRPTTATPRKCIRMVCESRLEEGE

SEQ ID NO: 66671 - protein, 94 aa, Zea mays
  Coding DNA Sequence Number=SeqID_24892
  Homolog annotation: Hit_ID=UPI000034F09A; Match level="QueryCoverage =53%, HitCoverage=10%, E-value=1e-07, Identity=49%"; Hit description =antiporter/ drug transporter/ transporter
MPVPVLGWGLPGAATAYDATSWAIAVEQVAYVTRHCSDPSWDALQGLWPFAKLSIRSRRSAARLRSSRTSPRTGSSVSSSLAPTTLSLINTIIS

SEQ ID NO: 66672 - protein, 163 aa, Zea mays
  Coding DNA Sequence Number=SeqID_24893
MNPSSNAPHPHALSPKLQAPGDTIVYLSPAYLLSSRLDIQAAIAKDTELRALHGSLLQSGSATAYNVGAYASASRSPRRHLPTVDRVVDVSARQAGPPGHDDQGVPRVCPRYNIYDNGDEMMEANVQTKLVLCEFVMSNPSDTTQPLSNTLPSSFKTSARGAT

SEQ ID NO: 66673 - protein, 171 aa, Zea mays
  Coding DNA Sequence Number=SeqID_24894
MSTSREVDTELQKNELDASNFTNQLINLGNNGYEDLLLSVRATAGTASSYKLCCPDTGTRIRDTPIPRYTISQKNTDTAIRNEFPIRLGNISRKYSYLIRYPTPNAKIRVPKSDTKRRFQRAEALSRRVMLRFGAYITLPKLRDRIGGAAAVGSRCPKAARGATAGAARRR

SEQ ID NO: 66674 - protein, 503 aa, Zea mays
  Coding DNA Sequence Number=SeqID_24895
  Gene Ontology: Mol. function=RNA-directed DNA polymerase activity; Cellular component=mitochondrion; Biological process=RNA-dependent DNA replication
  Homolog annotation: Hit_ID=UPI00004C1731; Match level="QueryCoverage =99%, HitCoverage=44%, E-value=1e-102, Identity=86%"; Hit description= UPI00004C1731 related cluster
  Pfam annotation: Domain name=rve; Domain location=303-451; Score =88.7; E_value=1.8e-23; Accession=PF00665.16; Description=Integrase core domain
MLLGFIVSERGIEANPEKIAAITSMGPIKDLKGIQRVTGCLAALSRFISRLGERGLPLYRLLRKAECFTWTPEAEEALGNLKALLTNAPILVPPAAEEALLIYVAATTQVVSAAIVVERREERHALPVQRPVYFISEVLSETKIRYPQIQKLLYAVILTRRKLRHYFESHPLVINQVMKNSHCRDPKMEAYCDEVRRLEDKFYGLELNHIARRYNETADELAKIASGRTTVPRTSSSETCINPPSRPTTRPSPRRPRHSPRHPRLSSRYPRLSPKHPRHSPRYPRLGPRHPWLNPRHPQLSPRYPRPPRKAPGGYTHLLVAIDKFSKWIEVRPLNNIRSEQAVASFTNVIHRFGVPNSIITDNGTQFTGRKFLDFCEDHHIRVDWAAVAHPMTNGQVERANGMILQGLKPRIYNNLNKFGKRWMKELPSVVWSLRTTPSRATGFTTFFLVYGAEAILPTDLEYSSPRTRAYADQSNQVNREDSLDQLEEEARDMALLHSARYQ

SEQ ID NO: 66675 - protein, 195 aa, Zea mays
  Coding DNA Sequence Number=SeqID_24896
  Homolog annotation: Hit_ID=Q6H5H5; Match level="QueryCoverage=81%, HitCoverage=40%, E-value=9e-45, Identity=62%"; Hit description=Emsy N terminus domain-containing protein-like
MPVTWRRQKWVRSRCGLIGAAAGDYTGRPMASECRQRMAPEDIRWDGEEPDLNLIGRGAPVHGMKSSSRGGPMSGTGRDRGPQKNSFKKDYPSQNGIGKKSVDYIEILHTETLIKEVERVFSSANPDPLEMERAKKALKEHEQSLIDAIARLAEASDDDRVRSLEYNRGWRNQHGGRYADDMTMDGHMAGDADAM

SEQ ID NO: 66676 - protein, 73 aa, Zea mays
  Coding DNA Sequence Number=SeqID_24897
MAAGLGELAMEETPACRSEGGELELGDAMERGRELGIGSRGTDPTTARRVRRRGLVEEHRARLKEEEAGRAGR

SEQ ID NO: 66677 - protein, 83 aa, Zea mays
  Coding DNA Sequence Number=SeqID_24898
MAYPSCLSAPMEPWFRSKNQDETRQTLARSRRTEGEGNVGGDDAAEEGRAAGTGVREAREGDNGEILIVKEPKRFILLVNFST

SEQ ID NO: 66678 - protein, 97 aa, Zea mays
  Coding DNA Sequence Number=SeqID_24899
MPMDAARSVMVRGTASSGEQFVEGQPPIMLGKLPYTTSGLEGATRTTQLGPNSGLHAAPRQRPNWIFLPSPNERVCHGAGSLVSGFGFIRGEGHRPK

SEQ ID NO: 66679 - protein, 93 aa, Zea mays
  Coding DNA Sequence Number=SeqID_24900
  Homolog annotation: Hit_ID=Q5JLE4; Match level="QueryCoverage=44%, HitCoverage=38%, E-value=5e-09, Identity=66%"; Hit description =Putative transcription factor IIA small subunit
  Pfam annotation: Domain name=TFIIA_gamma_C; Domain location=5-53; Score=32.6; E_value=1.4e-06; Accession=PF02751.5; Description =Transcription initiation factor IIA, gamma subunit, beta-barrel domain
MAFLITVQGHLHTNRVCDNVWTFILTDATFKSAEIQETPSKMGLNAVVAACYVFSSTCLCARSPLLLRTVAQWPTRVKVVRHQIALSHCPWLR

SEQ ID NO: 66680 - protein, 203 aa, Zea mays
  Coding DNA Sequence Number=SeqID_24901
  Gene Ontology: Mol. function=transferase activity; Cellular component= mitochondrial inner membrane; Biological process=transport
  Homolog annotation: Hit_ID=UPI0000D55940; Match level="QueryCoverage =71%, HitCoverage=70%, E-value=5e-13, Identity=32%"; Hit description =PREDICTED: similar to asparagine-linked glycosylation 14 homolog
  Pfam annotation: Domain name=Alg14; Domain location=1-153; Score =165.2; E_value=1.7e-46; Accession=PF08660.1; Description =Oligosaccharide biosynthesis protein Alg14 l
MMNIVTTLQKDRFTPRYYVAALTDNMSLQKAQVYEQSLIQVESNGTKAGESAHFMQIYRSREVGQSYVTSIATTLLATLHAMWLVIRIRPQVVLGLGWSSIFYIESIARVKKLSLSGLLLYKLRIADQFFVQWPQLQHEYPRACYAVFSISEIQNTVAIYAHFDKCKLLKSGGACCRTGDVSVMNKCMRAVTAYGLKIYLINF

SEQ ID NO: 66681 - protein, 58 aa, Zea mays
  Coding DNA Sequence Number=SeqID_24902
MDTRLLGWSGAEQPLSLVLYRTLVSNLDTSSLHPKGAKYQGGVDNITHSRDRWYTDKC

SEQ ID NO: 66682 - protein, 527 aa, Zea mays
  Coding DNA Sequence Number=SeqID_24903
  Gene Ontology: Mol. function=protein binding; Cellular component=DNA replication preinitiation complex; Biological process=regulation of progression through cell cycle
  Homolog annotation: Hit_ID=Q2QYC3; Match level="QueryCoverage=88%, HitCoverage=78%, E-value=0.0, Identity=92%"; Hit description=CDC45 -like protein, expressed
  Pfam annotation: Domain name=CDC45; Domain location=25-527; Score= -0.2; E_value=2.8e-14; Accession=PF02724.5; Description=CDC45-like protein
MVRELRVDSFYARLRAAAGSSSSSPLLILPSAADADSLCAVRGAPRLLRRPGPALPRPRQLGARTGTCARCCPPPPPPSSSTPTAPSTSTTSARATTASSSYSPPTTSAPRISPTTSTSPRSPTPPTSPPTPATTTTSAGGPGSDASDSEDSDDDEDDAGGGRRKRRRLSDDDGDDPAPNTDPGKPSGCLMYDLAHAMRKNTNELLWLACVALTDQFVHDRITNERYQAAVMELEQHINGSGNLDPSGAGSVVTLKDGTKIRAPEASRIAYEDEPRLMLLREWSLFDSMLCSSYVATKLKTWSDNGLKKLKLLLARMGFPLADCQKNFQYMSMEVKRKMRDEFDRFLPEYGLTEFYYRSFLRVHGYRSKVSAADVVYGVTALLESLDSQSKDTKESSAAEQFWVAYSALSLSNADQLRKGMLSAIEIQRAILRQGSSAITKTGFIRSAKKFRWVKLDDPVDTNKLCHPQALTKFCFFLLDALKERGARMKPLICACLAKEPEKVLVVGVCGKPRLGAVQGNAFGNAF

SEQ ID NO: 66683 - protein, 63 aa, Zea mays
  Coding DNA Sequence Number=SeqID_24904
MERRELFVRARGDRRIWNLGLGLGGKPKTARQKFGFGDGRKQTREFSVSRFWAGFPPLMGPSP

SEQ ID NO: 66684 - protein, 152 aa, Zea mays
  Coding DNA Sequence Number=SeqID_24905
  Homolog annotation: Hit_ID=Q6QP51; Match level="QueryCoverage=32%, HitCoverage=22%, E-value=1e-15, Identity=79%"; Hit description =Putative growth-regulating factor 1
  Subcellular localization annotation: CTP_CleavageSite=48; ConfidenceScore=5.14e-01
MQAACNRNKGAHPFDFDASSMGPRPTRHVTGAPVTMCEKLHFHLRQYRAFSTAEPVPRLEATLRMAQQCQPSTLVMGQDRERGCSERDPSPRRKRAPSPPTDQRFEGWPLGRVRQPPQSTRAPRPLLVRDSKAGPSEGFDSRLRPLGLRAHY

SEQ ID NO: 66685 - protein, 47 aa, Zea mays
  Coding DNA Sequence Number=SeqID_24906
  Subcellular localization annotation: CTP_CleavageSite=30; ConfidenceScore=5.04e-01
MELAQVSPQRSTPNVITRATSPVTAGLAVLASSAPSLLLSASCLPVL

SEQ ID NO: 66686 - protein, 257 aa, Zea mays
  Coding DNA Sequence Number=SeqID_24907
  Subcellular localization annotation: CTP_CleavageSite=77; ConfidenceScore=5.39e-01
SAPSASAHGHGARPRRAARGLGPVLARHPPLRQLGPDSPSLSPVPARPAMARAPTPAPPCARWRSVRRDPGGPLPPPAMAPARRGPAMALAHPDALGPAPVLGPVPACAPAPARSPRPAPARPPLPAHVRGGVALLLARSCASAAWRGRPPAQPRCLLAARSASRARLGPRRVRDLFTARQRGLARTRARVLRAVLWRGSPCPRLRSPKNSQEKPLSNSYLVEASDNENDGFGIDSGNGEDEAVEGDFQEFQDYDEF

SEQ ID NO: 66687 - protein, 409 aa, Zea mays
  Coding DNA Sequence Number=SeqID_24908
  Gene Ontology: Mol. function=nucleotidyltransferase activity; Biological process=biosynthetic process
  Homolog annotation: Hit_ID=Q1F7U0; Match level="QueryCoverage=73%, HitCoverage=76%, E-value=2e-47, Identity=38%"; Hit description =Expressed protein
  Pfam annotation: Domain name=CTP_transf_2; Domain location=215-362; Score=-3.8; E_value=0.002; Accession=PF01467.16; Description =Cytidylyltransferase
MESWVRAVVEAIHSSRSQTVIYLAGGASQALGWLLSVPGASGTVLEVVVPYSRASMAQLLGKMPLQFTSKQAAEDMALAAYNRALKLSGPGLQVMGVGFTGSLASSRPKHGDHRFYVSTWTHNCLRTSHVTLSKGLRSREEEDKVSSYFLLKAIADTCRVSATIQSDIHKSEIPEEIMEQFDEDQELQQVINGQVCMKVYNFAAPAESNLNRKIILPGSFNPLHDGHLRLLEAAVSMCDDGLPFFEISAINADKPPLSIAEIKRRVEQFRKAGKNVIISNQPYFYKKAELFPGSAFIIGADTAARLVNVQDIHGNLSLAGIEQYLQLWKVLDNFQLRNSNDKHVWRLSSNGLFSSKSAYRAFFIGVETFEPLKRIWKSWAAPKCKVFIWLAINNKCWTTDRLQKRFGLS

SEQ ID NO: 66688 - protein, 105 aa, Zea mays
  Coding DNA Sequence Number=SeqID_24909
  Pfam annotation: Domain name=Ribosomal_L30_N; Domain location=15-83; Score=-0.5; E_value=0.004; Accession=PF08079.2; Description =Ribosomal L30 N-terminal domain
MHMSSEAVKVTMLESMFRRRKREEQWAVKKKKAMPEKKKSIERRKLIFSRAKRWVVGLLLRLKQTIGQAKDGCKKSFEVPSAWRRSRRLRNLKPGVKKKTCKIKD

SEQ ID NO: 66689 - protein, 120 aa, Zea mays
  Coding DNA Sequence Number=SeqID_24910
  Subcellular localization annotation: CTP_CleavageSite=18; ConfidenceScore=5.01e-01
MAFTAPYTIPKYPKHCISSTRLSRSLDIPNSTVCPRQQLHYQSTTVESLTVFSDDDAFDDADGADDDEEEGDITYSMQRRTICFTWDISPVTRNGKHVIVCSRKEVKVSVSQSVKFFPHG

SEQ ID NO: 66690 - protein, 647 aa, Zea mays
  Coding DNA Sequence Number=SeqID_24911
  Gene Ontology: Mol. function=protein kinase activity; Cellular component=ubiquinol-cytochrome-c reductase complex; Biological process=protein amino acid phosphorylation
  Homolog annotation: Hit_ID=Q5N7S6; Match level="QueryCoverage=94%, HitCoverage=93%, E-value=1e-178, Identity=52%"; Hit description =Receptor serine/threonine kinase PR5K-like
  Pfam annotation: Domain name=Pkinase; Domain location=373-643; Score =128.1; E_value=2.5e-35; Accession=PF00069.15; Description=Protein kinase domain
  Pfam annotation: Domain name=Pkinase_Tyr; Domain location=368-643; Score=91.3; E_value=3e-24; Accession=PF07714.7; Description=Protein tyrosine kinase
  Pfam module annotation: Pfam domain module=Pkinase::Pkinase_Tyr; Domain location=373-643::368-643
MAAHLPRLPVLLLVLLAAHVVSTSTRAEPLLPSTYNVSMCSESFWCGGVEIRYPFYLANATADYSGSYYSCGYTDLSVSCELEVEGPPTTWTPTIRLGGDNYTVKNILYDYHTISLADSDVLGGGECPVVRHNVSFDETWLHNASAFNNLTFFFGCHWGPRDTLPEFAGYNISCDGFSTPTISGGGSFVFKTEDLDEQEEQDFASHCDEVFSVPVGSEALRATDTFSLSRYGYGELLRQGFELEWNRTSEDQCGQCEGSSSGGRCAYNQKREFLGCLCSGGKAGNPFCKPSMSPVCEYRAAPACLLLTPNGAVVAVAFLCLVILTCFLACRHGSLPFKSKNKPGTRIESFLQKNESSIHPKRYTYADVKRMTKSFAVKLGQGGFGAVYKGSLHGRQVAVKMLKDTQGDGEEFMNEVASISRTSHVNVVTLLGFCLQGSKRALIYEYMPNGSLERYAFTGDMNSENLLSWERLFDIAIGTARGLEYLHRGCNTRIVHFDIKPHNILLDQDFCPKISDFGLAKLCLNKESAISIVGARGTIGYIAPEVYSKQFGTISSKSDVYSYGMMVLEMVGARDRNTSADSDHSSQYFPQWLYEHLDDYCVGASEINGETTELVRKMIVVGLWCIQVIPTDRPTMTRVVEMLEGST

SEQ ID NO: 66691 - protein, 140 aa, Zea mays
  Coding DNA Sequence Number=SeqID_24912
  Subcellular localization annotation: CTP_CleavageSite=61; ConfidenceScore=5.31e-01
MRLCAVQLLLLLAVFATMVCGVLRTALPSDPLALRTRVFRASGVHPRRGRAAPSGSVGRRRAGAGAQRTLGCVGTSALGMARGLHTLVTFVSRDSGARFVAPLSFATNAMRCDASMRRSPVLCGLVHEQEARLGLSMSSR

SEQ ID NO: 66692 - protein, 329 aa, Zea mays
  Coding DNA Sequence Number=SeqID_24913
  Gene Ontology: Mol. function=protein serine/threonine kinase activity; Cellular component=cell surface; Biological process =protein amino acid phosphorylation
  Homolog annotation: Hit_ID=Q5N7S6; Match level="QueryCoverage=92%, HitCoverage=33%, E-value=1e-135, Identity=76%"; Hit description =Receptor serine/threonine kinase PR5K-like
  Pfam annotation: Domain name=Pkinase; Domain location=60-326; Score =119.0; E_value=1.3e-32; Accession=PF00069.15; Description=Protein kinase domain
  Pfam annotation: Domain name=Pkinase_Tyr; Domain location=55-306; Score=53.4; E_value=9.6e-16; Accession=PF07714.7; Description =Protein tyrosine kinase
  Pfam module annotation: Pfam domain module=Pkinase::Pkinase_Tyr; Domain location=60-326::55-306
AVAVAFLCLVILTSFLACRYGLLPFKSKNKPGTRIESFLQKNESIHPKRYTYADVKRMTKSFAVKLGQGGFGAVYKGSLHDGRQVAVKMLKDTQGDGEEFMNEVASISRTSHVNVVTLLGFCLQGSKRALIYEYMPNGSLERYAFTGDMNSENLLTWERLFDIAIGTARGLEYLHRGCNTRIVHFDIKPHNILLDQDFCPKISDFGLAKLCLNKESAISIVGARGTIGYIAPEVYSKQFGTISSKSDVYSYGMMVLEMVGARDRNTSADSDHSSQYFPQWLYEHLDDYCVGASEINGETTELVRKMIVVTQMQNICGDECPLTSYNVSV

SEQ ID NO: 66693 - protein, 288 aa, Zea mays
  Coding DNA Sequence Number=SeqID_24914
  Gene Ontology: Cellular component=endoplasmic reticulum
  Homolog annotation: Hit_ID=Q5N7S1; Match level="QueryCoverage=63%, HitCoverage=42%, E-value=6e-15, Identity=76%"; Hit description=24 kDa seed maturation protein-like
  Pfam annotation: Domain name=Reticulon; Domain location=51-164; Score= -46.1; E_value=0.0011; Accession=PF02453.8; Description=Reticulon
MATDEGWAAAAAIAGASRFISFSVEGEATPSACVMARFTHGPPLLSVPLAAADILLWKDRNLSAGLLAGATLVWYLFEVVEYSIVPLVCQIAILAMLVVFIWSNAAPLLNIMICESHSHVSSSLLFREEPMEDRREETTADWGEEPTGDGRKPSAPSDPSDPEMVVEERDRERSPGYGTVGEGHTPGRATHKGGGYAPGRGVTVTPWNLAPPRIPEVIISEHAFRQIAQIIHYKLAHTVSALYDIACGKDLKKFLLVMGSKQPLRICRRRLVSVYPFPRPHPCGSLWH

SEQ ID NO: 66694 - protein, 103 aa, Zea mays
  Coding DNA Sequence Number=SeqID_24915
  Subcellular localization annotation: CTP_CleavageSite=33; ConfidenceScore=5.13e-01
MALTAVGTSNLNGTHAVNAGVKPCIAPLHSPVTSNDRSSQDANAEGVLQGSNEVVTKFKLIHDAKCIFLPNPHDASIRRACAGEGRRMTTPARGWRAALHIRM

SEQ ID NO: 66695 - protein, 84 aa, Zea mays
  Coding DNA Sequence Number=SeqID_24916
MSKKFNTLKQDIRRLIEDLSKLTLLEAFLFRRSSKTPLQRASSSGWKSFPYDDDIRDEEYQLRLIMVIKTDDDASRKGKRILSP

SEQ ID NO: 66696 - protein, 172 aa, Zea mays
  Coding DNA Sequence Number=SeqID_24917
MPGTSRRAKARARRELGTVELQAQVPVHLLLRMGKEEERRVELRRGVGTWSEAVPALGEDEQGNRRPLAAPETWACAAGGSAATRVWAHDARAGRSAERWGLRPGGWATCSRGDVRDVLGERAVQAWQRWTVDRGARGWGAGLRWAAARLGRAGGGMRMGRAGLGGGSGLVE

SEQ ID NO: 66697 - protein, 133 aa, Zea mays
  Coding DNA Sequence Number=SeqID_24918
MNLNLVWNLKIGQRRIENKMGRKCERKTKMCEYVHAYAIHHERLIDHHHAIQDVLCMCLPARRWYYIVLLLLSMRCVWKRRNRDSSSSVGHDMDRTCIHVDADAREAHRRSSSQTRANAVQNESITRLRMNGN

SEQ ID NO: 66698 - protein, 110 aa, Zea mays
  Coding DNA Sequence Number=SeqID_24919
  Gene Ontology: Cellular component=extracellular region; Biological process=sexual reproduction
  Homolog annotation: Hit_ID=Q94KS7; Match level="QueryCoverage=86%, HitCoverage=35%, E-value=3e-31, Identity=66%"; Hit description=Beta -expansin 7 precursor
MASSSFSKVLALGALIFSLLVTYGSCARPANFTASDFTADPNWEAARATWYGAPTGAGPDDDGGACGFKNVNLPPFSAMTSCGNQPLFKDGKGCGSCYQVARSIGQTKTL

SEQ ID NO: 66699 - protein, 184 aa, Zea mays
  Coding DNA Sequence Number=SeqID_24920
MAKCLTASAATLHALATASRSLAWEIDSMDLLCYMALVVIPLLVRTALAMEWDTFDVVADIAWEVESLRSPMVSVPDRAEHNFVAGATHARSVGSANDTTLVAHKGGQMEATSDEARLEIVCVVPFAENGHLVSMIELGKILHARVLTVIIAIFKPPYNTSVTRPFLVGFFVAKCCTLRRGWVP

SEQ ID NO: 66700 - protein, 187 aa, Zea mays
  Coding DNA Sequence Number=SeqID_24921
MGVGKGRLAFLLLRHFHISCCCLLFDLLFFLPLHHGQEQERWWFFASFRRQAQARADSPSEDFSDSEYSEEEFSSESEGSPAPASPPASSDDSDDSQRIAAEVWTYIRAIERVRFEGSDESEYSSDEENSSNPSEEGSGGDGGDGDDDGGDGDGGGDSGKGGDDSGNGGNGGGGSKGSSKGSNKASG

SEQ ID NO: 66701 - protein, 197 aa, Zea mays
  Coding DNA Sequence Number=SeqID_24922
MAAKGRRATGASLVVTSRSATTEGEPAGRGHHDEAEEGEAALPAQQRQVWGLDRVWCHVVAGRGRVGLAWVRGGSGDRSRWPVRPRRRVQGGSGGVTRSRGGFAPPSPPAAHGRGRRDPGGCSPAEIDQALKITGEFTPLVTKFPDRWDRGTGTWCLVALLHHSTKDNSDRSGVLVVSPKPEKILYQKSLANTQLDT

SEQ ID NO: 66702 - protein, 156 aa, Zea mays
  Coding DNA Sequence Number=SeqID_24923
  Gene Ontology: Mol. function=transferase activity
  Homolog annotation: Hit_ID=Q2R3Q9; Match level="QueryCoverage=78%, HitCoverage=51%, E-value=8e-30, Identity=75%"; Hit description =Transferase family protein, putative, expressed
MNHCMFDDIGAMEFVNSWTKTARGVTELTVSPLPRGDFGNGIVLTNALATTRGLLSAPMSRATGLVQEAVRMVTDDYMRSAMDYFEATWARPSLACTLLITTWSHLEFHDADFRVGRARRVGPSHAAREGGHPLPCSAREQVKRPNPLGLKCDTIY

SEQ ID NO: 66703 - protein, 193 aa, Zea mays
  Coding DNA Sequence Number=SeqID_24924
MRCGNPSGCGGGDGRQSRARHDACKIATASCGVPTHFRSAHVPCPCASGKKQQQGPNRSSAAGRSAPAGLLLLTILLKDGRPGWLPSLGFAFLSFNCGMAVYRSWDDPYAVAFVLAAYAALVLLFRCLHLLERRRDQRLKLAVWGLSTLLTLMFSYKIAAVMPPWAQLLVWGMGILTVVAGFYAFFVARPEEP

SEQ ID NO: 66704 - protein, 65 aa, Zea mays
  Coding DNA Sequence Number=SeqID_24925
MSSNMQWFMLRHIIDLKSHFKRAGESKALPKYFQISSLIAIRHTYSAFLLSHPNLWKALYVADVY

SEQ ID NO: 66705 - protein, 225 aa, Zea mays
  Coding DNA Sequence Number=SeqID_24926
  Gene Ontology: Mol. function=oxidoreductase activity
  Homolog annotation: Hit_ID=Q69XJ5; Match level="QueryCoverage=97%, HitCoverage=64%, E-value=2e-58, Identity=49%"; Hit description =Putative allyl alcohol dehydrogenase
MEVVNRYVATRHHIEGAPTEADFEVKEETARWAPDSGEVLVRNLYLSIDPYQLNRMKRSSASHLAVDGILPGQVADADAAGFPLSHHISVLGTSGMTAYGGLFEVGKPVKGEKVFVSAASGSVGSLVGQFAKLAGCYVVGCAGTTAKPNVLDRHTNGNGPVAQVFQKQEPSLHLIISDARIAPKLNQLVMNPQVDLLKDKLGFDDAFNYKEEPDLKSALKRSSLT

SEQ ID NO: 66706 - protein, 44 aa, Zea mays
  Coding DNA Sequence Number=SeqID_24927
MAGFGHPTTRLCFGVPWTDIEAITVTRTRVDGAERLRVLGRRRQ

SEQ ID NO: 66707 - protein, 356 aa, Zea mays
  Coding DNA Sequence Number=SeqID_24928
  Homolog annotation: Hit_ID=Q9FJJ1; Match level="QueryCoverage=87%, HitCoverage=68%, E-value=3e-34, Identity=34%"; Hit description =Arabidopsis thaliana genomic DNA, chromosome 5, TAC clone:K19B1
  Subcellular localization annotation: CTP_CleavageSite=26; ConfidenceScore=5.37e-01
WTHKPQQAPHAGVRVIPRGHAGSAARASKLRYPLRSASKGKAAVVSPAADAPPTISAPRRAKPSSDVSKSMCLDLSVKDNSAKPPRRHSIQTKPGASPRPTPSGTVTPVSGVRSKRSESQGRFDTPTSEVSMSISRRKFSTLSSISYWMTQIRLAEAASKHSVSLGFFKLALESECEPLDRMREELKSYVARHGLATELEDPVKDILQVYDILDDFEKLKISAEPSQQPKKSDKAARTATNASPNGNLKPRSLNSDATESKEAVKKESIQKVNPGARIRGSCNRNPVKNTTAKEAVAKNTGKETKKGAKGQQEVSEAPSALPNQESADVVKEITHEDKENMGDIEMAVDVAVAQDI

SEQ ID NO: 66708 - protein, 67 aa, Zea mays
  Coding DNA Sequence Number=SeqID_24929
MATDPRVVAREFEMVRWRSEKEKSTIARDWWLSPWRAHRRSPEMCNMSYCDVNYRAPKSALFNGFQT

SEQ ID NO: 66709 - protein, 113 aa, Zea mays
  Coding DNA Sequence Number=SeqID_24930
MGQPVPPRRLTGVSAVWVLVGAPVDLHHRAAFVALTGNEPAMAEDPAGGAGHSWRLQIEALLERLESRPLTKTLVLRTSRTTTITAYEQATVETKVQQVEIAEQELIEGKLCP

SEQ ID NO: 66710 - protein, 239 aa, Zea mays
  Coding DNA Sequence Number=SeqID_24931
  Homolog annotation: Hit_ID=Q6QP54; Match level="QueryCoverage=37%, HitCoverage=29%, E-value=3e-18, Identity=59%"; Hit description =Putative kinase
MALPVDVAGLRPRLGDVEAPPKPRSSLSSMAEVESEPLGRARRRSSAEARTVSEPWGRAKRSSSSSGAEPESEPWLESKPWVGRSGVRRLPGLSPSPSPGSGGAEFAVFRVLARVRALGRAERSSPSSGAEPESEPWVGRSGVRRLPGLSPSPSPGSGGAEFAVFRVLAQVRALGQAERSSPSSGAEPESEPWVGRSGVRRLPGLSPSPSPGSGGTSYGAFGRAFALNAPATWSVGAAI

SEQ ID NO: 66711 - protein, 794 aa, Zea mays
  Coding DNA Sequence Number=SeqID_24932
  Gene Ontology: Mol. function=nucleic acid binding
  Homolog annotation: Hit_ID=Q8LJR0; Match level="QueryCoverage=51%, HitCoverage=84%, E-value=0.0, Identity=94%"; Hit description=Water -stress protein
  Pfam annotation: Domain name=RRM_1; Domain location=214-285; Score =83.0; E_value=9.4e-22; Accession=PF00076.12; Description=RNA recognition motif. (a.k.a. RRM, RBD, or
  Pfam annotation: Domain name=RRM_1; Domain location=294-371; Score =10.5; E_value=0.015; Accession=PF00076.12; Description=RNA recognition motif. (a.k.a. RRM, RBD, or
  Pfam annotation: Domain name=RRM_1; Domain location=391-462; Score =42.5; E_value=1.5e-09; Accession=PF00076.12; Description=RNA recognition motif. (a.k.a. RRM, RBD, or
  Pfam annotation: Domain name=RRM_2; Domain location=291-389; Score =2.2; E_value=0.073; Accession=PF04059.3; Description=RNA recognition motif 2
  Pfam module annotation: Pfam domain module=RRM_1::RRM_1::RRM_1::RRM _2; Domain location=214-285::294-371::391-462::291-389
MPPKSKRGGAAAARKAPVTRGRMGRAQAAAEAAPVVEEMEAPAEEVKAAEEVPKVVEAPKVVEDSKVVEEPKPSPLLPQQPVVVVEKDSDIAANGANQGEDDRAAKEISEEEDKGERLEFEDEPEYEEEAAVDYDEKDLEQYEEQYEDGDEEVEYTEDVVEVETDMVDEELDEGGDDVEGEGYENADEDHHVDGDDEEHNEMVKEHRKRKEFEIFVGGLDKDATENDLMKVFGEVGEITEVRLMMNPVTKKNKGFAFLRYATVEQARRAVSELKNPLVRGKQCGVAPSHDNDTLFVGNICKTWTKEHLKDKLKSYGVESFDDLLLAEDTNNPGMNRGYALLEFSTRPEAMDAFRTLQKRDVVFGVDRSAKVSFADSYPQVDDEIMAQVRTVFLDGLPPSWDEDRVKKYLKKYGAIEKVELARNMPAAKRKDFGFVTFDTHDNAVACTEGMSNSEIGEGEHKAKVRARLSRPLQRPPRMKHGLRGNFRVGHGAPRGGRLPYSRAPPPRRPPPRLIRPAVSRLPSIRSHPLKRPIDIRDRRPAMSMPDRARRFPPERSYDRRPPAPVYLKRSPRREYGRRDELPPPRSRATTDYITRVPVDRRPSLRDDYSPRGSGYSDLGPRSAPRLSDRRAYADDSYGEKFDRPLVAYREGRGRDYDTISGSKRPYADMDDVPRYQEIGVRQSKARLDYDIGGSSARYGDTYSERSGRPHAGYSSSRSIPVHDSAYGSSRHGMSYGGSASSADAGGMYPPSYSGSYGSRGSDVGGSSYSSLYSGRNLGTSSGGYYGGSGSSSYY

SEQ ID NO: 66712 - protein, 145 aa, Zea mays
  Coding DNA Sequence Number=SeqID_24933
  Homolog annotation: Hit_ID=Q6QP51; Match level="QueryCoverage=28%, HitCoverage=18%, E-value=4e-10, Identity=75%"; Hit description =Putative growth-regulating factor 1
MRHATGAPNASCMQLHRHLRHHRASSIAEPIPRLEATQRTTQQRQPGAAGPRKGDTPKRILPREGTRLRASLLIRGSKAGPPEGFDSRLRSRGPYTHYWSEVRRPAPQKGSTAASGYSGSAPITDQGFKGWPPKGSQPPQTPSEG

SEQ ID NO: 66713 - protein, 139 aa, Zea mays
  Coding DNA Sequence Number=SeqID_24934
MEKANELSRRLMNDLFLMECPLGLIYPTVGHYIGGVFLRVKGIAGLCFPPASSDDSDDSQGIAAEVWTYIWSVEHAGLEGSNESEVSSDEENSSRSSEEGSGGDSDDECDSGGGGGDDGSKGGGGGSGGSRSESCLEGG

SEQ ID NO: 66714 - protein, 82 aa, Zea mays
  Coding DNA Sequence Number=SeqID_24935
MGFVLVVSLPFIFLSILLGFGCYFLGKHRGREEMQTGVGAQIYSTPLPPPSVVGASSPPPQPFHSKKEVYECDTRFAKKGSW

SEQ ID NO: 66715 - protein, 211 aa, Zea mays
  Coding DNA Sequence Number=SeqID_24936
MADSGALVVTEARQQHPLSQIAASETHRLLLKQWVKEEDLLARRVVLWEACLNGARKEIAFLYCAFFAFHSASVLLLFLSSSSSSSAGLAAATTACRRSWILCLVSLLSSLAMIWALWYKSDTEAILERVLAREREDALHLARCVSELKRKGLRFDLLKEVDTVRRAKNLRAEAKGAADRPRRWQTRDLAVFAFFAVACGVLMLTRFLLCN

SEQ ID NO: 66716 - protein, 173 aa, Zea mays
  Coding DNA Sequence Number=SeqID_24937
  Gene Ontology: Mol. function=hydrolase activity; Biological process =metabolic process
  Homolog annotation: Hit_ID=Q69Y17; Match level="QueryCoverage=54%, HitCoverage=29%, E-value=7e-32, Identity=71%"; Hit description =Putative PrMC3
  Pfam annotation: Domain name=Abhydrolase_3; Domain location=38-172; Score=-32.8; E_value=1.5e-05; Accession=PF07859.3; Description =alphabeta hydrolase fold
MWRTLCVCYTSAAGESCTDAEVSLFIRMATISPAPPDRSRHSYLNDLVARSGAIGMSVYYRLAPEHKLPAAYDDAWAALRWAVTLGEDPWLLEHADLSRVFLAGCNADANIAHDTAVRVSAAGVAIRVCCCKIPPHPDSRKKLFVSKASPEGSKPETSKKLDVYAMAAEGSRK

SEQ ID NO: 66717 - protein, 268 aa, Zea mays
  Coding DNA Sequence Number=SeqID_24938
  Gene Ontology: Mol. function=acyl-CoA binding; Cellular component =intracellular; Biological process=lipid transport
  Homolog annotation: Hit_ID=Q10B01; Match level="QueryCoverage=82%, HitCoverage=41%, E-value=3e-96, Identity=69%"; Hit description=Acyl -CoA binding family protein, putative, expressed
  Pfam annotation: Domain name=Kelch_1; Domain location=56-101; Score =22.1; E_value=0.0021; Accession=PF01344.15; Description=Kelch motif
MLVLCFRGTPPSPRRYKLVSPWNSKFIVLSLTTKFYRWKLQMEWSRPKQQGPTPSPRAGHAGGTVGENWYIVGGGNNKSGVSETLVLNMSTLTWSVVSTVEGRVPLASEGMTLVHSNYGGYDYLISFGGYNGRYNNEVYTLKLSLKSDSQSTLKEETLSDTTSRVIEPEAEIYQDGKIREISVDNADSDLELQAVRGQLASEQSRCFKLEVDVAELRQKLQSMDALEKEVELLRRQRAASEQAAMDAKQRQSSGGMWGWLAGSPTPAV

SEQ ID NO: 66718 - protein, 63 aa, Zea mays
  Coding DNA Sequence Number=SeqID_24939
MKPPQLPAGERSWAHEVKQALREKLRRSYGAASATPAAESDGSTSNPGKLPECAVFSYLVLES

SEQ ID NO: 66719 - protein, 1102 aa, Zea mays
  Coding DNA Sequence Number=SeqID_24940
  Gene Ontology: Mol. function=protein translocase activity; Cellular component=chloroplast outer membrane; Biological process =intracellular protein transport
  Homolog annotation: Hit_ID=Q1RV20; Match level="QueryCoverage=73%, HitCoverage=63%, E-value=1e-165, Identity=39%"; Hit description=AAA ATPase; AIG1
  Pfam annotation: Domain name=AIG1; Domain location=472-658; Score =6.0; E_value=4.5e-11; Accession=PF04548.7; Description=AIG1 family
  Pfam annotation: Domain name=Dynamin_N; Domain location=474-599; Score=-40.8; E_value=0.034; Accession=PF00350.13; Description =Dynamin family
  Pfam annotation: Domain name=MMR_HSR1; Domain location=472-590; Score= 38.0; E_value=3.2e-08; Accession=PF01926.13; Description=GTPase of unknown function
  Pfam annotation: Domain name=Miro; Domain location=473-565; Score= -9.9; E_value=0.051; Accession=PF08477.3; Description=Miro-like protein
  Pfam annotation: Domain name=Septin; Domain location=468-647; Score= -193.5; E_value=0.054; Accession=PF00735.9; Description=Septin
  Pfam module annotation: Pfam domain module=AIG1::Dynamin_N::MMR _HSR1::Miro::Septin; Domain location=472-658::474-599::472-590::473 -565::468-647
  Subcellular localization annotation: CTP_CleavageSite=47; ConfidenceScore=5.22e-01
MALLVRARLSPLDDDDDASTASSLSSAASSPPLSPAAASTPLPLYARAAVLVAPRIAAQLSSTEEDVSESFDDTTSSGEDVDLPEEVSNGFFFSVARVPPTPTSEDPILVPGGGVAGIAAAEAPEAEGGDGLGAAEEPLEGGIFVSAKNGLDGVEGSLGGSFLKSGSCIGAHNGGEAAASGDSVIVSDGTVLNEEDDKQGEQAVNDAASGPLLMPVAGVDGLVIVDALEGMLDREAAESLPIPSATATGTEGEEAAAELRSDAVGSAAKLDASPEYAATGDVISDAMQVLDSVDDEADGDHEGSDDLTSMPISSSDYAVELAKELENNVPTSIGARFVADDSDDAEINGDDEYEEEMNGKENELFDHTALIELLRAASSSPEQGKAKVFPVESSEPRDLPPTLASNARMNVASAPVPQAIADPEKQMTDEEKKIYGKVDMARIKYMRLVHRLGYDTNHQREAEGTENLEFSCNVLVLGKTGVGKSATINSIFGEDKSKTNAFLPATSSVKEINGVVNGVKFHVVDTPGLGTSAEDEKSNRKMLNAVKKYMKRCPPDIILYVDRLDTPREEANSLSLLRCITSVLGLSIWPRTIITLTHSGAASPEGPNGLEVNYDMVVSRRTHAIQQSIRQITNDPQIQNPVALVENHHLCRRNAEGEKMLPDGLIWRRLLLLLCFSLKMIAEIDSLSTRRASSASFLGRLLQVPPIPYFLSSLLKSREHPKRSNDHNVVSVDSDFYLDELLNGDQEDEDDYDQLPPFKPLSKSQVAKLSKEQQILYFDESDYRTKLLQKKQLKEQLKGFKEMKKKEGDDNDILSDDDHPDDGYDTDRYPMPEWTLPSSFDSDDPVYRYRCPVSTPNLLVRAVYNPDGWDHDFGFDGVSVQHSHDVANKYPASLWVQVNKDKREFTIHLDSSMSVKHGDYASSLAGFDIQTIMNQLSYTLRGETKFKNFKKNITTGGLSMTFLGNSMVAGAKLEDKLLVGNRLTLSGNTGAVSMRGDAAYGVIMEATLREKSYPVGQGVATLGASLVKWHKEWTMAANLDSHVSVGRSSNMSVHVDVNNKLTGRVSIKANTSEQLNIALLGTCSVIMYVWNKMHPSADPNAE

SEQ ID NO: 66720 - protein, 147 aa, Zea mays
  Coding DNA Sequence Number=SeqID_24941
  Gene Ontology: Mol. function=triacylglycerol lipase activity; Biological process=lipid metabolic process
  Homolog annotation: Hit_ID=Q850Z2; Match level="QueryCoverage=57%, HitCoverage=14%, E-value=2e-11, Identity=43%"; Hit description =Putative heat-shock protein
MPAAVAAAAAAASAGAVLLCLLLNCRPQPALDAQRESERGEDEASPLLSGSGPGSDREEEEPWPDRAPVTCCEAAAVAARTARRTWELTVGRWGLHGLAFGIKRHMKRQVVLDSLQSSDFVRSLYYDTALAVPLAYPVLEPESRSAV

SEQ ID NO: 66721 - protein, 910 aa, Zea mays
  Coding DNA Sequence Number=SeqID_24942
  Homolog annotation: Hit_ID=Q10MM5; Match level="QueryCoverage=98%, HitCoverage=96%, E-value=3e-44, Identity=31%"; Hit description =Expressed protein
MDVEKPASKGHGFFALFDWGKKSKKRLFVGSTGSSPNLKNAADGKDIDDSTPSTRSNLILEDTPSLKESTEHSCSSSVIDEEAHSRRSPTVVARLMGLDSMPAASSTESNPMPLTVQPPFQTNSHEDFIGRSYVGSPLKTPGSPIDRFKVEALPPRLAKRTVSVAQYKLLSPMKNPNNISSRNAADIMEAASRIIRPGVENISPYRVHDVGSAIAARAYNPGELIGAQQRSQKLNEALRKCDGPASFRPPSGKPSDGRLRGSEGTSTSRISQANVCVPVGPKVKSGDRLDTARAMHAQEKRGMRKGGRKLETLKNPENNMAKRSGLNRQKDSNQIGTTSSSSVLMPNSRKQNATATKHKVNSNPATPSRQRSNIHQINAHPRKVRVASTFAGNSSQGSRKVDLQPNAHANVRNNSVPKAIPKPRRLQDRRAYSDTSQSSDSINSERSQRRIRHNIVIDEQSSFSTNKKKVSTEIVSFTFTSPVDKSLHGIHFPNHSVFTSPVDKSLHGIHFPNHSVEKQFLGNLNTVSTSSNTSNTKLDVIDGDFLGLLLEQKLRELTSGVRSPYTKTTKGVQAHHTSTAWEDMASACETSSIASTDYDRESLQSFNDGKATLPQTDLASRSLQSSQPVKKYDHDVTDQAEPPERLGRGPLFTWEASISTETCSSSESWRSAKGKQSSLEFAVTGTRLFGSAEGGRTCDSTRSSKFLEADASSEYSDTASSITVATTEIPRSESNSSCHMDGRQDLQFIREILKASSPARHIFSYLERFGDSGVLDAHVLEELNGDIRLLGGEERKGYRLRRRLLFDCVNESLSARCAYYFNGGYGLWFTGTAVLQSLSAEGIHREMTGLQVGEEWMVDELVYREMSGPLGSWVDFKVESYQGGGDMAAELLGSLIDEVVADLLTTGSFS

SEQ ID NO: 66722 - protein, 125 aa, Zea mays
  Coding DNA Sequence Number=SeqID_24943
MYFSIWRLEREQQRETDVEENHRSNWLGLRLGIWQTGCVSTKIQNSLDQKLQLPIVGAEELTELCTKVADLGTVHLLKGLVLRTLDKVSCCYKGSCRAFSTIAIVEGVNQIVDVETILSTFGSKL

SEQ ID NO: 66723 - protein, 879 aa, Zea mays
  Coding DNA Sequence Number=SeqID_24944
  Gene Ontology: Mol. function=phosphotransferase activity, alcohol group as acceptor
  Homolog annotation: Hit_ID=Q69JJ2; Match level="QueryCoverage=70%, HitCoverage=96%, E-value=0.0, Identity=74%"; Hit description =Phosphatidylinositol 3-and 4-kinase family-like
  Pfam annotation: Domain name=PI3_PI4_kinase; Domain location=178-441; Score=251.9; E_value=1.3e-72; Accession=PF00454.17; Description =Phosphatidylinositol 3- and 4-kinase
  Pfam annotation: Domain name=ubiquitin; Domain location=54-118; Score= 6.7; E_value=0.054; Accession=PF00240.13; Description=Ubiquitin family
  Pfam module annotation: Pfam domain module=PI3_PI4_kinase::ubiquitin; Domain location=178-441::54-118
IQAAPFKSPMSRDLDCPVQTQMAVAVLDRSFSSEYPGGSRIEGRQLSWKRVFVQTDNGSVLGIELERGENVQTVKKKLQIALNVPTDESSLTFGDLVLNNDLSSIRNDSPLFLKRNQIHRSNSTPCLSPTGKNVLQRDRSGPIEILGCSSPSSRMKQLAKDVIKAIMNDVDPVAVNSGMGGAYYFKNIWGERVAIVKPTDEEPFAPNNPKGFVGKALGQPGLKRSVRVGETGFREVAAYLLDYGHFANVPPTMLVKITHTIFNVNDCVGCKSKVFCNKSEAVSKIASLQEFIPHDFDASDHGTSSFPVSAVHRIGILDIRIFNTDRHAGNLLVKKLGPGADNFGEQTELIPIDHGLCLPECLEDPYFEWIHWPQASVPFSEEELEYIARLDPVKDAEMLRMELPMIRDACLRVLVLSTVFLKEAAASGLCLSEIGDMMSRQFTAKEEEPSQLELLCMEARKWVEERESFLPNEAGVEDDDDDFTQFLIDGEDDYPDALEPSAFCKFGSMKASSRNPLSKLDERDEEDGDGTEEDDDDDILTGALPQRISSISKLSSSMKGLGFIGKPKPYRTCLRKGKATGRTKYTGKASEHQSGSRSANELLPPSASFVKLSDMSPKQWSAFLDKFQELLPEEKPPNPRYDERASVRALVCSSQAVKYSYCYCIAAPGTGWDLGRCYLNDGAWTVGLRDGAAARLVSCRHRGDIYKQHLIPAPTWAPKCKKGRVVTPPLGATGSMITTAAEGDAVALCWLSRAAVIAEQTTGSRDQRYSFSDCPAGQAAKLPSGAKISNKAFISSHLSSLRGVLGCPGGELNQRSAVVDRAVATSIQPVVVVHAGEDLRRRCIRAAAAAAGMPWCLERGMGYRALAPFTLEGNCGLAV

SEQ ID NO: 66724 - protein, 160 aa, Zea mays
  Coding DNA Sequence Number=SeqID_24945
MRCAGVLLPLLLLSLSAASTAEAHKERLGDAAAALSTGRRWLTGRKTLAAPGRDEVVEGAKKSTGANQEADAPDLRKLYMARVICLYCQAAISFQCKRSEGPVTHATFQAPRHAGGGGGGTDTSAPEILAGMDYNYRLDARRHRPINNGAPLVELAAGTP

SEQ ID NO: 66725 - protein, 98 aa, Zea mays
  Coding DNA Sequence Number=SeqID_24946
  Gene Ontology: Mol. function=protein dimerization activity; Cellular component=nucleus; Biological process=regulation of transcription, DNA-dependent
  Pfam annotation: Domain name=bZIP_1; Domain location=2-66; Score =24.3; E_value=0.00033; Accession=PF00170.11; Description=bZIP transcription factor
  Pfam annotation: Domain name=bZIP_2; Domain location=2-53; Score =16.2; E_value=0.016; Accession=PF07716.5; Description=Basic region leucine zipper
  Pfam module annotation: Pfam domain module=bZIP_1::bZIP_2; Domain location=2-66::2-53
MAEAERRRRRMVSNRESARRSRMRKQRQLTELCAQVVHLRGANRRRLDELNRALRGCSDMCCENAPAPEREDRSQYQARAPHPGAERRHAKLLLGAAT

SEQ ID NO: 66726 - protein, 149 aa, Zea mays
  Coding DNA Sequence Number=SeqID_24947
  Subcellular localization annotation: CTP_CleavageSite=88; ConfidenceScore=5.70e-01
MPSLLTEGAFTFTATIGITSCTTFSKSSSFALVLHALNYACSSSSSPPRPSCSSSPTRAWLASSARPQISSLPLPCRLVERVRTKAACANANKDCIEVDRAEASCGLGDGGASSAEEEHREQEQGRSFSFSSFDEEFIGSRLLGDDDDE

SEQ ID NO: 66727 - protein, 103 aa, Zea mays
  Coding DNA Sequence Number=SeqID_24948
MAEYQRRRGNSHAIAADSARWGHTHHPRITAMLQVFFPRQETQPRPMHKAAAIFFSLPSAYGSLGDWVFVEMVKGVRAVGFYRGRASPSGAAARSTAEFAGSD

SEQ ID NO: 66728 - protein, 468 aa, Zea mays
  Coding DNA Sequence Number=SeqID_24949
  Gene Ontology: Mol. function=transcription regulator activity; Cellular component=nucleus; Biological process=regulation of transcription
  Homolog annotation: Hit_ID=Q69JJ6; Match level="QueryCoverage=87%, HitCoverage=94%, E-value=1e-124, Identity=62%"; Hit description=TA1 protein-like
  Pfam annotation: Domain name=HLH; Domain location=256-306; Score =36.9; E_value=6.8e-08; Accession=PF00010.16; Description=Helix-loop -helix DNA-binding domain
MDMNESGETGMEQGNASSGAPVDWQTQFNAAAFSCAPQQVPMMDSAFASAGLWASTSQAMALSDVVGAMSAARGGGFLAPVPGFLPQGLGHFAVDSGFIERAARTSCFSGGGGGVMGASAAAFGAAGQTVNNAFSGSSEALLLDHQKKDVVGEKGEPELGRDDGVLSPEAAGGGDCSSKGTSDSKKREKAQRGERSSCFADSANESVHSMDKGEESSPATTTAGAGPGKSRGKGEKEVPESQKEDYIHIRARRGQATNSHSLAERLRREKISERMKLLQDLVPGCSKVTGKAVMLDEIINYVQSLQRQVEFLSMKLATVNPRLDLNIEGLLSKDLLRFPGAPSSSLGFPPEMMHPQLLQLSQPGRLVQGAAAAAAGMANPDVFRRIMQAQLSAKDDSGGASQMLPHGSFGGVARAAYPSSSSALALGSHDYLRSMSRASQQDARRAGVSDAATVVLCCAVLGAAALQF

SEQ ID NO: 66729 - protein, 128 aa, Zea mays
  Coding DNA Sequence Number=SeqID_24950
  Subcellular localization annotation: CTP_CleavageSite=43; ConfidenceScore=5.09e-01
MASASYAATHAAPPAPRSPPVRPPAPLGRADPDLPAYELAFASCARGRGLGTGAAGAFEQVEKRTRWMQMHAYEAFASTYAFKQRAIKFESNKPCSIENKISVNYLGKTKQTGRSMRVIMDNGTCSVG

SEQ ID NO: 66730 - protein, 196 aa, Zea mays
  Coding DNA Sequence Number=SeqID_24951
MDDVRASRGTERGEREIEGHATKDPGVRDRPTLPRVRLSGGRKQWLDPTAGGGRGEDALRTRGNEQGDGESRADNATSMAEQGHAPGKDVRRRGQGAGHGGATAMSELHGRKKLGKSRTAGSSGQAQTPGRAMIEPPKSLGPPTVILVQQTTDNPVDAPNHSTSLVYVSFTFPKSVSPVTQILRYIGGMNKRKPLQ

SEQ ID NO: 66731 - protein, 157 aa, Zea mays
  Coding DNA Sequence Number=SeqID_24952
MAAETELGETGNWRVVVANRWQDQVLGLGVDPTQQTVPSIYSGAKRWPVNLVETHGGRKEGMSHWRVLPWHSPAEGLRWLSRSCKLVVLYINYNSAIAITLNRAMNQTQNRALSSYNFTACVDSELEWPDSPTLDLIISKYFMAPRLNPYSKVVLLS

SEQ ID NO: 66732 - protein, 184 aa, Zea mays
  Coding DNA Sequence Number=SeqID_24953
  Gene Ontology: Mol. function=peptidase activity
  Homolog annotation: Hit_ID=Q6Z5N1; Match level="QueryCoverage=99%, HitCoverage=26%, E-value=1e-57, Identity=65%"; Hit description =Putative potyviral helper component protease-interacting protein 2
MNQMIEAWKEIPGAEEDECSSALPPASQSQRRCSLTGSASDGRYLAASLGSNSVPSATRKSILSVSRSSPPDVSTSVTITNSPSSIRNKKLSLPSYHKVCQANNCDYKVDIVVSLDATPMKVVTEEKLLKGRGVRDRLESRRTLFKGSKDRSAKLAAHKAGSQVVPYEGGGNLEEISEVEGGSE

SEQ ID NO: 66733 - protein, 229 aa, Zea mays
  Coding DNA Sequence Number=SeqID_24954
  Gene Ontology: Mol. function=hydrolase activity; Cellular component =nucleus; Biological process=metabolic process
  Homolog annotation: Hit_ID=Q67IZ5; Match level="QueryCoverage=86%, HitCoverage=51%, E-value=2e-35, Identity=40%"; Hit description =Putative PrMC3
  Pfam annotation: Domain name=Abhydrolase_3; Domain location=22-228; Score=63.3; E_value=7.8e-16; Accession=PF07859.3; Description =alphabeta hydrolase fold
  Subcellular localization annotation: CTP_CleavageSite=43; ConfidenceScore=5.18e-01
DATRASTTAPPPSATPLRPVRVRNPTASSLYHIYVASLAATVPAAVVSVDYCLAPEHHIPAAYDDAFAALKAVIVACRADGAEAEAEPWLAAHGDAFRIVLVGDSADGNMAHNVAIRPRKEGSIEGYDDMVSDVILLYPYFWGKEPLGVEPTDLGYRTMFDPTWEFICGGKFGLDHPYVNPMASSEELRQLGSRRVLVTTTDQCWFVERARAYIEGIKKCDWEGELEFY

SEQ ID NO: 66734 - protein, 196 aa, Zea mays
  Coding DNA Sequence Number=SeqID_24955
  Gene Ontology: Mol. function=peptidase activity
  Homolog annotation: Hit_ID=Q6Z5N1; Match level="QueryCoverage=66%, HitCoverage=20%, E-value=9e-22, Identity=46%"; Hit description =Putative potyviral helper component protease-interacting protein 2
MMENFGSKTVQIAMNAVDSSVCAALVDTARVAAAASASTSAVLRPLTDAHLHEQDQCTRLAAALATAAAVEASTVTVDLASYLHRLQPRLLKLLRSNAFKAKPALITLIGACAAMGTDAKVTASIPCLRDAIASDDCAARKAAAEALSALALEHTDLLTTYKSSCITFFEARMFDYTWPNGRPGPARPGHDQARHS

SEQ ID NO: 66735 - protein, 152 aa, Zea mays
  Coding DNA Sequence Number=SeqID_24956
  Subcellular localization annotation: CTP_CleavageSite=30; ConfidenceScore=5.24e-01
MAPTKPRTRTYNRGQGAVFGHSRPTVDDIRGSKSAGAARRASRRRNRGLLKSDLPRIQRFVATRERPRAGWKTADKAGPREVTDAETQGGICCAERDFSGAVAVIFSCLREEEATGCWGPHARVTGTRKRQAVTDARVRLVSAAWTRRWAAR

SEQ ID NO: 66736 - protein, 329 aa, Zea mays
  Coding DNA Sequence Number=SeqID_24957
  Homolog annotation: Hit_ID=Q9LK80; Match level="QueryCoverage=92%, HitCoverage=71%, E-value=1e-38, Identity=32%"; Hit description =Arabidopsis thaliana genomic DNA, chromosome 5, TAC clone:K23F3
MQWFGHFAVTGESTHRKGAKALSQFAFVNRDRCWEELEWKGKHGQSPAVVATKPHYFRDLDVLETVENFLEYVPDFWSSDELANSIKDGKLINPTMQCKELTFPCCWLEVLLSGHYDHISLDDLVFLNCVIAKGRQLWRLMNDEEQHEEWGQMEELLKGGNHLTDADHFALMKELVETELPGVLKWVGIQSWIIFCELSKECKSGDSCESFFSHNKIEFHKADDYSLVRNYGFSISHMPDIDVEDLTRSSHKRRKRNRRKRHRYESDEDKFDELLELGSSDGKNGVESQRGSWRLSTDGFSASWDIMHSGIAERCMRSRTTLFSWDAEG

SEQ ID NO: 66737 - protein, 106 aa, Zea mays
  Coding DNA Sequence Number=SeqID_24958
  Subcellular localization annotation: CTP_CleavageSite=66; ConfidenceScore=5.38e-01
MADSGVPTPKSGGQSWGGKGGNGAQVSYHSESQQPSDRPRPVARPALGLLRFSSPSRSLHQLGKNRSELAWEAMLTIGSHTVWMSWAHYYIAIDAFIFIIHKCTIK

SEQ ID NO: 66738 - protein, 69 aa, Zea mays
  Coding DNA Sequence Number=SeqID_24959
MAVVSRDDNESDSDWMVQKLARGRTREVYLNPSAIAPAGAIPNLQLNPSGFTHCTVLNNNSTISNIKNK

SEQ ID NO: 66739 - protein, 79 aa, Zea mays
  Coding DNA Sequence Number=SeqID_24960
MASKSLISWSSSSSCGVGLMAFLFGFGLLSEGDLLGDDVRAITIQREQYRGTVHLFIGNRKGEELVPPEEDYYDEFDEV

SEQ ID NO: 66740 - protein, 123 aa, Zea mays
  Coding DNA Sequence Number=SeqID_24961
MESKWERKKKRSREELLNAMDERTTGQARENVRVQGTNTNCSLLGKGTDVNGEQRAEPGDCLHTLLESVELTAMAHWFLGRPGFGTCSNSGLGFRANKGFKRVLTKHIRDSTMEARNVVVPNS

SEQ ID NO: 66741 - protein, 499 aa, Zea mays
  Coding DNA Sequence Number=SeqID_24962
  Gene Ontology: Mol. function=oxidoreductase activity, acting on the CH-OH group of donors, NAD or NADP as acceptor; Cellular component =mitochondrion; Biological process=isocitrate metabolic process
  Homolog annotation: Hit_ID=Q9XGU7; Match level="QueryCoverage=77%, HitCoverage=93%, E-value=0.0, Identity=91%"; Hit description=NADP -specific isocitrate dehydrogenase
  Pfam annotation: Domain name=Iso_dh; Domain location=7-395; Score =353.4; E_value=3.7e-103; Accession=PF00180.10; Description =Isocitrateisopropylmalate dehydrogenase
MAFEKIKVSNPIVEMDGDEMTRVFWQSIKDKLIFPFLDLDIKYYDLGILHRDATDDKVTVEAAEATLKYNVAIKCATITPDETRVKEFNLKHMWKSPNGTIRNIINGTVFREPIICKNVPRLVPGWTKPICIGRHAFGDQYRATDAVLKGPGKLKLVFEGKEEQIDLEVFNFTGAGGVALSMYNTDESIRAFAAASMTTAYEKKWPLYLSTKNTILKKYDGRFKDIFQEVYEADWKSKFEAAGIWYEHRLIDDMVAYALKSEGGYVWACKNYDGDVQSDFLAQGFGSLGLMTSVLVCPDGKTIEAEAAHGTVTRHFRVHQKGGETSTNSIASIFAWTRGLAHRAKLDDNARLLDFALKLEAACVGAVESGKMTKDLALLVHGSSNASEIAEGKETPRRARRRGRAKTTYQRARTMSGAQGAHPVGQTTPTTYESVGGGENRTRTDLRSREDQGAIQIEKVQDKVDDAAGRGVDHSTFGANKEGRDDKADAGATGTGTGA

SEQ ID NO: 66742 - protein, 196 aa, Zea mays
  Coding DNA Sequence Number=SeqID_24963
MTTPAAVTAFPAFHYPALEEFDIDAAAAVRLGLKDRRAHRVHKWPADLCWMAQRLGSLRLDAVKLVDEDGFGGFATAHDEAQHHREVVRPKLVGHEPDEAGGVAELCEQAHERGSERAHSSVMRSTTPHLPQASRCPRPHELPMPSSLSSMFISKTLMDAYTKTSRLKLVLQVLGEMTSRNVVSRTMLVASLVRAG

SEQ ID NO: 66743 - protein, 283 aa, Zea mays
  Coding DNA Sequence Number=SeqID_24964
MAGLGLGGINLNPITYGEEEIDPCTPCRYDQRWPQQAAGAGTGVPAHDHDRCFPPDRALHLLLIYESMVFCRCLSISHCFSQYILVGLAGPISSDVMWMKLSFGYIFPPRSGFLSAWLQNLLTSGLNISIVDTTIIIMSTILSIVFHEFGHAIAAARLYIPLIPAHSHNCRELNETGPEDIELLCKQSLSHNTMVAKPSDSLKLTIDYVKAIVREATLEASSGKREPLPPSVAASPEQQPSSAMEAEKNAAEELSFLKHATLGKYCLIVAKKKDEGSLARPVD

SEQ ID NO: 66744 - protein, 285 aa, Zea mays
  Coding DNA Sequence Number=SeqID_24965
  Gene Ontology: Mol. function=metalloendopeptidase activity; Cellular component=integral to membrane; Biological process=proteolysis
MASCLSEQVMEVPEISPMSEYLSTHDVILSVDGLKITRTDDWIKILNQGTTAKSRDPEFLEGSHRYVATSSTKGYCVPDSWIDASKNLWQIRDKLPCPDELIAFEKVICNVSTILTEKTSIGSDQKEVEGKYCLIAKDVVKLRRCGNGWHMTEDDESSCACFEDEHCLVPVLNPGFSWIEVSYARPYSLRCLQKGGNLLSSHTANSNFGQSPCEGSFVYVGDLSSAARSVRLSRYRPRWALLLFIADIPYILENGLSSLLHASAALAVINCLPKRIALEEFGVNL

SEQ ID NO: 66745 - protein, 84 aa, Zea mays
  Coding DNA Sequence Number=SeqID_24966
MDLRNQNDDKGNGAANIHNPILIANDRDRAIRYGKTLEPKEVVVEDEPIEKEESQPTIEILPPEELEVTNSYEILKQLRKFRSS

SEQ ID NO: 66746 - protein, 263 aa, Zea mays
  Coding DNA Sequence Number=SeqID_24967
  Gene Ontology: Mol. function=zinc ion binding; Cellular component =nucleus; Biological process=chromatin modification
  Homolog annotation: Hit_ID=Q1AJM5; Match level="QueryCoverage=87%, HitCoverage=75%, E-value=3e-79, Identity=53%"; Hit description=ATXR5
  Pfam annotation: Domain name=PHD; Domain location=54-102; Score=49.2; E_value=1.4e-11; Accession=PF00628.19; Description=PHD-finger
  Pfam annotation: Domain name=SET; Domain location=176-262; Score= -9.8; E_value=0.0073; Accession=PF00856.18; Description=SET domain
  Pfam module annotation: Pfam domain module=PHD::SET; Domain location =54-102::176-262
MAGARRLVSSRRRTEAPRRRPSPSTPPKKLRPMSEIMARAKYAVVERADYSDIICEQCGSGERPGELLLCDKCDKGFHMRCLRPIVVRIPIGSWLCPKCSGHRRKRIIDFFKIQKSGDGKKKCNLSQAMQMEFSDDLTYSSDMAPRSANQAKFENGGMQVLSREDMETLELCRSMSRRGECPPFIVVFDSCEGYTVEADAQIKDMTFIAEYTGDVDYIKNRENDDCDSMMTLLLATNPSESLVICPDKCGNIARFINGINNHT

SEQ ID NO: 66747 - protein, 130 aa, Zea mays
  Coding DNA Sequence Number=SeqID_24968
MEHDSEESVVERGDEKKRLRREGDKFVDRDKLGSLVVRSRKVLGSSYITSVDTKGRCDFLNGIDVAADGSRGGLSLVWRRNSTITLRSFSKYHIDIEFKEGDRVISGDLRVSIGLQIRVIEMTHGTCLGL

SEQ ID NO: 66748 - protein, 83 aa, Zea mays
  Coding DNA Sequence Number=SeqID_24969
MPKFPTFPTTLLSSNEYEEEPVPSAAKTDSVTKRATIDKRKVIEEKLEKSTSAELENDVEGKEKTNVPTIAPATMTKKEKLLY

SEQ ID NO: 66749 - protein, 139 aa, Zea mays
  Coding DNA Sequence Number=SeqID_24970
MPILKETETGKTRKGKAKADSKRTNLNGETSLWCKLKGVEKMDGIFADQEDTIFDKEVDIAEAEVIAEEEEVAENEKEKEKEDFVEKVVTAPESAGANIDNLGRTGAGLAEVAKVTSQKQCNTWAIVVCTGPLQLDSPT

SEQ ID NO: 66750 - protein, 321 aa, Zea mays
  Coding DNA Sequence Number=SeqID_24971
  Gene Ontology: Mol. function=catalytic activity; Biological process =trehalose biosynthetic process
  Homolog annotation: Hit_ID=Q8LCM4; Match level="QueryCoverage=98%, HitCoverage=99%, E-value=1e-101, Identity=54%"; Hit description =Trehalose-phosphatase, putative
  Pfam annotation: Domain name=Trehalose_PPase; Domain location=112 -298; Score=176.7; E_value=5.8e-50; Accession=PF02358.7; Description =Trehalose-phosphatase
  Subcellular localization annotation: CTP_CleavageSite=62; ConfidenceScore=5.34e-01
MTNQQNVVVLDVISRGVSNVLPRSSLPVPKSFSPQDLKMLLMKRFEAENGGAKISAWVDSMRASSPTRIKSSTTASLPETDDTSSWIVHHPSALSMFEQIVAASKGKQIVMFLDYDGTLSPIVEDPDQAFMPKEMRATVRDVARYFPTAIVTGRCRDKVYSFVKLAGLYYAGSHGMDIKGPSKSCKYKKGNQGVLFQAASEFLPMIDEVYKDLVEKTKSIPGTKVENNKFCVSVHFRCVDEKSWAALAEQVRSVLNHYPKLKLTQGRKVLRERGQGFGILVSKLPKETNASYSLQEPSEVKEFLKRLVDWKKMSQRAAKCA

SEQ ID NO: 66751 - protein, 347 aa, Zea mays
  Coding DNA Sequence Number=SeqID_24972
  Gene Ontology: Mol. function=protein binding; Cellular component =endoplasmic reticulum; Biological process=ER to Golgi vesicle -mediated transport
  Homolog annotation: Hit_ID=Q10M68; Match level="QueryCoverage=89%, HitCoverage=80%, E-value=1e-118, Identity=62%"; Hit description =Serologically defined breast cancer antigen NY-BR-84, putative, expressed
  Pfam annotation: Domain name=DUF1692; Domain location=134-338; Score =376.3; E_value=4.9e-110; Accession=PF07970.2; Description=Protein of unknown function (DUF1692)
MRKRNVKKIIELMEGLMNKLRHLDAYPKFDVTFPAIACSILSLDAIDISGEQHLDVKHDIVKERLGVNGNVIEVRPDGVGSRKMEKPLQRQGGRLEHNETYCGSCYGAESIDGECCNSCEEVRDAYRKKGWAMSNLDLIEQCKREGFFQKIKDEEGEGCNIYGSLEVKKVAGNFHFAPGKSFDQSNIHVHDLQAFRKNRFNLSHTINRLAFGDHFPGVVNPLDGVQWMQKQPIGMYQYFIKVVPTMYKDENGHTIQSNQFSVTEHFKGAERGLLDNLAGVFFIYDLSPIKVTFAEGHVSFLHFLTNVCAIVGGVFAVSGIIDSCIYHGQKAMEKKMEIDCVYTLINI

SEQ ID NO: 66752 - protein, 526 aa, Zea mays
  Coding DNA Sequence Number=SeqID_24973
  Gene Ontology: Cellular component=cytosol
  Homolog annotation: Hit_ID=Q6ASY7; Match level="QueryCoverage=75%, HitCoverage=86%, E-value=1e-128, Identity=57%"; Hit description=WD domain, G-beta repeat containing protein
  Pfam annotation: Domain name=WD40; Domain location=388-426; Score =35.8; E_value=1.5e-07; Accession=PF00400.22; Description=WD domain, G-beta repeat
  Pfam annotation: Domain name=WD40; Domain location=431-469; Score =8.2; E_value=4; Accession=PF00400.22; Description=WD domain, G-beta repeat
  Pfam module annotation: Pfam domain module=WD40::WD40; Domain location=388-426::431-469
MVEIHESDRVMRQFGWRQKISSLLRNMEALHKLDLQGKTNENWRDYHKNIMERFEDDDLQYVVDDYYDVNDFNNDGAVVEPEPQRDAAGLESFDSDFEDDIESVMSKPKTDTSAEEARNGKDIQGIPWERLNFTRERYRQTRVREYKNYENLYGSREEMEKECLQVEKGKAFYDFQFNTRLVKSTIVHFQLSFANGLNFNYPHITTHSSRVLVRLRNLLWATSKHDVYLMENYSVMHWSSLLHKGEEVLNVAKPIVPNLKHPGLLSQQLSRVQISTMVVKENLMVAGGFQGELICKVRNTVSLWHFGRFDDILTGNELKAYYILSGALRVMAANNDAKIRIFDAETFASINRYSFNWSVNNTSVSPDGKLLAVLGDSVECLIVDAQSGKVTNSLKGHLDYSFASAWHPDGHILATGNQDTSCRLWDIRNLSKSLAILKGRMGAIRGVKFTSDGRFLAIAEPADFVHIFDTKLGYVNCQEIDIFGEIAGVSFSPDTETLFVGVADRTYGSLLAYNRRRYNQYLDSML

SEQ ID NO: 66753 - protein, 833 aa, Zea mays
  Coding DNA Sequence Number=SeqID_24974
  Gene Ontology: Mol. function=hydrolase activity, hydrolyzing O -glycosyl compounds; Cellular component=cellulose and pectin -containing cell wall; Biological process=carbohydrate metabolic process
  Homolog annotation: Hit_ID=Q8W011; Match level="QueryCoverage=91%, HitCoverage=95%, E-value=0.0, Identity=59%"; Hit description=Beta-D -xylosidase
  Pfam annotation: Domain name=Glyco_hydro_3; Domain location=73-355; Score=187.2; E_value=3.9e-53; Accession=PF00933.12; Description =Glycosyl hydrolase family 3 N terminal domain
  Pfam annotation: Domain name=Glyco_hydro_3_C; Domain location=427 -658; Score=267.7; E_value=2.3e-77; Accession=PF01915.12; Description= Glycosyl hydrolase family 3 C terminal domain
  Pfam module annotation: Pfam domain module=Glyco_hydro_3::Glyco_hydro_ 3_C; Domain location=73-355::427-658
  Subcellular localization annotation: CTP_CleavageSite=62; ConfidenceScore=5.04e-01
MKLLNLSLLIHLCSLLLVSTQPTNQPPFSCDSTDPLTKSYKFCKTTLPINRRVEDLVSRLTLDEKISQLVNTAAAIPRLGIPGYEWWSEALHGVAFVANISQGIRFNGTIRSATSFPQVILTAASFDPYLWYRIGQASPITLYSSVCFNVNSKSIQRERAIGIEARGVYNAGQARGMTFWTPNINIFRDPRWGRGQETPGEDPLVTGKYAVSFVRGIQGDSFEGGKLGESLQVSACCKHFTAYDLDNWKGINRFVFDANVTLQDLADTYQPPFQSCIEKGKASGVMCAYNRINGVPNCADYNLLSKTARGQWGFNGYITSDCDAVSIIYDEQGYVKEPEDAVADVLTAGMDLDCGEYLKNYTGSAIEKKKVAVSDIDRALHNLFSIRMRLGLFNGNPAKQPFGNIGSDQVCSQEHLNLALEAARNGIVLLKNDNRLLPLAKTEITSLAVIGPNANSSETLVGNYAGPPCNPVTPLQGLQSYVKNINYHPGCSTVNCSSDLADEAMKIVKGTDQVVLVMGLDQTQEREAHDRVDLVLPGHQQKLVTRIASAANKPVILVLLCGGPVDITFAKNDQNIGSIIWAGYPGEAGGRALAEIIFGDHNPGGRLPITWYPQNLTKIPMTDMRMRPEPSSGYPGRTYRFYQGLKVFEFGYGLSYTNYSYEFLPLTKDKVYLNNQSSDKIALGYKSVSEMGTELCEKSKLPVTVRVQNNGEMDGKHAVLLFVRQAKTGNERPIKQLVGFNNVDLKAGEKAEIKLELSPCEHLSSAEGDGQMVVDEGSYFLSIGDKESEITVVFSEDTSDAATSKLMILPRILIFFYIYSFIHSFIPMHIVLK

SEQ ID NO: 66754 - protein, 356 aa, Zea mays
  Coding DNA Sequence Number=SeqID_24975
  Subcellular localization annotation: CTP_CleavageSite=44; ConfidenceScore=5.20e-01
MVSTVGSVSNLGGAVAGSSLGIIIPFTGGTSLASPFTAESRLFLAPAPASDPIPSPPECGGAHSPRADAAADGHRNRRAAAARAAAVFGRRRPAGGGGGVGSRMATGGLADGWIPLSSEHLATWVVVQVSRGAAGDLDLGCCSCLTSGVSILCSGPRRAVGQTSIKRGACRTMPPHVPHPSATAVVTINHARIRCRPRQQRVSEEGAGLMARCRAVGRLCGERRPVKIQEERRPREYDREHSYSGWAKVLENTLRDEEELRAILGDSIGNMELMRKRWRHQLADRAGRGARSRYRRSGDPASTTGSTTILDGPTLFLSKSKCTVLENTLRDEEELRAILGDSTGNMELMRKRWRHV

SEQ ID NO: 66755 - protein, 394 aa, Zea mays
  Coding DNA Sequence Number=SeqID_24976
MDRGIKGGDGQRQDNGRATIRHQMQHQLNAALNIGSEGERWGWRWRWHEDGGVPEREASRREGGVQGCKGGGRPTGQKASSSPRTNPRHLLIPIGSHPIPYTDPTLFSSVDSDGRLGAWGRLHQLDELERKLADEVKVRNRAERRLRRAIRKLESLKVLDVGLSDGSTGSLYSNGRSGHQAPEAEVGAEAEERNGPGSLTTDGSAPSAPSGDADRVVSSEGSCTQLNSSSQDGSWCSVASEQSQPGPCMDPAGHTTNCRSAGSGGCDRDSERQHLDASSRGCGPAKPEEAVNESDDTLALVLVDPQLVAAAAGGGPRTQAGEVRRGRSHEEEEEEESDRLAIVLAEPQRQAAAGRGDVESVLLALRRVKEQLRYTIERRSRARLVVAHQELYGH

SEQ ID NO: 66756 - protein, 75 aa, Zea mays
  Coding DNA Sequence Number=SeqID_24977
METLLVAPPLGTETNDATAALLANHARYHALSGRVTCTRPGVMSVSRQKQNTTPDPFQKHLDAWIQTQERTIGHV

SEQ ID NO: 66757 - protein, 123 aa, Zea mays
  Coding DNA Sequence Number=SeqID_24978
MAIGGAAQKQCGGLERQAAESSWSGRAARTEDTQPAPFRHVRRGTVQDNRLTGEETPNRVRCPHLGLAGPVARDLPGRTAHATATDGKQCARTGKKKGARRSGIVASISHPPPPPCMRIATVE

SEQ ID NO: 66758 - protein, 352 aa, Zea mays
  Coding DNA Sequence Number=SeqID_24979
  Gene Ontology: Mol. function=serine carboxypeptidase activity; Cellular component=cellulose and pectin-containing cell wall; Biological process=proteolysis
  Homolog annotation: Hit_ID=Q2R3G8; Match level="QueryCoverage=89%, HitCoverage=66%, E-value=1e-164, Identity=89%"; Hit description =Serine carboxypeptidase family protein, expressed
  Pfam annotation: Domain name=Peptidase_S10; Domain location=1-307; Score=222.9; E_value=7.1e-64; Accession=PF00450.12; Description =Serine carboxypeptidase
MDNMVFLQRWLQKFPQYKGRDLYIAGESYAGHYIPQLAEAMVEFNKKDRIFNLRGVALGNPVLEFATDFNARAEYFWSHGLISDATYRVFTSACNYSRYVTEYYGGSLSPLCARVMNQVTRETSRFVDKYDVTLDVCLSSVLSQSKILSPHEQVGQRIDVCVEDETVRYLNRRDVQAALHARLVGVDKWAVCSSVLEYELLNLQIPTISVVGSLVKSGIRVLVYSGDQDSVIPLTGSRTLVQNLARDMGLKTTTPYRVWFEGQQVGGWTQVYGGGALSFATIRGASHEAPFSQPGRSLVLFRAFLQGQPLPETFSPAAAAKARSEGWRLCLRPNICPPRDQFDKVIWCRRRR

SEQ ID NO: 66759 - protein, 61 aa, Zea mays
  Coding DNA Sequence Number=SeqID_24980
MTVWELILAIITPVEEQLTNLKMEKHSSPRLAYLYIVEEATKAWVSQTLSSLSNQESELLR

SEQ ID NO: 66760 - protein, 41 aa, Zea mays
  Coding DNA Sequence Number=SeqID_24981
MGRGAPQLGSVGGMTDALLLVWTFAEEPFSFSDSTRRPSVG

SEQ ID NO: 66761 - protein, 54 aa, Zea mays
  Coding DNA Sequence Number=SeqID_24982
MARVRRRSVVPAREFRGEEDLSRRGPPVIGQRRTHGRKPWRVGPAYMDEIDYMM

SEQ ID NO: 66762 - protein, 46 aa, Zea mays
  Coding DNA Sequence Number=SeqID_24983
PAPSRQCSQAREIWMRKRRSSAMGFGCSSGIRGGSQPPAEAAVSDP

SEQ ID NO: 66763 - protein, 217 aa, Zea mays
  Coding DNA Sequence Number=SeqID_24984
MADLYDEDKGPSLKSQQSCPGLRLKPVIEIFNYWVCMLIFILHYLGKNVYCKGGISGELVITCRQRSPRRCKGYKNDLVALNLTLWISVKLTGSPTTDLDLLESIAGKEEGGGGASGRGRGRSANASEVSESDSDLGSTVEARAGADSDAGCGAGSARAGVVTEIATTAVVTTNAGGTSGGVLTGPTTWVEKSRVTGLSGEMDGPKEWSWVQTEWLA

SEQ ID NO: 66764 - protein, 128 aa, Zea mays
  Coding DNA Sequence Number=SeqID_24985
MATKQLASRPRWPRPQEACCFLELFTLVPLSFLIHLPGFACSVPYPHCRRRSWSGTRYGGWSRRTAWATSLSARLACLWSQRTAGGNMGSRRLTLKKKNVAGAGEGRECELWDTEGINVKYETRKDRA

SEQ ID NO: 66765 - protein, 95 aa, Zea mays
  Coding DNA Sequence Number=SeqID_24986
  Subcellular localization annotation: CTP_CleavageSite=26; ConfidenceScore=5.01e-01
MTRTIPRGSLPRCGRTSGPSSAPGSRARMSKNSSDSSEEGSGGDGDDEGEGGDGGDGGGGGDGDGKGDGDGGKGDGDDGKGVSGSSKASGKAPVA

SEQ ID NO: 66766 - protein, 450 aa, Zea mays
  Coding DNA Sequence Number=SeqID_24987
  Gene Ontology: Mol. function=RNA-directed DNA polymerase activity; Cellular component=chromatin; Biological process=RNA-dependent DNA replication
  Homolog annotation: Hit_ID=Q7XYU1; Match level="QueryCoverage=35%, HitCoverage=65%, E-value=5e-63, Identity=60%"; Hit description =Integrase
MHVAHLLLGRPWQFDRDVTHQGKKFTFAPLNPTDVYKDQQRMMKFCEGVREKGQVQKTERKEANSEKSHNFKSPKDYEDVFSEAPKAYRCNPEETKELQRQAEELLDKGYIRESLSPCAVPVLLVPKKDGFIVSAQGIHVDEDKVKAIKEWPTPKSVTEDKQPIAYFSEKLNGAQLNYSTYDKELLALVRALQVWQHYLLPNKFVIHTDHESLKWLKGQGKDNVVADALSRRYALMTTLNAKVLGLCIPKCSMRDLLIHEAHSGGLMGHFGVAKTLDILQEHFHWPHMKKDVEKMSNSLATFGRYCGKAELVKSLHEKARQRIAKTNDVNTNKANKGRKRVVLEPGDWVWVHLRKERFPTKRKTKLDPRDDGPFQVLEQINDNAYKIDLPGEYNEMEMLIQIANVEEEDETTMVRFIDGLNKLIANTLRLQTYIDLEEAVHKAIEIEQQL

SEQ ID NO: 66767 - protein, 79 aa, Zea mays
  Coding DNA Sequence Number=SeqID_24988
MELGSLKTLTMASSDKGLRADQDRVVKSRETPMKNAKHLDLKRSTFIFWTARCMDKFNCELIVGVFQVIFQPSFPSLQE

SEQ ID NO: 66768 - protein, 75 aa, Zea mays
  Coding DNA Sequence Number=SeqID_24989
MSKGWPNVWDHLTRNPTRNLTSIPCLPPLRGIEHFHWPHMKKDVEKFLWLYMKFEFHLTKVNSTTELRLHYAPDE

SEQ ID NO: 66769 - protein, 79 aa, Zea mays
  Coding DNA Sequence Number=SeqID_24990
MVEKLCLTTTKHPRPYQLQGLSNEGQFKVTEQVRIAFSIGLQHSTHGQVPASLPFYRETFQLMEQDFIVLVRLNQFPKF

SEQ ID NO: 66770 - protein, 69 aa, Zea mays
  Coding DNA Sequence Number=SeqID_24991
MSLNELIKMQLLAKEIPALKEDVNGQNKCEKSALKSPLGVNMPNRIVIGVNSKCEQHYAILLRNESAEH

SEQ ID NO: 66771 - protein, 156 aa, Zea mays
  Coding DNA Sequence Number=SeqID_24992
MRKLSNGFKDTSIKGEREQPSRCEKGVGKVFGSVNNDQPNGPCAWISTETNYSYLFGARDVVKHFFAMTGSEDRSRGGDQPPDLQMQAITRTLQRLLENAFEPIHSRLDKIEGGGSQSVHNEHNDENDIEHSPRGRSARLNTFLSVITTQNRKKFD

SEQ ID NO: 66772 - protein, 285 aa, Zea mays
  Coding DNA Sequence Number=SeqID_24993
MKEKEQEIKKVREKENEEKEFEKEIEIEQECKREREIERKEEKIEKEKEIQKGSEVENKIENERGNEKRKKEVEIRKETREKEINEPEKVPEISNDYFQLHYLFDERHFHMVSIGKVEDENVPQEFKATEIRLDYISEERRFIMINKGKNDPCFSIPRGKQALFKNESSVLLDADDAILEEPIVQFPLQGFTIHSSVCDKNWCSISCGEEFICLIDERIKLIMSTCLLKIFGKILLDDKFVENVKDQWPLLSLTMQDLSRLSGKIITCKKLCSIDCGYEIWKIPS

SEQ ID NO: 66773 - protein, 106 aa, Zea mays
  Coding DNA Sequence Number=SeqID_24994
MRIVKNSNLKEDDSDIRPSKPSHVCFRKSMIKKGQVEVMKMLEYIDNIDMIMLGEEDTIPKPQNNELVAFQSFFKTKATGKEIIHNNFDYYNFQYWKDVHFSTLGY

SEQ ID NO: 66774 - protein, 146 aa, Zea mays
  Coding DNA Sequence Number=SeqID_24995
MDQIVRRRRTIPRPLDQRTAPKPPDQRSWSLKDARATHATRGRHRQRRPHLARPSERPASLVATAAVADAYSASHNRRCHRAWGAPPPLVRFGSTVTACLLASGASPSLVPGGAPPSVARLGAAPPPLARPREPPSRSHARCRRRH

SEQ ID NO: 66775 - protein, 35 aa, Zea mays
  Coding DNA Sequence Number=SeqID_24996
MGLVYATTEGSRCGIYGANYPEWIITMKESCVSLY

SEQ ID NO: 66776 - protein, 150 aa, Zea mays
  Coding DNA Sequence Number=SeqID_24997
MAKQGGIRQGERAGREAGGGGDDCDGRSRGRMRSVGAQGNSRSHQGANGVGAGAALADRGWDGVGGRMGGRKAGSAGGASGETSSRGGAAAGRGELLHAGAACWLPTGSSGGGAVAAKARVDVGGAAAATTTKACAVPGASARGAVSAAR

SEQ ID NO: 66777 - protein, 152 aa, Zea mays
  Coding DNA Sequence Number=SeqID_24998
MGKSKKGGCSSHHSGDKRKREPTPPSEDFGDSEYSEEEFSSESEGSLVHASLPASSDESDDSQGITAEVWTYIRAVERAGLEGSDESEYSSDEENSSDSSEEGGGDSDGGDNDDDRGDGDGGEGDDKGGDGGDKGGSGAGGDGSNGSNKASG

SEQ ID NO: 66778 - protein, 77 aa, Zea mays
  Coding DNA Sequence Number=SeqID_24999
MGKKTGCRCPQISLVLLVELTKMARMKAILNCRRRVLSAINAEATRLYEPYVRLGPLVYVTGHKPRGSSGSLPEREA

SEQ ID NO: 66779 - protein, 157 aa, Zea mays
  Coding DNA Sequence Number=SeqID_25000
  Gene Ontology: Mol. function=oxidoreductase activity; Biological process=electron transport
  Homolog annotation: Hit_ID=Q1RYZ3; Match level="QueryCoverage=76%, HitCoverage=34%, E-value=3e-21, Identity=67%"; Hit description =Oxidoreductase, C-terminal
MGLVSDTDASNKRRFYLGYGSAFYCWLEDEFYLRTERLKTWIAFLSKLENGCSGVFVMVVSSSSPKIIWRVVGSKGTVQVERGKVDGKHGYLVSLYSADGQCKSTFHPFCGVHEELKIFIHDIVQANLKNSSDTIFGLGEAKQGNGYEAEPRSSFVE

SEQ ID NO: 66780 - protein, 34 aa, Zea mays
  Coding DNA Sequence Number=SeqID_25001
MTTDLVRAYVSHQISVQFKSKGGISGFASSATVV

SEQ ID NO: 66781 - protein, 147 aa, Zea mays
  Coding DNA Sequence Number=SeqID_25002
MNGEMIESAIRSGKIDAGGNNRRQASKEKENEVNNVNTYGKLIANQQSSSRQELGVKPGTEKLQFTPIPMAYKELYQSLFNVHVVSTLHVKPPQPPYPKWSLDNDMNDAATDSESPFEQDMCLEGSHDFEDDIDYLNSGPHCQCHDQ

SEQ ID NO: 66782 - protein, 772 aa, Zea mays
  Coding DNA Sequence Number=SeqID_25003
  Gene Ontology: Mol. function=transferase activity, transferring glycosyl groups; Cellular component=integral to membrane; Biological process=response to oxidative stress
  Homolog annotation: Hit_ID=Q9LXU2; Match level="QueryCoverage=99%, HitCoverage=100%, E-value=0.0, Identity=83%"; Hit description =Anthranilate phosphoribosyltransferase-like protein
  Pfam annotation: Domain name=C2; Domain location=204-286; Score=81.2; E_value=3.1e-21; Accession=PF00168.20; Description=C2 domain
  Pfam annotation: Domain name=C2; Domain location=365-454; Score=78.2; E_value=2.6e-20; Accession=PF00168.20; Description=C2 domain
  Pfam annotation: Domain name=C2; Domain location=43-123; Score=94.3; E_value=3.7e-25; Accession=PF00168.20; Description=C2 domain
  Pfam annotation: Domain name=PRT_C; Domain location=617-772; Score =431.2; E_value=1.4e-126; Accession=PF08372.1; Description=Plant phosphoribosyltransferase C-ter
  Pfam module annotation: Pfam domain module=C2::C2::C2::PRT_C; Domain location=204-286::365-454::43-123::617-772
MQKPPPQSVDFALKQTSPNIGAGAVTGDKLSCTYDLVEQMQYLYVRVVKAKDLPGKDVTGSCDPYVEVKLGNYKGVTKHFEKKSNPEWNQVFGFSKERIQASILEVFVKDKDVVVDDLIGRVVFDVNEIPKRVPPDSPLAPQWYRLEDRKGNKAKGELMLAVWMGTQADEAFPDAWHSDAASVGPDGVTNIRSKVYLSPKLWYVRVNVIEAQDLVPSDKGRFPEVFVKAVLGNQALRTRISPSKTINPMWNEDLMFVVAEPFEEPLFLSVEDRVGSNKDETLGKCVIPLQVVQRRLDHKPVNSRWHNLEKHVIVDGEKKEMKFASRIHLRICLEGGYHVLDESTHCSSDLRPTAKQLWRPNIGILELGILSAHGLMPMKTKDGRGTTDAYCVAKYGQKWIRTRTIVDNFMPRWNEQYTWEVFDPCTVITIGVFDNGHIHGGAGGAKDARIGKVRVRLSTLEADRVYTHSYPLLVLHSSGVKKTGEVQLAVRFTCSTLINMLHMYSHPLLPKMHYIHPLSVIQLDSLRHQAMQIVSVRLSRAEPPLRKEVVEYMLDVDSHMWSMRRSKANFFRIMGVLSGLIAVGKWFDQLCNWRNPITTILIHILFIILVLYPELILPTVFLYLFLIGIWNYRWRPLHPPHMDTRLSHADAAHPDELDEEFDTFPTSRPSDIVRMRYDRLRSIGGRVQTVIGDLATQGERLQSLLSWRDPRATTLFVTFCLIAAIVLYVTPFQVVALLIGLYALRHPRFRHKLPSVPLNFFRRLPARSDSML

SEQ ID NO: 66783 - protein, 149 aa, Zea mays
  Coding DNA Sequence Number=SeqID_25004
MDDDICICNQIVGMCLSPPISLVDEGGLVSVIFVAVLLVLVAYPVAVEIVGGDLQGCERQPRRGRLLSWQRQQRQMRRSTIDIPNFQYETRIPRNPKRIGKQSPLEYVWRCRTAVGLVLVGSHATRVSAPAPTRSDSGELTSHEVGAER

SEQ ID NO: 66784 - protein, 82 aa, Zea mays
  Coding DNA Sequence Number=SeqID_25005
MARGGALCTLALPAGSSLSDWLVVPSMMVKGAGMGRGFYIPLERGWHPHPAGQVDLRGNPNKTERMRGRSPRGWFGDGWLQE

SEQ ID NO: 66785 - protein, 54 aa, Zea mays
  Coding DNA Sequence Number=SeqID_25006
MAEVRHENPGRRRQRRGAKILGGGGTTGRGGGGGIGVAVDAHIRILGVTVLKVA

SEQ ID NO: 66786 - protein, 719 aa, Zea mays
  Coding DNA Sequence Number=SeqID_25007
  Gene Ontology: Mol. function=binding; Cellular component =intracellular; Biological process=metabolic process
  Homolog annotation: Hit_ID=Q7XHP5; Match level="QueryCoverage=99%, HitCoverage=99%, E-value=0.0, Identity=72%"; Hit description =Putative pentatricopeptide (PPR) repeat-containing protein
  Pfam annotation: Domain name=PPR; Domain location=112-146; Score=3.7; E_value=2.7; Accession=PF01535.11; Description=PPR repeat
  Pfam annotation: Domain name=PPR; Domain location=147-181; Score=8.8; E_value=0.68; Accession=PF01535.11; Description=PPR repeat
  Pfam annotation: Domain name=PPR; Domain location=209-243; Score =27.1; E_value=6.2e-05; Accession=PF01535.11; Description=PPR repeat
  Pfam annotation: Domain name=PPR; Domain location=313-347; Score =39.7; E_value=1e-08; Accession=PF01535.11; Description=PPR repeat
  Pfam annotation: Domain name=PPR; Domain location=348-382; Score=9.8; E_value=0.52; Accession=PF01535.11; Description=PPR repeat
  Pfam annotation: Domain name=PPR; Domain location=414-448; Score =38.2; E_value=2.9e-08; Accession=PF01535.11; Description=PPR repeat
  Pfam annotation: Domain name=PPR; Domain location=449-483; Score=9.8; E_value=0.52; Accession=PF01535.11; Description=PPR repeat
  Pfam annotation: Domain name=PPR; Domain location=485-519; Score=7.4; E_value=0.98; Accession=PF01535.11; Description=PPR repeat
  Pfam annotation: Domain name=PPR; Domain location=551-585; Score=3.1; E_value=3.2; Accession=PF01535.11; Description=PPR repeat
  Pfam annotation: Domain name=PPR; Domain location=75-108; Score=13.7; E_value=0.18; Accession=PF01535.11; Description=PPR repeat
  Pfam module annotation: Pfam domain module=PPR::PPR::PPR::PPR::PPR::PP R::PPR::PPR::PPR::PPR; Domain location=112-146::147-181::209-243::313- 347::348-382::414-448::449-483::485-519::551-585::75-108
  Subcellular localization annotation: CTP_CleavageSite=3; ConfidenceScore=5.11e-01
MAQAARKAACAVLLSPQTFIFHSSARLLPEAGACAAKKAIHRQSVRGCVPSSSVIARGLHNAHRVFDGTPTRSLPAWTSIISGCAREGRHADGMRAFAEMLDECGATAPNAFVLAGVLRCCAGLGDVESGRRIHGWILRSGVCPDVVLCNAVLDMYAKCGDHGRARRAFGAMAQKDATSWNIVIRACLQDGDLVGATQLFDESSLRDVSSWNTIVSGLMRHGHTTEALGRLQQMVRAGVTFSNYTYSMVFALAGLLSSRDLGRQLHGRVVVAVLEEDAFVGCSLMDMYCKCGEMESALSIFDRWSDFTEDRQFAWSTMVAGYVQNGREEEALEFFRRMLREGVPAGQFILTSVASACANAGMVEQGRQVHGFVEKLGHRFDAPLASAIVDMYSKSGSLEDACRIFRSAQTKNVALWTTMLCSYASHGQGRMALEIFSRMKAEKIMPNEITLVAVLSACSHSGLVSDGYHYFNLMQEEYGIVPNTEHYNCMVDLYGRAGLLDKAKNFIEENKISHEAVVWKTLLSACRLHKHIEYAQLASEKLVQLEQYDAGSYVLMSNMYATNNKWLDTFKLRSSMKERRVRKQPGQSWIHLKNVVHRFVALDTSHPRSAEIYAYLEKLMERLKEMGYTSRTDLVVHDIEEEQRETSLKFHSEKLAIAFGIISTPVGTALRIFKNLRVCEDCHEAIKFITRATDREIVVRDLYRFHHFKDGQCSCEDFW

SEQ ID NO: 66787 - protein, 111 aa, Zea mays
  Coding DNA Sequence Number=SeqID_25008
MAAELAGMQPRSAARPATSGVSTSATGYCLLAAWGLGCWGWRAGNARIEKGGSSPLYMKSGWQRNRSKDHLPVRRVSTHDFDGDRVRDKYQEHGDKDNRDKPTLIDKAYGW

SEQ ID NO: 66788 - protein, 394 aa, Zea mays
  Coding DNA Sequence Number=SeqID_25009
MSKAYDRVEWDFLEKMMIRMRFSAAWVTLVMQGVEILKDILHYFEAISREKINPSKSIIYFSPNTPKDQREQLSGILGDGRIARYGFDRWGFEGLDGNLLRTSFSGNQDGRFFTSSTGFCHRCGTGDENIIHALRDCPKDCAVLSFGGLDGRLLDPAFERCIDWLEDATCLLDLKAFENFITVLCNICNSLNNALFRGKEEDAWLIWEHARALGNDFRIFNLSHVAMNPRPRRSHKWVKLLIDVIRINVDSTIHDTVVGIRIIMCDSDGFVLGGHVVYLDYKLDIQWAEAEALREGIVWARNNNVARAIFETDYAVLVNRFKFCIEDISIYGFRLKNIFDLLDSSSKSMVEWVACSSNRVVDGLCKLSIDECCTFSFNMEYSSDIHGLVLADAC

SEQ ID NO: 66789 - protein, 133 aa, Zea mays
  Coding DNA Sequence Number=SeqID_25010
MKGYAPEFCKLRTYQVYEETVEDVIIFKSTPYKVTTKGMGNWWMFQPPEVVPAGSRRMVRFGTSSYSKGELQGSIYDVYCDAYVVYSVMPLRQYLDNHLCGEIRNSICKYPILGEVFNIQLSENSPKFHKVIS

SEQ ID NO: 66790 - protein, 59 aa, Zea mays
  Coding DNA Sequence Number=SeqID_25011
MCYRYSTARVSSIMKLGFDPQLMLWPSYWMDFIMLTYKLCIEMHMKQVWNGNEILSFRK

SEQ ID NO: 66791 - protein, 223 aa, Zea mays
  Coding DNA Sequence Number=SeqID_25012
MSRKRTRSSKTTLENPILIKEEVKERFDSIFKHQPMMLEKRPVKTEASLKGRYVQGCITNYNLERLVERVHELNQGEQEEPTKPDTEESTDGTETEANSITDTEEEESDKEPNILEPKVEPEEELVKLIVEPEYTTPMPTSASTSRKSELSILIDMYKFMQNQEQNYQKYAKIRDDSIRNTFKNISNTFVPEFSDSIFETWTKDTDDASRGGATQDKGNKSEK

SEQ ID NO: 66792 - protein, 719 aa, Zea mays
  Coding DNA Sequence Number=SeqID_25013
  Gene Ontology: Mol. function=transporter activity; Cellular component= membrane; Biological process=oligopeptide transport
  Homolog annotation: Hit_ID=Q1SQ92; Match level="QueryCoverage=65%, HitCoverage=81%, E-value=1e-169, Identity=61%"; Hit description=TGF -beta receptor, type I/II extracellular region
  Pfam annotation: Domain name=DUF1264; Domain location=494-686; Score =475.9; E_value=5e-140; Accession=PF06884.2; Description=Protein of unknown function (DUF1264)
  Pfam annotation: Domain name=MFS_1; Domain location=37-532; Score =1.8; E_value=0.00026; Accession=PF07690.6; Description=Major Facilitator Superfamily
  Pfam annotation: Domain name=PTR2; Domain location=99-491; Score =321.8; E_value=1.2e-93; Accession=PF00854.12; Description=POT family
  Pfam module annotation: Pfam domain module=DUF1264::MFS_1::PTR2; Domain location=494-686::37-532::99-491
MKKRNMEKLELVDGKVNWKGETAVKHKHGGLRAALFVLLAFAFENLANLHLAVNLTTYFNGILHFEVSDAANALTNFMGTGYILSIIFAVFADTYIGRFKSILISGSVEFLGLALLTAQAHYSSLRPPPCNVFDPTSRCEKLESSDTVFLYVALYLVAAGMAGIKASIPSHGADQFDEKDPREAKTMSSFFNGLLFALCIGGAVSLTLYVWLDDHKGWDVGFGVSAIAMFLALIVAVLGWPLYRIHVVQGSSVLLELIQVFAAAIRNRNLKLPENPLELYEIDKDKEAALEDDFLPHRDVYRFLDKAAIKTASEKPNPWKLCRVTQVENAKILLGMTPVFACTIIMTLCLAQLQTFSVQQGLTMDTTIVGSFHIPPASLPIIPVVFLIFIIPFYDQIAVPLLRKVTGHVTGISHLQRIGVGLILSSISMATASIMEVKRKSVARDHNMLDALPVLQPLPISVFWLSFQYFIFGIADIDKSPAPTPAKGAEAAPPGQPMTMGQHVVDKGASMLQALTPVKQISQHVCTFALYSHDMCRQIETHHYVSRLNQDFLQCPVYDSDDSNASLIGIEYIISDRLFEALPQEEQKLWHSHAYEIKSGLWVNPRIPEMIGKPELENLAKTYGKFWCTWQVDRGDRLPLGAPALMMSPQGVNLGKIDPELVKKRDDNYSISTEAIMESRVEIEEPEWINPQADYWKQHAKGFAIDIEKTEMKLRAPFP

SEQ ID NO: 66793 - protein, 441 aa, Zea mays
  Coding DNA Sequence Number=SeqID_25014
  Gene Ontology: Mol. function=protein-tyrosine kinase activity; Cellular component=cytoplasm; Biological process=protein amino acid phosphorylation
  Homolog annotation: Hit_ID=Q1ENV7; Match level="QueryCoverage=89%, HitCoverage=89%, E-value=1e-168, Identity=72%"; Hit description =Protein kinase family protein
  Pfam annotation: Domain name=Ank; Domain location=22-54; Score=10.9; E_value=0.84; Accession=PF00023.20; Description=Ankyrin repeat
  Pfam annotation: Domain name=Ank; Domain location=55-87; Score=44.6; E_value=3.3e-10; Accession=PF00023.20; Description=Ankyrin repeat
  Pfam annotation: Domain name=Ank; Domain location=88-120; Score=16.4; E_value=0.11; Accession=PF00023.20; Description=Ankyrin repeat
  Pfam annotation: Domain name=Pkinase; Domain location=140-393; Score =201.6; E_value=1.8e-57; Accession=PF00069.15; Description=Protein kinase domain
  Pfam annotation: Domain name=Pkinase_Tyr; Domain location=140-393; Score=184.3; E_value=3.1e-52; Accession=PF07714.7; Description =Protein tyrosine kinase
  Pfam module annotation: Pfam domain module=Ank::Ank::Ank::Pkinase::Pki nase_Tyr; Domain location=22-54::55-87::88-120::140-393::140-393
MAPERDRGEADGKENEEGEEIDEGVRLMYLANEGDLDGIRELLDSGINVNFRDIDDRTALHIAACQGQTDVVSLLLQRGADVESTDRWGSTPLADAVYYKNHDVIKLLEKHGAKPFMAPMHVNHAREVPEYEIDPKELDFTNSVNITKGTFCIALWRGTQVAVKRVGDEVFTDEDKVRAFRDELALFQKIRHPNVVQFLGAVTQSSPMMIVTEYLPKGDLRAFLKRKGALKPMTALRFALDIARGMNYLHENKPAPIIHRDLEPSNILRDDSGHLKVADFGVSKLLTVKEDKPLTCLDTSCRYVAPEVFKNDDYDTKVDVFSFALILQEMIEGYPPFSAKQDNEVPKVYAARERPPFKAPAKHYAHGLKELIEECWNEKPAKRPTFRRIITRLESIHNSFSHRKRWKVRPLKCFQNLEAMLKKDHSSPSSRSNSSRSTNSI

SEQ ID NO: 66794 - protein, 469 aa, Zea mays
  Coding DNA Sequence Number=SeqID_25015
  Gene Ontology: Cellular component=cellulose and pectin-containing cell wall
  Homolog annotation: Hit_ID=Q153F5; Match level="QueryCoverage=64%, HitCoverage=100%, E-value=4e-88, Identity=44%"; Hit description =Pectin acetylesterase
  Pfam annotation: Domain name=PAE; Domain location=113-435; Score =472.1; E_value=6.8e-139; Accession=PF03283.4; Description =Pectinacetylesterase
MTKNGQLDQKAQAKATHPSIKTGHALPPPTAGGTARHEHSALHYRGTACLQAAAQPSAVRIRSCAALPCPAPTMPPPPPSAPASHHLRLWWRRRGRAGAVGATFAVALLATALLLALSSYASIVFPASSGRRGPALVGLTLVRRASEKGALCLDGSAPGYHLQGGSGSGSRSWLIHLEGGGWCRNLKSCASRQRSMLGSSRYMEGQVEFTGILSDDKSQNPDFYNWNKVKIRYCDGASFSGDVKDELQNGTRFFFRGQRIWEAVMNELVVKGLRNAKQGFGGFLDLCEKGLRERFSHCNSNMDAGQCFFPREVVKHIVNPVFVLNPAYDAWQVQHALAPEASDPQHSWLDCRLDISKCSPKQLGILQGFRKELHDAISEAKQKRGWGFYINSCFVHCQSLNSLTWHSPTSPRVNNKSIAEAVGDWFFDRREVKEIDCEYPCNPTCHNLVFARPFQDMKFYLSSSAMILL

SEQ ID NO: 66795 - protein, 532 aa, Zea mays
  Coding DNA Sequence Number=SeqID_25016
  Gene Ontology: Mol. function=protein phosphatase type 2C activity
  Homolog annotation: Hit_ID=Q1SBX2; Match level="QueryCoverage=63%, HitCoverage=61%, E-value=6e-78, Identity=46%"; Hit description =Protein phosphatase 2C, putative
  Pfam annotation: Domain name=PP2C; Domain location=188-489; Score =73.8; E_value=5.5e-19; Accession=PF00481.12; Description=Protein phosphatase 2C
MGNSVARLATPCFAPPDDAHHDTAGAADDDGTTGVCHVLSFDGRIHGVLLPSNQSTAGGSVLLTDRASFSGSSSFDSSNSFSFRTLQPHQYSGPLDGGSSSSSASTSATNSGVSSVPRRTDDQILADLYATRHRRQQQASSPLPLLGGIRRAVASLLRAGPCVPPSPKQEHAAAKVQWARGKAGEDRVHVVVSEEHGWMFVGIYDGFNGPDATRLPRRAPPAEAGRNGGGRALAGEQGRHHDVLDALARALRSTEAGYFAEAEARAAECPELAMVGSCVLVALVKGADVYVMNVGDSRAVLAQRAEPEPDLSRALVAPRQGGGGVDLAGVKDEIRRQFNACETGDLAALQLTMDHSTSVYKEARRIRSEHLDDPACIVNGRVKGSLKVTRAFGAGYLKEPRWNEALLEVFRVRYVGASPYISCRPYLRHHRVGPRDKFVVLASDGLYDYMSNEEVVARVEAFTASYPDDEDPARFLSHEILLRAANQAGMGFHELLQVQQGDRRRYHDDVSIIIIPLGACSVIPQSIWIEGG

SEQ ID NO: 66796 - protein, 147 aa, Zea mays
  Coding DNA Sequence Number=SeqID_25017
MTETPLETNCKCRDNIHCSARANPFSFSLCCVQVAAIGLRQPQVNRSTCWSTSNQMKTQFVTSIPKLEGIVSLYRDSRSKLIGYLDGTLVAPASQIVASTQTGAELVPNPVYKQWYNTDQHLLSGLLSSMTEEMLRGVLYAKTSKEV

SEQ ID NO: 66797 - protein, 42 aa, Zea mays
  Coding DNA Sequence Number=SeqID_25018
MARRSRSLVMWSVALVSMSVYQSVSTLEDAVATCAEGEDYYK

SEQ ID NO: 66798 - protein, 114 aa, Zea mays
  Coding DNA Sequence Number=SeqID_25019
MEDLNTMTPTIVIRNIAAFEMSQKMGQQEPTSLRPYAFACDEIKKRKKRKVMMMKMINPQHHPSWMKKQSDASKRRPGRGKGGGVASADELAMTVVMAHTGDGTARAGGMGVGG

SEQ ID NO: 66799 - protein, 198 aa, Zea mays
  Coding DNA Sequence Number=SeqID_25020
  Gene Ontology: Mol. function=metal ion binding; Cellular component =endoplasmic reticulum lumen; Biological process=auxin mediated signaling pathway
  Homolog annotation: Hit_ID=P33488; Match level="QueryCoverage=94%, HitCoverage=77%, E-value=4e-77, Identity=76%"; Hit description=Auxin- binding protein 4 precursor
  Pfam annotation: Domain name=Auxin_BP; Domain location=4-198; Score =345.0; E_value=1.2e-100; Accession=PF02041.7; Description=Auxin binding protein
  Pfam annotation: Domain name=Cupin_2; Domain location=79-158; Score =41.2; E_value=3.6e-09; Accession=PF07883.2; Description=Cupin domain
  Pfam module annotation: Pfam domain module=Auxin_BP::Cupin_2; Domain location=4-198::79-158
MCTDDILMYPDNSLVRDISRMQQRNYGREGFSHITVTGALAHGTKEIGTAQGRLLKYGDPERTQPGSEAVFGVDRVEVWLQTFGPGQRTPIHRHSCEEVFIVLKGKGTLLLGSSSLKYPGQPQEVPVFQNTTFSIPVNDPHQVWNSNEHEDLQVLVIISRPPVKIFIYDDWSMPHTAAKLKFPYFWDEDCLPAPKDEL

SEQ ID NO: 66800 - protein, 231 aa, Zea mays
  Coding DNA Sequence Number=SeqID_25021
MPSMETSHPHSPWKVSGLKGGGCRRWWGKAGRWQGRYRARLEGGGFPFSGERERGSRGLPFHGGLERLILLPWTAQTWIERDCDETRQIRMGLRTRSLIERTPLPWRLGRDPSGGRRTRHGVRGRGWDFGEWMGFWRARTRMGFWGSDPGEREQGLRRERKVGRGQPDLHAEEEICAATREGIAPMGEGVDSDTGVDRADGEQMGGGVDRADLNRTEEICATPRRTRSRWI

SEQ ID NO: 66801 - protein, 102 aa, Zea mays
  Coding DNA Sequence Number=SeqID_25022
  Gene Ontology: Mol. function=structural constituent of ribosome; Cellular component=ribonucleoprotein complex; Biological process =translation
  Homolog annotation: Hit_ID=O22386; Match level="QueryCoverage=68%, HitCoverage=38%, E-value=4e-28, Identity=92%"; Hit description=50S ribosomal protein L12, chloroplast precursor
  Pfam annotation: Domain name=Ribosomal_L12; Domain location=34-102; Score=122.4; E_value=1.3e-33; Accession=PF00542.9; Description =Ribosomal protein L7L12 C-terminal domain
MESAGEKFPSTASSAPGAGGGAAAEEEAPVEKTEFDVVIEEVPSSARIATIKVVRVLTSLALKEAKDLIEGLPKKLKEAVSKDEAEDAKKQLEEVGAKVSIV

SEQ ID NO: 66802 - protein, 138 aa, Zea mays
  Coding DNA Sequence Number=SeqID_25023
MSFYIVEVDKRTFLFGKELGPNVYHSLVGMLGIQGALGRARSTHFCLTSGADKAEVKKTLNLAVDPSFAWSLSLGELVKERCDNHDILAHLGELRWPTPFTDYVTANVEPRRSGHCGGQISPGSTGRLKDLAKGLRAQ

SEQ ID NO: 66803 - protein, 366 aa, Zea mays
  Coding DNA Sequence Number=SeqID_25024
  Homolog annotation: Hit_ID=Q9FM11; Match level="QueryCoverage=62%, HitCoverage=68%, E-value=2e-72, Identity=61%"; Hit description =Arabidopsis thaliana genomic DNA, chromosome 5, P1 clone:MQB2
  Pfam annotation: Domain name=PGAM; Domain location=72-269; Score =14.1; E_value=0.00022; Accession=PF00300.12; Description =Phosphoglycerate mutase family
  Subcellular localization annotation: CTP_CleavageSite=55; ConfidenceScore=5.75e-01
MQTPARLSAPSSPLVSSAPPIPVRPQRVAFPSLRRRDLLLLPAALTLPTAPAPLPASARGLFRMPPPRLVNRYFLVRAGESVYEGQGLLRTNPVAKTSVDSGLSPVGLRQTARAALELQRLGACEDDCWIWPSITQRAYQAAEIIAAANGVNRRRQKARGIPFSQKKLGSMRILNYIAFDCSRIVPEYSFLDARGLGAFEWKSLDTLPEVYASDNISPDLKPPPIRDGTPNESVADVFVRVTQLMSILETQYSGETVVIVSPDSDNLSILQAGLIGLDLRRHSSLFFQPGCGLFLRFLVTDFGGVCLVLVHGSTSVELGRLDEIDAKWNLTQQCQKGGGGFGLNQRGKVSLSRNFMKLKGDLAVNK

SEQ ID NO: 66804 - protein, 181 aa, Zea mays
  Coding DNA Sequence Number=SeqID_25025
  Gene Ontology: Mol. function=RNA binding
  Homolog annotation: Hit_ID=Q5SMR4; Match level="QueryCoverage=83%, HitCoverage=27%, E-value=3e-25, Identity=62%"; Hit description=ALM beta-like
MGEISPAMESTRTAPFPLVDSYLVSTFMVEGVWYHLGDQCWEAAAVETNKYWIENSHKRYIPYVEDTVLGTVILWLEPNLGVNFLVDIKGPNLPFLPVLAFEGGTRRNIPKFEVVKYANMSSSGGPWEKKLSFEIAVGINGRVWVNAPAASTVILVSNAIMRSESLSGIKQRAMVENLLER

SEQ ID NO: 66805 - protein, 180 aa, Zea mays
  Coding DNA Sequence Number=SeqID_25026
  Gene Ontology: Mol. function=RNA binding
  Homolog annotation: Hit_ID=Q5SMR4; Match level="QueryCoverage=84%, HitCoverage=29%, E-value=2e-53, Identity=66%"; Hit description=ALM beta-like
MGSRRYDIDTRRCGIHSRPTKSMYLDAQQIVSCQTRVGDHDVGSCAVKHHFPSPIVSWIEDLSSFGNASFNPVSEYVDEQARASVGQSSASSNLHDMQISVRLTAEFMELAKENTSNNLETCGILGASFRDGTYFVTMLIIPKQEGTAHSLRAEPFFHFVLLQFFFFVNEAGELRVISLR

SEQ ID NO: 66806 - protein, 148 aa, Zea mays
  Coding DNA Sequence Number=SeqID_25027
  Homolog annotation: Hit_ID=Q6AUN9; Match level="QueryCoverage=47%, HitCoverage=41%, E-value=4e-33, Identity=91%"; Hit description =Putative iron-sulfur cluster assembly complex protein
  Pfam annotation: Domain name=NifU_N; Domain location=38-144; Score =123.2; E_value=7.2e-34; Accession=PF01592.7; Description=NifU-like N terminal domain
MLRAGARQLLAPGLRRLGLGTGAAGQVGPAAAAAGMRAYHERVVDHYNNPRNVGSFDKEDPNVGTGLVGAPACGDVMKLQIRVDEDSGKIVDACFKTFGCGSAIASSSVGMWQAALSATLASYSSGVHAAGCSAIKYHADNARELWQW

SEQ ID NO: 66807 - protein, 171 aa, Zea mays
  Coding DNA Sequence Number=SeqID_25028
MNWEAKKKRKEKGPEFNNGEQRKKKGKYLEKEIEVEPKTPSEKREIGKEKKKRFEKEKRKSKKEKEVPEISNDNFQLHYLFDERHFHMVSIGKVEDENVPQEFKATEIRLDYISEERRFMMIDKGKNDPCFSIPRGKQALFKNESFVLLDADDAILEEPIIQFPLQGLLNA

SEQ ID NO: 66808 - protein, 82 aa, Zea mays
  Coding DNA Sequence Number=SeqID_25029
  Gene Ontology: Mol. function=nucleic acid binding; Biological process= RNA-dependent DNA replication
  Homolog annotation: Hit_ID=Q1RXS1; Match level="QueryCoverage=70%, HitCoverage=23%, E-value=3e-12, Identity=64%"; Hit description=Zinc finger, CCHC-type; Peptidase aspartic, catalytic
MVDRLALPTIKHPSPYKLQWLNEGVELKVIFYLEGHGSMIDESNMMDLLTNTHFSIRDCSNKQVDLESRLLAQDLFDAQFRE

SEQ ID NO: 66809 - protein, 188 aa, Zea mays
  Coding DNA Sequence Number=SeqID_25030
MVSKESIDKFKLQYFPDEKQFKLIKKGKIIDDPSPPALKDDMANCHSLFNVDAPLLKYGKTSFSNENYRIHKCIGENTLSLTPVHIIRYLCLRESNLGKFIFKTIVIECLVIYVCFHQRKRILGATVQFINKGVRDKQKFFASKWPDLRTNRFKEGGMIRPCLEYTLGPTLKALLAILCKLNCSILAS

SEQ ID NO: 66810 - protein, 198 aa, Zea mays
  Coding DNA Sequence Number=SeqID_25031
MKKRKLKKKLRLRKKLKKKKMLKKKREKMKIVPTNLCDEYQLQYLPNERRFCMIEKGKDEVEIKPHELEDSVYNLNLFFDHFMWLYMKFIFHFERVSQGLCNELRLQYLLKEERFTLIEKGKIDSQFSTPKGESDLNFLFHYSHSIYLNNDLWKQIEKFECLKTYLSLSRPFDELWIWNEFCPYDCTSTCGNTINEDS
